United States Patent Application Publication US 2013/0332133 A1 - sequence listing, part 23

SEQ ID NO: 207850 - DNA, 477 bp, Unknown
  Bacterial polypeptide expressing nucleotide sequence isolated from the Sargasso Sea
atggaggtccatgggtaacaataaaaaatccaaataatgaaaaaaatatcataattaaagatgtaatttgtgatgcttttcttcaacaaatcttaacaagaccaaaagaatacgacgttattgcaactatgaatttaaatggagattatgtttcagatgcattggctgcatgtgttggcggaataggaattgctccaggagccaatataggagacgattcagcgctatttgaagcaacacatggcacagctcctaaatatgcagggcaagataaagttaatcctggatcattaatattatcagcagaaatgatgttaagacaccttggctggaccgaagctgctgatttaattatctcttctatggaagcagctctaacggctaaaatggtcacgtatgattttgaaagattaatggatggtgcaaatcttgtttcatgctcaggattcgcagatgaaatgataaaaagaatgtgag

SEQ ID NO: 207851 - DNA, 385 bp, Unknown
  Bacterial polypeptide expressing nucleotide sequence isolated from the Sargasso Sea
gatactatagcgcaaggattcggatctttgggattgatgactagcgttttaatgacaccggacggaaaaactatagaatcagaagcagcacatggaacggtcactagacactataaatggcatcaagaagggaaagaaacgtcaacaaatcctattgcctcaatttttgcttggacaagaggtttggctcacagaggtaagttagataaaaatgatcaattagtaaaattttctgatgttttggaaaaagtttgcattcaaacggttgaagatggtttaatgactaaagatctagcaatattaataagtaaaaaccaaaaatatttaaatacaaatcaatttttagatgcaatagattctaacttaaataaaagtcttaaataat

SEQ ID NO: 207852 - DNA, 673 bp, Unknown
  Bacterial polypeptide expressing nucleotide sequence isolated from the Sargasso Sea
aatggcaaaaataaaagttaaaaatcctgtagttgaaatggatggagatgaaatgaccaggattatctgggaatacatcaaagaacaattaattttgccctatcttgatatagatatcaaatattttgatcttggagtgattaaaagagatgaaacaaatgatcaaattacaatagatgctgccgaggcggtgaaaaaatatggtgtaggaataaaatgcgcaacaattactcctgatgaaaatagggtacaggaattcaaattaaaacaaatgtggcgttctcccaatggaacaataagaaatatactgggaggaacaatatttagacagccaattatatgtaagaatgttccaagaataatcacaaactggaatcatccaattgtagttgctagacatgcctttggtgatcaatatagagcgactgacacattaattaataaaccaggaactcttaaaatggtttttgaacctaaagatggatctgaaggatttacaaaagatgtatatgagtttgaaaaacctggtgtagccctatcaatgtataatttagataattcaattaaagactttgctagagcttgttttaattatggacttaaccttggttggccagtttacctttctactaaaaatgctattttaaaagtctacgatggaagatttaaagat

SEQ ID NO: 207853 - DNA, 502 bp, Unknown
  Bacterial polypeptide expressing nucleotide sequence isolated from the Sargasso Sea
tatgactaaaattaaagtttcaaaccctgtggtggaaatggatggcgacgagatgaccagaataatttgggagtttataaagcaaaaactaattctgccatacttagacatcccattagaatattatgatttgggtattgaagaacgagacaagacaaatgatcaggtaaccattgatgccgccaacgctactctaaaacacggagtcgccgtaaagtgtgcaaccataactccggatgaagaaagagtgaaggaattcaaccttaagaaaatgtggcgatcgccaaatggcacaattcgaaatatacttggtggtgttgtttttcgagccccaattatttgtcaaaatgtccctagattggtgcctggatggaacaagcctattgtggtagggagacacgcatttggagatcaatacagagccactgattttaaatttcctgggaagggtaaattatttatgaaattcgtttcagatgatggtgaagagatgaacacgaag

SEQ ID NO: 207854 - DNA, 306 bp, Unknown
  Bacterial polypeptide expressing nucleotide sequence isolated from the Sargasso Sea
ttgaagctgaggctgctcatggcactgtaactagacattatagaaatcataaaaaaggtatgcaaacttcaactaatccaattgcatcaatttttgcatggacaagagggttagagtttagaggtaaattcgataaaaataatgaattaatacaatttgctaaaaaactagaaagaacttgtataaatacagtagaaaaaggtcaaatgactaaagatttagctatattggttaataaagatcaaaggtggttaaatactgaagattttttaagtgcaataaataacaactttcagtttaactaat

SEQ ID NO: 207855 - DNA, 423 bp, Unknown
  Bacterial polypeptide expressing nucleotide sequence isolated from the Sargasso Sea
tctgggcatgtaaaaactatgatggagatgtacagtcagatactgttgctcaaggatatggttcattaggtttaatgaccagtgtgttattagctccagatggtagaacaatggaagctgaagcagctcatggtacggtaactagacactttaggctacatcaacaaggaaaagaaacttcaacaaatcctattgcttctatttttgcttggactagaggattggctcatagaggaaaattagatagtaataatgaattgataaaattctcaaatactttagagaaagtttgtattgattgtgtagagaatggatcaatgactaaagaccttgctatattggtagggccttcaacaaaatatcttacaacaaatcaatttcttgatgaaatagaccatagtttattaaaaagtttaaactaaa

SEQ ID NO: 207856 - DNA, 880 bp, Unknown
  Bacterial polypeptide expressing nucleotide sequence isolated from the Sargasso Sea
tggggttgggattaaatgtgcaactatcacgcctgttgaagcaagagtagaagaatttgacctaaaaaaaatgtggagatcaccaaatggaacaatcagaaatatcattggggggactgtttttagagaaccaatcatctgtaaaaatattccaaagcttgttccctcttggacagatccagtaattataggaagacatgcttttggggatcagtacagagcaacagattttaaagttcctggtaaaggaaaaatggaagttaaatggacatcagaagatggaaaagatgagataaaatatgaagtatttaatttcactggcccgggggtggcactttcaatgtataatttagacaaatctattgaagactttgcaagatcttgttttagttatggtcttattaaaaagtggccagtttacatgtctacaaagaatacaattttaaaacagtacgatggtagatttaaagatatttttcatgaaatatttgaaaatgaatataaagaggaatttgaaaaaaataatttaacttatgagcacagattaatcgacgacatggttgcatgtgcaatgaaatggagtggtaaatatatttgggcttgtaaaaattacgatggtgatgtgcaatcagatacaatggcacaaggttatggttcgttaggattaatgactagtacacttcttaccccagatggaaaaattatggaggcagaagctgctcacggaactgtaactagacactacagaatgcatcagcaaggtaaagaaactttcacaaatcctatcgcatctatttttgcatggactagaggactagcgcacagagggaaactagatagtaataatgaattaattaaatttgcacaaacaaatgaaaaa

SEQ ID NO: 207857 - DNA, 724 bp, Unknown
  Bacterial polypeptide expressing nucleotide sequence isolated from the Sargasso Sea
attttacaatctcaatttgatgttaaaaaaattagatttacagagaactgtggtataggaattaaacctatttctgaagagggcagtaaaaggttaattagaaagtcgtttgaatatgcgatacagaataatagagactctgtaacattaattcataaaggaaacatacaaaaattcacagaaggcgcattcagagactggggatatgagcttgcacgcgaggagttcaatggagaaccgtttgacggaggcccttggcatacatttctaaatccaaaaacaggaaagccaatcattataaaagatgtgatttgtgatgcttttcttcagcaaatattacataggccagctgaatatgatgttattgcttcaccaaatttaaatggagattatatttcagatgcacttgctgcccaagtaggaggtattggtatcgcaccaggagccaacttaggtgattcgactgcagtttttgaggccacacatggaacagcaccaaagtatgcaggtcaagataaagtaaaccctggatctttaattctttcagctgagatgatgcttagacatttaggttggactgaggctgctgatcttataataaattcaatggaaaaaactattcaaaagaagaaagtaacttatgattttgcaagactaattgatgacgctaatgaagttagctgttcagaatttggaagattgttgataaaaaaattcaaataat

SEQ ID NO: 207858 - DNA, 343 bp, Unknown
  Bacterial polypeptide expressing nucleotide sequence isolated from the Sargasso Sea
atggccaagatcaaggtaaaaaccccaatcgttgacctagatggcgacgagatgacgcgcataatatggcagttcatcaaggaaaaattgatcctgccttaccttgatgtagatttaaaatattatgacctgagtgtcgaatatcgcgacaaaactgatgatcaggttacagtcgatgccgctaatgctatcaagcggtatggcgtcggtgtgaaatgcgccaccatcacgcccgacgaagctcgagtgacagagtttaacctcaagaagatgtggcgctcgcccaacggcactattcggaatattctgggcggcaccgtttccgcgagcccattatatgcaa

SEQ ID NO: 207859 - DNA, 976 bp, Unknown
  Bacterial polypeptide expressing nucleotide sequence isolated from the Sargasso Sea
aagcttaatatttccatcggacggaactaagatcgggcatgatggggacaaacttgttgtgcctaataatcctataattccatatattattggagatggaataggcatagatgtaacaccagtaatgaaacgtgtattggactatgctgttaacaaggcatatggtagtgatagagaaatcaagtggttagaactatatgctggttctaattctgaagatttatatggctctattctacctgaagagactatagaggctatgaaggaatatagaatttccatcaaaggcccactcactacacccattggaaaaggccataaatctataaatgtaaagattagacagaaattagatttatttgcttgcgtaagacctatcaaatattttccaggtaccagtacaccgatggctgactcaggaaatacagacatggtcgtttttagggaaaatactgaagacctatattctggtatagagtgggagccaaattctcccggtgctaaaagaataattgactttataaataaagaattaggtgggtcaccatttagatttgaaaaaaattgtggaatcggtatcaaaccagtatctgaagagggcacaaaaagacttatcaggatggctattgattattcattggagttaaataagtcgagtatcactattgttcataaaggaaatattatgaaatacacagaaggtgcatttcgtgattgggcttatgatgtagtaacaaaggaatataatggagtagcacagaagaataatacatatgtaattgataattctaaatttaatacagaaataataattaaagattgtattgcagataactttctccagcagattattctagctccagagcagcatgatgtaatagcaacactaaaccttaatggtgactatatatctgatgctttagcagcacaagttggtggcattggtatggcgcctggaggaaacataggcaatggg

SEQ ID NO: 207860 - DNA, 778 bp, Unknown
  Bacterial polypeptide expressing nucleotide sequence isolated from the Sargasso Sea
gttagcattaaatggactcctgaggatccaaatattgaacccattgaaaaagaagtttatgaatttcaatcgagcggtgtagctatggcaatgtataatacggacgagtcaatcagagactttgcaaagtcttgtatgaattatgcattaatgcgtgaatggccagtttatttatccacaaaaaatactattttaaaacaatacgacggtaggttcaaagatctatttcaagaagtgtatgaaaatgattttgctgataaatttaaatctctcaatttagattacgaacatagattaattgatgatatggttgcatctgcattaaaatggaatggaaaatttgtatgggcctgtaaaaactatgacggagatgtacaatctgatactgttgctcagggatttggatcgctaggtctcatgacaagtgtattaatgaccccagacggaaagacaatcgaggcagaggctgctcatggaacagtcacaagacattacagattgcatcaagagggtaaacagacctcgactaacccaattgcctctatctttgcatggtcaagaggtcttaaatatcgtgggaaactggatgagaatgatgaactaattaaatttgcagataagttagaaaaagtatgtgttgagacagttgaaagtggctcaatgacaaaagatctagctttattaatgcctcatgaacaagattggcatagtactgaagattttttagaaattattgaacgaaaccttaataaaaaacttactgtaacttatcaataat

SEQ ID NO: 207861 - DNA, 842 bp, Unknown
  Bacterial polypeptide expressing nucleotide sequence isolated from the Sargasso Sea
gtgccgcgcctggtgccaggctggacgcgtcctatcgtcattggacgtcacgccttcggcgaccagtatcgtgcgaccgattttgtagtgcagggcgccggcaaactgaccatgaccttcacgccggccgacggcagcgcccccgtcacccgcgaagtgttcgactttccggacggtggtgtcgcgatgtcgatgtataatctagacgagtcgatccgcggcttcgcacgcgcctgcatgaattacggtctcgatcttgactggccagtatatctgtcgaccaagaacacgattatgaaagcctatgacggccgcttcaaggatctgttcgaagaggtcttcgaggccgaatttgccgaaaagttccgtgccgccggcatcacctacgagcaccggctgatcgacgacatggtagcctgcgcgttgaaatggaacggcggctttgtttgggcttgcaagaattatgacggcgacgtgcagtcggacactgtggcccagggctttggttcgctcggtctgatgacgtcggttctgatgacgccagacggaaagacggtcgaggcggaagccgcacacggcactgtcactcgccattaccgccagcatcagcagggtaaggaaacatcgaccaacccaatcgcgtcgatcttcgcctggacgcgcggcctcggctaccgagccaaatttgacgacacgccggatgtggccgaatttgccgcgacgctcgagaaggtctgcatcaagacggtcgaaagcggccagatgaccaaggacctcgcgcttcttgtcggcaaggaccaagcgttcctaaagaccaaccagttccttgacgcgctggatgg

SEQ ID NO: 207862 - DNA, 982 bp, Unknown
  Bacterial polypeptide expressing nucleotide sequence isolated from the Sargasso Sea
aaccgatgaccaagtaactgttgatgccgctaatgccattaagcaatatggagtaggcgtaaaatgtgcaactattacacctgatgaagaaagagtagaagaatttaaactaaaaaaaatgtggcggtcaccaaatggaacaataagaaatattttaggaggaacagtttttagagaaccaattatttgcagtaatgttccaaaattagtaccaggctggacaaaaccaattgtaattggaagacatgcatttggagatcaatatagagctacagactttttaattcctggtgagggtaatctagaagtcaaatggacttctaaagatggaaaaaataaaaaagaatttaaagtatttgattttcctggttctggaactgcactaacaatgtacaatctagatgagtctattaaaaattttgcaagggcgtgcatgaattatggacttggaagaaagtggccagtttatttatcaacaaaaaatacaatacttaaagcttatgatggcagatttaaagatttattccaagaagtttttgaaaaagaattttctgacaaatttaaagaaataaacattacatacgaacatagattaattgatgatatggttgcatgtgcaatgaaatggaatggtggatatatttgggcgtgtaaaaattatgacggtgacgtgcaatcagatacagttgctcagggatttggttctttgggattgatgactagtgtattaatgacgccagacggaaaaacagtagagtctgaggctgctcacggaactgtaactagacattttagaatgcatcaacaaggaaaagaaacttctacaaatcctattgcctccatatttgcatggacaagaggtttggctcacagaggtaaactcgacggaaatcaagaactaataaaattttcctctaatattgaagaagtgtgtattgaaacggttgagagcgggtcaatgaccaaggatttggcgatatta

SEQ ID NO: 207863 - DNA, 861 bp, Unknown
  Bacterial polypeptide expressing nucleotide sequence isolated from the Sargasso Sea
aattagttccaagttggactaatcccatttgtataggaagacatgcatttggtgatcaatacagagctacagattttcatgttccaggcaaaggtaaattagaaataaaatggacctcagaagatggaaaagaaaaaaaagaatttgaagtttttaattttccaggacctggtatagcgttatccatgtacaacttagataagtctataatagatttcgcaagagcatgtatgaattatggtcttaatagaaaatggcctgtatatctttctactaaaaatacaattttgaaaaaatacgatggtagatttaaagatttatttcaagaagtttatgaaaaagaattcaaagaaaaatttaaagaaagaaaaataacttacgagcatagacttattgatgatatggtagcgtgtgcaatgaaatggaatggaaattatatttgggcatgcaaaaactatgatggagatgtacaatctgatacggtagctcaaggatttggttctttgggtctaatgacaagtatgctgatgtcacccgatggtaaaacaatagaatctgaagctgctcacggtacagttacaagacactacaggctacatcaacaaggtaaagaaacttcaacaaaccctatagcttctatttttgcatgggcaagaggtctgtaccatcgaggaaagttagatggcaacgaagatttaaaaaagtttgtaaaaactctagaaaaaacttgtattgaaacagttgaaaatggatcgatgactaaagatttagccattcttataggcccctctacaaaatacctaaacaccaatgaatttttagatttattgaccaacaatttaagtaaaaagctaaattaaa

SEQ ID NO: 207864 - DNA, 405 bp, Unknown
  Bacterial polypeptide expressing nucleotide sequence isolated from the Sargasso Sea
aatgagcaaaatcaaggtaaaaaacccagttgtagagctggatggcgatgaaatgactcgtattatatggaagttcattaaaaataaattaatcctgccatatttagatcttggtatcgaatattacgatttaggcatgaaaagcagagataatactgaagatcagattacaatcgactctgcgaacgcaatcaaaaaaattggtgttggcataaagtgtgcaacgattacccctgatgaagcaagagtagaagaatttgatttaaaaaaaatgtggagatctcctaacggaactataagaaatataattggaggaacagtatttagagaaccaattatttgtaaaaatattccaaaacttgttccttcttggactgatccagtgattattggaagacatgcatt

SEQ ID NO: 207865 - DNA, 540 bp, Unknown
  Bacterial polypeptide expressing nucleotide sequence isolated from the Sargasso Sea
ttgaagaagtttttgaaaatgaatttaaagatagatttgatcaaaataaaattacttatgaacatagattaatagatgacatggtagcatgtgcaatgaaatggcatggtaaatatatttgggcgtgcaaaaattatgatggagacgtacaatcagatactgttgctcaaggatatggatctttaggtttaatgacaagtgttttgctcgctcctgatggtagaacaatggaagctgaagctgcacatggaacagtaactagacactttagaatgcatcaacaaggtaaagaaacatcgacaaatccaatagcatctatttttgcatggacaagagggttggctcatagaggaaaattagatggaaatgaggaattaataaagtttgcagaaacacttgaaaaagtatgtgttgattgtgttgaagaaggctcaatgactaaagatttagctattttgataggaccttcgacaaagtatttaacaactaatcaatttttagacactttagatggtaagttgagacaaaaactaaattaaa

SEQ ID NO: 207866 - DNA, 729 bp, Unknown
  Bacterial polypeptide expressing nucleotide sequence isolated from the Sargasso Sea
gatgaaatgaccagaataatctgggaatttattaaaaaaaaattaatccttccttatcttgatatcggtattgagtactatgatttaggtatgaagagtagagatgatactgatgaccagattacaatagactctgctaatgcgattaagaaaattggtgtaggtataaagtgcgctacaatcactcctgatgaagcacgagttgaagaatttaatttaaaaaaaatgtggagatcaccaaatggaacaataagaaatatcattggtggaactgtttttagagagcccataatttgttctaacattccaaaattagtgccttcatggtcagatccagtggtaattggcagacatgcctttggcgatcaatacagagcaaccgattttaaagttccaggtaaaggaaagatggaagttaagtggacatcagaggatggtaaaaatgaaattaaatacgaagtatttaattttactggaccaggagtagccctttctatgtataacttggataaatccatcgaagactttgccagatcttgctttaattatggtctcataaaaaagtggccagtctatctttcaacaaaaaatacaatacttaaaaaatacgatggacgttttaaagatatttttgaagatgtatttaataaagaatttaaagaaaaatttgataaggaaaagattacctatgaacatagattaattgatgacatggttgcatgtgcaatg

SEQ ID NO: 207867 - DNA, 359 bp, Unknown
  Bacterial polypeptide expressing nucleotide sequence isolated from the Sargasso Sea
tttaggattaatgacaagtgtattaatgagcccagacggtaaaactgttgagtcagaagctgctcacggaacagtaactagacactacaggatgcatcaacaaggaaaagaaacttctacaaacccgatagcctcaatttttgcttggactagaggtttagctcacagaggtaaattagataataataatgaacttattaagtttgcttcatctcttgaaaaagtttgtgttgaaaccgtcgagaaaggttcaatgacaaaagaccttgctatattaattgataaatcatctaaatatttaaccactaatcaatttttagaagctattaatggaaatttaaggaaagaactcaattaag

SEQ ID NO: 207868 - DNA, 436 bp, Unknown
  Bacterial polypeptide expressing nucleotide sequence isolated from the Sargasso Sea
aatggtaattatattgtgggcatgtaaaaactatgatggagatgttcagtctgatactgtcgctcaaggatttggttcattgggtcttatgagtagtgttctgatgactcctgatggtaaaactatagaagctgaagctgcacacggaactgtaactagacattatagacttcatcaacaaggaaaagaaacatcaactaacccgatagcatctatatttgcatgggcaagaggtctttatcatagagggaaaattgacaataatgacgagttaaaaaagtttgttaaaactttagaaaaagtttgtattgaaactgtagagaatggcttaatgacaaaagatttagcaattttgattggtccatcaagcaaatatcttacgacaaatcaatttttggatgtaattgatcaaaatcttaaaaaaaaactaaattaa

SEQ ID NO: 207869 - DNA, 763 bp, Unknown
  Bacterial polypeptide expressing nucleotide sequence isolated from the Sargasso Sea
accaatgaccaagtaacaattgactgtgctaaagcaattcaaaaatatggtgcaggagtaaagtgtgcaacaataactcctgatgaagctcgagtgaaagaatttaatttaaaaaaaatgtggagatccccaaatgggacaattagaaatattgtagggggaacaattttcagagagccaataatttgtaaaaatgtaccaagattagttccgcactggactgaaagtgtcatagttggaagacatgctttcggagatcaatacagagctacagattttaaagttccaggaaaaggtaaaatgacaatcaagtgggaatccgaggatggaaaagataaaatcgagcatgaagtttttaagtttaatgattcagggatagctctctcaatgtataatttagatagttcaattaaagattttgcaagagcatgtttgaattatggtttggttagaaagtggccagtttatttttcatctaaaaatactattttaaaagtttatgatggaagattcaaagatatttttgaagacgtctatgaaaaagaatttaaaaaaaaatttaatgaagcgaagattacttacgaacacaggctaattgatgatatggtagcatgtgccatgaagtggagtggaaagtatatttgggcttgtaaaaattatgatggagatgttcagtctgatacggttgctcaaggctatggctctctcggtttgatgacaagtgtgcttagaactccagacgggaaagtagcaaaagctgagg

SEQ ID NO: 207870 - DNA, 583 bp, Unknown
  Bacterial polypeptide expressing nucleotide sequence isolated from the Sargasso Sea
aatacaatacttaaagcttacgacggaagatttaaagatctttttcaagaagtttttgaaaaagagtttttagataagtttaaaaaagtaaacatcacctacgaacatagattaattgatgatatggtagcttgtgctatgaaatggaatggtgggtatgtctgggcgtgtaaaaactatgatggagacgtccaatcagacactgttgctcagggatttgggtctttaggattgatgaccagcgtgttaatgacaccagatggtaaaacagtagagtccgaagctgctcatggaacagtaacgagacattatagaatgcaccaagaaggaaaagaaacttctactaatcctatagcatcgatatttgcatggacaagaggtttagctcatagaggaaagcttgatgggaacaatgaattgattaaattctcggctagtattgaagaagtgtgtattaaaactgttgaaagtggctcgatgactaaagatttggcaattttgatagataaatcaaataaatatcttacgacaaatcaatttttagaggctattaatggaaatttgaagaaaaaacttaattaat

SEQ ID NO: 207871 - DNA, 634 bp, Unknown
  Bacterial polypeptide expressing nucleotide sequence isolated from the Sargasso Sea
atgagcaaaatcaaggtaaataacccggtagtagagctggatggcgatgaaatgacacgaattatatgggagttcatcaaaaacaaattaatccttccatatttagatcttggcattgaatactacgatttagggataaaaagcagagataatacagacgatcaaatcacaatagactctgcgaatgctattaaaaaaattggtgttggaattaagtgtgcaacgattacacctgatgaagcaagagtagaagaatttgatttaaaaaaaatgtggaggtctccaaacggaaccataagaaatataattggaggaacagtatttagagagccaattatttgtaaaaatattccaaaacttgttccttcttggacagatccagtaattattggaagacatgcatttggtgatcaatacagagcaacagattttaaagttcctggaaaaggaaaaatggaagtaaagtggacatcagaggatggaaaagatgaaattaaatatgaagtatttaatttcacaggtcctggtgtagctttatcaatgtacaatttagataagtctattgaagactttgcaagatcttgttttagctatgggttaataaaaaaatggcccgtctatatgtctacaaaaa

SEQ ID NO: 207872 - DNA, 666 bp, Unknown
  Bacterial polypeptide expressing nucleotide sequence isolated from the Sargasso Sea
aatgacaagaattatatggcagtttattaaagataaactcatacttccatatcttgatatagaccttgattattatgatcttggagtaataagcagggatagaaccaatgacaaaattacagtcgactctgcaaatgctataaaaaaatacggtgttggagttaaatgtgccaccataacacctgatgaagaccgagtagaggaatttaaactgaaagaaatgtggcgttcaccgaatggaactataagaaatatacttggtggaacagtttttagggagccaattgtttgcaataatgttccaagacttgtgcctggatggactgatccaattgttgtaggtagacacgcttttggagatcaatacaaagcaacagattttaaagtacctggcaaagggaagttaagtattaaatggactccagaggatccaaatatagaacccattgaaaaagaagtttatgaatttcaatcgagcggtgtagcgatggcaatgtataatacagacgagtcaatcagagactttgcaaaatcttgtatgaattatgcattaatgcgcgaatggcctgtctatttatccacaaaaaatactattttaaaacaatacgatggtaggtttaaagatctctttcaggaagtatatgaaaatgaatttgctgagaaatt

SEQ ID NO: 207873 - DNA, 844 bp, Unknown
  Bacterial polypeptide expressing nucleotide sequence isolated from the Sargasso Sea
aaaagaatttaatttaaaaaaaatgtggagatcacccaatggtacaataagaaatattttaggaggaacagtttttagagaacctataatctgcaaaaacattcctaaattagttccaagttggactaatccaatttgtataggtaggcacgcatttggagatcaatatagagcaacagattttaaagttcctggcaaaggaaaactagaaataaagtggacttcagaagatggaagtgaaaaaaaagaattcgaagtatttaattttccaggttctggtgttgcactgtcaatgtacaacctggatcaatcaataaaagattttgcgagagcatgcatgaattatggtcttaatagaaaatggccagtttatctttcaacaaaaaatacaatattaaaaaattacgatggtaggtttaaagatttattccaggaagttttcgataaagaatttaaagaaaaatttaaagaaagagaaataacttatgaacatagacttatagatgacatggtagcgtgtgctatgaaatggaatggaaactatatctgggcatgtaaaaactatgatggtgatgtacaatctgatacggttgcccaaggatttgggtctttgggtcttatgagcagtgttttaatgacacctgatggaaatactatagaagctgaagctgcacacggaactgttactagacattataggctacaccagcaaggaaaagaaacttcaacaaatccaatagcatctatatttgcatgggcaagaggtctttatcacagaggaaaaatggataataatgaagaacttaaaaagttcgtaaaaactttagaaaaaagtttgtattga

SEQ ID NO: 207874 - DNA, 949 bp, Unknown
  Bacterial polypeptide expressing nucleotide sequence isolated from the Sargasso Sea
agtcttagattatgcagtaaataaggcatatggaaaccatagagaaattaaatggttagaactttatgcaggttctaattctaatgatttatatggttctattcttccagacgaaactctcgatgctatgaaagagtatagaatttctatcaaaggtccacttacaacacccattggatcaggccataaatcattgaatgtgatgatacgtcaaaaactagatttatatgcgtgtgtaagacctataaaatattttcccggaacaagcactcctatggctgaatcaggcaatacggatatggttgttttcagagaaaatacagaagatttatattctgggattgagtggaaaccggactctgaaggtgcaaaaaagataatagactttataagcaaagaacttgggacatctccttttagattcgaaaaaaactgtggaattgggataaaaccggtatcagaagagggcacaaagagactagtcagaatggctatcgactattcattggaacttaataagtcgagtataacaatagttcacaagggtaatataatgaaatatacagagggtgctttccgtgactgggcttacaatgtagtcactagtgagtataatgggaaaatacttaatgacggcacttatctaattgaaaataataagtttaatactgaactcattataaaagattgtattgccgacaacttccttcaacagatcattttggccccagagcaacatgatgtgatagcgacgcttaatttgaatggtgattatatatcagatgctttagcagcacaggtaggtggtattggcatggcaccaggtggaaatattggagacggtgttgctgtatttgaggcaactcatggttctgctgagccatttgcgggaaaaagcagggtaaatcctggttctatcattttgtcaggtgagatgatgttgagatat

SEQ ID NO: 207875 - DNA, 511 bp, Unknown
  Bacterial polypeptide expressing nucleotide sequence isolated from the Sargasso Sea
atgagtaaaatcaatgtcaaaaatccagttgttgagcttgatggcgatgaaatgactaggataatttggtcatttataaaaaaaaagctaatacttccatatctcaatatagacctaaaatattacgatttaggcatggaaagcagagacaaaacaaacgatcaaataactatagattgtgcaaaagctatacaaacatatggtgtaggagttaaatgtgcgactataacgccggatgagcagagagttgaagaatttaaactcaaaaaaatgtggaaatcaccaaatggtactatcagaaatatacttggtggaactgtgtttagagagcctattatatgcaagaatgttccaaagcttgtaccaacatggaccgactcagtagtaataggtagacatgcttttggagaccaatatagagccactgattttaaagtgcctggtaaaggaaaactaaaagtttcatgggtttctgatgacggaaaaaacaggattgagcatgatgtgtatg

SEQ ID NO: 207876 - DNA, 496 bp, Unknown
  Bacterial polypeptide expressing nucleotide sequence isolated from the Sargasso Sea
tatggcaaaaattaaagtaaaaaatccggtagtagagctcaatggtgatgaaatgacccgtataatttgggcttttataaaagacaaattaatcaaaccttacctggatattgagcttaaatactttgatcttggaatagagagtagagacaaaactaatgaccaaataactgttgattgtgcaaaagcgattcaaaaatatggtgttggcattaaatgtgcaacaatcactcctgatgaagcaagagtaaaggaatttaaactaaaaaaaatgtggagatctccaaatggtacgatcagaaatattttagggggtactgtatttagggaaccaattatttgtaaaaatgttccaaaacttgttcctgggtggacaaagccaattattatcggaagacatgcttttggagatcagtatcgagcaactgactttgttgtgccgggtaaaggaaaattagaagttaaatggacttcagaagacggtaaagacaaaaaa

SEQ ID NO: 207877 - DNA, 754 bp, Unknown
  Bacterial polypeptide expressing nucleotide sequence isolated from the Sargasso Sea
gatgaagtaaccaaagtaatcaattttctaaaaaatgagatgggcgtcgaaaaaattaggttcccagaaacatcagggataggaatcaagcccgtaagtagggagggaacagaaagaatagtcagggcagccatacactactccatagaaaacgataagcaaagcgttacattagtgcacaaagggaatatcatgaagttcacagaaggagggttcagagactggggatatgagttggctaagtcggaattcggagctaaagaattggacgacggaccttggtgcacttttgaaaatccaatcactggaaatattatcaccgttaaggacgtgatagctgatgcaatgcttcaacaggttctgacacgccctagtgagtatgacgttctggcgacaatgaacttgaacggagattacatttcagacgctctggcagctcaagtaggcggaatagggattgcaccgggtgcaaacataaattatgataccggagtcgcgatttttgaggcaactcacggcacagctcccaagtatacgggacaggacaaagtaaaccccggaagcctaattctatctgctgaaatgatgctcaggcatatgggctgggaagaagctgcagatctaattgtcaagggaatggaaggagcgatttctgctagaacggttacctatgacttcgagcgtttaatggatgaggcaactctgctttcttgttccgaatttgggaatgcaataatttcgcacatgaattaga

SEQ ID NO: 207878 - DNA, 835 bp, Unknown
  Bacterial polypeptide expressing nucleotide sequence isolated from the Sargasso Sea
ttgattataggtagacatgcatttgttgatcaatacagagcaacagattttacagtacctgtaaagggtaagttagaaatcaaatggactgctgaggatggttctgatgagagaaaatacgaagtcttcaatttcccaggtccagggattgcattatcaatgtataatttagataaatcaatagaggactttgcaagatcttgttttaactatggattaattaaaaaatggccagtttatctctctactaaaaatacaattttaaaaagatatgatggaagatttaaggatatttttgaagaagtttttgaaaacgaatttaaagatagatttgatcaaaataaaattacttatgagcatagattaatagatgacatggtggcatgtgcaatgaaatggcatggtaaatatatttgggcgtgcaaaaattatgatggagacgtacaatcagatacagttgctcaaggatatgggtctttaggtttaatgacaagtgttttgcttgctccagatggtaaaacaatggaagctgaagctgcacatggaacagtaactagacactttagaatgcatcaacaaggtaaagaaacatccacaaatccaattgcgtccatttttgcatggacgagagggcttgctcatagaggaaaattagatggaaatgaagaattgataaagttcgcagaaacacttgaaaaagtatgcgttgattgtgttgaagagggctcaatgactaaagacttagctattttgataggaccttcgacaaagtatttaacaactaatcaatttttggatactttagatggtaagctgagacaaaaactaaattaaa

SEQ ID NO: 207879 - DNA, 887 bp, Unknown
  Bacterial polypeptide expressing nucleotide sequence isolated from the Sargasso Sea
gaagtaaaaaacccagtagttgagctagatggcgatgaaatgactagaataatatgggattttattaaaaaaaaactaattctcccctatttagatattgatattaagtattacgatttaggcataaaaaacagagataaaacctcggacaaagttacaattgaatccgcaaatgctataaaaaaatttggtgttggtattaaatgtgcaacgatcacaccagatgaaaatcgcgtaaaagaatttaacttaaaaaaaatgtggaaatctcctaacggcacaataagaaacatccttggtggtacagtttttagagaaccaataatttgtaaaaatattccaaaactagtgcctagctggactaatccaattgtgataggacgacatgcttttggagatcaatatagagctactgattttaaagtccctggtaagggaaagttagaaatgaaatggacttcggaagatggaaaagaaaaaaaagaatttgaagtttttaactttagcggtccaggtattgctttatcaatgtataatttagatcaatccataaaagattttgctagagcttgtatgaattatggtcttaacagaaaatggcctgtttatctttctactaaaaatactattttgaaaaactatgatggtagatttaaagatctatttgaagaagtgtatgaaaatgaatttaaagaaaaatttaatgaaagaaaaataacttacgaacatagacttatagatgatatggttgcatgcgcgatgaaatggaatggtaattacatttgggcgtgtaaaaattatgatggagatgttcagtctgacacaatagctcatggatttggttctcttggtcttatgacaagcgttttaatgtctcctgatggtaa

SEQ ID NO: 207880 - DNA, 586 bp, Unknown
  Bacterial polypeptide expressing nucleotide sequence isolated from the Sargasso Sea
aaaaaatacgatattaaaaaattatgatggtaggtttaaagatttattccaagaagtttttgataaagaatttaaagaaaagtttaaagaaagagaaataacttacgagcatagacttatagatgacatggtagcatgtgctatgaaatggaatggtaactatatttgggcctgcaaaaactatgatggagatgtacaatctgatacagttgctcaaggatttgggtctttgggtcttatgagtagtgttttaatgacacctgatggaaatactatagaagctgaagctgcacatggaactgttactagacattatagactacatcaacaaggtaaagaaacatcaacaaatccaatagcatctatatttgcatgggcaagaggtctttatcacagaggaaaaatggataataacgaagaacttaaaaagttcgtaaaaactttagaaaaagtttgtattgaaacagttgagagtggcttaatgacaaaagatttagcaattctggttggaccttcaagcaaatatcttacaacaaaccaatttctagatgtaattgatggaaatcttaaaaataagctaaattaa

SEQ ID NO: 207881 - DNA, 373 bp, Unknown
  Bacterial polypeptide expressing nucleotide sequence isolated from the Sargasso Sea
tcaaggctacggttctctaggattaatgacaagtgtgctaagaactccagatggaaaaatagcggaggctgaagcagctcacggaacagttactagacattacagacaacatcagcaaggtaaggaaacttccacaaatccaatcgcttctatttttgcttggacaagaggtttgtcacataggggacagttagatggcaataatgaattaattaaatttgcaaacactcttgaaaaagtttgtgtagagactgtcgaaaatggttctatgactaaagatctagcaatactaataagtaaaagtcaaaagtttttgacgacaaatcaatttttagaagcaatagactctaatcttaagaaaaaacttaactaa

SEQ ID NO: 207882 - DNA, 769 bp, Unknown
  Bacterial polypeptide expressing nucleotide sequence isolated from the Sargasso Sea
gcaacaatcacacccgatgaagctagagtaagggaatttaatcttaaaaaaatgtggagatctccaaatggtacaataaggaatattattggaggaactgtttttagagaaccaataatttgtaaaaatattccaaaactagtgccctcatggacagatccattgatcataggtaggcatgcgtttggtgatcaatacagggcaacagactttacggtacctggtaagggtaaattagaaatcaaatggactgctgaagatggttctgatgagagaaagtatgaagtctttaattttccagggcctggaatagctctatcaatgtataatttagataagtcaatagaagactttgctagatcttgctttaattatggattaattaaaaaatggccagtttacctttctactaaaaatacaattttaaaaagatacgatggaagatttaaagatatttttgaagaagtttttgaaaaagaatttaaggatagatttgatcaaaataaaattacttatgaacatagattgatagatgatatggtagcatgtgctatgaaatggcatggcaaatatatttgggcatgcaaaaattatgatggagatgtgcaatcagatacagttgctcaaggatatggatctttaggtttaatgacaagtgtattgcttgctccagatggcaaaacaatggaggctgaagctgcacatggaacagtaacaagacactttagaatgcatcaacaaggtaaagaaacctcaacaaatcctattg

SEQ ID NO: 207883 - DNA, 778 bp, Unknown
  Bacterial polypeptide expressing nucleotide sequence isolated from the Sargasso Sea
aatggaattcaaaccccaacaaaaaatcctcaagatgtagatataactttatttagagaaaacacagaagacgtttatgccgggaaagagttagaagaaggaagcgaagaagttcaaaaattaaacaaatttttaaaatctgagtttggatgggaaataagagaagatagcgggataggaataaaacctatttctaaaacagctactgaaagattagtaagagcttcattaaattatgctgttgaaaacaataaaaaaaatcttgcattagttcataaaggtaacattatgaaatttacagaaggcgcatttagaaaatggggttatgaattagttcaagaagaattttctgatgtagctatatcttgggaagactgcaacggagattcaggtgataaaattttaatacaggatgttattgctgatgcatttcttcagcaaattttagttaaacctgaaaattttgatgtgattgctactactaatttaaatggtgattatgcatcagacgctttagcagcacaaataggaggaattggaattagtcctggaggaaatataaattatgaaaacggcaaagcagtgtttgaagcaactcatggtacagcacctaagtatgcaggtaaagaccaagccaatccaggatccttaattctatctggtgaaatgatgtttagatacatgggctgggatgaagcagctgacttaactatcaaaacaatggaaaaatcaattttagatggaaatgtaacttatgatttagcaagaggaagagaag

SEQ ID NO: 207884 - DNA, 718 bp, Unknown
  Bacterial polypeptide expressing nucleotide sequence isolated from the Sargasso Sea
tgtaaaaatattccaaaacttgtgccctcatggaccgatccattgatcataggtagacatgcttttggtgatcaatacagagcaacagactttacagtgcctggtaaaggtaagctagaaatcaaatggactgctgaagatggttctgatgagagaaaatacgaagtcttcaatttcccaggtcccggaattgcattatcaatgtataatttggataaatcaatagaagactttgcaagatcttgttttaactacggattaattaaaaaatggccagtatatctttctactaaaaatacaattttaaaaagatacgacggaagatttaaagatatttttgaagaagtttttgaaaaggaatttaaagatagatttgaacaaaataaaattacatatgaacatagattgatagatgacatggtagcatgtgcaatgaaatggcatggcaaatatatttgggcgtgcaaaaattatgatggagacgtacaatcagatacagttgctcaaggatatggatctttaggtttaatgacaagtgtattgcttgctccagatggtaaaacaatggaagctgaagctgctcatggaacagtaacaagacactttagaatgcatcaacaaggtaaagaaacttcaacaaatcctattgcttctatttttgcatggacaagagggttggctcatagaggaaaattagatggaaatgaggaattaataa

SEQ ID NO: 207885 - DNA, 766 bp, Unknown
  Bacterial polypeptide expressing nucleotide sequence isolated from the Sargasso Sea
tatggcaaaaattaaggtaaaaaatccaatagttgagctagatggcgacgaaatgacgagaataatatggtcatttattaaaaagaaactaatagaaccttatcttgaactagacatcaaatattatgatttaggaatagaaagtagagacaaaacatccgataagataacagtagactgtgcaaatgcgatcaaagaatatggagtgggtattaagtgcgcaactataacacctgatgaagcaagagtagaagagtttaaattacaaaaaatgtggagatcacccaacggtactatacgaaatattctaggaggaacagtttttcgagagccaattatttgtaagaatgttcctaagctagtacctggttggactaatccaattataattggaagacatgcttttggtgatcagtataaggcaacggattttcttgttcctggcaaaggaaaattagaaatgaaatggacttcagctgatggaaaacaaaagaaagaatttgatgtttttaattttcctagctcaggtgttgctttgtcaatgtataacttggataattctataaaagattttgctaaagcttgtatgaattatggtcttcaaagaaattattcagtttatatgtccactaagaatacaattttaaaaggttacgatggaagatttaaagacttgtttcaagaagtttttgataaagagtttaaagaaaaatttgaaaaaaataaacttacctatgaacacagattaattgacgatatggttgcc

SEQ ID NO: 207886 - DNA, 582 bp, Unknown
  Bacterial polypeptide expressing nucleotide sequence isolated from the Sargasso Sea
aacaatacgacggtcgtttcaaagatctgtttcaagaggtgtatgaaaaggactttgcagaaaaatttaaatcactcaatttagattacgagcaccgattgatagatgatatggtcgcatctgcattgaaatggaatggaaaatttgtgtgggcgtgtaaaaactacgatggagatgtgcaatcagatactgttgctcaaggatttggttcactagggctcatgacaagtgtacttatgacgccagacggaaaaacaatcgaagcagaagctgctcatggaacagtcacgagacattttagattacatcaagagggcaaacaaacctcaaccaacccaattgcctccatctttgcatggtcgaggggcctaaaatatcgtggaaagctggatgagaatgatgagcttgttaaatttgcagataagcttgaaaaagtttgtgttgagacagttgaaagtggttcaatgacaaaagatctagctttattaatgcctcatgaacaagattggcacagtactgaagattttttagaaattattgaacgaaacctaaataaaaaacttactgtaacttatcaataat

SEQ ID NO: 207887 - DNA, 905 bp, Unknown
  Bacterial polypeptide expressing nucleotide sequence isolated from the Sargasso Sea
gtggtacaattttagagaacctataatttgcaaaaatgtccaaagactggttcctcattggactgaaagtgtaatagttggaagacatgcgtttggtgaccaatatagagctactgatttcaaggtccctgggaaaggtaaaatgacaatcaaatgggagtcggaagatggaaaaaataaaattgagcacgaagtttatgatttcaaaagttctggtatagcactttctatgtataaccttgatgactctataaaagattttgctagagcatgtatgaactatggtttggtaagaaagtggcctgtttatttttctacaaaaaatacaattttaaaagcctatgatggaagatttaaagatatttttgaagaaatttttcaaaaagaattcaaaaagaagtttgaagaaataggtattacttatgaacacagattaatagacgatatggtagcctgtgctatgaagtggagtggaaaatatatttgggcctgtaaaaattacgatggagacgtacaatctgatacagtggcacaagggtacggttctcttggattgatgacaagtgtgctgagaactccagatggaaaaatagctgaggctgaagcagcccatggaacagttacgagacattatagacaacatcagcagggtaaggaaacttccacaaatccaattgcatccatttttgcctggactagaggactatctcatagaggtcagttagatggaaatcaggagttaattaaattttcaaatactctcgaaaaagtttgtgtagaaacagttgaaagtggatcaatgactaaagatctagcaatacttgttagcaaaaatcaaaaatttttaacaaccaatcaatttttagaagcaattaactctaatcttaaaaagaaacttaactaat

SEQ ID NO: 207888 - DNA, 430 bp, Unknown
  Bacterial polypeptide expressing nucleotide sequence isolated from the Sargasso Sea
aaattacatttgggcatgtaaaaattacgatggggatgtacaatctgatactgtagcacaaggatttggttctttgggtcttatgacaagcgttttaatgtctccagatggtaagacaatagagtccgaggccgcacatggaacagttacaagacactatagactttaccagcaaggtaaagaaacatcaacaaacccaattgcatctatatttgcatgggctagaggtctttatcatcggggaaaaatggatcaaaacgaagaattaaaaaaatacgtaaaaactttagaaaaagtttgtattgaaacagtcgaaaaaggtttaatgacaaaagatttggcaatattaattggtccttcaagtaaatatcttacaacaaatcaatttctagatgtaattaatgaaaatcttaaaaaaagtctaaattaa

SEQ ID NO: 207889 - DNA, 767 bp, Unknown
  Bacterial polypeptide expressing nucleotide sequence isolated from the Sargasso Sea
taagatgacaattaaatgggaatcagaagatggaaaaaataaaattgaacacgaggtttacaatttcaaagggtctggtatagcgctttctatgtacaatttagacgactcgataaaagactttgcaagagcatgtatgaactatggtttagtaagaaaatggcctgtttatttttcaaccaagaatacaattttaaaagcctacgacggaaggtttaaagatatttttgaggaaatttttcaaaaagaatttaaaaaaaaatttgatgaatcaggtattacttatgaacatagattaatagatgatatggtggcatgcgcaatgaaatggagtggaaagtatatttgggcatgtaaaaattatgacggtgatgttcaatctgatactgtggctcaaggttatggttctctaggattaatgacaagcgtacttagaactccggatggtaaaatagcagaagcagaagcagctcatggaacggtaactagacattatagacagcaccaacaaggtaaggaaacttctacaaatccaattgcttctatttttgcatggacaagaggcttgtctcatagaggacaactagacgggaatactcaattaattaaatttacgaacactcttgaaaaagtttgtgtagaaactgtcgaaagcggatctatgactaaagatttagcaatacttattagcaaagatcaaaaattcttaacaacaaatcaatttttggaagcaataaactcaaatcttaaaaagaaacttaactaat

SEQ ID NO: 207890 - DNA, 757 bp, Unknown
  Bacterial polypeptide expressing nucleotide sequence isolated from the Sargasso Sea
gaacaaggatcaaaagaatgtcagtcttttctagacctactcaaccagaactatccggagctttataaaaaggtcaggttccccagcacatctggcattggaatcaaacccgtgtctcaagaaggcactagcaggttagttcgagccgctatcagatatgcaattgataataaaagagaaagcctcacttttgtgcacaaaggtaatatcatgaagttcaccgaaggcgctttccgtaattgggggtatgagctagcagaaacagaattcccaaatgacacctacacttgggaccaatacgacaggactgctgcggacaaagggaaagaagccgccaataatgaacaacatcaggctattgctaatggaaagatagttgtaaaagacgcaatcgctgatattactcttcaacaggttttaactcgcccgaaggaatttgatgttatcgcaactatgaacttgaacggggactatttatctgacgctctggcggcgcaggtcggaggaataggaatagcgccaggtggaaatataaattacgacaccggccatgcgatcttcgaggcgactcatggcactgcgccgaaatatgcaggtcaagacaaagttaatccaggatcagttttactatccggcgaaatgatgctcagatatcttggttggacagaagcagcggaccgtataatcagtagtatggataaaacaataagtagtaaagtagttacgtatgattttgctcgccttatggatggagcaa

SEQ ID NO: 207891 - DNA, 707 bp, Unknown
  Bacterial polypeptide expressing nucleotide sequence isolated from the Sargasso Sea
attgtcttacaaaaatataaaaattcctgaatcaggtgaaaaaataacattaaaagatggtaatttaaatgttcctaataatcctataattccatttattgaaggtgatggtattggttcagatataacaccagccatgattgatgttgttgatgctgctgttgaaaaagcttacggagatgaaaaatctatatcttggatggaaatatattgtggtgaaaaatctactaaggtttatggtaaagatgaatggttgccagatgagaccttagacgctcttcgtgaatatgttgtaagtattaaggggcctttaacaactccagtgggtggaggcataagatcacttaatgtttcattgaggcaaattcttgatttgtatgtatgtttacgtccagttagatggtttgcaggtgttcctagtccagtaaaagttccaggcaatgttgacatggttatctttagagaaaattctgaagacatatacgctggtgttgagtttgcatctgattcaaaagaatcagcagagttagtcaaaatacttcaagataaattcaatgttgaccagataagattcccacaaaatgttgggttaggtgtaaaacctatatcagaagagggttcaaaaagacttgtaaaaagggcctttgaatatgctatagagcaagatagatcttcagttactttagttcataaaggaaatattatga

SEQ ID NO: 207892 - DNA, 835 bp, Unknown
  Bacterial polypeptide expressing nucleotide sequence isolated from the Sargasso Sea
gttgagctagatggtgatgaaatgactagagtgatttggaaatttatcaaaaataaacttattctgccctatttggatctagatattaaatattatgatcttgggttggaaaatagagataaaactaacgaccaaataacaattgaatgcgccaatgcaattaaaaaatttggagttggaattaaatgcgcaacaataactcctgatgaagaaagagtaaaagaattcaatttaaaaaaaatgtggagatctccaaatggtacaattagaaatatattgggtggtactgttttcagagaaccaattatttgtaaaaatgttcctaagttagttccaagttggactaatccaatttgtataggaagacatgcgtttggtgatcaatatagagcaactgacttcaatgttcctggaaaaggtaaattagaaataaaatggacatctgaagatggaaaagaaaagaaagaatttgaagtatttaattttcctggtccaggtgttgcattatcaatgtacaatttggatcaatcaataaaagattttgcaagatcttgtatgaattatggtcttaatagaaaatggccagtatatctttctactaaaaatacgatattaaaaaaatatgatggaagatttaaagatttatttcaagaagtttatgaaaaagaatttatagataaatttaaacagagaaaaattacatacgaacatagacttattgatgacatggttgcttgtgctatgaaatggaatggaaactatatttgggcatgtaaaaattatgatggcgatgtacaatctgatactatagcacagggatttggttctttaggtc

SEQ ID NO: 207893 - DNA, 773 bp, Unknown
  Bacterial polypeptide expressing nucleotide sequence isolated from the Sargasso Sea
aaaaggaaaaatggaagtgaagtggacatcagaggatggaaaagatgaaattaaatatgaagtatttaattttacaggtcctggtgtggccctatcaatgtacaatttagataaatctatagaagactttgcaagatcttgttttagttatggcttaattaaaaaatggcctgtttatatgtccacaaaaaatacaattctaaaacaatacgatggaagatttaaagatattttccaagaaatttttaacaaagaatacaaaagcgaatttgaaaaaaataatttaacttacgaacatagattaattgatgacatggttgcatgtgcaatgaaatggagtggaaaatatatttgggcttgcaaaaattatgatggagatgtgcaatcagatactatggcacaaggttatggatctttggggttaatgacaagcacattattaactccagatggaaaagtaatggaagcagaagctgcacatggaacagtaactagacattatagaatgcatcaacaaggaaaagaaacatcaacaaatcctatcgcatcaatttatgcttggactagaggattagctcacagaggtaaactagatggtaatgaagaacttattaaatttgcacaaactttagaaaaagtttgtattgaatgtgtggaaagtggatcaatgacaaaagatttagcaattcttattggtccaaatagtaaatttttaactacaaatcaatttttagatgaaattgatggtaatttaaaaaagaaattaaactaaa

SEQ ID NO: 207894 - DNA, 333 bp, Unknown
  Bacterial polypeptide expressing nucleotide sequence isolated from the Sargasso Sea
tgttaatgacccctgatggtaaaacagtagaagctgaagctgcacatggcactgttactagacattatagaaatcatcagaaaggtatagaaacttcaactaatcctattgcatcaatttttgcttggacaaggggtttaagttttagaggagaatttgatggtaataatgaattaataaattttgcaaaaaaattggaagaaacgtgtatcaaaacagtagaaaatggtgaaatgacaaaagatttagcaatattaattaataaagatcagaaatggttaaatactcaagattttttaagcgcaataaaaaacaattttaagattaactaat

SEQ ID NO: 207895 - DNA, 862 bp, Unknown
  Bacterial polypeptide expressing nucleotide sequence isolated from the Sargasso Sea
ccaagttggaaaaatccattttgtattggaagacatgcctttggtgaccaatatagggtaaccgactttcaagttcctggaaaaggtaagttagaaatcaaatggacttcagaagatggaaaagaaaaaaaggaatatgaagtttttaattttccaggaccaggtgttgcattatcaatgtataatttagatcagtcaattagagactttgctagagcttgtatgaattatggattaaatagaaaatggcctgtttatctttctactaaaaataccattcttaaaaaatatgatgggaggtttaaagatctttttcaagaagtatttgaagctgaatttaaagaaaaatttaaagaaagaaatattacttacgaacatcgactaatagatgacatggttgcatgtgcaatgaaatggaatggtaattatatatgggcgtgtaagaattatgatggagatgttcaatcagatacggtagcccaagggtttggatctctgggtttaatgacaagcgtactaatgacaccggatggtaaaactattgaggctgaagcggcacacgggaccgttactagacattataggatgcaccaacaaggtaaagaaacgtcaactaatccgattgcttcaatttttgcatgggcaagaggattatatcacagggcaaaattagatgataatcaggaccttaaaaaatttgtaaaatctttggaaaaaacatgtattcaagtggttgagaatggatctatgactaaagatcttgcaatattaattggcccagatgcaaagtttttaacaaccaaccaatttttagatgtaatagataaaaatttgaaagaaaaattaaatcagactttttaat

SEQ ID NO: 207896 - DNA, 400 bp, Unknown
  Bacterial polypeptide expressing nucleotide sequence isolated from the Sargasso Sea
tcagcaggttctaactagaccaagggaatatggcgtacttgctaccatgaacctcaatggcgactatatctcagatgcgctagcggcacaagtcggaggaattggaatcgcacccggtgccaatatcaactacgatacaggaatcgcaatcttcgaggcaacccatggaaccgcacccaagtacacaggccaggacaaggtcaatccaggaagcctaatactttcggcagagatgatgcttaggcacatggggtggaccgaagcggcggatctcattgtcaaggggatggagggggcaatttcctcaaagacggtaacctacgacttcgagagactgatggacgacgcaactctcctttcatgttcagatttcggaaacgcagtagtctcccacatgtag

SEQ ID NO: 207897 - DNA, 785 bp, Unknown
  Bacterial polypeptide expressing nucleotide sequence isolated from the Sargasso Sea
tatgagtaaaattaaggtaaaaaatccagttgttgagttaaatggggatgaaatgaccagggttatatgggactttattaaaaataaattgatcctctcatatcttgacctaggaattgagtattatgatcttggaataaaaaatcgagataaaacaaacgatcaagtaactatagactgtgcaaatgcaattaaaaaaaatggcgttggtattaaatgtgcaacaatcactcctgatgaattaagagtaaaagaatttaatttaaaaaaaatgtggagatctccaaatggcaccattagaaatattttaggaggaacagtttttagagaaccaattttatgtaaaaatattccgaaattagttccaagttggacaaaccctatctgcataggaagacatgcctttggagatcaatatagagcaacagattttaaagttcctggtaaaggaaagcttgaaataaagtggacttcagaagatggatctcaaaaaaaagaatatgaagtatttaacttcccaggaccaggtgtggctctttcaatgtataatctggatcagtctataaaagattttgctagagcttgcatgaattatggacttaatagaaaatggccagtttatctttctacaaaaaatacaattttgaaaaaatatgatggtagatttaaagatctgtttcaagaagtttatgaacacgaatttaaaaaaaagtttgaagaaagaaaaattacttacgaacatagacttattgatgatatggtagcatgtgcaatgaaatggaatg

SEQ ID NO: 207898 - DNA, 915 bp, Unknown
  Bacterial polypeptide expressing nucleotide sequence isolated from the Sargasso Sea
gaatttattaagaataaactgatccttccttaccttgatttggagatagaatactacgatttaggcatgaaaagtagagatgatactgatgatcaaatcacaattgactctgcaaatgctattaaaaaaattggtgttggaataaaatgtgcaactattacacctgacgaagcaagagtaaaagaattcaaattaaaaaaaatgtggagatcaccaaacggaactattagaaacataataggtggaactgtttttagagagccaataatttgttcgaatattccaaaacttgtgccatcatggactgaccctgtaatcataggaagacatgcttttggagatcagtatagagcaacagattttaaagttcctggtaaaggtaagatggaagttaaatggacatctgaagatggtattaaagaaattaaatatgaggtatttaattttactggacctggagtggcgttgtcaatgtacaacttagatagatcaattgaagactttgcaagatcttgctttagttatggactcattaaaaaatggccagtttatttatcaactaaaaatactattttaaaaaaatacgatggaagatttaaagacatatttcaagaggtttttgacaaagagtttaagaataagtttgaagaaaataaaatcacttatgagcacagattaatagacgatatggttgcatgcgcaatgaaatggagtggaaaatatatttgggcatgtaaaaattatgacggtgatgtacaatcagatacaatggctcaaggttatggatctttagggcttatgaccagtacattattgacacctgatggaaaagtgatggaagctgaagctgctcatggaactgtaacaagacattatagaatgcatcaacaagggaaaagaaacatcaacaaatcc

SEQ ID NO: 207899 - DNA, 304 bp, Unknown
  Bacterial polypeptide expressing nucleotide sequence isolated from the Sargasso Sea
tgaagctgctcatgggaccgttacaagacactatataatgcaccaacaaggaaaagaaacatcaactaatcctatcgcctcaatttttgcttggacgagaggcctagcacatcgaggtaaattagatggaaatgacgagcttattaaatttgcaaatactattgaacaagtttgcattggatgtgttgaaagcggctcaatgaccaaagatctagctatattaattggaccatcaagcaagtatttaacgacaaatcaatttctagatgaaattgatgaaaatttgaaaaagaaactaaattaa

SEQ ID NO: 207900 - DNA, 733 bp, Unknown
  Bacterial polypeptide expressing nucleotide sequence isolated from the Sargasso Sea
aatgggaaaaatcaaagtagaaaatccgattgtagaaatagacggcgatgaaatgacccggataatatgggattatataaaacaaaaattaattgtcccttatttagatgtagaccttaaatattttgacttaggaattgaagaaagagatcggacaaacgaccaaataacaattgacgctgcggaggcaataaaagaaataggggtcggtgttaaatgtgccacaattactccagacgaagcgcgagtagatgaatttaaattaaaatcgatgtggagatctcctaatggcacaatacggaatatccttggaggagtagtattcagagctccaattatttgcaaaaatgtacctagacttgtcccaggctggaacaaaccaatagttataggaagacatgcatacgctgaccaatatagggcgaccgattttttatttcctggaaagggaaagctgtcattaaaatttgtaggagatgatggaaagataatagaaaaagaggtttttgaagccccttctgctggaattaccatggcaatgtataatctagaccagtctattatagactttgcaagagcgtctctcaattatggtctgagaatgaattggccagtttacttatcaacaaaaaatacaattcttaaagcctacgatggaagatttaaagatctatttcaaaaagtttatgaggaagagtttgaagagcagtttaaaaaatcaaatattacttat

SEQ ID NO: 207901 - DNA, 631 bp, Unknown
  Bacterial polypeptide expressing nucleotide sequence isolated from the Sargasso Sea
tatgaattatggtttaggtagaaaatggcctgtgtatttatcaactaaaaatactattttaaaagcctatgatggtaggtttaaggatttattccaagatgtttttgaaaaagaatttaaaaataaatttgaaaaagcctcaattacgtatgaacatagattgattgacgatatggttgcgtgcgctatgaaatggaacggaggttatgtttgggcttgtaaaaactatgacggcgatgtccaatccgataccgtggctcaaggatttggttctttaggcttaatgacaagtgtattgatgacaccagatggaaaaacggtagagtcagaggccgctcatggcactgtaacaagacactatagagtgcatcaacaaggtaaagagacttccactaatcctatagcatcaatatttgcgtggacaagaggtttaacccatagaggaaaactagataataataccgaacttgtaaaatttgcttcaacattagaaaaagtttgtatcgaaacggtcgagagtggatctatgacaaaagatttagcaattttgattgaacaatcagctaagtatttaactacaaatcagtttctagaagcgatagatggcaatttgaaaaaaaaacttaattaa

SEQ ID NO: 207902 - DNA, 658 bp, Unknown
  Bacterial polypeptide expressing nucleotide sequence isolated from the Sargasso Sea
tatggcaaaaattaaagtcaaaaacccagtagttgagctagatggagacgaaatgactcgaattatatggtcatttattaaagacaaactaattaaaccttacttggaaattgatcttaaatactacgatctgggtatggaaaatagagataaaactaacgatcagataacaatagattgtgctaaagcaatccaaaaatatggagccggggttaagtgtgcaactataacaccagatgaagctcgggtaaaagaatttaaattaaagaaaatgtggagatctccaaatggaacaattaggaacatagttggtggaacaatttttagagagccgataatttgtaaaaatgttcctaggctggttccacattggactgaaagtgtaatagttggtaggcatgcctttggagatcaatataaagctactgatttcaaagttcctgggaaaggtaaaatgactgttaaatgggaatctgaaaatggaaaggataaaatagaacatgaggttttcaattttgacggccccggtatagctctttcaatgtataatttggatagttctattaaagactttgcaagagcttgtatgaattatggtttagtgagaaaatggcctgtctacttttcttcaaaaaatacaatctttaaaagcttatga

SEQ ID NO: 207903 - DNA, 454 bp, Unknown
  Bacterial polypeptide expressing nucleotide sequence isolated from the Sargasso Sea
tatggtggcctcagctttaaaatgggaaggtaattttatttgggcttgtaaaaattatgatggagatgttcaatcagattctgttgctcaaggatttggatcgttaggtttaatgacaagtgtgttaatgaccccagatggtaaaactttagaagctgaagcagcacatggaactgttacaagacattatagaaatcatcagaaaggtttagaaacttcaactaatcctattgcatcaatctttgcttggacaagaggtttaagttttagaggagaatttgatggtaataatgaattaataaattttgctaaaaaattagaagaaacgtgtatcaaaactgtagaaagtggtgaaatgacaaaagatctagcaatattaattaacaaagatcagaaatggttaaacactcaagattttttaagcgcaataaaaaataattttcaaattaactaa

SEQ ID NO: 207904 - DNA, 709 bp, Unknown
  Bacterial polypeptide expressing nucleotide sequence isolated from the Sargasso Sea
gacaagaataatatggtcctttattaaagaaaaattaattcttccatatttagatattgaactaaaatattatgatcttggtatggattctagagataaaactaatgatcaaataacaattgattctgcagaagctatcaaaaaatataacgttggggttaaatgtgcaactataactcctgatgaggatagggtagaagaatttaatttaaaaaaaatgtggaagtctcctaatggaacaatcagaaatatattgggaggtacagtttttagagagccaattatatgtaaaaatgttcccagattagttccaggctggacagaccctatcgtaataggaagacatgcttttggtgaccaatatagggcaactgattttaaagtgcctggaaaagggaaattaacaattaagtttgaaccggaagataactcagaaataattgaagaaatagtttataactttccaggtagtggaataggattggcaatgtacaatgttgacgattcaataagaggatttgcaagagcatgtatgaactatggcctccaaagaaaatggccagtatacctctctactaaaaatacaattttaaaagcatatgatggacgattcaaagaattatttgcagaagtctatgaaaatgaattcaaagataaatttttagaaaacaaaatagattatgaacataggcttattgatgacatggtt

SEQ ID NO: 207905 - DNA, 592 bp, Unknown
  Bacterial polypeptide expressing nucleotide sequence isolated from the Sargasso Sea
acaaaaaatacaatttttgaaagtttatgacggtagatttaaagatttatttgaaaaaatttttaaaagtgaattttcagctaaatttaaagaaaaaaatataatttatgagcatagattaatagatgacatggttgctagtgctcttaaatgggaaggaaattttatttgggcttgtaaaaattatgatggcgatgttcaatctgactcagtcgctcaaggatatggctcacttggtttaatgacaagcgtactaatgacaccagatggaaaaacaattgaagcagaagctgcacatggtaccgttactagacattatagaaatcatcaaataggtttagaaacatcaacaaatccaattgcatcaatatttgcttggtctagagggcttcattttagaggaaaatttgatgataataaaaatttaattaatttttctaaaaaactagaagaaacttgtattgaaacagtggaatctgggaagatgactaaagatttagcaattttaataagctctgatcaaaaatggttaaatactcaagatttccttgatactttaaaagagaatttggaaacaaaattaaaagtttag

SEQ ID NO: 207906 - DNA, 884 bp, Unknown
  Bacterial polypeptide expressing nucleotide sequence isolated from the Sargasso Sea
atactacgatttgggtatggaaaatagagacaaaacaggcgatcaagtaacagtagattgtgcaaaagctatccaaaaatatggggcaggagttaagtgtgcaactattactccagatgaagctcgtgtaaaagaatttaaattaaagaagatgtggagatctccaaatggaacaatcagaaatatagttggtggaacaatttttagagaaccaataatttgtaaaaatgttccaagattagttcctcattggactgatagcgttatagtcggaaggcatgcttttggagatcaatataaggctacagattttaaggttcctggaaaaggtaaaatgactgtaaaatgggagtcagaaaatggaaatgataaaattgaacatgaagttttcaattttgatggtccaggtatagctctctctatgtataatttagatagttcaattaaagattttgctagagcgtgtatgaattatggtctagtaagaaaatggccagtttacttttcatcaaaaaatacaattttaaaagcttatgatggaagatttaaagatatttttgaagaggttttccaaaaggagtttaaaattaaatttgatgaatcaggtataacttatgaacatagattaattgatgacatggttgcttgtgcgatgaaatggagtggaaaatatatttgggcttgtaaaaactatgatggagatgtccagtcagatactgtggcccaaggatatggttcactgggtttaatgacaagtgttctgagaacgccagatggaaaaattgctgaagctgaagctgctcacggaactgtaacgaggcattatagacaacaccaagctggtaaagaaacctctacaaatcctatagcttctatctttgctt

SEQ ID NO: 207907 - DNA, 496 bp, Unknown
  Bacterial polypeptide expressing nucleotide sequence isolated from the Sargasso Sea
aatgagtaaaatcaaggtaaataacccagttgtagagttagatggtgatgaaatgactcgaattatttgggagtttattaaaaataaattaatccttccatatattgatctaggtatcgagtattacgatctgggaatgaaaagcagagataatactgatgaccagatcactatagattcagcaaatgctatcaaaaaaattggtgttggaattaaatgtgcaaccattacacctgatgaggcaagagttgaagaatttaatttaaaaaaaatgtggagatctccaaatggaacaataagaaacattattggaggaacggtattcagagaaccaattatttgtaaaaatattccaaagttggttccttcatggacggatcctgtgattattggaagacatgcttttggtgatcaatatagagctacagattttaaagtacctggtaaaggaaaaatggaagttaagtggacatcagaagatggaaaagaagaataa

SEQ ID NO: 207908 - DNA, 844 bp, Unknown
  Bacterial polypeptide expressing nucleotide sequence isolated from the Sargasso Sea
ctgattttatatgtttgcttgaggcctatcaaatatttcaaaggcattcaaactcctacaaaaaatccacaagatgtagatatcactttatttagagaaaacaccgaagatgtctatgcaggaaaagaactagaaaattcctcagaagatgttgaaaaacttaataattttttaaaacaggaatttggatgggatataagaatagacagcgggattggaataaaaccaatatctcagactgcttctgaaaggctgataagagcagcactcaattatgcagtggaaaatgataaaaaaaatgttgctttagtgcataaaggaaacattatgaagtttactgaaggtgcatttagaaaatggggttacgaccttgtaaagtcagagttttcagatgttgcagtttcatgggaggattgtggtggtgatcctggagataaaatattagtacaagatgtaattgcagatgcatttttacagcaaatcttaattaaaccacaaatgtttgatgtaattgctacaacgaatctcaatggagattatgcttctgacgccttagcagctcaaatagggggcattggtatcagtcctggaggaaacataaactatgaaaatggaaaagcagtttttgaagcaacacatggtactgctcctaaatatgctggtcaagataaaacaaatccaggatcattaattttgtcaggagtaatgatgtttcgatatatgggttggaatagtgctgctgatctaattgttaaatcaatggagaaaacaattctcgaaggaaaagtaacttatgatcttgctcgaggaagaagtgtcaaaaaaattctttcttcatcagaat

SEQ ID NO: 207909 - DNA, 638 bp, Unknown
  Bacterial polypeptide expressing nucleotide sequence isolated from the Sargasso Sea
tatggcaaaaataaaagtaaaaaatccagtagttgagttagatggtgacgaaatgactagaattatatggtcatttataaaagacaagcttattaagccttatcttgagatagatcttaaatactatgatcttggtatggagagtcgagataaaactgatgaccaaatcactgtagatgcggcaaatgcaatcaaacaacatggtgttggtgtaaaatgtgcaactatcacacccgacgaagcacgcgtaaaagagtttaaacttaaaaaaatgtggagatcgccaaatggtactattagaaatatattaggtggtacagtttttagagagccaattatttgtaaaaatgtccccaaactagttccaggttggacgaaaccaatagtgataggaagacatgcttttggtgatcagtaccgagccactgattttcttataccaggtgagggaaatttggaggtcaaatggacttcaaaagatggaaaagataagaaagagtttaaagtttttgattttccaggatccggaacagctcttacaatgtacaatttagatgactctataaaaaatttcgcaagagcatgtatgaactacggtctgggaagaaaatggccagtttatttgtctactaaaaaca

SEQ ID NO: 207910 - DNA, 373 bp, Unknown
  Bacterial polypeptide expressing nucleotide sequence isolated from the Sargasso Sea
cagggttatggttctcttggcttaatgacaagtgtgcttagaacgccggatggtaaaatagcagaagcagaggcagcccatggtactgttactagacattatagacaacatcaacaaggtaaagaaacttctacaaatccaatagcatctatttttgcatggacaagaggtttggctcatagaggtcaattagatggtaataatgaactggtaaaattttcaaataccttagaaaaagtttgtgtagagacagttgaaagtgggtcaatgacaaaagatcttgctattttaattggtaaaagtcaaaaataccttactacaaatcaattcttagaggcaatagactctaatcttaaaaaaaaacttaactaat

SEQ ID NO: 207911 - DNA, 727 bp, Unknown
  Bacterial polypeptide expressing nucleotide sequence isolated from the Sargasso Sea
tatggcaaaaataaaagtaaaaaatccagtagttgagcttgatggcgatgaaatgacccgtataatttggtcgtttattaaagataagttaataaagccttatttagacatagaacttaaatacttcgatcttggcattcagaatagggataaaactaatgaccaggtaacaatagattgtgccaaagctattcaaaagtatggagctggggttaagtgtgcaacaatcactcctgatgaggctcgtgttaaagaatttaaactaaaaaaaatgtggagatcacctaatggcacaataagaaatatagttggtggaacaatttttagagagccaataatttgtaaaaatgtaccaagattagttcctcattggactgaaagtgtaatagttggaagacatgcctttggagatcaatataaagccactgattttaaagtaccaggaaaaggtaaaatgacaatcaaatggcaatctgaagatggaaaagaaaaaattgagcatgaggtatttaaatttaatgactcaggtatagctctctcaatgtataatttagatagttcaataaaagattttgcaagagcatgtttaaattatggtttggatagaaaatggccagtttatttttcatctaaaaatactattttaaaaatatacgatggtaggtttaaagatatttttgaggatatttatcaaaaagaatttaagaaaaaatttgatgaagcagga

SEQ ID NO: 207912 - DNA, 889 bp, Unknown
  Bacterial polypeptide expressing nucleotide sequence isolated from the Sargasso Sea
ctttttgcatgcgtaagacctgttagatggtttgatggtaccccatctccagttaaagatccaagtactactgatatggtgatttttagagaaaatactgaagatatttatgctggaattgaatttgagaacggcacaaaagaaaatcaaaaaatcaaatctttattaaaagaaaattttgaacaaagatttaataaaataagatttccagaatcaagtggaataggtttaaaaccaatttcagaagaaggaacttcaaggttagttagatctgctattgattatgctattaaaaataaaagagattcagtcacctttgttcataagggaaatattatgaaatatactgagggtgcttttagagactgggggtataatatagcaaaagaagaatttggagcgaaagatttagatggtggtccatggcaagaaataaatattgaaaatagaaaaataattattaaggatgttattgctgatgcttttttacaacaaattctattaaggccaaaagaatattctgtagttgcaacaatgaatctaaatggagattatatttcagatgctctagctgcgatagttggtggtattggaatagctccaggagcaaatataaattatgaaactggtcacgctatttttgaagctacacatggaactgcgccaaagtatgcagggaaaaataaggtaaacccaggttcggttattttatctggggctatgatgttagagcatttaggatgggtcgaagctaaagatcttattcataagggtataacaaaatctatatctagcaaaaaagttacttatgactttgaaagattaatggatgaagccactttactatcatgttctgaatttggagaagaaattataaaaaacatgtaat

SEQ ID NO: 207913 - DNA, 793 bp, Unknown
  Bacterial polypeptide expressing nucleotide sequence isolated from the Sargasso Sea
gaccgatttcaagtttcctgggaaaggtaaactagaaatcaaatggacatctgaagatggtaaagaaaaaaaagaatttgaagtatttgattttcctggaccgggtattgcattatcaatgtataatctagacagatctataagagattttgcacgagcttgtatgaactatggattaaatagaagatggccagtttatctatctacaaaaaatacaattttaaaaaaatatgatggaagatttaaagatttatttcaagaaatttatgaaaaagaatttaaagaaaaattcaaagaaagaaaaataacttatgaacatagattaatagatgacatggttgcatgcgcaatgaaatggaatggaaattatatttgggcatgtaaaaattatgatggcgatgttcaatctgatactgttgcacaaggatttggttctcttggacttatgacaagtgtgctaatgacgccagatggaaaaactatagaatctgaggctgcccatggtactgtcacaagacattacaggttacatcaagagggaaaagaaacttcaactaaccctattgcttctatctttgcgtgggctagaggattatatcacagaggaaaaatagatggaaatgaagacctaaaaaaatttgttaaaacattagaaaaagtttgtgtagaaactgttgaatctggttcaatgaccaaggatttggcaattttagttggaccatctactaaatatttaacaacaactcagtttttaaatgttttagacattaaccttaagaaaaaactaaattag

SEQ ID NO: 207914 - DNA, 2026 bp, Unknown
  Bacterial polypeptide expressing nucleotide sequence isolated from the Sargasso Sea
atgtccaccccttcgaagatcatctacaccttcaccgacgaagctccggccctcgctacctattcgcttctgccaattgtagaagcctttgccgcctcggctgacatctccgttgaaacccgcgacatctctcttgctggacggatcctggcaagctttgccgaccgcctggacgccgacaagcgcatcgatgacgacctggccaaactggccgagctgactctgcagccggacgccaacatcatcaaactgccgaacatcagcgcctccgtacctcagctcaaggcagccatcgccgagctgcaggctcagggctataacattccggacttcccggaagatccgcagagcgacgaagacaaagaagttcgcgcccgctacgccaaaatcctgggcagcgccgtgaacccggttctgcgcgaaggcaactccgaccgccgcgccccggccgcggtcaaggcctatgcacgcaagcacccgcacagcatgggcaagtggagcatggcttcgcagtcccacgccgactacatgcgcggcggcgacttcttctccagcgagcagtcgatcaccatggccaaggctggtgacgtgcgcatcgagttcgtcggcaaggacggcaaggtcgaggtcaagaaacaactcgccctgcaggaaggcgaagtgttcgacagcatgttcatgagctgccgcaagctgcgtgacttcttcgagaagaccctgcaggactgcaaggaaaccggcgtgatgtggtccctgcacgtcaaggcgaccatgatgaaggtctcccacccgatcgtcttcggccacgccgtcagcgtttattacaaagacgtgttcgacaagtacggcgaactgttcaaggagctgggcgtcaacccgaacaacggtatcagcagcgtctacgacaagatcaagtcgctaccggcctcgcagcaggaagaaatcctccacgacatccacgaggtttatgcccatcgcccggaaatggccatggtcgactcggtcaagggcattaccaacctgcacattccgagcgacgtgatcgtcgacgcctcgatgccggcaatgatccgcaactccggtcagatgtggggcaaggacggcaagcagaaagacaccaaggccgtcatgcctgagagcacctacgctcgcatctatcaggaaatgatcaacttctgcaaaaccaatggtgcgttcgacccgaccaccatgggcaccgtgccgaacgtcggcctgatggcgcagaaggccgaagaatacggctcccacgacaagaccttcgaaatgaccgccgacggcaccatgcgcgtcgtggctgccgacggcaccgtgctgatgcagcaccaggtcgaagccggcgacatctggcgcgcctgccagaccaaggacgcgccgattcgcgactgggtcaagctggcagttacccgcgctcgtcaatccaacacccccgccatcttctggctggacccggagcgcgcccacgaccgcgagctgcagaagaaggtcgagctgtacctcaaggattacgacctgaccggcctggacatccgcatgatgggctacaacgaagccatccgcgtatccatggagcgcatgatccgcggccaggacaccatctcggtgaccggcaacgtactgcgcgactacctgaccgacctgttcccgatcatggaactgggcacctcggccaagatgctgtccattgttccgctgatggctggcggcggcatgtacgaaaccggcgccggcggctcggcacccaagcacgtacagcaactggtcgaagagaactacctgcgctgggattccctgggcgagttcctggccctggccgtttccctggaagaaaccggcatcaagaccaacaacgccaaggccaaggtactgggcaagaccctggatcaggccaccggcaagctgctggacaacaacaagtccccggcgcgcaaggtcggcgagatcgacaaccgtggcagccacttctacctggcactgtactgggcacaagccctggccgagcagaacg

SEQ ID NO: 207915 - DNA, 1156 bp, Unknown
  Bacterial polypeptide expressing nucleotide sequence isolated from the Sargasso Sea
tattatatgggagttcatcaaaaataaattaatactcccatatttagatcttggtatcgaatattacgatttaggtatgaaaagcagagataatactgacgatcagattaccatcgactctgctaatgcaatcaaaaaaattggtgttggaataaagtgtgcaacgattacccctgatgaagcaagagtagaagaatttgatttaaaaaatatgtggagatctccaaatggaaccataagaaatataattggaggaacagtatttagagaaccaattatttgtaaaaatattccaaaacttgttccctcttggacagatccagtaattattgggagacatgcatttggtgaccaatatagagcaactgattttaaagttcctgggaaaggaaaaatggaagtgaagtggacatcagaagatggaaaagatgaaattaaatatgaagtatttaattttacaggtcctggtgtggctttatcaatgtacaatttagacaagtctattgaagactttgcaagatcttgtttcagttatgggttgattaaaaaatggcctgtttatatgtctacgaaaaatacaattctaaagcaatacgatggaagatttaaagatatttttcaagaaatttttgacaaagaatacaagagtgaatttgaaaaaaataatttgacttacgaacacaggttaattgatgacatggttgcatgtgcaatgaagtggagtggaaaatatatttgggcttgtaaaaattatgatggagatgtgcaatcagatactatggctcaaggttatggatctttgggtttaatgacaagtacgttgttaactccagatggaaaagtaatggaagcagaagctgcacacggaacagtaactagacattacagaatgcatcaacaaggaaaagaaacttcaactaaccctatcgcatcaatttttgcttggacaagaggattggctcacagaggtaaattagatagcaatgaagaacttattaaatttgcacaaattttagaaaaagtttgtattgaatgtgtggaaagtggatcaatgacaaaagatttagcaattcttgtcggtccaaatagtaaattcttaactactaatcaatttttagatgaaattgatggtaatttaaaaaggaaattaaactaa

SEQ ID NO: 207916 - DNA, 522 bp, Unknown
  Bacterial polypeptide expressing nucleotide sequence isolated from the Sargasso Sea
aaaaagaaaatataacatacgaacacaggctaattgatgatatggttgcagctgcaatcaaatggaagggtggatttgtatgggcatgtaagaactatgatggagatgttcaatctgatgtagtagctcaaggatttggttcactcggacttatgacatctactttagtaacaccagatggaaaaactctagaagctgaagcagcccacggaactgtaacaagacattttagaagacatcaaaaaggtgaagaaacttctactaatccaattgcatcaatttttgcttggacaaggggtttgatgcatagaggaaaacttgacaataataatgaattgattaaattctgtaaagctttagaagaagtttgtatagaaactgtagaagacggaaaaatgacaaaggatttagctttacttgtatttagagatgatcttgtagactcaaattttctaactacacagcagtttttagccgaacttaagaagaatctagacttaaaattaaattcaaaagagtaat

SEQ ID NO: 207917 - DNA, 1216 bp, Unknown
  Bacterial polypeptide expressing nucleotide sequence isolated from the Sargasso Sea
atgcctaaaattaaagtaaaaaatccagttgttgagcttgatggcgatgaaatgacccgaattatttggtcttttataaaagataaattgattaaaccttacttagatattgatctgaaatactacgaccttggaatggaaaatagagataaaactaatgatcaagtaacaattgattgtgctaaggcaattcaaaaatatggtgccggcgtaaagtgtgcaacgattacacctgatgaagctcgtgtaaaggaatttaatctaaaaaaaatgtggagatcccctaatggcacaataagaaatattgtaggtggaacaatttttagagaaccaataatttgtaaaaatgttccaagattagttcctcattggacagaaagtgtcatagtaggaagacatgcttttggagatcaatataaagctacagattttaaagttcctggaaaaggtaaaatgacaatcaagtgggaatctgcagatggaaaagataaaattgaacatgaggtttttaaatttaatgattcaggaatagcgctatcaatgtataacttagatagttcaattaaagattttgcaagagcttgtttaaattatggtttagttaggaagtggcctgtttatttttcatctaaaaatactattttaaaagtttatgacggaaggtttaaagatatttttgaagacatctatgaaaaagaatttaagaaaaaatttaatgaagcaggtattacctatgaacataggttaattgatgacatggttgcatgcgcaatgaaatggagtggtaagtatatttgggcttgtaaaaattatgatggagatgttcaatctgatacagttgctcaagggtacggttctctaggtttgatgacaagtgtgctaagaactccagatggtaaagtagcagaggcagaggcagcccatggaactgttacaagacattatagacagcaccaacaagggaaggaaacgtctacaaatccaattgcatcaatttttgcatggacaagaggtttagctcatagaggtcaattggatggaaatgacgaattaattaaattttcaaatactttagaaaaagtttgcatagagacagttgagagtggatcaatgacaaaagatttggctattttaattagcaaaagtcaaaagtatctcacgacaaatcaattcctagaagaaatagactctaatctaaaaaaaaaacttaactaat

SEQ ID NO: 207918 - DNA, 1216 bp, Unknown
  Bacterial polypeptide expressing nucleotide sequence isolated from the Sargasso Sea
aatgcctaaaattaaagtaaaaaatccagttgttgagcttgatggcgatgaaatgacccggattatctggtcatttataaaagacaaattaataaaaccttacttggagatcgatctcaaatattatgatcttggaatggaaaatagagacaaaactaatgatcaggtaacagttgattgcgctaaagcgattcaaaaatatggtgttggagttaaatgtgcgacgataactccagatgaagcgcgagtaaaagaattcaatttaaaaaaaatgtggaggtcgccaaatggtacaataagaaatattgtaggcggaacaatttttagagaaccaataatttgcaaaaatgttccaagattggtcccacattggactgaaagtgtcatagttggaagacatgcttttggagatcaatatagagctacagattttaaagttcctggaaaaggcaaaatgacaattaaatgggagtctgaggatggaaaaaataaaattgaacatgaggtttttaagtttaatgactctggaatagcgctttcaatgtacaatttagatagttcaattaaggattttgcaagagcgtgtttaaattatggtttagtaagaaaatggccagtttatttttcatcaaaaaatactattttaaaaatttatgatggaaggttcaaagatatatttgaggacatctacgaaaaagaatttaagcaaaagtttaatcaagtaggaataacttacgaacatagattaattgatgatatggttgcttgcgcaatgaaatggagtggaaaatatatttgggcttgtaaaaattatgatggtgacgtgcagtctgatactgtagctcagggttatggttctcttggattaatgacaagtgtgcttagaacaccagatggaaaaatagcagaagctgaggcagcccatggtactgttactagacattatagacaacatcaacaaggcaaagaaacgtctacaaatccaattgcatctatttttgcatggacaagaggtttggctcatagaggtcaattagatggtaataatgaattagtaaaattttcaaataccttagaaaaagtttgtatcgagacagttgaaagtggatcaatgacaaaagatctggctattttaattggcaaaagtcagaagtatcttactacaaatcaattcttagaagcaatagactctaatcttaaaaaaaaacttaactaa

SEQ ID NO: 207919 - DNA, 583 bp, Unknown
  Bacterial polypeptide expressing nucleotide sequence isolated from the Sargasso Sea
atggcatttgagcacattcaagaaccaaaaagtggttcaaaaatatctatagactcttcagggaaactaattgttccagacaacccaataattcctttcatcgaaggagatgggataggttctgacatcactcctgcaatgattagagttgtagacagtgcagtagagaaatcttatggcggaaaaaagaaaattgaatggatggaaatctactgcggagagaaatcaaccgttgtatacggtgaagataactggcttcctccagaaactttaagggcacttgaaatctatcttgtaggtattaaaggacccctgactacacctgtaggtggaggtatcagatctttgaatgtagctttaaggcaagaattagacctctatgtgtgccaaagaccagtgagatattttaatggagtgcccagcccagttatttctcctgaaaaaaccgatatggtaatttttagagaaaactcagaagatatttatgctggtgttgaatgggaggccggatcagaaggcgctgagaagcttataaaattcttaactgaagaaatgggtgtaaacaagattcgttacagaagag

SEQ ID NO: 207920 - DNA, 721 bp, Unknown
  Bacterial polypeptide expressing nucleotide sequence isolated from the Sargasso Sea
atgattttcaggaggatggagttgcaatggggaatgtataacattgattcttcaatttatggatttgcccgttcgtgcatgaatagagcccttgataaaaaatggccactttatttgtcaacaaaaaatacaatattaaaagcttatgatggcaggttcaaagatatatttcaagaagtttttgaaaatgaatttaaagaactgtttagaaatgaaaaaataacctacgaacacagactaattgatgatatggttgctgcagcaatgaaatgggaaggtggtttcgtctgggcatgcaaaaattatgacggagatgtacaatcagatacggtagctcagggattcggatccttaggtttaatgacgtcaactcttgttactcctgatggaaagacaatggaagctgaggcagctcatggaactgttacaagacattatagaaaatatcttaaaggagaatccacatcaacaaatccaattgcatctatttttgcatggacaaggggtctagcatttagaggaaaattagacagtaatcatgatttaataaatttttgcgctctattagaacgtgtttgtattgagactgtagaaagtgggaagatgacaaaagatctagcaatgttagtttttaatcaagaccttactaaagaaaattatcaaacaacagaagaatttctgaatgaaattaaattaaacttagaaaaaaaattatcctaat

SEQ ID NO: 207921 - DNA, 1216 bp, Unknown
  Bacterial polypeptide expressing nucleotide sequence isolated from the Sargasso Sea
tatgagcaaaattaaggtaaaaaatccaatagtagagctagatggtgacgaaatgaccagaataatctggaaatttataaaagaaaaattaatttttccatatttagatctaaaaattgaatattacgacttaggcatgaagagtcgagatgaaactgaagatcaaataactatcaattgtgctaatgcaattaaaaaaaatggtgttggaattaaatgtgcaacaataactcctgatgaaggaagggtaaaagaattcaatttaaaaaaaatgtggagatctcctaatggcacaataagaaatatattgggaggaacggtttttagagaacctataatgtgtaaaaatattccaaaattagttcctagctggactaatccaatttgcataggaaggcatgcttttggtgatcagtatagagcaacagattttaaagttccaggtaaaggaaaattagaaatgaaatggacatcagaagatggaaaagaaaaaaaagaatttgaagtttttaactttcccggaccaggagttgctttatcaatgtacaatttggatcagtctataaaagattttgccagagcatgcatgaactatggtctaaatagaaaatggcctgtttatctatctacaaaaaatactattttaaaaaaatacgatggtagatttaaagacttattccaagaaatttatgagaaggaatttaagaaaaaatttgaagaaagaaaaataacttatgaacatagactaattgatgacatggttgcatgcgcaatgaaatggaatggaaactatatttgggcatgtaaaaactacgatggtgatgttcagtcggatactgttgcacaaggatttgggtcgctaggtctgatgacaagcgtattaatgactccagatggtaaaactttagaagctgaagctgcacatggtacggtaaccagacattatagattacaccaacaaggtaaagaaacatcaaccaacccaattgcttctatatttgcctgggcaaagggactttatcacagaggtaagttagatgggaatgatgaattaaaaaaatttgtaaaaaatttagaaagagtctgtatagaaacagtcgaaagtggatctatgacgaaagacttagctattttaattggcccatctacaaaatacctaacaacaaatcagttcttagataaaatagataagaatttaaagaaaaagctaaattaa

SEQ ID NO: 207922 - DNA, 1114 bp, Unknown
  Bacterial polypeptide expressing nucleotide sequence isolated from the Sargasso Sea
atggcccagttcgagaagctcaccgcccccagccagggcacaccgatccgcttcgagaacggccagcccgtggtggccgacaacccgatcattcccttcatccgcggcgatggcaccggcgtggacatctggccggcgacacagaaggtgctggatgcggccttggccaaggcctatggcggcagcaagagcatcgaatggttcaaggtctacgccggcgatgaagcctgcgacctctacggcacctaccagtacctgcccgaggacaccctcgaagcgatccgcacctacggcgtggccatcaagggccccctcactaccccggtggggggcggcatccgttcgctgaacgtggccctgcgtcagatctttgatctgtattcctgtgtgcgtccctgccgctactacgaaggaacccccagccctcacaagcgtccccaggatctggacgtgatcgtctaccgggagaacaccgaagacatttatatgggcgtggaatgggaggccgatgacgccgtcggccaggagctgcgcaagcacctcaacgaggtggtgattcccgccaacgggaagctgggcaagcgtcagatccccgagggttcgggcattggcatcaagccggtgagcaaggccggcagccagcgccacatccgcaaggcgatccagcacgccctgcgtcttcagggcgacaagcgccacgtgaccctggtgcacaaaggcaacatcatgaagttcacggaaggggccttccgtgactggggctatgaactggccaccaccgaattccgcgacgtgtgcatcaccgagcgggaaagctggatcctcggcaacctcgagaaggaccccaacctgagcgtgcaggccaacgcccgcatgatcgagcccggctacgacagcctcaccccggagaagaaagccgacatcgatgccgaagtgaaggcggtcatcgacgccatcggcagcagccacggaggcggcaagtggaaggagatggtgctggtggaagaccgcatcgccgacagcattttccagcagatccagacccgccctcaggagtattcgatcctcgcgacgttgaacctcaacggcgattacatctccgacgccgccgccg

SEQ ID NO: 207923 - DNA, 1192 bp, Unknown
  Bacterial polypeptide expressing nucleotide sequence isolated from the Sargasso Sea
atgagttataaaaaaataaaagttccaaacaaaggtaaaaaaatttcttatgttgatggtaagctcaacgtaccatctaatcccattattccatttattgaaggtgatggtattggcgttgatattactccacccatgatcaaagttgtagatgaagctgtaaaaattgcttactctggaaaaagaaaaatcgaatggatggaagtttattgtggtgaaaaagcaacgaatgtttattcaaaaaatgattggctaccagatgaaacaattgaagcacttaaagaatttatagtaagtattaaaggcccgttaacaacacctgtaggaggcgggataagatcattaaatgtttctctcagacaaatgcttgatttgtatgtttgtttaagaccaataaggtattttaatggagttccttcgcctgttaaaaaaccacaaaatgttgatatgataatttttagagaaaattctgaagatatctattgtggtgttgaattcgaaagtaattccaaagaaacaaaaagcctaataaggactttaaaaactagatttgatgtatctaaaataagatttgatcaaaatgttggtattggtattaagccgatatctaaagaaggaacgacaagattagtaagagaagcaattaaatatgcaattgacaataatagatcatcagtaacattagtgcataaaggaaatattatgaaatttactgaaggagcatttagagattggggatacgaattagctaaagatagttttggtggaatagaaattgatgaaggcccatggcaagaaattattaatccaaataatggtaaaaaaattgttatcaaagatgtcatttgcgacgcgtttcttcaacagattttacttaggccaactgaatatgacgtcattgcgacaatgaatcttaatggtgattacatatctgatgcattagcagcaatggttggtggtattggaatagctcctggtgctaatatttcagataaatatgccgtttttgaagctactcatggaacagcaccaaagtatgcgggtcaaaacagagttaatccaggtagtttaattttatcagctgaaatgatgttacgtcatatggagtggactgaggctgcagacataattatgaaatcaatggatagggcgattggcgccaaaaagttacatatgattttgctagaatgat

SEQ ID NO: 207924 - DNA, 1216 bp, Unknown
  Bacterial polypeptide expressing nucleotide sequence isolated from the Sargasso Sea
tatgagcaaaattaaggttaaaaacccgattgttgagctagatggcgatgaaatgactagggtgatttgggattttataaaaaataagcttatccttccttatctagaggtagatataaaatattacgacttaggaattaaaagtagagataatacttctgataaaattactgtcgactgtgcacacgcgattaaaaaatatggcgtagggattaaatgtgcaacaattacgccagatgaagcaagggttaaagaatttaatttgaagaagatgtggaggtctccaaatggaacaataagaaatattttgggaggaactgtttttagagaacctatattatgcaaaaatattccaaagctagttccaagttgggaaaatccaatctgtattgggagacatgcatttggagatcaatatagagcaactgattttcaggtgcctggaaaagggaaattagagataaaatggacttctgaagatggaaaagacaaaaaagaatttgaagtttttaactttcctggtccaggtgtagctctttcaatgtataacttggatcaatcaataatagattttgcaagatcatgcatgaactatggtcttaatagaaaatggcctgtattcctgtcaactaaaaatacaatcttaaaaaaatatgacggaagatttaaagatttatttcaagaagtatatgaaaacgaatttaaagagaaattcaaagaaagaggaattacttacgaacatagattaattgatgacatggttgcatgtgcaatgaagtggaatggtaattatatatgggcttgcaaaaattatgatggtgatgttcagtcagatacagttgcacaaggtttcggatcattaggtttaatgtctagtgttctaatgagtccagatggaaaaacaattgaagcagaagctgcacatggaactgtaacaaggcattacagattacaccaacaaggtaaagaaacttcaacaaaccctattgcatcaatatttgcatgggcaagaggtttataccacagagcaaaattagataataatgaggatttaaaaaaatttgtaaaaaacttagaaaaaacttgcattcaaactgtagagtctggatctatgactaaagacttggcaatcttagtgggtccatcaactaaacatttaaccacaaatcaattcttagatgtaattgatgcgaacttgaaaaaacgattaaactaa

SEQ ID NO: 207925 - DNA, 1216 bp, Unknown
  Bacterial polypeptide expressing nucleotide sequence isolated from the Sargasso Sea
atgagtaaaatcaacgtaaaaaatcctgttgtagagcttgatggagatgaaatgacccgaattatttgggagttcattaagaaaaaatttattttaccttatttagatctagggattgagtattacgatcttggaatgaaaagtagagataagactaatgatcaaattacaatagatgctgcgaatgctattaaaaaatttggggtaggaattaaatgtgcaactattactcctgatgaagttcgtgtaaaagaatttgatttaaagaaaatgtggagatctcctaatggtacaattagaaatattatcggtggaactgtttttagagaaccaataatttgtaaaaatattccaaaacttgttccttcatggaaagatcctgtagttataggaagacatgcttttggtgatcagtatagagcaactgattttaaagttccaggaaaaggaaaaatggaaattaagtggacctcagaaaatggtaaagatgtaattaagtacgaagtctttgattttacaggtccaggtgtagcactttcaatgtataacttagataaatcaatagaagactttgcaagatcatgtttcagttatggcttaataaaaaaatggccagtttatctatcaacaaaaaatactattctaaaaaaatatgatggaaggtttaaagatatatttgaagaagtctttaataaagaatttaaaaaaaaatttgaagaagctaagattacttatgaacatagacttattgatgacatggtagcttgtgctatgaaatggagtggtaaatatatctgggcttgtaaaaattatgatggtgatgtgcaatctgatactatggcccaaggttacggttcattaggtttaatgactagtaccttattaactcctgatggaaaaataatggaagctgaagctgctcatggaactgttacaagacactatcgaatgcaccaagaagggaaagaaacttctactaatcctatagcatcaatatttgcttggacaagaggattagctcatagaggtaaattagatgaaaatacagaacttattaaatttgcaaatactatcgagcaagtttgtatagaatgtgttgaaagtggatctatgaccaaagatcttgctatattgattggtccctcaagcaaatttatgacaactaatcaatttttagatgaaatagataaaaatttgaaaaagaaattaaattaaa

SEQ ID NO: 207926 - DNA, 856 bp, Unknown
  Bacterial polypeptide expressing nucleotide sequence isolated from the Sargasso Sea
tatgccatataaaaaaataaaagtaccaaaaaaaggatctaaaatttcatataaagatggaaaaattaatgttcctgataatcctataattccatttattgaaggagatggaattggtgttgatatcacacctcctatgattaaagttgtgaatgaggcagtaaaaatagcctacaagggaaataagaaaatagaatggatggaagtattttgtggcgaaaaagcaacaaaaatctatacaaaggatacttggttaccagatgaaactatagatgcattaaaagaatttgttgtaagtataaaaggaccattaacgacccctgtaggtggtggaatcagatccttaaacgtgtcattgagacagattttagatttatatgtttgtttgaggcctataaggtattttgatggcgtcccatctccagtaaaaaaaccagaaaatgttgatatggttatttttagagaaaattcagaagatatatattgtggtgttgaatttgaatcaaattcaaaagaagctaaaaatcttgttaaaacattaaaatccagatttgctgtttcaaaaattcgttttgatgaaaatgttggaattggtgtaaaacctatttcaaaagcaggaacatatagattggttaaaaaagcaattgattatgcaattgataacaatagatcatctgtaactattgttcataaaggaaatataatgaaatttacagagggtgcattcagagactggggttatgatttggctaaaagtaaatatggaggtcaggagattgatgaaggaccttggcaggaaattacaaacccaaataacggtaaaaaaattgtaataaaggatgtgatttgtgatgca

SEQ ID NO: 207927 - DNA, 1216 bp, Unknown
  Bacterial polypeptide expressing nucleotide sequence isolated from the Sargasso Sea
aatgaaaaaaattattgttgatacgccggttgtagaaatagatggcgatgaaatgacaaaaataatatgggaattaattagagaaagattgataaaaccatatttagatatagaaactttatattttgatttaagtattgaaaatagagacaagacatctgaccaagtaacaattgattctgctaatgctataaaaaaatatggggtaggtgttaaatgcgcaacaataactccagatgaacaacgtgtagaagaatttaatttacaaaagatgtggcgttctccaaatggtacaattagaaatatcttaggaggaacagtatttagacaaccaataatttgtaagaatatcccaagatatgttccaggatggacaaaacctatagttattggtcgtcatgcatatggtgaccaatatagagctactgattttttgattcctggatcagggaaattactaatgaaatttataccagataatggtgaagatacaattgaacatgaggtaaatcaatatgatggacctggaatagctatgggaatgtataatatagatgaatcaattagaggatttgcaagagcttgttttaattatggtctaaatttaaattggccagtatatctctctacaaaaaatactattttaaaagcttatgatggaagatttaaagatctttttcaggatatatttgatacagaatttaaagataaatttaaaaataaaaacattacttacgaacacagattaatagatgatatggtcgccgctgcaatgaaatgggaaggtggttttgtatgggcatgtaagaattatgatggagatgttcaatctgatgtagttgcacaagggtttggatcgcttggtctaatgacatctgtgctaatgacacctgatggaaacactattgagtcagaagcagcacacggaacagtaacaagacattatagagcctatgaaagaggagaagccacctctacaaatcctatagcatctatatttgcttggactagagggttatggtatcgaggtaaatttgataaaaatattgaattacaaaatttttcagaaaaattagaaaaagtatgcattagtaccatcgaaagtggagcaatgacaaaagacttagcacttcttgtaggaaataatcaaggttggatggaaacaattgaatttttagaagaattagaaaagaaccttaaatctgaaattagctaa

SEQ ID NO: 207928 - DNA, 793 bp, Unknown
  Bacterial polypeptide expressing nucleotide sequence isolated from the Sargasso Sea
aaatactgaggatatatatgctggtatagagtggatgagtggctctaatgaaatagagaaagtgaaagattttttgataaaggaaatgggcgttacaaatattagatttcctgattcgagcagcctcgggctaaaacccatctctaaagaaggtacagataggctggttcgatctgcgattgaatacgcgattacaaacaagcgtgattcattaacccttgttcataagggtaatataatgaaatttactgagggtgcatttcgtgactggggatatcagcttgcaaaagatgaatatagctcggaggattatgagggtggaccatggcagatcataagaaaaaatgggcatgatcttataattaaagatgttatagctgatgcatttctacagcagatacttctcaggccttctgaatatgatgtaatcgccacaatgaacctcaatggtgattatatatctgatgcacttgcggcaattgttggagggattggtattgctcctggggcgaatatcaactatacaagcggtcacgctatatttgaggctacgcatggaacagcacctaaatatgctggtcaggataaagtaaaccccagtagtgtgattctctctggagtaatgatgcttgaatacctaggatggcaagaagctgcagatttgattataaaaggagtagaaggagccattagctccaagcgtgtgacctatgattttaaccgtctaatggatggtgctacagagcttaaatgttcagaatttggacatgaaatagtgtccaatatggactag

SEQ ID NO: 207929 - DNA, 1216 bp, Unknown
  Bacterial polypeptide expressing nucleotide sequence isolated from the Sargasso Sea
atgagtaaaattaaggttaaaaaccccattgtagagttagatggtgatgaaatgaccagagttatatgggacttcataaaaaataagctcgttttaacttaccttgatctcaaaattgagtactacgatttaggaatggaaagcagggataaaactgaggacaaaataacaattgaatgtgctaatgcaattaaaagaaatggtgtcggtattaaatgtgcaaccatcacaccagatgaaactagagtaagagaatttaatcttaaaaaaatgtggagatctccaaatggtacaataagaaatataattggaggaactgtttttagagaacccataatttgtaaaaatattccaaaacttgtgccctcatggacagatccattgatcataggtaggcatgcgtttggtgatcaatacagagcaaccgactttacagtacctggtaaaggtaagttagaaatcaaatggactgctgaagatggttctgatgagagaaagtatgaagtctttaattttccaggaccaggaatagctttatctatgtataatttagataaatctatagaagactttgcaaggtcttgttttaattatggattaattaaaaaatggccagtttacctttcaactaagaatacaattttaaaaagatacgatggaagatttaaagatatttttgaagaagtttttgaaaatgaatttaaagatagatttgatcaaagtaaaattacttatgagcatagattaatagatgatatggtagcatgtgcaatgaaatggcatggtaaatatatttgggcatgcaagaattatgatggagatgttcaatcagatactgtagctcaaggatatggatccttaggtttaatgacaagtgttttgctcgctcctgatggcaaaacaatggaagctgaagctgcacatgggacagtaacaagacattttcgaatgcatcaacaaggcaaagaaacatcaacaaatcctattgcatctatttttgcatggacaagagggttggctcatagaggaaaattagatggaaatgaggaattaataaagttttcagaaacacttgaaaaagtatgtgttgactgtgtcgaagagggctcaatgactaaggacttagctattttgataggaccttctacaaaatatctaacaactaatcaatttttagatactttggatggtaagttgagacaaaaactaaattaaa

SEQ ID NO: 207930 - DNA, 346 bp, Unknown
  Bacterial polypeptide expressing nucleotide sequence isolated from the Sargasso Sea
atggctaaaattaaggttaaaaatccaatagttgagctagatggcgacgaaatgactagaataatatggtcatttattaaaaagaaactaattgaaccatatcttgaactagacatcaaatattttgatttaggaatagaaagtagagacaaaacatctgataagataacagtagaatgtgcgaatgcgattaaagaatatggagtgggggttaagtgtgcaactataacacctgatgaagcgagagtagaagagtttaaattacagaaaatgtggagatcacccaacggaacaatacgaaatattttaggaggaacagtttttagagagcccaattatttgtaag

SEQ ID NO: 207931 - DNA, 625 bp, Unknown
  Bacterial polypeptide expressing nucleotide sequence isolated from the Sargasso Sea
atgggtttgataagaaaatggtcagtttatttttcatctaaaaatactattttgaaagtttacgatggaagattcaaagatatttttgaagagatttatcaaaaagaatttaagaaaaagtttgaagaggtcgggattacttatgaacatagattaattgatgatatggttgcgtgcgcaatgaagtggagtggaaaatatatttgggcttgtaagaattatgatggtgatgtccaatctgatacagtagctcagggttatggctcattaggtttaatgactagtgtgcttagaacaccagatggtaaaatagcagaagctgaggcggctcacgggacagttacgaggcattataggcagcatcagcaaggtaaggaaacttcgacaaatccgattgcatctatttttgcatggacacgaggtttggctcatagaggtcaattagatggaaatgatgaattaactaagttttcagatactctggagaaagtttgtattgaaactgttgaaagtggatcaatgactaaagatttagcaatcctaattggcaacaaacaaaaatttctaacaacaaatcaatttttagaagcgatagactctaatcttaaaaagaagcttaactaat

SEQ ID NO: 207932 - DNA, 1216 bp, Unknown
  Bacterial polypeptide expressing nucleotide sequence isolated from the Sargasso Sea
aatgagcaaaattaaggtaaaaaatcccattgtcgagctagacggcgatgaaatgacaagagtaatttgggaattcatcaaaaacaaattaattctaccttatttagatttaggcattgagtattacgatctaggaatgaaaagcagggatgatacagatgacaaaattactatcgactgtgctaatgcaatcaagaaaaatggagtaggtatcaaatgcgctactataactcctgacgaggccagagttgaagaatttaaattaaagaaaatgtggagatctccgaatggaacaataagaaatattattggaggaacagtatttagagagccaataatttgtaaaaatattcctaaacttgtcccatcttggacagatccattaattattggaaggcatgcttttggtgaccaatacagagctacagattttttggttccaggaaaaggtaaattagaagttaagtggacatcagaagatgaaagtgatgaaaagaaatatgaagtatttaatttcccaggacctggtattgctctttcaatgtataatttagataaatcaatagaggactttgcaagatcatgtttcaattacggcctaataaaaaaatggcctgtttatttatctacaaagaataccatactaaaaaaatatgatggtagatttaaagatatatttcaaaatgtttttgaaaaagattttaaatcagaatttgaaaaaaataatataacttatgaacacaggttaatcgatgatatggttgcttgtgcaatgaagtggcatggtaaatatatctgggcttgtaaaaattacgatggtgatgttcagtcagatactgttgctcaaggttatggttctttaggtttaatgacaagtgttttattagcacctgatggtagaacaatggaagcagaggcggctcatggaactgttactcgacattttagaatgcatcagcaaggtaaagaaacatcaaccaatccaattgcatctatatttgcgtggacaagaggtttggcgcacagaggaaagttagatagcaatgatgaattaattaaatttgccaaaacacttgaagaagtatgtgttgagtcagttgaatcaggatcaatgaccaaagatttggcaatacttattggtccttctacaaaatatttaacaactaaccagtttttagatgtaattgatggaagtttaaaacaaaaattaaattaa

SEQ ID NO: 207933 - DNA, 606 bp, Unknown
  Bacterial polypeptide expressing nucleotide sequence isolated from the Sargasso Sea
aatgagcaaaatcaaggtaaaaaacctagttgtagagctggatggcgatgaaatgacacgtattatatgggagttcatcaaaaataaattaatcctcccatatttagatcttggtatcgaatattacgatttaggcatgaaaagccgagataatactgatgatcagattaccatcgactctgcgaatgcaatcaaaaaaattggtgttggaattaagtgtgcaacgattacccctgatgaagctagagtagaagaatttgatttaaaaaaaatgtggagatctccaaacggaaccataagaaatataattggtggaacagtattcagggagccaattatttgtaaaaatattccaaaacttgttccctcttggactgatccagtgattattggaagacatgcatttggtgatcaatatagagcaacagattttaaagttccaggcaaaggaaaaatggaagtgaagtggacatcagaggatggaaaagatgaaattaaatatgaagtatttaattttacaggtccaggtgtggctttatcaatgtacaatttagataagtcaattgaagactttgcaagatcttgtttcagttatggattaattaa

SEQ ID NO: 207934 - DNA, 847 bp, Unknown
  Bacterial polypeptide expressing nucleotide sequence isolated from the Sargasso Sea
atggcgaaaataaaagttaaaaatccagtagttgagttagatggcgacgaaatgactagaataatatggtcatttatcaaagataagctcattaagccatatcttgagatagatcttaaatactatgaccttggtatgaaaagtcgagataaaactgatgaccaaatcacagtagatgcggcaaatgcaatcaaacaacacggagtgggtgttaaatgcgctaccataacacctgacgaggctcgagtagaagagtttaaattaaaaaaaatgtggagatcgccgaatggtactattagaaatatcttaggtggtacagtttttagagagccaattatttgtaaaaatgttcctaaactagttcccggttggacgaaaccaatagtgataggaagacacgctttcggagatcagtaccgagcaactgattttctaataccaggtgaaggaaatttggaggtaaaatggacttcaaaagatgggaaagataagaaagagtttaaagtttttgattttcccggatctggaactgctcttactatgtataatttagatgattctattaaaaattttgcaagagcatgtatgaattacggtcttggaagaaaatggcctgtttatttatctactaaaaacacaatccttaaagcttacgatggtagatttaaagatcttttccaagaagtttttgaaaaagaattttctgataagtttaaaaaagcaaatattacctatgaacatagattaattgatgacatggttgcatgtgctatgaaatggattggcggatatgtttgggcgtgtaaaaattatgatggcgacgtgcaatcagacactgttgctcagg

SEQ ID NO: 207935 - DNA, 1022 bp, Unknown
  Bacterial polypeptide expressing nucleotide sequence isolated from the Sargasso Sea
aaagaatggagtaggtatcaaatgtgcaactattactcctgacgaggcgagagttgaagaatttaaattaaagaaaatgtggagatcaccgaatggaacaataagaaatattattggaggaacagtatttagagagccaataatttgtaaaaatattcctaaacttgtcccatcttggacagatccattaattattggaaggcatgcttttggtgatcaatacagagctacagattttttagttccaggaaaaggtaaattagaagttaaatggacatcagaagatggaagtgatgaaaagaaatatgaagtatttaatttcccaggaccaggtattgctctttccatgtataatttagataaatcaatagaggactttgcaagatcatgtttcaattacggcctaataaaaaaatggcctgtatatttgtcaacaaagaataccatactaaaaaaatatgatggaagatttaaagatatatttcaaaatgtttttgaaaaagattttaaatcagaatttgaaaaaaataacataacttatgaacataggttaatcgatgatatggttgcttgtgctatgaagtggcacggtaaatatatatgggcttgtaaaaactacgatggcgatgttcaatcagatactgttgctcaaggttatggttctttaggtttaatgacaagtgttctattagcacctgatggtagaacaatggaagcagaagcagctcatggaaccgttactcgacattttagaatgcatcagcaaggtaaggaaacatcaactaatccaattgcatctatatttgcttggacaagaggtttgtcacacagaggaaagttagataataatgatgaattaattaaatttgctaaaatacttgaagaagtatgtgttgagacagttgaatcaggttcaatgaccaaagatttggcaatacttattggtccttctacaaaatatttaacaactaaccagtttttagatgtaattgatggaagtttaaaacaaaaattaaattaag

SEQ ID NO: 207936 - DNA, 1203 bp, Unknown
  Bacterial polypeptide expressing nucleotide sequence isolated from the Sargasso Sea
tttttgagaatataaaattagtcgtaccaaattaccctgtcattccattcatagaaggtgatggcattggaccagatatttggaaggcctcccaaatggtatttgatagtgcggttactaaggcatatggaaaagatcgatcgattatctggaaggaaatatatgccggagaaaaagcttttgaattaaaaaaatcttggcttcctgatgaaaccttggctgatattaaagaatatttaattgctataaaaggtccgcttacaacaccagttggagggggtatgagatcgttaaacgttaccttaagacagattttggatctttacgcttgcgtcaggcctgtagcatggtttgaaggcgttccttctccagtcaaagatccttcattagtggatatggttatttttagagaaaacacagaagatatttatgcaggcatagaatggcctcacggttcagatgatttagacaaagtcaaaaattttctcgtaaatgaaatgaatgtaaataatatccgttttcctgatacggtttccctaggtgttaaacctgtatcagttgagggcactgaaaggattgtaagatcggctataaactatgcaattgctcatggaagggaatccgttaccctagttcataaaggtaatataatgaagtttacagagggtaaatttaaagaatggggttacagtttggcgaaaaatgaatatgactctgtcgattatgaaggtggcccatggcaattgattaatcagaatggtaagcaattaataattaaagatgtgatagcagatgcctttcttcaacagattttacttcgacctgcagagtacgatgtcatttgcactttaaatttaaatggagattatatatctgatgctcttgcagccattgttggtgggattggtatcgcacctggagctaatataaattacaatacaggccatgcaatttttgaggctacacatggtactgctcctaagtatgcaggcaaagacatggtaaacccctcatcagttatcctttccggtgtcatgatgcttgaacatttaggatggcaagaagctgcagatttaattgttaaaggattagggaaatcgatccaaaataaaactgtgacctatgattttcaccgacttatggatcaagcaaaaaaagtttcctgttcaggttttggtgagtccattatcaataatatgtaat

SEQ ID NO: 207937 - DNA, 1216 bp, Unknown
  Bacterial polypeptide expressing nucleotide sequence isolated from the Sargasso Sea
tatgagcaaaataaaggtaaaaaacccaattgtagagttagatggtgatgaaatgactagagtcatttgggaatttataaaaaaaaagttggtacttccttatattgatcttgatatcaaatactatgatttaggtatgaaaagtagagatgatactaatgatcaaataacaattgattgtgcaaatgctataaaaaaagtgggtgtaggaattaaatgtgcaactattactcctgatgaagaaagagtaaaggaatttaatttaaaaaaaatgtggagatcacctaacggtactattagaaatattattggaggtacagtatttagagaaccgataatatgtaaaaatgttccaaaacttgttccttcatggactgatccattaataattggaagacatgcattcggagatcaatacagagctacggattttttagttcctggcaagggcaaccttgaaattaaatggacatctgaggatggtaaagaagaaaaaaaatatgaggtttttaaatttccaggaccaggaattgcattatctatgtataatttagataaatcaattggtgatttcgctcgatcttgttttaactatggtctaataaaaaagtggccagtatatttgtcaacaaaaaatactattctcaaaaattatgatggaaggtttaaagatatatttcaggaaatatatgaaaaagagtttaagtcagagtttataaaaaataaaataatttacgaacatagattgattgatgacatggttgcctgtgctatgaaatggcatggtaattacatttgggcttgtaaaaactacgacggagatgttcagtcagatacagttgctcaaggatatggttccttgggattgatgacaagtgtattgttagcacctgatggaaaaacaatggaagctgaggctgcgcatggaactgttactagacattttagaatgcaccaacaaggtaaagaaacttcaacaaacccaattgcttcaatatttgcttggactagaggtttgtctcataggggcaaactagatggtaatagtgaattaataaaattttctgaagttttagaaaaagtatgtgtggaatgtgtagaaaatggttttatgactaaagatctagcaatattgattgggccttcaacaaaataccaaacaacaaaccaatttttagacgagatagatggtaatttaaaaaaaaaactaaattaa

SEQ ID NO: 207938 - DNA, 1237 bp, Unknown
  Bacterial polypeptide expressing nucleotide sequence isolated from the Sargasso Sea
atgtcaaaaattaaagtagccaatcccatagttgaaatagatggtgatgaaatggctcgtattatctggaaatttatcaaagaaaagttaattctagactatttagatcttaatattatatattatgatctaggaataaagtccagagataaaactgatgatcaaataacaattgatgccgcaaatgctatcaagaaacataatgttggtattaaatgtgcaacaattactcctgatgaaaaaagagttgaggaattttctctcaatcgaatgtacaaatctcctaatggcaccattagaaatattgtcggtggtactgtttttagggaacctatcatttgtaggtctatacctagatatgttcaaggttggtcaagaccaatctgtataggaaggcatgcatttggtgatcaatatcgtgcaacagatgtaacaactaatggtcctgggaaattagagatgaaatttacaccatcagatggctctgagtcaaaaacctgggaagtatataattttgaagaggatggtatcgcaatgtctatgtataatatagattcatccatttatggttttgcaagatcttgtatgaacatggctttaactaaaagatggcccctttatctatcaaccaagaatacaatattaaaagcttatgatggtcgatttaaagatatatttgaagaagtttttaaaaatgagttcaaagataaatttgaaaaagaaaatataacttatgaacacagactgattgatgatatggttgctgctgctattaagtggaaaggtggttttgtatgggcttgtaaaaattatgatggagatgttcaatctgatgttgtagctcaaggatttggatctttaggactaatgacatcaacacttgtaacacctgacggaaaaactttagaagcagaagcagctcatgggactgtaactagacattacaggagacaccaacagggtgaggaaacatctacaaatcctatagcatcaatttttgcttggacaagagggctaatgcacagaggtaaattggatgataataaggagctaatcaaattctgtaaaattttagaggaagtttgtattgagacagtagaagatggtaaaatgactaaagatctagctttgcttgtctttagagaggatttagttgattcaaattttcttactacacaagaatttctaggcgaacttaagaagaatttagactttaaattaaattcaaaagaataat

SEQ ID NO: 207939 - DNA, 1108 bp, Unknown
  Bacterial polypeptide expressing nucleotide sequence isolated from the Sargasso Sea
tctagatattgatttactttattatgatttaggcattgaagaaagagataataccaatgacgaaattactattaatgcagctaatgcaattaaaaagtatggagtaggcgtaaaatgtgcaaccataactcccgatgaagcaagagttgaagaatttaatttaaaacaaatgtggaaatctcctaatggaactataagaaatattttgggtggggtagtttttagggctccaattatatgtaaaaacgtaccaaggttagtcccaggatggacagatccaatagtaattggcagacatgcttttggtgatcaatataaagctacagattttctttttccaggaaaaggtaaattgacaataaaatttgaacccgaaaatggtgaagttattgaaaaagaggtttttaatgcaccttcaagtggaatagctcttggtatgtataaccttgatagctctataatagattttgccagagcttcgtttaattatggtttaaaactaggctggccagtttatttatctacaaaaaatacaatacttaaagcttatgatggtagatttaaggatttattccaaaaagtttatgaagaagaatttgaagaagaatttaaaaaaagaaatattgtttatgagcatagattaattgatgacatggttgctgccgctttaaaatggtctggctcatttgtttgggcatgtaaaaattatgatggagatgtacagtcagacactgtagcacaaggttttgggtcattagggcttatgaccagtcaactaatgacaccaaatggatcaattcttgaggcagaagcagctcatggaacagtaacaaggcattatagagaacaccaaaaaggaaatgtaacatctactaattcaattgcatcaatatatgcctggactggtggtctaaagcatagagcaaaactagataacaataaagaacttgaagaatttgcactaaaacttgaaagtattgtaataaaaactgtcgaaagcggttacatgaccaaagacttagcaatgcttataggaaataatcataagtggttaagcactactcaatttatcgataaagtggaagaaaacttattaaaagcaatttag

SEQ ID NO: 207940 - DNA, 1216 bp, Unknown
  Bacterial polypeptide expressing nucleotide sequence isolated from the Sargasso Sea
atgagcaaaatcaaggtaaataacccagttgtcgagttagatggcgatgaaatgacacgaattatttgggagtttattaaaaacaaattaatccttccatatattgatcttggaattgagtattacgatctagggatgaaaagcagagataatactgatgaccagatcacaatagactcagctaatgcaattaaaaaaattggtgttggaattaaatgtgcaacaatcacaccagatgaagcaagagttgaagaatttgatttaaaaaaaatgtggagatctccaaatggaacaatcagaaacattattggtgggacagtttttagagaacctataatttgcaaaaatattccaaagttagttccttcatggacagatcctgtaattattggaagacatgctttcggagatcaatatagagcgactgattttaaagtaccaggtaaaggtaaaatggaagtcaaatggacatcggaagatggaaaagaagaaataaaatatgaggtatttaatttcactggtccaggtgtggctctatcaatgtataatttagataaatctattcaagattttgctagatcgtgctttagctacggcttaattaaaaaatggccagtctatatgtctacaaaaaatacaattttaaaacaatacgatggaagatttaaggatattttccaagaagtattcgataatgaataccaagaagaatttgaaaagcacaatcttacttatgaacatagattaatagatgacatggttgcatgtgcaatgaaatggagtggaaaatatatctgggcttgtaaaaattatgatggcgatgttcaatctgatactatggctcaaggttatggatcattaggattaatgacaagtactctactaactcctgatggaaaagtgatggaagctgaagctgctcatggaactgttaccagacactatagaatgcatcaacaaggtaaagaaacttccacaaatcctattgcatctatatttgcatggacaagaggattggctcacagaggaaaattagataacaatcaagaattaattaaatttgcccaaacattagaagtagtatgtattgagtgtgttgaaaatggttcaatgacaaaagatttagcaatcttggttggaccaaacagtaagtttttaactactaatcagtttttagatgaaattgatggtaatcttaaaaaaaaattaaattaaa

SEQ ID NO: 207941 - DNA, 757 bp, Unknown
  Bacterial polypeptide expressing nucleotide sequence isolated from the Sargasso Sea
atgtcgaaaggtggttctaaaatccaaatggataatggaaaactccttgttcccgacaaccccgtgatcccattcattgaaggcgatggaattggccctgacatttggaaagcatcggtcagagtcttcgatgcagcggtagaaaaagcctactcaggtgaaagaaaaatagactggctagaggtctatgctggcgaaaaagcattcaataaattcaacaactggctgccggatgaaaccattgaacagtgcagagaatatttagtttcaatcaaaggaccgctgacaactccgattggaggtggcatgagatcactgaatgttgctttgagacaattactggacttatatgtctgccttagacctgttaggtggtataagggcgtgccctctccagtaaagagtcctgaaaatgtagacatggtcattttcagagaaaataccgaagacatttatgccggaattgaatttgaagaaggcacaaaatctaatcaaaagttcctttcgctctttaaagaatctttcccagaagagtactccaaaattcgttttccagaatcatcaggaatcgggattaagactgtttcaattgaaggttctgagagacttctcaggtctgcgtttgaatacgcaatagaaaacaagagaaagagtgtcacccttgttcataaaggaaacatcatgaaatatacagaaggtgcttttagaaattggggatatgagctcgccgagagggaattcggcgaccatgtttaca

SEQ ID NO: 207942 - DNA, 1225 bp, Unknown
  Bacterial polypeptide expressing nucleotide sequence isolated from the Sargasso Sea
tatgaatcatggtaaaaaaatagtttttgaaaaaaataaattagtcgtaccaaattaccctatcattcctttcatagagggtgatggcattgggccagatatttggaaggcttcccaaatggtattcgatagtgcagttaccaaggcatatggaaaagatcgatcaattatctggaaggaaatatatgctggagaaaaagcttttgaattaaaaaaatcttggctacctgatgaaaccttagatgatattaaggaatatttaatagctataaaaggtccgcttacaactccagttggagggggcatgagatcattaaacgttaccttgagacaggttttggatctatatgcttgcgtcagacctgtagcatggtttgaaggtgttccttctccagttaaagatccttcattagtggatatgattatttttagagaaaatacagaagatatttatgcaggcatagaatggcctcatggtacagatgatttggataaagtcaaaacttttcttgtaaatgaaatgaatgtaaataatattcgttttccagatacggtttcgctaggcgttaaacctgtatcagtcgagggcactgaaaggattgtaagatcagccataaactatgcaattgctcatggaagagaatcagttaccctagttcataaaggtaatataatgaagtttactgagggtaaatttaaagaatggggttacagtttagctaaaaaagaatatgattcagtagactatgaaggtggtccatggcaattaattaatcagaatggtaatcaattaataattaaagatgtgatagcagatgcttttcttcagcagattttactacgtcctgcagagtacgatgtcatttgcactttaaatttaaatggtgattatatatctgatgctcttgcagccattgttggtggaattggtatcgcgcctggagcaaatataaactatgacacaggacatgcaatttttgaagctacacatggtactgctcctaagtatgcgggtaaagatatggtaaacccatcatcagttatcctttccggtgtgatgatgcttgaacatttaggatggcaagaagctgcagatttaattgtaaaaggattagggaaatcgatccaaaataaaactgtgacctatgattttcaccgacttatggatgaagcaaaaaaagtttcctgttctggttttggtgagtcaattattaataatatgtaa

SEQ ID NO: 207943 - DNA, 1105 bp, Unknown
  Bacterial polypeptide expressing nucleotide sequence isolated from the Sargasso Sea
gatgctgctgttgaaaaagcttatggggaagaaaaatctatatcttggatggaaatatatttgtggtgaaaaatctactaaggtttatggtaaagatgaatggttgccagatgagaccctagatgctctacgtgagtatgttgtaagtattaaaggacctttaacaacaccagttggtggaggcataagatcattgaatgtttcattgagacaaattcttgatttgtacgtatgtttacgtccagttaggtggtttactggtgttcctagtccagtaaaagttccaggcgatgttgatatggttatctttagagaaaactcagaagatatttatgctggtgttgagtttgcgtctgactcaaatgaatcagcagagttagtgaaaatacttcaagaaaaattcaatgtcgaccaaataagattcccacaaaatgttggattgggtgtaaaacctatatctgaagagggaacaaaaagactagtaaaaagagcttttgaatatgctatcgaacatgatagatcctctgttactttagtgcacaaaggaaatattatgaaatttactgaaggtgcatttagagattgggggtatgagctttgtagagaaggatttgaaggcgatgatcttgacggaggtccatggcattactttattaatcccaacaacggtagaaaaataatagtaaaagatgttatatgcgatgcttttttacaacaaatactattaagaccaagagaatatgatgttattgcaacaatgaatttaaacggtgattatctttcggatgcattggcggcaatggttggtggtataggtattgctcctggtgcaaatattggcgatgaagctgctatgtttgaagctacgcatggaactgcgcctaaatatgctggcttagataaagttaacccactatctttaattctgtcagctgaaatgatgctgagacatataaactggaatgaagctgcagatcttttaataaactcaattgaaaaaactattcaggatagttatgtaacctatgattttgaaagattaatggataacgctacacttgtttcttgctcaggttttgcaaaagagatgattaaaagaatgtaa

SEQ ID NO: 207944 - DNA, 743 bp, Unknown
  Bacterial polypeptide expressing nucleotide sequence isolated from the Sargasso Sea
aaaagaaaaaaaagaatttgaagtatttaattttccaggtccaggggttgcaatgtcgatgtataatttggatcaatctataaaagatttcgcaagagcatgtatgaattatggattgaacagaagatggccagtttttttgtctacaaaaaatacaattttaaaaaaatatgatggaagatttaaagatattttccaagaaatttatgaaaatgaattcatagataaatttaaagagagaggcatcacatacgaacatagattaatagatgacatggtagcttgtgctatgaaatggaatgggaattatatttgggcttgtaaaaattacgatggcgatgttcaatcagatacagttgcccaaggatttggttctttaggattaatgtctagtgttttaatgagtccggatggtaaaaccattgaagcagaagcagctcatggaactgtcactagacattatagaatgcatcaacaaggaaaggaaacttcaacaaatcctattgcatcaatttttgcatgggctagaggtttatatcaccgagcaaaacttgacgaaaatgaggatttaaaaaaatttgttaaaaatttggaaaaaacttgcattgaaacggtcgagagtgggtcaatgacaaaggatttagctatattagttggatcagacacgaaatttttaacaactaaccaatttttggacgtaatagatagcaatcttagaaaaagattagatcaaaacttttaat

SEQ ID NO: 207945 - DNA, 1216 bp, Unknown
  Bacterial polypeptide expressing nucleotide sequence isolated from the Sargasso Sea
aatgagcaaaatcaaggtaaataacccaattgtagagctagatggtgatgaaatgacacgtattatatgggagtttatcaaaaataaactaatacttccttatatagatcttggtattgaatattacgatttaggaatcaaaagtagagataatactgacgatcagatcacaatagagtctgcaaatgctatcaagaaaattggtgttggaattaagtgtgcaactattactcctgatgaagcaagagtagaggaatttgaattaaaaaaaatgtggagatctccaaacggaactataagaaatataattggaggaactgtatttagagaaccaattatttgtaagaatattcctaaacttgtaccctcttggacagatcctgtaataatcggaagacatgcatttggagatcaatatagagcaacagactttaaagtacctggaaaaggaaaaatggaagtgaagtggacatcagaagatggaaaagatgaaattaaatatgaagtatttaattttacaggtcctggtgtggctttatcaatgtacaatttggataagtctattgaagattttgcaagatcctgttttagttatgggttaattaaaaaatggcctgtttatatgtctacaaaaaatacaattcttaaacaatacgatggaagatttaaagatattttccaagaaatttttgacaaagaatataaaaatgattttgagaaaagtaatctaacttatgaacataggttaattgatgatatggttgcatgtgcaatgaagtggagtggtaaatatatttgggcgtgcaaaaattatgatggagatgttcagtccgatactatggctcaaggttatggatctttaggattaatgacaagtacattgttaaccccagatggaaaaataatggaggcagaagctgcacacggtacagtaacaagacattataggttgcatcaacaaggaaaagaaacttcaacaaatccaattgcgtctatttttgcttggactagaggattagctcatagaggtaaattagataataatgatactctgattaaatttgcagaaactttagaaaaagtttgtattgaatgtgttgagaatggatcaatgacaaaagatttagcaattcttattagtcctgatagtaagtatttaactaccaatcagtttttagacgaaattgatggtaatttaaaaaagaaattaaactaa

SEQ ID NO: 207946 - DNA, 1051 bp, Unknown
  Bacterial polypeptide expressing nucleotide sequence isolated from the Sargasso Sea
atgagtaaatcaaatattaaagttccaacaacaggcgagaaaataacttataaaaacaacaagctagttgtgcctgataatcccataataccttacattgagggagatggtataggagtggatataactcctgtgatgcttaatgtcattgatgcagctgtagaaaaagcatatgacggcaaaagaaaaataagctggatggagatttattgtggcgaaaaatcagtaaaaatttatggtaatgatgaatggttgccagatgaaactcttcaagcttgtaaagattacaaagtttcaattaaaggtccgttaaccactcctgttggtggtggtattcgttcattaaacgtggctataagacaaaaattagatctatatgtatgtttgagaccagtgaagtattttgatggcactccaagtccagttagacgccctgatctagtagatatggtgatttttagggaaaactcagaggatatatatgcaggtgttgagtttgaatccaatacagatgcagcaaacaagttaattaaagtgcttcaagatgactttggggtagaaaaaataaggtttacagagaattgtggaataggaatcaagcctgtttcagaagaggggacaaagagattagtcagaaaagcttatgaatatgctattcagaatgaaaaagattctgtaactctgattcacaaaggaaatattcagaagtttacagaaggcgccttcatggattggggttatgagctagcacgagaagaattcggcggagagcctcttgatggcgggccttggcacacatttaagaacccaaataccggtaaagatatcattgttaaggatgtaatatgtgacgctttcttacaacaatgtcttttaagacctgcggattacgatgttttagcaacaccgaatcttaatggtgattatctttcagatgctcttgctgcgcaagttggcggaattgggatagctcctggtgcaaacttaggtgatgaagttgctgtatttgaagcgacacatggaactgcaccaaaatatgcagggcaagaca

SEQ ID NO: 207947 - DNA, 1170 bp, Unknown
  Bacterial polypeptide expressing nucleotide sequence isolated from the Sargasso Sea
ttatcccatatatagaaggtgatggaattggtattgatataacgcctcctatgattaatgtagtaaatgaagctgtaaaaattgcttatggcaataaaaagaaaattgagtggatggaagtatattgtggtgaaaaagcaactaaagtttacacaaaagatacttggcttccagacgagaccatagacgcattaaaagagtttgtagtaagcattaaaggaccactaacaactccggttggaggcggcataagatctctaaatgtgtcattaagacagatgttagatttatatgtttgcctaagacctattaggtattttaatggagtaccttcaccagtaaaaagacctcaagatgttgatatggttatatttagagaaaactctgaagatatctattgtggtgtcgagtttgaaggtaataccaaagaagcaactagtttaatcaaaacattaaaatctaagttcaatgttactaaaattagatttgatgaaaatgtaggtattggagttaaacctatatctaaagaggggacatcaagattagtaagaaaagctattgattatgctatagaaaataataggtcatctgtatcacttgttcataaaggtaatattatgaaatataccgaaggtgcttttagggattggggctacgaattagcaaaaaataaatataacggaatagaaattgatgagggtccatggcaagaaattatcaatcctaaaaatggtaaaaaaattattattaaagatgttatatgtgatgcatttttacaacaaatacttttaagaccaacagaatatgatgttatcgctacaatgaatttaaatggtgactatatatctgatgcattggcagcaatggttggtggtatcgggatagctccaggtgctaatatttcagatgagtatgctgtttttgaagctacccatggaactgcaccaaaatatgccggtcaaaataaagttaatccaggaagcttaatactatcagctgagatgatgttaagacatatgggctggacagaagctgctgatataataatgacatcaatggaaagaactataggtgctaaaaaagttacttatgactttgcaagaatgatgagtgatgctgatcttgttacttcatcaggattcgctgatgaaatgattaaaagaatgtaat

SEQ ID NO: 207948 - DNA, 1321 bp, Unknown
  Bacterial polypeptide expressing nucleotide sequence isolated from the Sargasso Sea
gatgttaaagtatacaagaccagaaggcggagaagaaatttcctttaaaaatggtgttgtttcaacaccagattatcctatcatcccctacattataggagatggcattggtatagatgtcactccggttatgaaacgtgtgttagattatgctgttaaaaaagcttatgatgataaaaaagaaattaagtggctagaaattcttgctggcaaacaagcttttgatatgactagacagcttctacctcgtgaaacacttgatgcactaaaaaaatatagggtttctatcaaaggacctttaacaacgccaattggatctggtcataaatccttaaacgtactgattcgacaaaacttagatttatatgcttgcgtaagacctattagatatttcccgggcacgagcagtcctatggtagattcatcactcacagacatgattgtatttagagaaaatacagaagatctttattctgggattgagtggcaagctgacacagatggcgctaagaaaattattgaattcattaagcaggaactgaaatcgtcacctttccgttttgaggaaaattgcggaataggcataaagccagtatctaaggaaggatctgagagattgataaagatggctatcagttatgcattaaaagagaagaaggattttttaactattgttcataaaggcaatattatgaaatacaccgaaggcgcatttagagactgggctttttcgcttgttaaatctgagttcaatggagttgaaaataacgataacacatattccataacttcaaatgaatctgatcatgaattaattataaaggattgtatcgcagataattttcttcaggaaataattttgtctcctgaacaacatgaagttatagctactctgaatttaaatggtgattatatttcagatgcattagcagcacaggttggaggaataggagttgcacctggcggaaatattggcgatggtattgcggtctttgaggctacacatggttcggccgaatcttttgcaggaaaaaaccgagtgaatcctggttccataatactatcaggagagatgttactcagatatataggatggcatgaggctgcagacttagtacttaacggggtaaaatctgcaattcaaaaaaaacaactaacctttgatttagctagagcgagagctggtaagaggataattagaacaaaatcaaaacataaacatactgaacaagaagttaaagaagaatttacgagacttgttcctggtgcaactttagtgacaacatcgggttttggggatgcagtaataaataatatgtaa

SEQ ID NO: 207949 - DNA, 676 bp, Unknown
  Bacterial polypeptide expressing nucleotide sequence isolated from the Sargasso Sea
aatgtataatttagataaatcaatcgaagactttgcaaggtcatgctttaattacggtctaataaaaaaatggcctgtttatttatcaactaaaaatacaatattaaaaacttatgacggaagatttaaagatatttttcaagctgtgtttgaaaaagaatttaagtctgattttgataaacataatttaaactatgaacatagacttatagatgacatggttgcctgtgcaatgaagtggagtggtaaatatatatgggcatgtaaaaattatgatggagatgttcaatctgatacagttgcacaaggttatggatcattgggattaatgacaagtgtgttgttggccccagatggaagaacaatggaagcggaagctgcacatggaactgttaccagacattttagaatgcatcaacaaggaaaagaaacctcaactaatccaattgcttcaatatttgcatggacaagggggcttgctcatagaggaaaattagactcaaatgatgagttaattaaattttctaaaactttagaggatgtttgtataaattgtgttgaaaccggtttaatgacaaaagatctagcaattttaattgataaaaatcaaaagtatttaactacaaatcaatttttagatgctattgatggaaatcttaagaagaaattaaactaa

SEQ ID NO: 207950 - DNA, 1216 bp, Unknown
  Bacterial polypeptide expressing nucleotide sequence isolated from the Sargasso Sea
atgagtaaaatcaaggtaaaaaaccccattgttgagctaaatggtgatgaaatgacccgaattatttgggagtttattaagaacaaattaatacttccttatcttgatcttgatatccagtactatgatttgggcataaaaaatagagataaaactaatgatcaagctactattgactctgctaacgccataaaaaaagttggggttggaattaagtgtgccacaataactccagacgagattcgagttaaagaatttaatttaaaaaaaatgtggagatcaccaaatggaactataagaaatattattggaggcacagtttttagagaaccaattatttgtaaaaacataccaaaacttgtgccctcttggacagatcctgtggttataggaaggcatgcttttggtgatcaatatagagcgacggattttaaagtaccaggtaaaggaaaaatggaagtcaaatggacttcagaagatggtaaagatgaaataaaatacgaagtatttaatttcactggacctggtgtagcgctttcaatgtacaatttagataagtcaatagaagactttgcaagatcttgttttagttatggtttgattaagaaatggcctgtctatttgtcaactaaaaatacaattctaaaacaatatgatggtagatttaaagatatatttcaagaagttttcgataaagaatataaagaagaatttgcaaaaaataacttgacatacgagcacagattgattgatgatatggttgcatgtgcaatgaagtggagtggaaaatatatttgggcttgtaaaaattatgatggtgatgtgcaatctgatactatggcacaaggttatggttcattaggattaatgactagtacattgttaacaccagatgggaaagtgatggagtccgaagctgctcatggaacagttacaagacactacagattacatcaacaaggtaaagaaacttcaacaaatccgattgcatctatatttgcttggactagagggttggctcatagaggaaaattagatggtaatgatgaacttattaatttttcaaaaactattgaaaaagtttgcattgattgtgtagaaaatggtgcaatgacaaaagacctggctattcttattggtccatcaagcaaatatttaactaccaatcagtttttagatgaaattgatggtaatcttaaaaagaaattaaattaaa

SEQ ID NO: 207951 - DNA, 1255 bp, Unknown
  Bacterial polypeptide expressing nucleotide sequence isolated from the Sargasso Sea
attgagttacaaaaatataaaaattcctgaatcaggtgaaaaaattacattaaaagatggagtcttgacagttcctaataatccaataattccatttatagagggggatggtattggttcagatataacaccggctatgattgatgttgttaatgctgctgttgaaaaagcttatggagaggaaaaatctatatcttggatggaaatatattgcggtgaaaaatctactaaagtttatggtaaagatgaatggttaccagatgagaccttagaagctcttcgtgaatatgttgtaagtattaaaggacctttaacaacgccagttggtggaggcataagatcattaaatgtttcattaagacaaattcttgatttgtatgtatgtttacgtccagttagatggtttactggtgttcctagtccagtaaaagttccaggtgatgttgatatggtaatctttagagaaaactcagaggatatttacgctggtgtagagtttgcttctgactcaaatgaatcagcagaattagtcaaaatacttcaagataaattcaatgtcgatcagataagattcccacaaaatgttggattgggtgtaaaaccaatatcagaagagggaacaaaaaggctagtaaaaagagcatttgaatatgctattgaacaagatagatcctctgtcactctggtgcacaaaggaaatattatgaaatttactgaaggcgcatttagagattggggttatgagctttgtagagaagaatttgatggggatgatcttgatggtggtccatggcattactttgttaatcccaacaacggaagaaaaataatagtaaaagatgttatatgcgatgcttttttacagcaaatactattaagaccaagagaatatgatgttattgcaacaatgaatttaaatggtgattacctttcagatgcattagcggctatggtcggtggtataggtattgctcctggtgcaaatattggtgatgaagctgcgatgtttgaagctacacatggaactgcaccaaaatatgctggcctagataaagttaacccattatctttaattctttccgctgaaatgatgcttaggcatataaactggaatgaagctgcagatcttttaataaattcaattgaaaaaactattcaagatagatacgtaacttatgattttgagagattgatggataacgctactcttgtttcttgctcaggttttgcaaaagagatgatcaaaagaatgtaa

SEQ ID NO: 207952 - DNA, 414 bp, Unknown
  Bacterial polypeptide expressing nucleotide sequence isolated from the Sargasso Sea
tatggcaaaaatcaaagtaaaaaatccagtagtagagctagatggcgatgaaatgacccgtattatttggtcatttattaaaaaaaaattaatcgaaccatacttggatatagaccttaaatactatgaccttggaatggaaaatagagataaaacaaatgatcaggtaacaattgagtccgctaaagcaattcaaaaatttggtgctggggtcaagtgtgcaacaattactccagacgaagcaagggtaaaggagtttaatttaaagaaaatgtggagatcgccaaatggaacaataaggaatattgttggaggaactatttttcgtgaaccaataatatgtaaaaatgtacctagacttgttccccattggaccgaaagtgtcatagtgggaagacatgcttttggggatca

SEQ ID NO: 207953 - DNA, 1084 bp, Unknown
  Bacterial polypeptide expressing nucleotide sequence isolated from the Sargasso Sea
atgccttacaagaaaataaaagtcccaaaaaaaggctctaaaattaccttcaagaatgggaagattaacatccctgataatcctatcattccttacattgagggtgacggaattggtgttgatataacaccgccaatgataaatgttgtaaatgaagctgtaaaaatagcttataaagataaaaagaaaattgaatggatggaggtatattgtggagagaaagctactcaagtttattcaaaagacacatggctacctgatgagactatagatgcattaaaagaatttgttgtaagcatcaaaggtcctttaacaactccagtaggtggtggaataagatcattaaacgtttcgttgagacaaatattagatttatatgtgtgtttaagaccaattagatattttgatggtgttccttcgccagtaaaaagacctcaagacgtagatatggttatatttagagaaaattcagaagatatatattgtggtgtagagtttgagggaaattcaaaagaagcaaagagcttggttaaaacacttaaaacaagatttgatgtttcaaaaattagatttgatgagaacgtgggcataggtgttaaaccaatatctaaaagtggaacctcaagacttgtaaaaaaagcaatagactatgctattgataataatcgttcatcggtaaccctagttcataaaggtaatattatgaaatacaccgaaggtgcatttagagattggggatatgaattagcaaaaaatgaatacggtggcattgaaattgacgatggaccatggcaggagattgttaatccaaataatggtaaaaaaatcgtaattaaagatgtaatttgtgatgcatttcttcagcaaatattattaagacctactgaatatgatgtcatagcaacaatgaatcttaatggcgactatatatctgatgctttggctgcaatggtaggtggaattggtatagcgccaggagcaaatatatctgatgaatatgcagtttttgaagccactcatggaaccgcaccgaaatatgctggacaaaataaagtaaatccaggaagtcttattctttctgcag

SEQ ID NO: 207954 - DNA, 802 bp, Unknown
  Bacterial polypeptide expressing nucleotide sequence isolated from the Sargasso Sea
aatgagtaaaatcacagtaaaaaatcccgttgtagagttagacggcgatgaaatgactagaataatttggaactttattaaaaacaaattgattttaccctatcttaatcttggtatcgaatattacgatcttggtatgaaaagtagagataacactgatgatcaaataactatagaatctgcaaaagcaataaaaaaaataggtgttgggattaaatgtgcaacaattactccagatgaagatcgagttaaagaatttaatttaaaaaaaatgtggagatctcctaatggaactataagaaatattattggaggaacagtttttagagaacctataatttgttctaacattccaaaattagttccatcatggtcagatccagtagtgattgggagacacgcttttggtgatcaatatagagctactgattttaaagttcccggaaaaggaagaatggaagttaaatggacttcggaagacggtaaagatgaaattaaatatgaagtatttaatttcactggacctggtatagcactttcaatgtataatttagataaatcaatcgaagactttgctagatcatgttttagttacggtcttataaaaaactggccagtttatctttcgacaaaaaatactatcctaaaaaaatatgatggaagatttaaagacatattcgaagaaatttttaataaagaatttaaggaaaaatttaataaagctaaaattacatatgaacatagactaattgatgacatggttgcttgtgcaatgaaatggagtggtaaatatatatgggca

SEQ ID NO: 207955 - DNA, 1178 bp, Unknown
  Bacterial polypeptide expressing nucleotide sequence isolated from the Sargasso Sea
taatccgataatacctttcatagaaggagatggaattggtgttgacattacgcccgcaatgaaaaatgttgtagataatgcagtaaaaattgcctatgacaataaaaagaaaattgaatggatggaagtatactgtggagagaaatcaacaaaagtttatacaaaagatacttggctaccagatgaaacaattgaagctcttaaagaatttattgttagcataaaaggccctttaacaacaccagtaggtgggggtattagatcacttaacgttagtttaagacaaataatggatctatacgtatgcttaagaccaattagatattttaatggcgttccttcaccagttaaaaaacctgaaaatgttgatatggtaattttcagagaaaattctgaagacatttatattggtattgagtttaaggcaaaatcggctgaatcaaaaaaaattgttaaagttttagaaaaagattttggtgtatatcaaatgcgttatcctgaaaatgttggaattggagtaaaacctatttcatacggtggaactaatcgcttggtaaaaaaagcaatcgattatgcaatagataacaataaatcttctgttactttggtccataaaggtaatattatgaaatacactgaaggtgctttcagagactggggttatgaagtagcaaaaagagattatggtgctgaagatcttgatggaggcccttggcaaattattaaaaatccttcaacaggaaaagacatagttgtaaaagacgttatatgtgatgcttttttgcaacaaattcttttaagacccaaagattatgatgttatagcaacaatgaatctaaatggagactatatatcagacgcattggctgcatgtgttggcggtattggtattgcccctggagcaaatctttcagacaattatgcagtttttgaagctactcatggaactgcccctaaatatgctgggcaaaatcgtgttaatcctggaagcttaattctttcagcagaaatgatgcttagacatcttggttggacagaagctgctgatttaataattagctcaatggaaaaaactatagctgcaaaaaaagttacatatgattttgaacgaatgatgaatgatgcagacctcgttacatgttcaggttttgccgatgaaatgattaaaagaatgtaat

SEQ ID NO: 207956 - DNA, 1282 bp, Unknown
  Bacterial polypeptide expressing nucleotide sequence isolated from the Sargasso Sea
atgtcagaaaatggttcaaaaatccggatggataacggtaaacttcaagtcccaaatgaccccataatcccatttattgaaggtgatggaatcggtccagatatttggaaagcatcagtcagggtattcgatgcagcagttgaaaaggcatatcaaggggaaagaaagataaactggctagaggtttacgcaggcgaaaaagcattcaataaattcaataattggcttccagatgacaccattgagaagtgtaaagaatatctggtttcaataaaaggcccgcttactactcctattggaggcggaatgagatctttgaatgtagccctgagacaattactcgatttatatgtctgcctaaggcctgttcgatggtatcaaggggtgccttcaccggttaaaaatcctgagaatgtcgatatggtgattttcagagagaacacggaagacatttatgctggaattgaatttgaacaaggaacagagcccaatcaaaaattcctatcactttttaaagaatcatttcctgatgaattttcaaaaattcgttttcctgaatcgtcaggcataggcatcaagccagtttctcttgagggttctgagaggctccttagatcagcttttgattacgcaatagagaatggtagaaaaagtgtcacctttgttcataaaggcaatatcatgaaattcactgaaggcgccttcagaaactggggttatgaacttgcagaaagggaatatggcgatcatgtatatacctgggatcaatgggaaagaacaaaatcagaaaaaggagaagaagctgccaatcaagaacaaaatgaagccatcgaaaatggagcgatcttggttaaagatgcgattgcagacataacacttcaacaagttcttacgagaccagcagaatttgatgtcatcgcaacaatgaacctcaatggcgattatttgtcagatgcactcgcagcgcaagtgggtggaattggtatagcgccaggtggaaacatgaataataccactggccatgcaatatttgaggcaactcatggtactgctccaaaatacacagacctggataaagtgaatcctggttcagtgatactatcaggtgaaatgatgctgagatatatgggctggacagaagcagctgatctcatagttcagtcaatggatgcaaccatacaaaagaaaacggtcacttatgactttgcaaggttaatgggaaatatcacacctgtaaagtgcagcgagtttggtgatgagctcatcaaaaatatgatctgat

SEQ ID NO: 207957 - DNA, 852 bp, Unknown
  Bacterial polypeptide expressing nucleotide sequence isolated from the Sargasso Sea
tcttggacagatccagtaattatttggaagacattgcgtttggtgatcaatatagagcaacggattttaaagttcctggaaaaggaaaaatggaagtgaagtggacatcagaaaatggaaaagatgaaattaaatatgaagtgtttaattttacaggtcctggtgtggctttatcaatgtacaatttagataagtctattaaagactttgcaagatcttgttttagttatggcttaattaaaaaatggcctgtttatatgtcaactaaaaatacaatattaaaacaatatgatggaagatttaaagatattttccaagaaatttttgataaagaatacaaaagtgaatttgaaaaaaataatttgacttacgaacatagattaattgatgatatggttgcatgtgcaatgaagtggagtggtaaatatatttgggcttgtaaaaattacgatggtgatgttcagtcagatactatggctcaaggttatgggtctttaggattaatgacaagtacattgttaactccagatggaaaaataatggaggcagaggctgcacacggaactgtaactagacactatagaatgcatcaacaaggaaaagaaacttcaaccaaccctatcgcatcaatttttgcttggactagaggattagctcacagaggtaaattggatggtaatgaagaactaataaaatttgcacaaactttagaaaaagtttgtattgaatgcgtagaaagtggatcaatgacaaaagatttggcaattcttattggacctgatagcaagtatttaactaccaatcagtttttagacgaaattgatggaaatttaaaaaagaaattaaactaaa

SEQ ID NO: 207958 - DNA, 1030 bp, Unknown
  Bacterial polypeptide expressing nucleotide sequence isolated from the Sargasso Sea
tgcaattaaaaagaatggtgtaggtataaagtgcgcaacaattactccagacgaagcacgagttaaagaatttaatttaaaaaagatgtggagatctccaaacggtacgattagaaatatcattggaggaactgtatttagagagcccattatttgtaaaaatgttccaagattggtaccatcatggactgatcctgtgattattggaagacatgcatttggtgaccaatatagagcaaccgattttaaagttcctggtaaaggaaaacttgaaattaaatggacgtctgaagacggtaaagatactaaaaattacgaggtatttaatttccctggatcaggggtggctttatcaatgtacaatttagataaatcaatagaagattttgctcgatcttgttttaactatggattgattaaaaagtggccagtttacctatcaacaaaaaacactattttaaaaacttacgatggaagatttaaagacatatttcaaagtgtttttgaaaaagaatttaaatcatcatttgaaaagaataatttaacttatgaacataggcttatagacgacatggttgcttgtgcaatgaagtggagcggtaaatatatttgggcttgtaaaaactatgatggtgacgttcagtcagatactgttgctcaaggatatggttctcttggactaatgacaagtgtcttactcgcaccagatgggagaacaatggaggcagaggctgctcatggaactgttacaagacattatcgaatgcatcaacaaggaaaagaaacttcaacaaatcctatagcatcaatttttgcttggactagaggacttgctcatagaggaaaattagatgcaaatgatgagctaataaaatttgcaaatacgttagaaaatgtttgcattgattgtgttgaaactggatcaatgactaaagacttagcaattttaattgactcaaatcaaaaatacctaactactaatcaatttcttgatgcaattgatggaaatttaaaaaagaaattaaattaa

SEQ ID NO: 207959 - DNA, 1156 bp, Unknown
  Bacterial polypeptide expressing nucleotide sequence isolated from the Sargasso Sea
tatgccaaaatttgaaaaattaactttacctaatgaaggcgagataataacttttaatcaaggcaaacctaatgttcctaataatccaattgtcccatttattaggggtgatggtactggagttgatatttggcctgctactcaaatcgttcttgattcagcgattaaaaaaagctatggagatgaaagaaaaattaattggtttaaagtatatgcaggcgatgaagcttgtgaactttatggaacatataactatctaccgcaagatactattgaagcaatcaaactctttggtgtagccatcaaagggcctttaacgactcccatcggtggaggtattagatctcttaatgttgcattaaggcaaatctttgatttatatagctgtgttagaccatgcaaatattattcaggcactccaagccctcacaaaaatccccaaaatttagacgttattgtttatagagaaaatactgaggatatctacatgggaattgaatgggaagcggaggataataattgtcttgaattaattaatcacttaaataacattgtcataccaaaaagtaaaaatttaaaaaatagatctataccaaacggatcaggtattggaataaaaccagtgagtaaatctggtagccaaagacatattagaaaagctattgaacatgcaaaaagattatcaggagataaaaggcatgtgactcttgttcataaagggaatattatgaaatatacagaaggtgcatttagagattggggatatgaattagcagtaaatgaatttagagaagattgcattacagaaagagaaagctggattttagataatattcaaaaaaatccagatattacaattgaaaataatgctcgaaaaattgaaccaggttttgacaagcttacaaataacaaaaaagcattcatttgcgaagaaattaaagaagttattgcatcaatatcaaattctcacggagatggaaaatggagagaacttattcttgttgatgatcgtatagctgatagtatatttcaacaaattcaaactagacctcaagaatattcaattcttgcaaccttaaatcttaatggagactatgtttctgatgcagctgcagcaattgttgggtggcctaggtatggctcctggtgcaaatat

SEQ ID NO: 207960 - DNA, 1234 bp, Unknown
  Bacterial polypeptide expressing nucleotide sequence isolated from the Sargasso Sea
tatgtcaaaaattaaagtagccaaccccattgttgaaattgatggtgatgaaatggcaagaatcatttggaaatatattaaaaatgatttaatccttgactatgttgatctggatatcaaatacttcgatcttagtataaaatcaagagataaaacagacgatcagattacagttgatgcagcgaatgcaattaaaaaatataatgtaggtatcaagtgtgctacaattactccagatgaggatagggtaaaagaattctctttaaaaagaatgtataaatcccccaatggaacaataagaaacatcgtaggaggaactgtttttagagaaccaattattgtaaagaccattcctagatatgttcaaggttggacaagaccaatttgtattggaagacatgcttttggtgatcaatacagagcaactgatattgtgactaagggcaagggtaaattaacaatgacatttacaccagaaggtggagggaaaccagaatcatgggaagtatacaattttcaagaggatggtgtagctatgtcgatgtataatatagattcttctatctatggatttgcaagatcatgtatgaatagagcgttggataaaaagtggcctctttatttatcaacaaagaatacaattcttaaagcttatgacggaagatttaaagatatatttcaagaggtatatgacaatgaatttaaagataaatttgagaaagaaaatatttcctatgaacataggctaatagatgatatggttgcagcagcaattaaatggaagggtggttttgtttgggcttgtaaaaattatgatggagatgtacaatctgatatagtagcacaaggatttggttcgctaggcctaatgacatcaacattagttactcctgacgggcaaactatggagtctgaagctgctcatggtacagtaacaagacattttagacgtcatgaaaaaggagaagagacatctactaatccaatcgcttcaacttttgcatggacaagaggtcttatgcatagaggtaagttagacaataatcaagagcttattgatttctgcaaactactagaaagtgtttgtattgaaacaattgaagaaggaaaaatgacaaaagaccttgcattattagtttttagagatgatatggtaagttcaaattaccttacaactgaacaattctttgaagaattgaaaagtaatctagaaagaaaaataaaaggaacctaa

SEQ ID NO: 207961 - DNA, 1426 bp, Unknown
  Bacterial polypeptide expressing nucleotide sequence isolated from the Sargasso Sea
tatgccaaaatttgaaaaattaactttacctaatgaaggcgaaataataacttttaatcaaggcaaacctaatgttcctaataatccaattgtcccatttattaggggtgatggtactggagttgatatttggcctgcaactcaaatcgttcttgattcagctataaaaaaaagctatggagatgaaagaaaaattaattggtttaaagtttatgcgggagatgaagcttgtgaactttatggaacatataactacctccctcaagatactattgaagcaatcaaacactttggtgtagctatcaaaggtcctttaacgactcccatcggtggaggtattagatctcttaatgttgcattaaggcaaatatttgatttatacagctgtgttagaccatgcaaatattattcaggaactccaagccctcacaaaaatccccaaaatttagacgttattgtttatagagaaaatactgaggatatctacatgggaattgaatgggaagcggaggataataattgtcttgaattaattaatcacttaaataacgttgtcataccaaaaagtaaaaatttaaaaaatagatctataccagacggatcaggtattggaataaaaccggtgagtaaatctggtagccaaaggcatattagaaaagctattgaacatgccaaaagattatcaggagataaaaggcatgtgactcttgtacataaagggaatattatgaaatatacagaaggtgcatttagagattggggatatgaattagcagtaaatgaatttagagaagattgcattacagaaagagaaagctggattttagataatattcagaaaaatccagaaattacaattgaaaataatgctcgaaaaattgaaccaggttttgacaagcttacaaataacaaaaaagcattcatttgcgaagaaattaaagaagttattgcatcaatatcaaattctcacggagatggaaaatggagagaacttattcttgttgatgatcggatagctgatagtatatttcaacaaattcaaactagacctcaagaatattcaattcttgcaaccttaaatctcaatggagactatgtttctgatgcagctgcagcaattgttggtggcctaggtatggctcctggtgcaaatattggagataatgcagcaattttcgaagctacgcacggtactgcgccaaaacatgcaggcttaaataagattaatccaggctcagtaattcttagtggtgtaatgatgcttgaatattttggttgggatgaggcagctaacttaattactaatggtttaagtaaggcaatagagcaaaaaaaagtcacctatgatctagcacgcttaatggaaccaaaagtagaacccctatcctgcagcagttttgctgaagaaattatctcaaatttctaa

SEQ ID NO: 207962 - DNA, 1258 bp, Unknown
  Bacterial polypeptide expressing nucleotide sequence isolated from the Sargasso Sea
catgccgtatcagcacatcaaggttccggaaggcggtgacaagatcaccgtcaacaaggacttctcgctcaacgtttccgatcagccgatcattccctatatcgaaggcgacggtacgggcttcgatatcacgccggtcatgatcaaggtggtggacgcggcggtcgcgcatgcctacaagggccagcgcaagatccactggatggagattttcgcgggcgagaaggcgacgaaggtgtacggtccggacgtgtggctcccggacgaaacgctgcaggtgctcaaggaatacgtggtgtcgatcaaggggccgctcacgaccccggtcggcggcggcatccgttcgctgaacgtcgcgctgcgccaggaactcgacctgtacgtgtgcctgcgcccggtgcagtacttcaagggcgtgccgtcgccggtgcgcgagccgcaaaagatcgacatggtgatcttccgcgagaactcggaagacatctacgcgggcatcgaatgggccgcgggctccgagcaggcgaagaaggtgatcaagttcctgcaggacgagatgggcgtgaagaagatccgcttcccggaaacgtcggggatcggcgtcaagcccgtgtcgacggaaggcaccgagcgtctcgtgcgcaaggcgatccagtatgcgatcgacaacgatcgcaagtcggtcacgctggtgcacaagggcaacatcatgaagttcacggaaggcctgttccgtgacgccggctatgcgctcgcgcagaaggaattcggcggcgagctgatcgacggcggcccgtggatgcgcgtgaagaacccgaagacgggcaacgagatcgtaatcaaggattcgatcgccgatgcgttcctgcagcagatcctgttgcgcccggccgaatacgacgtgatcgccacgctgaacctgaacggcgactacatctccgacgcgctggccgcgcaggtcggcggcatcgggatcgcgccgggtgcgaacctgtcggattcggtcgcgatgttcgaagcgacgcacggcaccgcaccgaagtacgccggcaaggattacgtgaaccccggttccgagatcctgtccgcggaaatgatgctgcgccacctcggctggacggaagcagccgatacgatcatcgccgcgatggagaagtcgatcctgcagaagcgcgtcacgtacgacttcgcgcgcctgatggaaggtgcgacgcaggtgtcgtgctcgggcttcggtgaagtgctgatcgagaacatgtaa

SEQ ID NO: 207963 - DNA, 1216 bp, Unknown
  Bacterial polypeptide expressing nucleotide sequence isolated from the Sargasso Sea
atggcaaaaattatagttaaaaacccagtagttgagcttgatggcgatgaaatgactaggattatttggtcatttatcaaaaacaaactcattaaaccttatttagatatcaatctaaaatactacgatctgagtattgaaaatagagataaaactaatgatcaggtaacaatagattgtgctaaagcaattcaaaaatatggagctggagttaaatgtgcaactatcactccagatgaggcacgagtcaaagaattcaaattaaagaaaatgtggagatctcctaatggaacgataagaaatattgttggaggaacaatttttagagagccaataatttgtaaaaatgtcccaagattagttcctcattggactgatagtgtaatagttggaagacacgcatttggagatcaatataaggctactgattttaaggttccaggaaaaggaaaaatgacagttaaatgggagtcggaaaatggaaaagataaaatagaacatgaagtttttaattttgatggccctggtattgctctatctatgtataatttagataattctattaaagatttcgctagagcgtgcatgaattatggtctggttagaaaatggccggtttacttttcatcaaaaaatacaattttaaaagcttatgatggaagatttaaggacatttttgaagaaatttaccaaaatgagtttaaaaataaatttgagaaagcagatatattttacgaacatagattgattgatgacatggttgcttgcgcaatgaaatggagtggaaagtatatttgggcttgtaaaaattatgatggagatgttcagtctgatactgttgcgcaaggatatggctcgctgggtttaatgactagtgttcttagaacacctgatggtaaagtagctgaagcagaggctgctcatgggactgtaacgagacattatagacagcaccaggcaggaaaggaaacatctacaaaccctattgcttctatttttgcttggacaagaggattgtctcatagagggaaccttgatggcaaccaagaattaatcaaattttctcaatctcttgaaaaagtttgtatagaaactgttgaaagcggttctatgactaaagatttggcgatattaatcggtaaagatcaaaaatttttaacaactaatcaatttttagaggcaatagactcaaatcttaaaaaaaaacttaactaat

SEQ ID NO: 207964 - DNA, 526 bp, Unknown
  Bacterial polypeptide expressing nucleotide sequence isolated from the Sargasso Sea
acgatagaatttaaaactgattttgaaaataacgaaatagtttatgaacaccgtcttatagacgatttagttgcgtcttcaatgaaatggtcaggtaactttatttgggcttgcaagaattatgacggagacgttcagtcagacgcagttgcacaggggtttggttctttgggtatgatgtctagtgttttaatgactcccgatggtaaaacaattgaagctgaagctgctcatggaactgtaactagacattatagactgcatcaaaaaggagaaaaaacttcaacaaatcctatagcatcaatatttgcttggacaaaaggtttaaattttagaggtgagttcgatggcaacgatgaacttattaagttttcaaaggcacttgaagaaacctgtattgagactgttgagtctggtcaaatgactaaggacttggcaatacttgtagacaaaaattcaccgtggatgaacactgaagattttttaaattgtctagataaaaaccttcaaactaaattaaattaaa

SEQ ID NO: 207965 - DNA, 997 bp, Unknown
  Bacterial polypeptide expressing nucleotide sequence isolated from the Sargasso Sea
aatgagcaaaatcaaggtaaataacccagttgtcgagttagatggcgatgaaatgactagaattatttgggagtttattaagaacaaattaatcctaccatatatcgatcttggtattgaatattacgatcttggaatgaaaagtagagataatactgatgaccagatcacaatagactcagcaaatgcaatcaagaaaattggtgttggaattaaatgtgcaactatcactccagatgaagcaagagttgaagaatttgatttaaaaaaaatgtggagatctcctaatggaacaataagaaacattatcggaggaacagtattcagagagccaattatttgtaaaaatattccaaagctagtaccttcttggacagatcctgtaattattggaagacatgcttttggagatcaatatagagcaactgattttaaagtacctggtaaaggtaaaatggaagttaaatggacttctgaggatggaaaagatgaaataaaatacgaggtatttaattttacaggtccaggagtagcactatcaatgtataatttagataaatctattcaggactttgcaagatcatgctttagctatggcttaattaaaaaatggcctgtgtatatgtcgacaaaaaatacaattttaaaacaatacgatggaagatttaaagatattttccaagaagtttttgacaatgaatataaaaaagagtttgaaaaacataatttaacttacgagcacagattaatcgatgacatggttgcgtgtgcaatgaaatggagtggaaaatatatttgggcttgtaaaaattatgatggtgatgttcaatcagacactatggctcaaggttatgggtcattgggtttgatgacaagtaccctgttaactcctgatggaaaagttatggaagctgaagcagctcatggaactgtaaccagacactacagaatgcatcaacaaggaaaagaaacttcgacaaatcctatagcatctata

SEQ ID NO: 207966 - DNA, 1264 bp, Unknown
  Bacterial polypeptide expressing nucleotide sequence isolated from the Sargasso Sea
tatgagtaaatcaaagatcaaagtcccaacaaagggcgagcaaataacttacaaaaataatacgctggttgtgccggataatccgataataccttatatcgaaggagatggcattggagtggatataactcctgtaatgcttgatgttattaacgctgcagtagcaaaagcgtatgaaggcaaaagagaaataagttggatggagatctactgtggtgagaaatcagtagaactttatggcaatgatgaatggttgccagatgaaacacttcaagcttgtaaggattataaagtttcaattaaaggtccattaacaactcctgttggcggtggtatccgctcattaaatgtagctataagacaaaaattagatctatatgtatgtttgaggcctgtgaagtattttgatggcactccaagtccagtaagacgaccagatctagttgatatggtaatttttagagaaaactcagaagatatttatgctggtgttgagttcgaatcaaatacagatgcagcaaacaagctaataaaagtgcttcaagatgatttcggggtagaaaaaataaggttcacagagaattgcggaataggaattaagcctgtttcagaagagggtacaaagaggttagtaagaaaagcatttgaatatgccattcaaaatgaaaaagattctgtaacacttattcataaaggcaatatacaaaaatttacagaaggtgcgttcatggattggggttatgaacttgctcgagaggaattcgatggaaaaccccttgatggaggcccttggcatacatttaaaaatcctaatacaggtaaagatatcgtcattaaagatgtaatttgtgatgcttttttacaacaatgccttttaagaccagctgattacgatgttttggcaacgcctaacctaaatggggactatctttcagatgcgctagcagcacaagttggtggaattggaatagcgcccggagctaatctaggtgatgaagttgcagtatttgaagcaacacatggaactgctccaaaatatgcaggacaagatagagtaaaccctggctctctaatactttcagctgaaatgatgttaagacatatgggttgggtagaagctgctgatttaataattgaagctatgcaaaaaaccattagcaaaaagagagttacttatgattttgctcgactaattgatgatgcagaagaagtaagttgttctaagtttggtgatttgctaattaaaagaattcaaaagcaataa

SEQ ID NO: 207967 - DNA, 920 bp, Unknown
  Bacterial polypeptide expressing nucleotide sequence isolated from the Sargasso Sea
catggaatttgagcacataatagaacccaaaggtggttctaaaatatcaatggattcttcaggaaaacttgtagtacctgacaatcctatagttccctttatcgaaggagatggtataggttccgatattacacctgctatgattagtgtagttgatagtgcggtagataagtcttatggtggtaagaagaagattgaatggatggaaatatactgcggtgagaagtctacaatggtttatggagaagataattggcttccgcctgaaacacttagagctttagaaatttatcttgtaggcattaagggcccattaaccactccagtaggaggtggtattaggtccttaaatgttgctttgagacaagaattagatctttacgtatgtcaaaggccggttagatattttaacggagtaccaagcccagttgtgtctcctgagaaaacagatatggtgattttcagagaaaattctgaggacatttatgcaggtattgaatgggaagcagggactgaagaggctgataaagtaataaagttttttactgaagaaatgggtgtaacaaaaataagatttatggaaaattgtggaataggtgtcaaaccagtttctaagcagggtacagagagattagtagacaaagctatccagtacgctataaataatgataaggactcagttaccttggttcacaaaggtaacataatgaagtttaccgaaggttcttttaaggattggggttaccaatttgcagtttcaaagtatgatgccaaagaattagacggaggaccatggcatgcattaactaacccaattacaggaaaagaaatagttattaaagatgttatagccgatgcttttcttcagcaaatacttacaagacctgacgagtatagtgttatagctactttaaatttaa

SEQ ID NO: 207968 - DNA, 1216 bp, Unknown
  Bacterial polypeptide expressing nucleotide sequence isolated from the Sargasso Sea
aatgagtaaaatcaaggtaaataacccagttgtagagttagatggcgatgaaatgactcgtattatatgggagttcattaagaataaacttatcctaccctatcttgatctaggaattgaatattatgatcttggtatgaaaagccgtgacaatacggatgatcaaatcacaatagactctgcaaatgccatcaagaaaattggagttgggattaaatgtgcaactatcacgcctgatgaagcaagagtagaagaatttgacctaaaaaaaatgtggagatcaccaaatggaacaatcagaaatatcattggggggactgtttttagagaaccaatcatctgtaaaaatattccaaagcttgttccttcttggacagatccagtaattataggaagacatgcttttggggatcagtacagagcaacagattttaaagttcctggtaaaggaaaaatggaagttaagtggacatcagaagatggaaaagatgagataaaatatgaagtatttaatttcactggcccgggggtggcgctttcaatgtataatttagataaatctattgaagactttgcaagatcttgttttagttatggtcttattaaaaagtggccagtttatatgtcaaccaagaatacaatcctaaaacagtacgatggtagatttaaagatatttttcaagaaatatttgaaaatgaatataaagaggaatttgaaaaaaataatttaacttatgagcatagattaatcgacgacatggttgcatgtgcaatgaaatggagtggtaaatatatttgggcttgtaaaaattacgacggtgatgtgcaatcagatactatggcacaaggttatggttcgttaggattaatgactagtacacttcttaccccagatggaaaaattatggaggcagaagctgctcatggaactgtaactaggcactacagaatgcaccaacaaggtaaagaaacttcaacaaatcctatcgcatctatttttgcttggactagaggactagcgcacagaggaaagctagatagtaataatgaattaattaaatttgcacaaacaattgaaaaagtttgtattgagtgtgttgaaaacggagctatgacaaaagacttagcaatactaattggtccctcaagtaaatacttaacgactaatcaatttttagatgaaattgatggtaatctaaaagcgaaattaaattag

SEQ ID NO: 207969 - DNA, 1062 bp, Unknown
  Bacterial polypeptide expressing nucleotide sequence isolated from the Sargasso Sea
tatggaaaaaattaaagtaaaaaatcctgtcgttgaaatggatggagatgaaatgacgagaatcatttgggagtttataaaagataaactcattcttccatatattgatattgatataaaatattatgatttaggggtgcaaaatagagatagttcagaagatcaaattactattgactctgctgaagcagttaaaaagtatggtgtaggaatcaaatgcgcaacaattactccagatgaagatagggttaaagaatttaatttaaaaaaaatgtggcgttctccaaatggaacaataagaaatattttaggtggaactatttttagacaacctattatttgtaaaaatgttcctagaattgtgactaattggaacaaaccgatagttgtagcaagacatgcttttggcgatcaatatagggcgaccgatacacttatttcaaaaccaggtaaattaaaaatggtttttgaaccaacagatggcagtgaggggtttgaaaaggaagtgtttaactttgaaagaaaaggaatagcattatcaatgtataatcttgatcaatcaattattgattttgccagggcttgttttaattacggacttaatcttggctggcctgtctatttatctacaaaaaacactattttaaaagtttatgatggaagatttaaagatttatttgaaaatgttttccaaaatgaatttgcagataaatttaatgataaaaatatagtttatgaacatagattgatagatgacatggttgctactgctctaaagtgggaaggtaactttatttgggcatgtaaaaattatgatggtgacgtccaatctgactctgtcgctcaaggttatggatctttgggcttaatgacaagtgttcttatgacaccagatggaaagactgtagaagctgaagctgcccatggaacagtaacgagacattttagaaatcatcaaaaaggtttagaaacatcaacaaatccaattgcttctatttttgcttggtcaagaggcttacatttcagagggaaatttgatgataatgaacgttttaatgaatt

SEQ ID NO: 207970 - DNA, 1258 bp, Unknown
  Bacterial polypeptide expressing nucleotide sequence isolated from the Sargasso Sea
gttgagtcaagaagaaaaaatacctgaagatggtgaaattatctccatagaaaatggaaagctggtggttcctaataaaccaataatacccttcatagagggagatggtatagggccagatgtctggcgcgcgtcgaaaagaataattgatgccgctataaaaaaaacctacgaaggtgaaaaagaaattaaatgggtagaggtttttgctggtgaaaaagctaacaaattaactggaagttggttgcctgatgaaacaattgatatgtgtaataaatttcttgttgcaattaaaggtcctttgactacaccaattggtggtggcattcgttctctcaacgtagcattaagacaaattttagatctctatgtatgtctaagaccagtacgttggtttgagggtgtgccatcccccgtaaaaaatcctgagttaataaatatggtcatctttagagaaaataccgaagatatttatgctggtattgaatttgagcaaggaactgaaaataatgaaaaatttctagctcttttaaaaaaggaatttcctaattattacaaaaaaatcagattcccaaaaacatcaggtattggcattaaacctatttcatctgagggaacaaacagactgacccgggcagcattaaactatgccatacaaaataaacagaaaagtattacatttgttcacaaaggtaacattatgaagtttacagaaggagcttttcgaaactggggttacaaacttgctgaaactgaatttaaaaatatgacttatagttgggatatgtgggaaaaaacatgtgctaaaaaaggtcaagaaaaagctaatgctgaaatggagcaagcaaaaaaagatggtaaagtattaattaaagattccatagctgacattacgctgcagcaagtgttaactcgaccagaagagtttgatgtaattgcgacaatgaatttaaatggtgattatctttctgatgcattagctgcccaagtaggaggcataggaatagcgccaggtggtaatataaattatgaaacaggacatgcaatttttgaagcaactcatggaacagcgccaaaatatgcaaatcaagataaagtaaatccagggtcattattactatcaggagaaatgatgctccgttatttggggtggacagaagcagctgataatattattaaggcaatggataaaacgattgcaaataaaactgtaacatatgattttgcaagattgatgaataatgcaaaagaaatttaa

SEQ ID NO: 207971 - DNA, 1261 bp, Unknown
  Bacterial polypeptide expressing nucleotide sequence isolated from the Sargasso Sea
tatgaaattcgaacatatagtggagcctagcgaaggttcaaaaatcacaatagataaaaaaggaaacttagttatccctgataatcccatcattccatttatagaaggagatggcataggttcagatataactcctgcaatgatacaagtagttgatagcgcagttgagaaatcttacaagggcaaaagaaagattgaatggatggaaatttactgcggtgaaaagtcaacagaagtatatggtgaagataattggctacctcctgaaactttaagagctttagagatttatttagttggcataaaaggacctttaaccacgcccgttggtggaggaataagatctcttaatgtcgcattgagacaggaactagacctctatgtatgtcaaagaccggtaagatattttgatggagttccgagcccagtaactaatccagaaaaaactgacatggtaattttcagagaaaattccgaagatatttatgctggcattgagtgggaagcaggttccgatgatgctaagaaagttattaccttccttagaaaagagatgggtgtcacaaaaataagatttcctgaagaatgtggaataggagttaagcctgtttcgaaagagggtactgaacgtttggttgataaagcaattcaatatgctattgccaatgacagagactcggtcactttagtccataagggcaatataatgaaatttacagaaggttccttcaaagactgggggtatcagtttgcggcttcaaaatatgatgcaattgaactagacggaggtccatggcatagtcttaaaaacccaaatactggaaaagaaattatcataaaggatgttatagctgatgcatttcttcaacagattcttactagaccagatgaatatagtgttattgctacactaaatttaaacggagattatatctccgatgctttagcagctgaggtaggaggaataggtattgctcctggtgcaaacttaggtgatgaggttgctttatttgaagctacgcatggaactgcaccaaagtatactggtttagataaagttaatcctggatcattaatattgtctgcagaaatgatgctgagatatatgggttggattgaggctgctgatttaattatagatgggcttgctaaaacaataagtcaaaaaactgttacatatgatttcgaaagattaatgagtggagctagcttgttgaaatgttctgaatttggagaggccattatcaagaatatggattaa

SEQ ID NO: 207972 - DNA, 1258 bp, Unknown
  Bacterial polypeptide expressing nucleotide sequence isolated from the Sargasso Sea
tatgaaatttaaaaatatagttgagcctacggatggctcaaaaataacatacaagggagaacaattaattgtccctaataacccaattatcccatttattgaaggtgatgggataggttctgatataacgcctgcaatgatagatgttgtagatgcagcagttgctaaggcctatgataataaaagaaaaatttcttggatggagatatattgtggagagaaatcagttgaagtttatggagatgacaactggttacctaaagaaacactaaaagctttagaagagtatcttgtaggtataaaaggaccgttaactacacctgttggaggtggaataaggtctttaaatgtagctctaagacaagaattagatttatatgtatgtcaaagaccagttagatactttgaaggagtaccaagccctgttgttagtccagaaaagaccgatatggttatatttagagaaaattcggaggatatatatgcaggcatagaatgggaggcgggcagtgaaggctctgaaaagataattaaattcctagtagaagaaatgggagttactaaaattagattccctgacttttgtggaataggcgtaaaacctgtttcaaaagaaggaacacaaagactagttgataaagctattcaatatgcaatagctaatgatagagattctgtaacctttgttcataaaggtaatattatgaagtttaccgaagggtcttttaaagattggggttatcaacttgctgctgaaaaatatggagccgaagagttagatggaggtccatggcatttattaaaaaacccaaaaacaggtaatgaaattattattaaagatgtaattgcagatgcatttcttcaacaaattctaacaagacctgatgagtatagtgttatagctacattaaatttaaatggagattatatttctgatgcattagctgctgaagtagggggcataggtatagctccaggtgctaatttaggcgacaaagtagcactttttgaagctacacatggaacagctccaaaatatactggtctagataaggttaaccctgggtctcttattctttcagctgaaatgatgcttagatatatgggctggcaagaagcagctgatctaattatcctaggtctttcacgaaccatagaaagcaaaacagtaacttatgactttgaacgtttaatgcaaggagctagcctagttaaatgttcagagtttgggaaagctattatcgataatatggagtaa

SEQ ID NO: 207973 - DNA, 1216 bp, Unknown
  Bacterial polypeptide expressing nucleotide sequence isolated from the Sargasso Sea
atgagtaaaatcaaggtaaataacccagttgtagagttagatggcgatgaaatgactcgaattatatgggagttcattaagaataaacttatcctaccctatcttgatctaggaattgaatattatgacctcggtatgaagagccgtgacaatacggatgatcaaatcacaatagactccgcaaatgccatcaaaaaaattggggttggaattaaatgtgcaactatcacacctgatgaagcaagagtagaagaatttgacctaaaaaaaatgtggagatcaccaaatggaacaatcagaaatatcattggggggactgtttttagagaaccaatcatctgtaaaaatattccaaagcttgttccctcttggacagatccagtagttataggaagacatgcttttggagatcagtacagagcaacagattttaaagttcctggtaaaggaaaaatggaagttaagtggacttcagaagatggaaaagatgaaataaaatatgaggtatttaatttcactggtccaggggtagcgctttcaatgtataatttagataaatctattcaagactttgcaagatcttgttttagttatgggcttatgaaaaaatggccagtttatatgtctaccaaaaatacaattctaaaacaatacgatggtagatttaaagatattttccaagaaatatttgaaaatgagtttaaagaagaatttgaaaaaaataatttaacttatgagcacagattaattgacgacatggttgcatgtgcaatgaaatggagtggtaaatatatttgggcttgtaaaaattatgatggtgatgtgcaatcagatactatggcacaaggttatggttcgttgggattaatgactagtacacttcttaccccagatggaaaaattatggaagcagaagccgctcatgggactgtaacgagacactatagaatgcatcaacaaggtaaagagacttcaacaaatcctatcgcatctatttttgcttggactagaggactagcgcacagagggaaactagatagtaataatgaattaattaaatttgcacaaacaattgaaaaagtttgtattgagtgtgttgaaaacggagctatgacgaaagatttagcaatactaattggtccctcaagtaaatacttaacgactaatcaatttttagatgaaattgatggtaatctaaaagcgaaattaaattaaa

SEQ ID NO: 207974 - DNA, 792 bp, Unknown
  Bacterial polypeptide expressing nucleotide sequence isolated from the Sargasso Sea
ttctgatgagcaaaaaaattattgaactaatgaatgattttggacagggcaagaaaattagatttcccgattcaagctcctttggtttaaaacctatttctaaagagggatctattagattatttgatgcagcattgaattatgcgatagaaaataatagaagatcagttaccatagttcacaaaggtaatattatgaagtttacggagggatattttaaaaagtggacttatgctcatgctgaagaacaatatggtgataaagtatttacttgggctcaatatgatagaattcaagaagaaaaaggtactgaagcagcaaatatggctcagaaaaaagctgttttagatggaaaaattattattaaagatgttattgctgatgcatttcttcaacaaattttgctcaggccaaatgagtatgatgtaattgctaccatgaatcttaatggagattatttatcagactcagctgcagctgcagtaggcgggattggtattgctcctggagcaaatataaattataaatctggacatgctatttttgaagcaactcatggaactgcaccaaaatatgctggccaagataaagtaaacccatcttcagtaattctttcagctgtaatgatgttgaattatatgggatggaaagaagctgctaattcaattgagtatgcattagaaaaagcaatttttaataaaaaagttacttatgattttcatcgattaatggacaatgctactctattaaaatgttcagaatttggtgatgaaatcatcagcaaattctaaa

SEQ ID NO: 207975 - DNA, 1216 bp, Unknown
  Bacterial polypeptide expressing nucleotide sequence isolated from the Sargasso Sea
tatgagcaaaattaaggtaaaaaacccaattgttgaacttgatggtgatgaaatgactagagtcatatgggagttcatcaaaaaaaaattaattctacaatatttagatttagggattgaatattatgacttaggaatgaaaagcagggatgctaccaatgatcaaattactattgattgtgcaaaagcaattaaaaaaaatggtgtaggaatcaaatgtgcaactatcacccctgacgaagcaagagtaaaagaatttaatttaaaaaaaatgtggaggtcacctaatggaacaataagaaatattttaggaggaacagtttttagagagccaataatctgtaaaaatatccctaaattagttccaagttggactaatccaatttgtataggtaggcacgcatttggagatcaatatagagcaacagattttaaagttccaggcaaaggaaaattggaaataaaatggacgtcagaagatggtactgaaaaaaaagaatttgaagtatttaattttccagggtccggtgttgcgctatcaatgtataacttagatcaatcaataaaagattttgctagggcttgtatgaattatggacttaatagaaaatggccagtttatctttcaacaaaaaatacgattttaaaaaattatgatggcaggtttaaagatttgttccaagaagtttttgataaagaatttaaagaaaaatttaaagaaagagaaataacttatgagcatagacttatagatgacatggtagcgtgtgctatgaaatggaatggcaactatatttgggcctgcaaaaactatgatggagatgtacaatctgatacagttgctcaaggatttggatctttgggtcttatgagtagtgttttgatgacacctgatggaaatactatagaagctgaagctgcacatgggactgttactagacattatagactgcatcaacaaggtaaagaaacatctacaaatccaatagcatctatatttgcatgggcaagaggtctttatcatagaggaaagatggataataacgaagaacttaaaaaatttgttaaaactttagaaaaagtttgtattgaaacagttgaaagtggcttaatgacaaaagatttagcaattttggttggtccatcaagtaaatatcttacaacaaatcaatttctagatgttattgatggaaaccttaaaaataaactaaattaa

SEQ ID NO: 207976 - DNA, 904 bp, Unknown
  Bacterial polypeptide expressing nucleotide sequence isolated from the Sargasso Sea
atgagtaaaatcaaggtaaataaccccgttgtagagttagatggtgatgaaatgactcgaattatatgggactttataaaaaacaaactcattctcccatatcttgatttaggaatagaatactacgatttaggaatgaaaagtcgtgatgatacagacgaccagatcacaattgactctgctaacgcaataaaaaaaataggggtaggtatcaaatgtgcaactataactcctgatgaagctagagttgaagagtttgacttaaaaaaaatgtggagatctccaaatggtaccattagaaatattatcggtggtactgtttttagagaacctataatttgcaaaaatattccaaaacttgtgccatcatggacagatcctgtggtgattggaagacatgcatttggtgatcaatatagagcaactgattttaaggtacctggtaaaggtaaaatggaggtaaaatggacatctgaagatggaaaagatgagataaaatatgaggtatttaattttactggccctggtgtagctctttcaatgtacaatttagacaaatcaatcagtgacttcgcaagatcttgttttagctatggattgataaaaaaatggccagtttatatgtctacaaaaaatacaattctcaaacaatatgatggaagatttaaagatatatttcaggaaatttttgacaacgaatataaagaagattttgaaaaaaataatttaacatatgagcatcgattgattgatgatatggttgcatgtgcaatgaagtggagtggtaaatatatttgggcatgtaaaaattatgatggtgatgttcaatcagatacgatggctcaaggatatggttctttaggtttaatgaccagtactttattaactccagatggaaaagtaa

SEQ ID NO: 207977 - DNA, 1216 bp, Unknown
  Bacterial polypeptide expressing nucleotide sequence isolated from the Sargasso Sea
aatgagtaaaattaaggtaaataatcctatcgttgaactggatggtgatgaaatgactagagtcatctgggacttcattaaaaataaattaatacttccttatgtagacttgggtattgaatattatgatcttagcatgaaaagcagagatgataccaatgatcaaataactatagattgtgcaaaagccattaagaaaaatggagttggtattaaatgtgcaacgataactgctgacgaattaagagttaaagaatttaatttaaagaaaatgtggagatctccaaatggaacaattagaaatattattggtggcacagtatttagagagccgattatttgtaaaaatatcccaaaattagttccatcatggactgatccattgatcattggaagacatgcttttggagatcaatatagagcaactgattttttagtacctggaaaaggtaagcttgaagttaagtggacatctgatgatggaaaagatgaaaaaaattatgaggtatttaattttccaggacctggtattgcattatcaatgtataatttagacaaatctattgaggacttcgctaggtcttgcttcaattatggcttaataaaaaaatggcctgtatacctttcaacaaaaaacacaattctaaaaaaatacgatggtagatttaaagatatttttcaaaaaatttttgaagaagagtttaaaactgaatttgaaaataataaaattacttacgaacatcgattaatcgatgatatggttgcatgtgcaatgaaatggagtgggaagtatatttgggcatgcaaaaactatgatggtgatgtccagtcagatactgtggctcaaggatatggttctcttggattaatgactagcgttttgttagctccagatggaagaacaatggaggcagaagcggctcatggaactgtaacaagacattttagaatgcaccaacaaggaaaagaaacttcaacaaatcctatagcttcaatttttgcttggactagaggattggcgcacagaggaaagctagataacaataatgagttaattaaattctctaatactttagaaaaagtttgtattgattgtgtagaaaatggatctatgacaaaggatcttgcaatattagttggtccttctacaaaatatcttacaacaaatcaattccttgatgaaattgatcgtaatctattaaagcaattaaactag

SEQ ID NO: 207978 - DNA, 775 bp, Unknown
  Bacterial polypeptide expressing nucleotide sequence isolated from the Sargasso Sea
tatgagcaaaattaaggtcaaaaaccctatagttgagcttgatggtgatgaaatgactagggttatttgggaattcataaagaacaagcttattttaccgtatcttgatcttggtattgaatattatgatcttggtattaaaaacagagacaaaacctctgatcaaattactatagatagtgctagagcaataaaaaaaattggcgttggtattaaatgtgcaactattactcctgatgagggaagagtaaaagaattcaatttaaaaaaaatgtggagatcacctaatggtacaataagaaatattttaggaggaaccgtttttcgtgaaccaatactatgcaaaaatatacctaaacttgtaccgagttgggaaaatccaatatgtattggaagacatgcatttggagatcagtacagagcaacagattttcaagttcctggtaaaggcaaattagaaattaagtggacttctgaagatggaaaagaaaaaaaagaatttgaggtatttaattttcctggaccaggtgtagctttatcaatgtataacctagatcaatcaattaaagatttcgcaagatcatgtatgaactacggattaaatagaaaatggccagtatttttatcaacaaagaacacaattcttaaaaaatacgatggaagatttaaagatttatttcaagaagtatatgataatgaattcaaagaaaaatttaaagaaagaggaatttcttacgagcacagactaattgatgatatggtggcttgtgcaatg

SEQ ID NO: 207979 - DNA, 1216 bp, Unknown
  Bacterial polypeptide expressing nucleotide sequence isolated from the Sargasso Sea
atgactaaaatcaaagtaaaaaatccggttgttgaattagacggcgatgagatgacaagaattatttgggatcttattaaaaagaaacttattcttccgtatttagatattgatctccattattatgacttaggtgttgaatacagagatcaaacaaatgaccaagttactattgatgctgcagaagctatacaaaaacatggtgtaggagtaaagtgcgctactataactcctgatgaagacagagtagaagaattcaatcttaaagaaatgtggaaatctcctaacggaactataagaaatattcttggtggtacagtttttagagagccaattatatgctctaatattccaagacttgttccaggttggactcaaccaattgtaattggaagacatgcttttggtgatcaatatagagctacagattttgtagttcctgcaaaaggaaaactatcaatgaaatgggtctcagaagatggttcgcaagaaattgaagaggatatatatgactttgaagatagcgggattgctatgggaatgtataatcatgataaatctattaaggattttgcaagagcttgttttaattacggtataaatcgaaaatggccagtttatctatctacaaagaatacaattttaaagaaatatgatggtagatttaaagatctctttcaggaagtatatgaaaaagaatataaagaacaaatggatgcattaaatattgaatatgaacataggcttattgatgacatggttgcatgtgctttaaaatggtctggagcatttatttgggcttgtaaaaattatgatggtgatgttcagtctgatacagttgcgcaaggttttggttcactaggtcttatgtcaagcgctcttatgacgccagatggtaaaactgtagaagccgaagctgctcatggaacagttactcgtcattatcgcttacatcagaaaggtgaagaaacctctacaaattcaattgcatcaatttttgcttggacaaggggtttagctcatagagcgaaattagatgataacgaagaattgcaatcattttctaatcttcttgaaaaagtttgtattaaaactgtagaaaaaggatttatgaccaaagatctggctttgcttgttggctctaatcagtcatggttaaatactcatgattttattgataaaattgactccaaccttcaatctgaaatgtcttaaa

SEQ ID NO: 207980 - DNA, 1255 bp, Unknown
  Bacterial polypeptide expressing nucleotide sequence isolated from the Sargasso Sea
atgacttataaaaaaataaaagttccaaaaaaaggtcaaaaaatttcatataaaaatggaaagcttaatgttcctgataatcctgtaattccatatattgaaggcgatggtataggagttgatattactccacctatgattaaagtagttgatgaagcagtaaaaattgcttacagcggaactaaaaaaatagaatggatggaagtcttttgtggtgaaaaggctacaaaagtctacacaaaagatacatggctacctgacgaaacaatagatgctctaaaggaatatgttgtgagtattaaggggcctttaaccactcctgtaggtggcgggataaggtcattaaatgtttcacttagacaattattagatttgtatgtctgtttgaggccaattaggtattttgatggcgtaccatctccagtaaaaaaacctgaagaggtggatatggtaatatttcgagaaaattcagaagatatctattgtggtgtagagtttgaaggaaattcaaaagaagctaaaaaccttctaaaagttttaaaatctaaatttgatgttacaaaaataagatttgaagaaaatgttggtattggtgtaaagccgatttctgaagagggcacccacagattagttaagaaagctattgattatgccatcgacaataatagatcatcagtcacacttgttcataaaggaaatattatgaaatttactgaaggtgcattcagagattggggctatgaattatctaaaaattcttatggtggaatagaaatagatgatggaccttggcaagagataataaaccccaacaatggaaagaaaattgtaattaaagatgtaatttgtgatgcatttttacaacagatacttctaagaccaacagagtatgatgttatcgcaacaatgaacctaaacggtgattacatatcagatgcactagctgcaatggtaggcggtataggtatagctcctggtgcaaatatttctgatcaatatgcagtttttgaagctactcatggaacagcaccaaagtatgctggtcaaaataaagtaaatcctgggagtttaatattatctgctgaaatgatgttgaggcatatgggttggattgaagctgcagatttaataattaagtcaatggataggacaataagcgctaaaaaggtaacgtatgattttgcgcgaatgatgactgatgctgatatggtttcatcttctggttttggagatgaaatgattaaaaggatgtgat

SEQ ID NO: 207981 - DNA, 550 bp, Unknown
  Bacterial polypeptide expressing nucleotide sequence isolated from the Sargasso Sea
atgtcgaaaataaaagtaaataatccagtagttgaattagatggtgatgaaatgacaagaattatctggaaattcataaaagacaaactcattttaccttttgtaaatattgatattaaatattatgatttaggtattaaaaatagagattttactgatgatcaagtaactgttgacgcagctaatgctattaaaaaatttaatgttggaataaaatgtgcaactattaccccagatgaggagagggttaaagaatatactctaaaaaagatgtggagatctcctaatggaacaatcagaaatattgttggaggaactgtttttagagaacctattataataaagaacgttccaagatatgttcaaggctggactaaaccaatttgcataggaaggcatgctttcggcgatcagtacaaagcaacagatatagtaactcacggaaaaggaaaacttacaatgacttttactccagataatggaaaagattcaaaatcttgggaaatttatgattttcaggaggatggagttgcaatggggaatgtataac

SEQ ID NO: 207982 - DNA, 361 bp, Unknown
  Bacterial polypeptide expressing nucleotide sequence isolated from the Sargasso Sea
aatgtcgcaagatggttcaaaaatccggatggataacgggaagcttcaagtcccaaatgatcctataatcccatttattgaaggcgatggcattggtcctgatatttggaaggcatcagtcagggtattcgatgcagcagttgaaaaggcatatcatggggaaagaaaaataaactggctagaggtttatgcaggtgaaaaagcattcaataaattcaataactggctcccagatgacaccattgagaagtgcagagaatatctggtttcaataaaaggtccgcttactactcctattggaggcggaatgagatctttgaatgtagcgctgagacaattactcgatttatatgtctgcctg

SEQ ID NO: 207983 - DNA, 654 bp, Unknown
  Bacterial polypeptide expressing nucleotide sequence isolated from the Sargasso Sea
tatgagcaaaattaaggtaaaaaaccccgttgttgagctagatggagatgaaatgacaagaattatttggtcatttatcaaaaaaaaactaataactccttacctagatttaaaaattgagtactttgaccttgggattgaaagtagagacaaaacctcagatcaaattacaatagattgtgcaaatgctataaaaaaatgtggagttggtattaaatgtgcaactattacacccgatgaagctagagtaaaagaatttaaactaaaaaaaatgtggagatctccaaacggtacaattagaaatattttaggaggaacagtttttagagagccaattatttgtaaaaatgttccaaaacttgttcctggatggactaaaccaattataattggaaggcatgcttttggtgatcaatatagagcaactgattttgttgtaccgggtaaaggaaaattagaagttaaatggacttcagaagatggtaaagataaaaaagaatttgaaatttttaattttacaggacctggggtttctttgtctatgtataatctggacaattctataaaagattttgcaagagcttgtatgaattatggtcttgaaagaaaatatcctgtttacatgtctacaaaaaatacaattttaaaatctta

SEQ ID NO: 207984 - DNA, 1237 bp, Unknown
  Bacterial polypeptide expressing nucleotide sequence isolated from the Sargasso Sea
ttgaaagaaaatttaaatagagaagaattatctgcagcaatttctgatactagaaaatcttttgatactgataatcctataattccgtttatcgaaggtgacggaataggtatagacatatggcctgcttctcagaaagtatttgattcagctgttgaaaaagcctataacaatcaaagaaaaattgaatggatggaagttttagctggtcaaaaagcatatgataatgaaaatgagtggttgcctgaaaaaacaattgaaatgtttgataaatatgggataggaattaaaggacctttaactactcctgttggaggtggaattagatctataaacgtctcaataaggcaaaaattagacctttatgcctgtgtaaggcctttgaggtggtttaaaggtgttgaaacaccaacaaagaacccaggagatgtagatattgctttatttagagaaaatacagaagatgtttattcaggcaaagaattagagatgggttctgaggaagtcaaaacattaaataactttctaaagtctgaatttggatgggaaattagagaagatagcggtattggaattaaaccaatttcccaaactgcatcagaaagattaattagagcagcactgaattatgcagtagagaatggaaagaaaaacctagcaatagtacataaaggaaacatcatgaaatttaccgagggagcatttcgaggctggggctatgaattagttaaaaatgaattttcagatgttgcagtatcttgggaagattgtaaaggtgaaccaggagacaagattctagttcaggacgtgatagcagatgcttttttacagcagatattaattaagcctcatgaatttgatgtgattgctaccacaaatcttaatggagattatgcatccgatgcactagcagctcaaattggaggaattggaataagtcccggtggaaatataaattatgaaaatggtaaatcagtttttgaagctactcatggaacagctccaaaatatgctggacaggacaaagctaaccctggatctctaatactttcaggtgaaatgatgtttaggtatatgggttggaatgaagctgcagatttagtaattaaagctatggaaaaatcaattagtgaaggtaatgttacctacgacttagcgagaggtagatctgatgcaagaactcttccttcatcagaattttctaaatccttaattgaaaatatagaaagcttttaag

SEQ ID NO: 207985 - DNA, 961 bp, Unknown
  Bacterial polypeptide expressing nucleotide sequence isolated from the Sargasso Sea
tttggtttaaaacgtatgtaccgatccccaaatgggacaatccgcaatattcttggagggacggtatttagacaaccaatattgtgttctaatgttcctcgccttgttcccggttggaagaagccgatagttattggccgtcatgcctttggcgatcagtatagggcaactgatatccctattcccgggcctggtaaagtcgtcatgcgatatgagccagctgacggaggtgaagtaatagagcatgaggtctttgattttgagggaagaggtgtcgcgctggcgatgtataacctcgatgagtcaattagagggtttgcccgtgcctctctgaactacggccttgaattagggtggcccgtatacatgtccacgaaaaacacaatccttaaggtgtatgatgggcgattcaaagacatctttgaaaaagtctatgaggaagaatttaaagagcgttttgttgaacaaggtctcacttatgagcacaggttgatagatgatatggtagctgctgcgctcaaatgggatggaggttttgtctgggcttgcaaaaattatgatggggatgtgcaatcggatactgtagcgcagggattcggatcactgggactaatgacttctgtattaatgacgccagacggaaatgttatagaagcagaggcggctcatgggactgtaacccgacactttagagaacaccaagctggtagagagacttctaccaacccaattgcttctatttttgcttggacaagaggtctctatcacaggggtagatttgatgaaacgtcatcagttcaacattttgcgaatacattagaggaggtctgtatagaaactgtggaatcaggcctaatgacaaaggacttagccttacttgttgggcccagccaggagtggctatctacaagtcaatttttggatgccttagatgatagattgcggaacaaattcgcttaac

SEQ ID NO: 207986 - DNA, 1216 bp, Unknown
  Bacterial polypeptide expressing nucleotide sequence isolated from the Sargasso Sea
ttgagtaaaataaaggtaaaaaatccaattgtagagctagatggtgatgaaatgaccagggttatctgggagttcattaaaaacaagctaatactcccatatcttgatttaggaattgaatactatgaccttggtataaaaaatagagacaaaacaaatgatcaagtaacgattgaatgtgctaatgcaattaaaaaaaatggtgttggaataaagtgtgcaacaattacacctgatgaattaagagtaaaagaatttgaattaaaaaaaatgtggagatctccgaatggaacaataagaaatattttgggaggtactgtttttagagaaccaataatttgcaaaaatgttcccaaattagttcctagttggacaaatcctatatgtattggaagacatgcgtttggagatcaatatagagccactgactttaaggtaccaggcaaaggaaagttagaaatgaaatggacatctgaagatggaaaagaaaaaaaagaatttgaagtatttgaatttcctggaccaggtgttgcattatcaatgtataatttagatagatcgataaaagattttgcaagagcatgtatgaattatggtcttaatagaaaatggcctgtttatttatcaacaaaaaatacaatattaaaaaaatacgatggtagatttaaagatttgtttgaagaagtttatgatcaagagtttaaaaaaaaatttgaggaaagaaatataacctacgaacataggttaatcgatgacatggttgcatgtgcaatgaagtggaatggaaattatatttgggcatgtaaaaattatgatggtgatgttcaatcagatactgtagcacaaggatttggatctcttggattaatgaccagtgtactaatgacaccagatggaaaaaccatagagtctgaagctgcacatgggactgtaacaagacactacaggttgcatcaacaaggtaaagaaacctcaactaacccaattgcctcaatctttgcttgggcaagaggcttgtaccacagaggtaaaattgacggcaatgaagatttaaaaaagtttgtaaaaaacttagaaaaagtatgtgttgaaactgttgagtctggatctatgacaaaagatctagcgattttaattggaccatctactaaatatctaactactaaccaatttttagacgttttggatggcaacttaaagaaaaaactaaattaaa

SEQ ID NO: 207987 - DNA, 1210 bp, Unknown
  Bacterial polypeptide expressing nucleotide sequence isolated from the Sargasso Sea
atggcaaaaataaaagttaaaaaccctgtagttgaaatggatggagatgaaatgaccagaatcatctgggaatacatcaaagaacaattaattttgccctatcttgatatagatatcaaatattttgatcttggagtaattaaaagagatgaaacaaatgatcaaatcaccatagacgctgccgaggcggtgaaaaaatatggtgtaggaataaaatgtgcaacaattacacctgatgaaaatcgagtagaggaattcaaattaaaacaaatgtggcgttctcccaatggaacaataagaaatatactaggaggaactatatttagacagccaattatatgcaagaatgttccaagaataatcacaaactggaaccatccaattgtagttgctagacatgcctttggtgatcaatatagagcgactgacacattaattaataaaccagggacacttaaaatggtttttgaacctaaagatggatctgaaggatttacaaaagatgtatatgaatttgaaaaatctggtgtagccctatcaatgtataatttagataattcaattaaagactttgctagagcttgttttaattatggacttaaccttggttggccagtttacctttctactaaaaatactattttaaaaatctatgatggaagatttaaagatttatttcaggatgtatttgatactgaatttaaaaataagtttaaagaaaaagatatagtttatgaacacagattaatcgatgatatggtagcgtcagccttaaaatgggaaggtaattttatttgggcttgtaaaaattatgatggagatgttcaatcagattctgttgctcaaggatttggatcactaggtttaatgacaagtgtgttaatgaccccagatggtaaaacagtagaggctgaagctgcacatggaactgttacaagacattatagaaatcatcagaaaggtatagaaacttcaactaatccaattgcatcaatttttgcttggacaaggggtttaagttttagaggagaatttgatggtaataatgaattaataaattttgctaaaaaattggaagaaacgtgtatcaaaactgtagaaagtggtgaaatgacaaaagatttagcaatattaattaataaagatcagaaatggttaaacactcaagattttttaagcgcaataaaaaacaattttcaaattaactaat

SEQ ID NO: 207988 - DNA, 947 bp, Unknown
  Bacterial polypeptide expressing nucleotide sequence isolated from the Sargasso Sea
gatgagtaaaattaaggtaaaaaaccccattgtggagcttgatggtgacgaaatgaccagagttatatggaacttcattaaaaacaaactcgttctaacttatttagatcttaaaattgagtactacgatttgggaatggaaagtagagataaaactgaagacaggatcacaatagaatgtgctaatgcaattaaaaagaatggagtcggtattaaatgtgcaacgatcacacccgacgaagcaagagtaagggaattcaatctcaaaaaaatgtggagatctccaaatggtacaataagaaatattattggaggaactgtttttagagaaccaataatttgtaaaaatattccaaaacttgtaccctcatggacagaaccattaattataggtagacacgcatttggtgaccaatatagagcaactgattttatggtacctggtaaaggtaaattagaaattaaatggacagctgaggacggatctgatgagagaaaatacgaagtctttaactttccaggtccagggattgcattatcaatgtataatttggataaatcaatagaagactttgcaagatcttgctttaattatggattaattaaaaaatggccagtttatctttctactaaaaatactattttaaaaagatatgatggaagattcaaagatatttttcaagaagtttttgaaaaagaatttaaaaacaaatttgatcaaagtaagattacttatgaacatagattaattgacgacatggtagcatgtgccatgaaatggcatggtaaatatatttgggcatgcaaaaattatgatggagatgtgcaatcagatacagttgctcaaggatatggatctttaagtttaatgacaagtgtattgcttgctccagatggcaaaaacatggaagctgaggctgcacatgggacagtaacaagacacttta

SEQ ID NO: 207989 - DNA, 1216 bp, Unknown
  Bacterial polypeptide expressing nucleotide sequence isolated from the Sargasso Sea
aatgagtaaaataaaggttaaaaaccccattgtcgaacttgatggtgatgaaatgaccagagttatatgggacttcattaaaaataagcttattttaacttacttagatttaaaaattgaatactacgatttggggatggtaagtagagataaaactgaagataaaatcaccgttgaatgtgctaatgcaattaaaaagaatggtgttggaattaaatgtgcaactattacccctgatgaggccagagtaagagagtttaatttaaaaaaaatgtggagatctccaaatggtactatcagaaatattattggaggaactgtttttagagaaccaataatttgtaaaaatattccaaaacttgttccttcttggacagatcctttaatcataggtagacatgcctttggggatcaatatagagcaactgactttactgttcctggtaaaggtaaattagaaattaaatggactgctgaagatggatctgatgagagaaaatatgaagtctttaattttcccggtcctggaattgctttatcaatgtataatttggataaatcaatagaagactttgcaagatcttgttttaattatggattaattaaaaaatggcctgtttacctttcaactaagaatacaattttaaaaagatacgatggtagattcaaagatatttttcaagatgttttcgaaaaagaatttaaaaataaatttgagcaaaataaaattacctatgaacataggttaattgatgacatggtagcatgtgcaatgaaatggcatggtaaatatatctgggcatgtaagaattacgatggagatgttcaatcagatactgtagctcaaggatatgggtcattaggtttaatgacaagtgttttacttgctccagatggtaaaacgatggaagctgaagcagcacacggaacggtaaccagacatttcagaatgcatcaacaaggaaaagaaacttcaacaaatccaatagcttcaatttttgcttggacacgtggtttagctcacagaggaaagttagatggaaacgaagaactgattaaatttgcagaaacacttgaaaatgtatgcgttgattgtgttgaggaaggatcaatgactaaggatttagctatcttaataggtccttcgacaaagtatttaacaacaaatcaatttttagataccttagacggtaagttgagacaaaaactaaattaa

SEQ ID NO: 207990 - DNA, 556 bp, Unknown
  Bacterial polypeptide expressing nucleotide sequence isolated from the Sargasso Sea
aagatttaaagatatatttcaagaggtatttgataaggagtacaaaaaagatttcgagaaacaaaaattgacatatgaacatagattaattgatgacatggtagcatgtgcaatgaagtggagcggtaaatatatatgggcgtgtaagaattatgatggtgatgttcaatcagatacaatggctcaaggatatggatcgttagggttaatgactagtactttactaactccagatggaaaaataatggaggctgaagcagctcatggtacagtaactagacactatcgaatgcaccagcaaggtaaagagacatcaactaacccaatagcatcaatttttgcttggactagaggattagcacatagaggtaagctagatggaaatcaagaacttataaagtttgctaatactatagaagaagtttgtattggttgtgttgagagcggatcaatgacaaaagacttagcaatattagttggtccatctagtaaataccttacgaccaatcaatttttagatgtaatagatggtaatttaaaaaagaaattaaattaa

SEQ ID NO: 207991 - DNA, 1070 bp, Unknown
  Bacterial polypeptide expressing nucleotide sequence isolated from the Sargasso Sea
aaaaatagaatggatggaagtatattgcggtgaaaaagcaactcaagtatatgataaagatacatggttaccagatgagacaattgaagcactgaaagaatatgttgttagtattaaaggacctctaactacaccagtaggtggtggcattagatcattaaatgtttcgttaagacaattattggacttatatgtttgtttgagaccaattagatattttgatggtgtgccatctccagtcaaaagaccacaagatgttgatatggttatatttagagaaaactctgaagatatatattgtggtgtagaatttgaaggaaattcaaaagaagctaaaaaacttgtcaagactttaaaaaatgattttgaggtttcaaaaattcgttttgaagaaaatgttggaataggtgttaaacccatttctcaggctggcacaacaagacttgtaaaaaaagcaattgattatgctattgcaaataacagaacgtcagtaactttagttcataaaggaaatattatgaaatttactgaaggtgcttttagagattggggttacgaagtagcaaaaaatgattatggcggcgttgaaatcgatgaaggcccatggcaagaaataacaaacccaaaaaatggtaagaaaataataattaaagatgttatatgtgatgcatttcttcaacaaattttgctaagacctacagaatatgatgttattgcaacaatgaatttaaatggtgattatatatctgatgccttagcagctatggttggtggaataggtattgctccaggtgcaaacatttctgatgattatgctgtatttgaagctactcacggaacagcgccaaaatatgctggcaagaatcaagttaatcccggaagtataatattatctgcagaaatgatgttgagacacatgggctgggttgaagctgcggatatattaatggaatctatggatagaactattagtgcaaaaaaagttacttatgattttcatagaatgatggacaatgcagaaaaagttacttcatcaggttttgcagatgaaatgattaaaagaatgtaat

SEQ ID NO: 207992 - DNA, 985 bp, Unknown
  Bacterial polypeptide expressing nucleotide sequence isolated from the Sargasso Sea
cctgatgaggcaagagtagaagagtttaaattaaaaaaaatgtggagatcacccaatggtacaattcgaaacatacttggtggtactgtttttagagagccaattatttgtaaaaatgtacccaagctagttccaggatggactaatccaattattattggcaggcatgcttttggagatcaatacaaagcaacagattttcttattccaggaaaaggaaagttagaaatgaaatggacatctgatgacggaaaacaaaaaaaggagtttgaagtatttaatttcccaagctcaggtgttgctttatcaatgtataatttagatgattcaataagagatttcgcaagagcttgtatgaattatggtcttcaaagaaattatccggtttacatgtcaacaaaaaatacaattttaaaaggttatgacggaagatttaaggacttgtttcaggaagtttttgataaacaattcaaagaaaaatttcaaaaagcaaagttaacttatgaacacagattaatagatgatatggttgcatgtgcaatgaaatggaatggtgggtacgtgtgggcttgtaaaaattatgatggagatgttcagtctgacactgttgcgcaggggtttggttctttaggattaatgactagtgttttaatgacacctgatggaaaaacagtagagtcagaagcagcgcacggcacagttactaggcattataggatgcatcaacaaggaaaagaaacatcaacaaatccaattgcgtctatatttgcttggactagaggtttggcacatagaggaaagcttgataataatgatgaattaatcaaattttctaaaagtttggaagaagtctgcattaatacagttgagagtggtacaatgacaaaagatttagcaatattgattgataaatctacaaagtatttaactactaatcagtttttagaagctatagatagtaatctaaaaaaaaaacttaactgat

SEQ ID NO: 207993 - DNA, 301 bp, Unknown
  Bacterial polypeptide expressing nucleotide sequence isolated from the Sargasso Sea
tatggcaaaattaaaagttaaaaatccaatagttgagttagatggagatgaaatgactagaatcatatggtcgtttataaaagataagctaattaagccatatcttgagatagatctcaaatactatgatcttggtatggagagtcgagacaaaactgatgaccaaattacggtagatgcggcaaatgcaatcaaacaacatggagtaggcgtgaaatgtgcaactattacacccgacgaagctcgtgtagaagaatttaaactaaaaaaaatgtggagatcgcacaaatggtactattag

SEQ ID NO: 207994 - DNA, 964 bp, Unknown
  Bacterial polypeptide expressing nucleotide sequence isolated from the Sargasso Sea
tatggacctttatgcttgtgtgaggcctataagatattttcctggaaccacaaccccgatgagatcttcttcagctactaatatggttatttttagagaaaatacagaagatatttacgctggtattgagtggcaagcagaaacacctgatgtaaaaaaagtattaagttttctaatagaccaaatgaatgtagatggaattagatttccaaatacctcaggtattgggattaagcctgtttcaaaagaaggatcagagagattaattagaaaagcgataaattatgctattgataatgaccgagagtctgtatctttagttcataaagggaacattatgaagtataccgaaggcgcttttatgaattggggttatgagcttgtaaaaaatgaattcgatggtgaattaattgatggtggaccatggtgctcttttataaatccaaaaagtggtaaaactattctagtcaaagatataattgcagataactttttacaacaaattcttcttaaacctgaagattatgatgttattgcaacattaaatttaaatggagattacatatctgatgcactagcagcgcaagtaggtggtattggtatcgctccaggagcaaacatggctgatgccgtagctgtatttgaagcaactcatggttctgctccaaaatatgctggaaaggacagggtcaacccaggttcaataatattatcagctgaaatgatgttaagatatctaggttggaccgaagctgctgacttaattatcaaaggcgtggcaggagcaattgctaataaaactgttacatatgatttagcgagagctagggctggaatgaaagcatttgtgaaaactcaccaatctagtaaagaaatcatacaagacttacaagagcttatgccaggagcaacactagtttcatgtagtggttttgggaaagctattattaattgcatggagtga

SEQ ID NO: 207995 - DNA, 742 bp, Unknown
  Bacterial polypeptide expressing nucleotide sequence isolated from the Sargasso Sea
tgaggttgaaaaagttaaaaattttttaataaatgaaatgaatgtaaccaatattagatttcctaacacagtttcattaggtgtgaaaccggtttctgttgaggggacagaaagaatagttagagcggcattagaatatgcaattacccataatagaaaatcggtcacgcttgttcataaaggcaatataatgaaattcactgagggtaagttcaaggaatgggggtatgcgttagcaaaaaaagaatttaattcatctgattatgaaggtgggccttggcaagtcattgataataatggaaatgagattataattaaagatgttattgctgatgcttttttgcagcaaattttactaagaccgtcagaatatgatgttatttgtactttaaatttaaacggtgattatatatctgatgccttagcagccatcgttggaggtattggaatagctcctggagcaaatataaactatactactggtcatgcaatatttgaagccactcatggcactgcgccgaaatatgctggaaaagatatggttaatccctcatcggttattttatccggagtaatgatgctagagtatatgggctggcaagaggccgcagacctaattattaatggtattgaaaaatctataaataataaaactgttacctatgattttcatcgccttatgaaggatgctgaaaaagtttcatgttcaggttttggaaaagcaataatagataatatgtag

SEQ ID NO: 207996 - DNA, 1141 bp, Unknown
  Bacterial polypeptide expressing nucleotide sequence isolated from the Sargasso Sea
atccttccatttcttgagattgacataaagtactatgacttgtcgatacagaagcgagatgaaacaaacgaccagatcacacttgatgcggcaaaggcagtaaaaaaatataacattggaattaaatgtgctaccatcacgcctgatgaagaaagggtaaaagagtttggactaaagaaaatgtggagaagtcctaatggaaccatccgcaattaccttgggggaacaatttttcgcgcacccattatctgtaaaaatgtgccgagacttgtcaaagcatggaataaacctattgtggtaggacgtcacgcacacgctgaccagtacaaggcaagtgattttactgtacccggagcaggcaccctgaaaatgacttttaccccagatgatggcggagaatcactcgagtgggtgataaatgagtttgagggttccggaatcggattgggaatgtataacacttatgaatcaataagagattttgcccgctcatgcatgagctattcgctgagtcttggatatccactttaccttagtacaaagaacaccatccttaaaacatatgacggaacttttcgtgatatttttaggcaaatttttgatgaagaattcgcagacaaatttaaaaaagccggactgacttatgaacaccgccttattgacgacatggtggcacaggtactgaaatgggaaggaggaattgtctgggcctgtaaaaattacgacggtgacgtacagtctgacacagttgctcaaggttttgggtcacttggactaatgacttctgtgctggtttgtcctgatgggaatacctttgaatctgaagcagcgcatggcactgttacacgtcattaccgccagcatcaacaggggaagtccaccagcaccaatccagttgctagcatctttgcctggacatcaggactcatccaccgggggaagttggacaggaatcaagcattaattgacttttgcaaaaagctggaaaaagtctgtgtagatacagttgaaggaggtacaatgaccaaggaccttgcctctgcaattcattccagttccaatccagacccttctacatatgtaagtacccaggaatttatggatgcccttactgcaggattgcaaaaggccgtaaattgat

SEQ ID NO: 207997 - DNA, 1216 bp, Unknown
  Bacterial polypeptide expressing nucleotide sequence isolated from the Sargasso Sea
tatgacaaaaattaaagtaaaaaatccagttgttgaaattgatggcgatgagatgacaagaatcatctgggatcttataaaaaataagcttatccttccttatttagatattgaccttcattattatgaccttggggttgaatatagagatcaaacaaatgatcaagtaacaatagatgctgctgaagcaattcaaaaatatggcgttggggtaaaatgcgcaactattacccctgatgaagatagagttgaggagtttaatctcaaagaaatgtggaaatcacctaatggaacaatcaggaatattcttggtggaacagtttttagagagccaattatttgctcaaacattccaagattagttcctggatggacacaaccaatagttatcggaagacatgcatttggtgatcaatatagggcaacagattttgttgttcctggaaaaggaaagctatcaatgaaatgggtttcagaagatggatcgaaagaaattgaagaggatatatatgatttcgaaactagtgggattgctatgggaatgtacaatcatgatgagtcgattaaagatttcgctagagcatgttttaactacggcattaatagagaatggccagtttatctttctacaaaaaatacaattctaaaaaaatatgatggacgatttaaagatttatttcaggaagtctatgaaagagaatataaagaaaaaatggattcattgaacattgagtatgaacatagacttatcgacgatatggtggcatgcgctttaaaatggtcgggagcatttatttgggcatgtaaaaattatgacggggatgttcaatctgatacggtggcccagggctttggatctttagggcttatgtctagcgttttaatgactccagatggaaaaactgtagaggcagaagcagcccatggaactgttactagacattatcgactacatcaaaaaggagaagaaacctcaacaaattcaattgcttcaatttttgcttggacaagaggtcttgcacatagagctaagcttgatgataatgaggaattaaaatcattttcagaatctttagaaaaagtctgcattaaaactgttgaaaaagggtttatgacaaaagatttagctttgcttgtggggtctaaccaatcttggttaaatactcaagaattcattgataaaattgatacaaatcttcaatctgctatgtcttaa

SEQ ID NO: 207998 - DNA, 415 bp, Unknown
  Bacterial polypeptide expressing nucleotide sequence isolated from the Sargasso Sea
gtgtaaaaattatgatggagacgtacaatcagatactgttgctcaaggatatggatctttaggtttaatgacaagtgtattgcttgctccagacggtaaaacaatggaagctgaagctgctcatggaacagtaactagacactttagaatgcatcaacaaggtaaagaaacatcaacaaatcctattgcatctatttttgcatggacaagagggttggctcatagaggaaaattagatggaaatgaggaattaataaagtttgctgagacgcttgaaaaagtatgtgttgattgtgttgaagaaggctcaatgacgaaagacttagctattttgataggaccttcaacaaaatatttaacaactaatcaatttttagatactttagatggtaagctaagacaaaaactaaattaa

SEQ ID NO: 207999 - DNA, 1231 bp, Unknown
  Bacterial polypeptide expressing nucleotide sequence isolated from the Sargasso Sea
atgtcgaaaattaaagtaaaaaccccacttgtcgaaattgatggcgacgaaatgacaagaattatatggcagtttataaaagataaactaatcctaccgtaccttgatattgatttagaatattatgacctgggtgttgaaaatagagataaaaccaacgacaaggttacagtagactccgcaaatgctataaaaaaatatggtgtaggagttaaatgtgcaactatcacaccagatgaagatagggtaaaggaatttaagctaaaagagatgtggcgttccccaaacggaacaataagaaatatccttggcggtacagtttttagagagccaatagtttgtgaaaatgttccaagacttgtacccggttggactgatccaattgtagttgggcgacacgcatttggtgatcaatatagagcaacagattttaaggttcctggtaaaggaaaattaagtattaagtggacgcctgatgaccccaaccaagaaccgattgaaaaggaggtttatgaatttcaatcaagtggcgttgcgatggcaatgtataataccgatgagtcaatacgtgattttgctagatcatgtatgaattacgctctcatgagagagtggccagtctatttatcgacaaaaaatactattctcaaaaaatatgatggaagatttaaagatttatttcaggaaatttatgataaagaatttgctgatcaattcaaatctctggagcttgattatgaacatagattaattgatgacatggtggcatctgcgttaaaatggaatggtaaatttgtttgggcatgtaaaaattatgacggcgatgttcaatcggatactgtcgctcaaggttttggttctcttggattaatgacgagtgtgttgatgacacctgatggaaaaacaattgaggctgaagctgctcacgggactgtaacgaggcattataggcttcatcaagaaggaaaacaaacgtcgacaaatcccatagcgtcaatttttgcatggtcaagaggtcttaagtatagagggaaacttgatgataatgatgaactaattcagtttgctgatacacttgagaaagtctgtgtaaaaacagttgaacgtggctcgatgacaaaggatttggcactccttatgcctcatgagcaagattggcacagtactgaagactttcttgaaataattgaacgaaatttaaataaagcccttaatccaacttatcagtaat

SEQ ID NO: 208000 - DNA, 1282 bp, Unknown
  Bacterial polypeptide expressing nucleotide sequence isolated from the Sargasso Sea
atgtcgaaaggtggttctaaaatccaaatggataatggaaaactccttgttcccgacaaccccgtgatcccattcattgaaggcgatggaattggccctgacatttggaaagcatcggtcagagtcttcgatgcagcggtagaaaaagcctactcaggtgaaagaaaaatagactggctagaggtctatgctggcgaaaaagcattcaataaattcaacaactggctgccggatgaaaccattgaacagtgcagagaatatttagtttcaatcaaaggaccgctgacaactccgattggaggtggcatgagatcactgaatgttgctttgagacaattactggacttatatgtctgccttagacctgttaggtggtataagggcgtgccctctccagtaaagagtcctgaaaatgtggacatggtcattttcagagaaaataccgaagacatttatgccggaattgaatttgaagaaggcacaaaatccaatcaaaagttcctttcgctctttaaagaatctttcccagaagagtactccaaaattcgttttccagaatcatcaggaatcgggattaagactgtttcaattgaaggttctgagagacttctcaggtctgcgtttgaatacgcaatagaaaacaagagaaagagtgtgacctttgttcataaaggaaacatcatgaaatatacagaaggtgcttttagaaattggggatatgagctcgccgagagggaattcggcgaccatgtatacacatgggatcaatgggaaagaacgaaagcagaaaaaggcgaagacgcagctaatcaagaacaatcagaggcgatcgaaagcggtgcaatactggttaaagatgcgattgcagatatcacactccagcaagtactcactaggccatcggaattcgatgtgattgcaacaatgaatctcaacggtgactacttatctgatgcactagcggcacaagtaggcggcattgggatcgcacccggtggaaatttgaactatataaccgggcatgcagtatttgaggcaacccatggcacggcacccaaatacactgatttggataaagtaaatcctggttcagtaattttgtccggcgaaatgatgcttcgatacatgggatggtcagaagcagcagatctcatcgttcaatcgatggatgcaaccatccaaaagaaaaccgtcacttacgactttgcgagactcatggggaatattgatcccatcaaatgcagcgagtttggggatgaactcatcaaaaatatgaactgat

SEQ ID NO: 208001 - DNA, 952 bp, Unknown
  Bacterial polypeptide expressing nucleotide sequence isolated from the Sargasso Sea
aaaaaaatgtggagatcacctaacggaacaataagaaatattttaggtggaacagtttttagagagccgataatatgcaaaaatattccaaaattagttccaagttggactaatcctatttgcataggtaggcatgcttttggagaccaatatagagctactgactttaaagtgccaggtaaaggaaaattagaaataaaatggacatcagaagatggaagtgaaaaaaaagaatttgaagtatttaattttccaggatctggtgttgctttatcaatgtataacttggatcaatcaataaaagattttgctagagcatgtatgaattatggtcttaatagaaaatggcctgtttatctatcaacgaaaaatacaattttaaaaaattatgatggccgttttaaagatttgtttcaagaaatatatgacaaggaatttaaagaaaaatttaaagaaaaaagtataacttatgaacatagacttatagatgacatggtagcttgtgcaatgaaatggaatggaaactatatttgggcatgtaaaaattatgatggggatgttcaatctgacactgtggcccaaggctttgggtctctaggtcttatgactagtgtattaatgacgcccgatggaaatactatagaagccgaagctgctcacgggactgttactagacattacaggttgcatcaacaaggtaaggaaacatcaacaaatccaatagcgtcaatatttgcatgggcaagaggtctttatcatagaggaaaaatggataataacgaagaacttaaaaagttcgtaaaaattttagaaaaagtttgtattgaaacagttgaaagtggtttaatgacaaaggatttggcaattttgattggtccttcaagcaaatatcttacaacaaatcaatttctagatgtaattgatggaaatcttaaaaaaaaattaaattaaa

SEQ ID NO: 208002 - DNA, 1213 bp, Unknown
  Bacterial polypeptide expressing nucleotide sequence isolated from the Sargasso Sea
atgatcgaagatatattggctgacaaaataacaattaatgaagatcactccctgaacgtctctgacaatccaattatccccttcatagaaggtgacggaacaggagtggatatctggcctgctgcaaaactcgtccttgatgcagcagctaagaaatatggaagaacaatcgagtgggttgaggtcttagcaggggaaaaggcttttaatgaaacaggggactggctaccacaggaaactgtagacacatttcaagagtacttgattggcattaaaggccctttgacaacccctattggcggtggttttcgaagcttaaatgttgctttgcggcaactacttgacctgtacgtctgccttcgaccagttcgctggtttgaaggcgtcccttcaccagtaaagcaaccagaactggtggatatggttattttccgagagaataccgaagatatctatgcaggtatagaagctgaagctggatcacctgaggcagcaactattcgcgaaatgattcgtgaagtattcggccgagatatttccgaagactcaggtataggtataaaaccagtttcccgcacagggtcgcaacgtcttcaaagagcagcaatgaaatacgctgtagaacgcgatcgcaagacagtgcattgggtgcataaaggaaacatcatgaaatacacggaaggcgctttccagaaatggggatatgaactagtccgtgaagaattctctgacgttgctgtcggctgggatgactgtgggggcgaccctggagataagattctcgttcaagatgccatagctgacatcgcccttcaacaagtacttacaagaccagccgagtttgatgttatcgccacgatgaatcttaacggagactatctctctgatgcactagctgctcaggtaggaggaatcggaatagcgcccggagcaaatatcaactacgtcaccggtcacggtatttttgaagctacacacggaactgctccaaagtatgcagggcaagataaggtcaacccgtcatcggttctactctccggtgtccttatgtttgaacacttaggatggagagaagcagcggatgacattatcaaagcagtagagcaaacgattggtgaaaagattgtcacctatgactttgctcgactcatggatggagccacccaagttaagtgctccgaatttgcttcagccatagtcgatagactctaaa

SEQ ID NO: 208003 - DNA, 1231 bp, Unknown
  Bacterial polypeptide expressing nucleotide sequence isolated from the Sargasso Sea
tatgtcaaaaattaaagtagccaatcccatagtcgagatagatggagatgaaatggctagaattatctggaaatttataaaagaaaaacttattctagactatctagatcttgatatagtatattatgatctaggaattgagtcaagggataaaactgatgaccaaatcacaattgatgctgctaatgctataaaagaacataatgttgggataaaatgtgcaacaataacaccagatgaacaaagagttgaagagttctctttatcaagaatgtataaatctccaaatggaacaattagaaacattgttggaggtactgtttttagagagcccattatatgtagatccattccaagatatgtccaaggctggtcaagaccaatatgtattggtaggcatgcatttggtgaccaatatagagcaaccgatgtaattactcatggacctggaaaacttgaaatgaaatttactccaaaagatggagaagagtcaacaacatgggaagtatataattttgaagaggatggaattgcaatgtcaatgtataatattgactcatcaatttatggatttgcaagatcatgtatgaatatggcacttacgaaaagatggcccctatatctatctacaaaaaacacaatacttaaagcttatgatggtagatttaaagacatttttcaggaggtatatgataacgaatttaaagatagatttgagaaggaaaacataacatatgagcatagattaattgatgatatggtagctgctgctattaaatggaaaggtggatttgtatgggcttgtaagaattacgatggtgatgtacaatcagatatagttgctcaaggttttggatcacttggtttaatgacttctaccttagtaacacctgatgggaaaactcttgaagctgaagctgcacatggaacggttactagacactttagaagacatcaaaaaggtgaacagacatcgacaaatccaatagcttcaatatttgcttggacaagaggtttaatgcatagaggtaagcttgataataatgaaagacttattaatttttgtaaaactttagaggaggtttgtattgaaacagttgaagatggaaaaatgactaaagatctagccttattagtttttagagatgatttggttaactctaattttcttacaacacaagaattcttggatgaattaaaaagtaacctggataaaaaattagatatctaa

SEQ ID NO: 208004 - DNA, 929 bp, Unknown
  Bacterial polypeptide expressing nucleotide sequence isolated from the Sargasso Sea
tggtggcattagatcattaaacgtttcattgcgacaaattttagatctttacgtttgtttaagaccaatacgctattttgagggagttccttcgcctgtaaaaagaccgcaagatgtagatatggtaatttttagagaaaattcagaagatatatactgcggtgttgagtttgaggctaattcaaaagaatcagataaacttcttcaaatattaaaaaaagattttgatgtaacaaaagtaagatttgatgaaaatgttggtatcggtgttaaaccaatatctaaatcaggtacagaaagattggttaaaaaagctattgactatgctatagataacaatagatcttctgttactttagttcataaaggtaacatcatgaaatttactgaaggtgcatttagagactggggttacgacttagcaaaaagagattatggcggtgtagaaatagaagagggaccatggcaagaaattattaatccaaataatggaaaaaagataattattaaagatgtaatttgtgatgcttttctacaacaaattgtcttaaggcctacagattatgatgttattgcaacaatgaatttaaatggagattatatatctgatgcattagcagcaatggttggaggtattggaattgctcctggtgcaaatatatcagatagctatgctgtttttgaggctactcatggaacagcgccaaaatatgctggaaaaaatcaggtaaatccaggaagcctaattttatctgcagaaatgatgttacgtcatatgggatggattgaggcagcagatattttagtaaattcaatggatagaacaataggtgctaaaaaagttacttatgattttgcaagaatgatgactgatgctgataaagttacttcatcaggctttgcagatgaaatgattaaaagaatgtaat

SEQ ID NO: 208005 - DNA, 994 bp, Unknown
  Bacterial polypeptide expressing nucleotide sequence isolated from the Sargasso Sea
ggtgtaaaatgcgcaacaattactccagatgaaaaaagagttagagaatataaattacaaaagaaatatccttcccctaatggaacaataagaaatatcttaaagggtacaatttttcgtgaacctataatgattgataagatacctaagattgtaaatcattggaatcaaccggtaattattgctagacacgcttttggagatatttatagatcaagggaaatatcgactaaatcaaaggggaagttgaccctttgcttcgaagacgagaatggaaatagagaagaaacactaattcataatttcgactccggaggtgttggtttggcatattttaatgtttttgattctatatatgactttgcttattcttgttttaattttgctttaaaaagaaaggttcccttatttttgtctacaaaaaatacaattcttcaaaaatacgatgaagcttttaaagaaatatttgatgatgtatttaaaaaatttaaacataaatttcaagaatcaggtcttacttatcaacacagactaattgatgatatggtagcttgtctgatgaaatggagtggagggtttatttgggcgtgtaaaaattatgacggtgatgttatgtctgatttagtagctcaaggttttggttcattaggattgatgtcatcagtattacaaagtcctgatggaaaaataatcaaaactgaagctgctcatggtacagtaacaagtcattttcgacaacaccaacaaggcaaggaaacatcaactaaccctattgcttcaatctttgcctggtcaaaagcattgaagcatagagcaattatagatgataattcaagcttaaaaagattctctgttaatctcgaaaatatttgtattaacactctaaatgaaggttatatgacaaaggacctggctcttatgtgtggcccagaacagaaatgggtcactacaaatgaattttttgatataattaaaaataggatagagaactaat

SEQ ID NO: 208006 - DNA, 580 bp, Unknown
  Bacterial polypeptide expressing nucleotide sequence isolated from the Sargasso Sea
actatccttaaaaaatacgatggaagatttaaagacatatttgaagaaatttttaacaaagaattcaaagaaaaatttaataaagctaaaattacttatgagcatagactaattgatgacatggttgcttgtgcaatgaaatggaatggaaaatatatatgggcctgtaaaaattatgatggcgatgttcagtctgatactatggcacaaggttatggatctctaggtttaatgactagtactttgctaactcctgatggaaaaataatggaagctgaagctgctcatggaactgtaacaagacattatagaatacatcaagaaggtaaagaaacatcaactaatccaatagcatcaatatttgcttggaccagaggactagctcatagaggtaaattagatggaaacgatgagcttatccgatttgcaaggacaattgaaaaagtttgcatagaatgtgttgagagcgggtcaatgactaaagacctcgcaatattaattggtccatcaagcaaatatctaacaactaatcaatttcttgatgtaatagataaaaatttaaaaaagaaattaaattaaa

SEQ ID NO: 208007 - DNA, 1231 bp, Unknown
  Bacterial polypeptide expressing nucleotide sequence isolated from the Sargasso Sea
catgtcagagggagaacaaatatcaatttctaatggggaattagaagtccccaacaaccccgtgattcattttattgaaggggacggaattggggtagatattaccccggtgatgattgatgtcgttgatagttcagttgaattagcatattctggagacaggaagatacactggagagaagtactagccggacagaaagcattcgactccacgggggaatggcttcccgaggaaactaagaagtcaatgagagagaatctgatttctatcaaaggcccattaaccactccagttggaggtgggattaggagcttaaacgtagcacttaggcagcaactggatctattcgcctgtgttagaccagtaaggtggtttgacggaactcccagtccagttaaggacccaggctcggttgacatggtgatattcagggaaaatagcgaagatgtctacgctgggatagagtgggaggcaggtagtccagaggttgcaagagtcatagatttccttcagaatgagatgggtgttgacaaaattcgatttccagatacatctggtttgggaatcaagcccattagtgaacaaggaacttctaggatagtcagagccgcgatcaagtatgcaatagaaaacgacaggggcagcgtcactctggtgcacaaaggcaacatcatgaagttcaccgaggggggtttcagggattggggatatgatatcgcgaagacggagtttggtgcatccgagatagatggggggccatggtgctcattcccgaacccgaatacaggtactgagataattgtgaaggacgttattgcggatgcgatgcttcaacagatattgactagacctagagaatatgaggtactggctactatgaatctgaatggtgactacatctcagatgcactagctgcacaagtggggggaatcggcattgctccaggtgcgaacatcaactatgacacgggtgtagcaattttcgaggcgactcacggtacggctcctaagtatgcgggacagaacaaggttaaccccggaagcctgattctatctgcagagatgatgctcaggcacatgggttggacagaatcagcagatttgattgtaaagggcatggagggagcgatttcctctaagaaagtgacatatgattttgagagactgatggaagacgctaccctcctctcctgttcagatttcggtcgagcaatcgtgtctcacatgtag

SEQ ID NO: 208008 - DNA, 349 bp, Unknown
  Bacterial polypeptide expressing nucleotide sequence isolated from the Sargasso Sea
aatgacaagtgtgctacttgcaccagatggtaaaactatggaagcagaggccgcacatggaacagtaacaagacactttagaatgcatcaacagggaaaggaaacctctactaatcctattgcatcaatttttgcttggacaagaggtttggctcatagaggaaaactggatggaaatgatgagctaataaaattctctgaaacattagaaaaagtgtgtgttgattgcgttgaagaaggttcaatgactaaagacctagctatattaataggtccttcaactaagtacctcaccactaatcaatttttagatactttagatggaaaattaagacaaaaactaaattaa

SEQ ID NO: 208009 - DNA, 635 bp, Unknown
  Bacterial polypeptide expressing nucleotide sequence isolated from the Sargasso Sea
ttgttttaattatggattaattaaaaaatggcctgtttacctttcaactaagaatacaattttaaaaagatacgatggtagattcaaagatatttttcaagaagtttttgaaaaagaatttaaagataaatttgagcaaactaaaattacttatgaacatagattaattgatgacatggtagcatgtgcaatgaaatggcacggaaaatatatctgggcatgcaaaaattacgacggggatgttcaatcagatactgtagctcaaggatatggatcattaggtttaatgacaagtgttttacttgctccagatggtaaaacgatggaagctgaagcagcacacggaacagtaaccagacatttcagaatgcatcaacaaggaaaagaaacttcaacaaatccaatagcttcaatctttgcttggacacgtggtttagctcacagaggaaaattagacggaaatgaagatctgattaaatttgcagaaacacttgaaaatgtatgtgttgattgtgttgaggaaggatcaatgactaaggatttggctatattgataggtccatcaacaaaatatctaacaactaatcaatttttagatactttagatggtaagttgagacagaaattaaattaaa

SEQ ID NO: 208010 - DNA, 961 bp, Unknown
  Bacterial polypeptide expressing nucleotide sequence isolated from the Sargasso Sea
tatgccttacaagaaaataaaagtcccaaaaaaaggctccaaaattaccttcaagaatgggaagattaacatcccagataatccaatcattccttacattgagggtgacggaattggtgttgatataacaccgccaatgataaatgttgttaatgaagctgtaaaagtagcttataaagataaaaagaaaatcgaatggatggaggtatattgtggagagaaagctactcaagtttattcaaaagacacatggttgcctgatgagactatagatgcattaaaagaatttgttgtaagcatcaaaggtcctttaacaactccagtaggtggtggaataagatcattaaacgtctcgttgagacaaatattagatttatatgtttgtttaagaccgattagatattttgatggtgttccttcgccagtaaaaagacctcaagacgtagatatggttatatttagagaaaattcagaagatatatattgtggtgtagagtttgagggaaattcagaagaagcaaagagtttggttaaaacacttaaaacaagatttgatgtttcaaaaattagatttgatgagaacgtgggcataggtgttaaaccaatatcgaaaagtggaacctcaagacttgtaaaaaaagcaatagactatgctatcgataataatcgttcatcagtaacgatagttcataaaggtaatattatgaaatacaccgaaggtgcatttagagattggggatatgaattagcaaaaaatgaatacggtggcattgaaattgacgatgggccatggcaagagattgttaatccacataatggtaaaaaaatcgtaattaaagatgtaatttgtgatgcatttcttcagcaaatattattaagacctacggaatatgatgtcatagcaacaatgaatcttaatggtgactatatatctgatgctttggctgcaatggtaggtgga

SEQ ID NO: 208011 - DNA, 1216 bp, Unknown
  Bacterial polypeptide expressing nucleotide sequence isolated from the Sargasso Sea
atgagcaaaattaaggtcaaaaacccaatcgtcgagttggatggcgatgaaatgacaagggtaatttgggagtttattaagaataaactgatattaccctatctagatttgggtattgaatattacgatcttggtatgaaaagcagagatgatacttcagatcaaataactattgattgtgcaaatgcaattaaaaagaatggtgtgggtattaagtgtgcaacaattacacctgacgaagcacgtgtaaaagaattcaatttaaaaaaaatgtggagatctccaaacggtacaattagaaatattattggagggactgtctttagagaacctattatttgcaaaaatgttccaagattagtgccatcatggactgatcccgtaattattggaagacatgcatttggagatcaatatagagcaaccgattttaaagttcctggtaaaggaaaacttgaaattaaatggacttctgaagacggtaaagataccaaaaattatgaagtatttaatttccctggatcaggggtggctttatcaatgtacaatttagataaatcaatagaagattttgctcgatcttgttttaactatggattaattaaaaagtggccagtttacctttcaacaaaaaacactattttaaaaacttacgatggaagatttaaagatatatttcaaggtgtttttgaaaaagaatttaaatcgtcatttgaaaaaaataatttaacctatgaacataggcttatagatgacatggttgcctgtgcaatgaagtggagcggtaaatatatttgggcttgtaaaaactatgatggcgacgttcaatcagatactgttgctcagggatatggttctcttggacttatgacaagtgtcttgctcgcaccagatggaagaacaatggaggcagaggctgctcatggaactgttacgagacattttcgaatgcatcaacaaggaaaagaaacttcaacaaatcctatagcatcaatttttgcctggactagaggacttgctcatagaggaaaattagatgcaaatgatgagctaataaaatttgcaaatacgttagaaaagatttgtattgattgtgttgagactggatcaatgactaaagacttagcaatattaatagatacaaatcaaaaataccttactacaaatcaattccttgatgcgatcgatggcaatttaaaaaagaaattaaattaaa

SEQ ID NO: 208012 - DNA, 1216 bp, Unknown
  Bacterial polypeptide expressing nucleotide sequence isolated from the Sargasso Sea
atgagtaaaattaaggttaaaaaccccattgtagagttagatggtgacgaaatgactagagttatatgggacttcataaaaaataaactaatcttaacctacatagatcttaagatcgaatactacgatttagggatggaaagtagagataagactaatgataaaattactatagagtgtgctaatgcaattaaaaagaatggagtgggcatcaaatgcgcaactattactccagatgaagcaagagtaaaagagtttaacttaaaaaaaatgtggagatctcctaatggtacaataagaaatattattggtggtaccgtttttagagaacctataatttgtaaaaatattccaaagcttgtaccctcatggacagatccactaattataggcagacacgcatttggtgaccaatatagagcaacagactttacagttccaggaaaaggtaagctagaaataaaatggactgccgaagatggaaatgatgagagaaaatatgaggtatttaactttcctggtcctggaattgctttatcaatgtataacttagataaatctatagaggattttgcaagatcatgctttaattatgggttaatcaagaagtggcctgtatacctatcaacaaaaaatacaattttaaaaagatacgacggaagatttaaagatattttccaagaagtttttgaaaaagaattcaaagaaaaatttgaacaaaataaaatcacttatgaacatagattaatagatgatatggttgcatgtgcaatgaaatggcatggtaaatatatttgggcatgcaaaaattatgatggagatgttcaatcagacacagttgctcaaggatatggttctttaggtttgatgacaagtgtactcctcgcaccagatggaaaaactatggaagcagaagctgctcatggtacggtaacaagacactttagaatgcatcaacaaggaaaagaaacttcaacaaatcctattgcctcgatttttgcatggacaaggggcttggctcatagaggaaagctagatggaaacgaggaattaattaaatttgctgaaacacttgaaaaggtatgtgttgattgtgttgaagaaggttcaatgactaaggacttagctatattaataggaccttcaactaaatatcttacaactaaccaatttttagatactttagatggaaagttgaaacagaaattaaattaaa

SEQ ID NO: 208013 - DNA, 1003 bp, Unknown
  Bacterial polypeptide expressing nucleotide sequence isolated from the Sargasso Sea
aaatgtgcaacaattactcccgatgaagctcgtatggaagaattcaaattaaaaaaaatgtggcgatctccaaatggaactataagaaatatcattggtggaactgtatttagagaaccaataatttgttcaaatattccaaagcttgttccttcttggtctgatccagtagttattggaagacatgcgtttggagaccaatatagggcgacagattttaaagtgcctggcaaaggtaagatggaagtaaaatggacctctgaagatggtaaagatgaaataaaatatgaagtatttaattttacaggacctggtgtggctctttcaatgtataatttagacaaatcgattgaggactttgcaagatcttgttttagttatggattaattaagaaatggcccgtttatctatctacaaaaaatacaattttaaaaaaatatgatggaagatttaaagatatattcgaaagtgtatttaacaaagagtttaagaagaagtttgaagaagcaaagattacttatgaacatagattgattgatgacatggtggcatgcgctatgaaatggagtggtaaatatatttgggcatgtaaaaattatgatggtgatgttcagtcagatactatggctcaaggatatggttcgttagggttaatgactagcacattgttaacgcctgatggaaaaatcatggaagcagaagcagctcacggaacagttacgagacattatagaatgcaccaacaaggaaaagaaacttctactaatccaattgcatcaatttttgcttggacaagaggattggcgcatagaggtaagcttgatggcaacgatgaacttattaaatttgccaatacaatagaaaaagtttgtattgatagtgttgaaaatggctcaatgacaaaagatcttgcaatattagttggacccttaagtaaatacctgacaactagtcaattcttagatgtgattgataataatcttaaaaagaagctaaattaaa

SEQ ID NO: 208014 - DNA, 667 bp, Unknown
  Bacterial polypeptide expressing nucleotide sequence isolated from the Sargasso Sea
ttggataagtctattgaagactttgcaagatcttgtttcaattatggattaataaaaaaatggccagtttatctttcaacaaaaaatacaattttaaaaaaatacgacggaagatttaaagatatttttcaaaaagtatttgatgaagattttaaaactgaatttgataaaaataatataacttatgaacatagattgattgatgatatggttgcttgtgcaatgaagtggagtggaaaatatatttgggcatgtaagaactatgatggagatgtgcaatcagatactgttgctcaaggatatggttcattaggtctaatgactagtgttttgttagctccagatggtagaacaatggaagctgaagcggctcatggtactgtaactagacactttaggctacatcaacaaggaaaagaaacttcaacaaatcctatagcttctatttttgcttggactagaggattggctcatagaggaaaattagatagtaatgatgaattgataaaattctcaaatactttagagaaagtttgtatcgattgcgtagagaatggatcaatgactaaagaccttgctatattgttagggccttcaacaaaatatcttacaacaaatcaatttcttgatgaaatagaccataatttattaaaaagtttaaactaaa

SEQ ID NO: 208015 - DNA, 608 bp, Unknown
  Bacterial polypeptide expressing nucleotide sequence isolated from the Sargasso Sea
aatgactaaaatcaaagtaaaaaatccggttgttgaattagacggcgatgagatgacaagaattatttgggatcttattaaaaagaaacttattcttccgtatttagatattgatctccattattatgacttaggtgttgaatacagagatcaaacaaatgatcaagttactattgatgctgcagaagctatacaaaaacatggtgtaggagtaaagtgcgctactataactcctgatgaagacagagtagaagaattcaatcttaaagaaatgtggaaatctcctaacggaactataagaaatattcttggtggtacagtttttagagaaccaattatatgctctaatattccaagacttgttccaggttggacgcaaccaattgtaattggaagacatgcttttggtgatcaatatagagctacagattttgtagttcctggcaaaggaaaactatcaatgaaatgggtctcagaagatggttctcaagaaattgaagaggatatatatgactttgaggatagcgggattgctatgggaatgtataatcatgataaatctattaaggattttgcaagagcttgttttaattacggtataaatcgaa

SEQ ID NO: 208016 - DNA, 1210 bp, Unknown
  Bacterial polypeptide expressing nucleotide sequence isolated from the Sargasso Sea
atggcaaaaataaaagttaaaaaccctgtagttgaaatggatggagatgaaatgaccagaatcatctgggagtacatcaaagaacaattaattttgccctatcttgatatagatatcaaatattttgatcttggagtgattaaaagagatgagacaaatgatcaaatcaccatagatgctgccgaggcggtgaaaaaatatggtgtaggaataaaatgtgcaacaattactcctgatgaaaatcgagtagaggaattcaaattaaaacaaatgtggcgttctccaaatggaacaataagaaatatactgggaggaacaatatttagacagccaattatatgcaaaaatgttccaagaataattacaaactggaatcatccaattgtagttgctagacatgcctttggtgatcaatatagagcgactgacacattaattaataaaccaggaactcttaaaatggtttttgaacctaaagatggatctgaaggatttacaaaagatgtatatgaatttgaaaaatctggtgtagccctatcaatgtataatttagataattcaattaaagactttgctagagcttgttttaattatggacttaaccttggttggccagtttacctttctactaaaaatactattttaaaagtctacgatggaagatttaaagatttatttcaggatgtatttgatactgaatttaaaaataagtttaaagaaaaagacatagtttatgagcatagattaatcgatgatatggtggcctcagctttaaaatgggaaggtaattttatttgggcttgtaaaaattatgatggagatgttcaatcagattctgttgctcaaggatttggatcactaggtttaatgacaagtgtgttaatgaccccagatggtaaaactgtagaagctgaggctgcacatggaactgttacaagacattatagaaatcatcagaaaggtatagaaacttcaactaatcctattgcatcaatttttgcttggacaagaggtttaagttttagaggagaatttgatggtaataatgaattaataaattttgctaaaaaattagaagaaacgtgtatcaaaactgtagaaagtggtgaaatgacaaaagatttagcaatattaattaacaaagatcagaaatggttaaacactcaagattttttaagcgcaataaaaaacaattttcaaattaactaat

SEQ ID NO: 208017 - DNA, 313 bp, Unknown
  Bacterial polypeptide expressing nucleotide sequence isolated from the Sargasso Sea
aatggaagcagaagctgcacatggaacagtaacaagacactttagaatgcatcaacaaggtaaagaaacctcaacaaatcctattgcatctatttttgcatggacaagaggtttggctcatagaggaaaattagatggaaatgaggaactaataaagtttgcagaaacactagaaaaagtatgtgttgattgtgttgaagagggctcaatgactaaggacttagctattttgataggaccttcaacgaagtatttaacaactaatcaatttttagatactttagatggtaagttaagacaaaaactaaattaa

SEQ ID NO: 208018 - DNA, 891 bp, Unknown
  Bacterial polypeptide expressing nucleotide sequence isolated from the Sargasso Sea
gagaaccaataatctgtaaaaatattcctaaactagttccaagttggactaatccaatttgtataggtagacacgcatttggagatcaatatagagcaaccgattttaaagttccaggtaaaggaaaattggaaataaaatggacgtcagaggatggaaatgaaaaaaaagaatttgaagtatttaattttccaggatctggtgttgctttatcaatgtataacctagaccaatcaataaaagattttgccagagcttgtatgaattatgggattaatagaaaatggccagtttatctttcaaccaaaaatacaattttaaaaaattatgatggtcgatttaaagatctattccaagaagtttttgataaagaatttaaagaaaaatttaaagaaagagaaataacttacgaacatagacttatagatgacatggtggcatgcgctatgaaatggaatggtaattatatttgggcatgcaaaaactatgatggagatgtacaatctgatacggttgctcaaggatttggttctttaggccttatgactagtgttttgatgacacctgatggaaatactatagaagctgaagctgcacatgggactgttactagacattatagactgcaccaacaaggtaaagaaacatcaacaaatccaatagcatctatatttgcatgggctagaggtctttatcatagaggaaagatggataataacgaggaacttaaaaaatttgtaaaaattttagaaaaagtctgtattgaaacagttgaaagtggcttaatgacaaaagatttagcaattttggttggtccttcaagtaaatatcttacaacaaatcaatttttagatgtgattgatggaaaccttaaaaataagctaaattaaa

SEQ ID NO: 208019 - DNA, 694 bp, Unknown
  Bacterial polypeptide expressing nucleotide sequence isolated from the Sargasso Sea
attgaaaaaatctggtgtagctctatcaatgtataatttagataattcaattaaagactttgctagagcttgttttaattatggacttaaccttggttggccagtttacctttctactaaaaatactattttaaaagtctacgatggaagatttaaagatttatttcaggatgtatttgattttgaattcaaagacaagtttaaagaaaaagatatagtttatgaacacagactaatagatgatatggtagcatcagcattaaaatgggaaggtaattttatttgggcttgtaaaaattatgatggagatgttcaatcagatactgttgctcaaggatttggatcattagggttaatgacaagtgttttaatgaccccaaatggcaaaacagtagaagctgaagctgcacatggaactgttactagacattatagaaatcaccagaaaggtatagaaacatcaactaatccaattgcatcaatttttgcttggacaagaggtctaagttttagaggaaaatttgatggcaatattgaattaataaattttgctaaaaatttagaggatacgtgtatcaaaactgtagaaaatggtgaaatgactaaagatttggcaatattgataaataaagatcagaaatggttaaacactcaagattttttaagtgcaataaaaaataatttttcaaactaa

SEQ ID NO: 208020 - DNA, 586 bp, Unknown
  Bacterial polypeptide expressing nucleotide sequence isolated from the Sargasso Sea
atgactagtccaacatcaattagaatggaaaatggaagtttaaacgttccaaatcaccctattattccatttatagaaggagatggaataggccctgatatctgggaagcatctgtaaatgtttttgacagtgcagttaagcacgcatacgggaatactaaaaaaattgactggctagaagtccttgcaggagaaaaagcctatgaatcaaaaggtgaatggttaccccagtcaacactggatactatttcagaacacttagtcgctataaaaggacctcttaccaccccagtaggtggtggcatacgttcactgaatgttgcccttaggcagaaacttgatctttatgcctgtgtgcgccctgttcgatggtttgagggtgttccttcgcctgtaaaagaaccagggttggttgatatggttatttttagagaaaatactgaagatatatatgccgggatagaatggatgcatggaggtgatgatgttgaaaaagtaaagtcatttttagttgatcaaatgggcgttacaaacatccgatttcctgatacctctagtttaggtataaaacccagtatcaaaagaa

SEQ ID NO: 208021 - DNA, 761 bp, Unknown
  Bacterial polypeptide expressing nucleotide sequence isolated from the Sargasso Sea
aatgagtaaaataaaggttaaaaaccccattgtcgaacttgatggtgatgaaatgaccagagttatatgggacttcattaaaaataagcttattttaacttacttagatttaaaaattgaatactacgatttggggatggtaagtagagataaaactgaagataaaatcaccgttgaatgtgctaatgcaattaaaaagaatggtgttggaattaaatgtgcaactattacccctgatgaggccagagtaagagagtttaatttaaaaaaaatgtggagatctccaaatggtactatcagaaatattattggaggaactgtttttagagaaccaataatttgtaaaaatattccaaaacttgttccttcttggacagatcctttaatcataggtagacatgcctttggggatcaatatagagcaactgactttactgttcctggtaaaggtaaattagaaattaaatggactgctgaagatggatctgatgagagaaaatatgaagtctttgattttcccggtcctggaattgctttatcaatgtataatttggataaatcaatagaagactttgcaagatcttgttttaattatggattaattaaaaaatggcctgtttacctttcaactaagaatacaattttaaaaagatacgatggtagattcaaagatatttttcaagatgttttcgaaaaagaatttaaaaataaatttgaacaaaataaaattacctatgaacataggttaattgatgacatgg

SEQ ID NO: 208022 - DNA, 470 bp, Unknown
  Bacterial polypeptide expressing nucleotide sequence isolated from the Sargasso Sea
cccttggcaggaagtaattaatccgaaaaatggaaaaaaaattgttataaaagatgttatttgtgatgctttcttgcaacaaatactacttagaccaaaagattacgatgttatagcaactatgaatttaaatggtgattatatctcagatgcacttgcagctatggttggtggcattggtatagctccaggagcaaatttatcagataaatatgccgtattcgaagcaactcatggaacagctccaaaatatgcaggtaaaaatcaagttaatcctggtagtttaattttgtctgctgaaatgatgttgagacatatgggatggaatgaagctgctgatttaataattacttctatggacaggactatagcagctaaacatgttacttacgattttgctaggatgatggatgatgctataaaagtgtcttcatcaggttttgctgacgaaatgataaaaagaatgtaat

SEQ ID NO: 208023 - DNA, 438 bp, Unknown
  Bacterial polypeptide expressing nucleotide sequence isolated from the Sargasso Sea
ggagtggtaaatatatttgggcttgtaaaaattatgatggtgatgttcaatctgataccatggctcaaggctatggatcattaggtttaatgacaagtactcttttaacacctgacggaaaaattatggaagctgaagctgcccatgggactgttacaagacactatagaatgcatcaacagggaaaagagacatcaaccaatcctatcgcctcaatttttgcctggacgagaggcctggcacatcgaggtaaattagatggaaataatgaacttattaagtttgcgaatactattgaacaagtttgcattggatgtgttgaaagtggctcgatgacaaaagatctagctatattaattggaccgtcgagcaagtatttaacaacaaatcaatttttagatgaaattgataaaaatttaaaaaagaaattaaattaag

SEQ ID NO: 208024 - DNA, 613 bp, Unknown
  Bacterial polypeptide expressing nucleotide sequence isolated from the Sargasso Sea
tagaaggtggcctgtttatctttcaactaaaaatacaattttaaaaaagtatgatggacgttttaaagatttatttgaagaagtttatgaaaaagaatttaaagaaaaatttaaagaaaggaaaataacttacgaacatagacttatagatgatatggtggcatgcgcaatgaaatggaatgggaattatatttgggcatgtaagaattatgatggcgatgtacagtctgacacaattgctcaaggatttggttctcttggcttgatgacaagtgttttattatctccagatggtaaaactattgaagctgaagctgcgcatggaactgttactaggcattacagattacatcaacaaggaaaggaaacttcaacaaatccaatagcttcgatatttgcttgggcgagaggtctttaccatagaggtaaaatggaccaaaatgaggagctaaaaaaatttgtaaaaaccctagaaaaagtttgtattgaaacagttgaaaaaggtttaatgacaaaagatttagcaatcttgataggtccgaatagcaaatatcttacaactaatcaatttcttgaagaaattgatggaaacttaaaaaaaaaattaaattaa

SEQ ID NO: 208025 - DNA, 724 bp, Unknown
  Bacterial polypeptide expressing nucleotide sequence isolated from the Sargasso Sea
gaaagaatttaaagtttttgattttcctggatctggaactgcacttacaatgtataatctggatgagtctattaaaaactttgcaagggcatgtatgaattatggcctaggaagaaagtggccagtatatttatcaactaaaaatacaatccttaaagcttatgatggtagatttaaagatcttttccaagaagtttttgaaaaagaattttctgataagtttaaaaaagcaaatattacatacgaacatagattaattgatgacatggtagcatgtgctatgaaatggaatggtggatatgtttgggcatgtaagaattacgatggtgacgttcaatctgacactgttgcacaaggatttggatccttaggcctcatgacaagcgtattaatgacaccagatggcaagatagtagagtctgaagcagcccatggaacagtgactagacactatagaatgcaccagcaaggaaaagaaacttccacaaacccaatagcttctatttttgcatggacaagaggtttagctcatagaggaaagcttgatgggaatgatgaattaattaaattttcaattaatgttgaggcagtatgtgtaaaaacagttgaaagtggttcaatgactaaagatttggcgattttaacagataaatcaagtaattacttaactacgaaccaatttttagaagctattgacggaaatttaaaaaaaaagcttaactaa

SEQ ID NO: 208026 - DNA, 516 bp, Unknown
  Bacterial polypeptide expressing nucleotide sequence isolated from the Sargasso Sea
ttaagaaaaaatttgaggaattgaaaattacttatgaacataggttgattgatgacatggtagcatgtgcaatgaaatggagtggtaaatatatttgggcctgtaaaaattatgatggtgatgtacaatctgatacaatggcacagggttatggctcattaggcctaatgacaagcacattattaacccctgatggaaaaattatggaagccgaggcagctcatggaacagtaacaaggcattatagaatgcatcaacagggcaaagaaacttctactaatcccatagcttcaatttttgcgtggacaagaggtttggctcatagaggaaaattagataacaataatgaattaattgaattcgcaaatactattgaacaagtttgtattgaatgtgtagagggtggatttatgactaaagaccttgcaatattagtcggaccctcaagcaaatatcttacaactaatcaatttttagatgtgattgatcaaaaattaaagaagaaattaaattaac

SEQ ID NO: 208027 - DNA, 598 bp, Unknown
  Bacterial polypeptide expressing nucleotide sequence isolated from the Sargasso Sea
tatttgtcaacaaaaaatacaattttaaaaaattatgatggtcgttttaaagatttatttcaagaggtttacgataaagaatttaaagtaaaattcaaagaaagagaaataacctacgagcatagacttatagatgatatggtagcgtgcgcaatgaaatggaatggaaattacatttgggcatgcaaaaactatgatggagatgtacaatctgatactgttgctcaaggatttggttctttaggtcttatgactagcgttttaatgactcctgatggtaatactatagaagcagaagctgcacatggaactgttactagacattacagacttcaccaacaaggtaaagaaacatcaacaaatccaatagcatctatatttgcgtgggcaagaggtctttatcacagaggtaaaattgacaataatgaagaattgaaaaaatttgtaaaaactttagaaaaagtttgtattgaaacagttgaaagtggcttaatgacaaaagacttagcaattttgataggcccatcaagcaaatatcttacaacaaatcaatttctagatgtaattgatggaaatcttaaaaagagtctaaattaaa

SEQ ID NO: 208028 - DNA, 1237 bp, Unknown
  Bacterial polypeptide expressing nucleotide sequence isolated from the Sargasso Sea
aatgggagaaaatttaaagagaacagacctagaatccgcaattcagcgaactagagaatcttttgacacagataacccaacagtgccttatatagagggagacgggataggtgtcgacatatggccagctgcacaaggagtatttgatgcagtagtagaaaaagcctataaaggccaaagaaaaataaattggttggaggtgctagcaggacaaaaagcttttgataatgtaaatgaatggttacctgaagaaacaacaaataaatttgaagaatatggagttgggataaaagggcctttgacaactccagtaggagaaggcattagatctataaatgtctcaatcagacagataatggatttgtatgtttgcttaagaccaattaaatactttaatggaattcaaaccccaacaaaaaatcctcaagatgtagatataactttatttagagaaaacacagaagacgtttatgccgggaaagagttagaagaaggaagcgaagaagttcaaaaattaaacaaatttttaaaatctgagtttggatgggaaataagagaagatagcgggataggaataaaacctatttctaaaacagctactgaaagattagtacgagcttcattaaattatgctgttgaaaacaataaaaaaaatcttgcattagttcataaaggtaacattatgaaatttacagaaggcgcatttagaaaatggggttatgaattagttcaagaagaattttctgatgtagctatatcttgggaagactgcaacggagatccaggtgataaaattttaatacaggatgttattgctgatgcatttcttcagcaaattttagttaaacctgaaaattttgatgtgattgctactactaatttaaatggtgattatgcatcagacgctttagcagcacaaataggaggaattggaattagtcctggaggaaatataaattatgaaaacggcaaagcagtgtttgaagcaactcatggtacagcacctaagtatgcaggtaaagaccaagccaatccaggatccttaattctatctggtgaaatgatgtttagatacatgggctgggatgaagcagctgacttaactatcaaaacaatggaaaaatcaattttagatggaaatgtaacttatgatttagcaagaggaagagaagaagcaaaaacattaaaatcttctgagtttgcaaattcattaattgataatttagataaattttga

SEQ ID NO: 208029 - DNA, 382 bp, Unknown
  Bacterial polypeptide expressing nucleotide sequence isolated from the Sargasso Sea
tatggctaaaataaaggtaaaaaatccaatagttgagctagatggcgacgaaatgaccagaattatttggtcatttattaaagataaactcataagaccttatttagatatagatctaaagtattacgacttaggaatagaaagccgagataaaacaaatgaccaaattactgtagatgccgctaaagctatccagaaatatggggctggtgttaagtgtgcaacaataactccagatgaggccagagtaaaagaatttaatttaaaaaaaatgtggagatcacctaacggtacaataagaaatatcgttggtggtacaatttttagagaaccaataatttgtaaaaatgttccaaggttggttcctcatggacagaaagta

SEQ ID NO: 208030 - DNA, 1216 bp, Unknown
  Bacterial polypeptide expressing nucleotide sequence isolated from the Sargasso Sea
tatggcaaaaatcaaagtaaaaaatccagtagtagagctagatggcgatgaaatgacccgtattatttggtcatttattaaaaaaaaattaatagaaccatacttggatatagaccttaaatactatgatcttggaatggaaaatagggataaaacaaatgatcaggttacaattgattgtgctaaagctattcaaaaatttggtgctggtgttaaatgtgcaacaattacaccagatgaagcccgggtaaaggaatttaatttaaagaaaatgtggagatcaccaaatggtacgataagaaatattgttggaggaactatttttcgagaaccgataatttgtaaaaatgtacctagacttgttccgcattggactgagagtgtaatagttggaagacatgcttttggtgatcaatatagagcaacagattttaaggttcctggaaaaggtaaaatgacaattaagtgggaatcagaagatggaaaaaagaaaatcgagcatgaagtttttaaatttaacgactctggaattgcattatcaatgtacaatttagatagttcaataagggattttgctagagcatgtttaaattatggtttagtaagaaaatggccagtttatttttcatcaaaaaatacgatcttaaaagtatatgacggaaggtttaaggatatatttgaagatatttatcaaaaagagtttaagaaaaagtttgatgaagctggaattacttatgaacatagattaattgacgacatggttgcatgtgcaatgaagtggagtggtaaatatatttgggcatgtaagaattatgatggagatgtccaatcagatacggttgctcagggttatggttcgttaggtttaatgactagtgtgctcagaacaccagatggtaaaatagcagaagctgaggcagcccatggaactgttactaggcattatagacaacatcaacaaggtaaagaaacatcaacaaatccaattgcatctatttttgcatggactagaggtttggctcatagaggtcaattagacggtaatgatgaattaattaagttttcagatactctagagaaagtttgcattgaaacagttgaaagtggatcaatgactaaagacttggcaattttaattagtaaaagtcaaaaatttcttactacaaatcaatttttggaagcaatagactccaatcttaaaaaaaaacttaactaa

SEQ ID NO: 208031 - DNA, 352 bp, Unknown
  Bacterial polypeptide expressing nucleotide sequence isolated from the Sargasso Sea
aatgacaagtgttttaatgactcctgatggaaaaactgtagaagctgaagcagcgcatggaaccgttactaggcactttagaaatcatcaacagggtttagaaacatccacaaatccaattgcttctatttttgcatggtcaagaggtttgtattttaggggaaaatttgatgataatcaaaatttaatgaatttttcaaaaaaacttgaagaaacttgtatcgaaactgttgaaactggaaaaatgacaaaagatttggcgattttaattagtgaaaaacaaaaatggttaaacactcaagattttttaaatactctaaaggataacttagaaaaaaaattaggatcttaa

SEQ ID NO: 208032 - DNA, 1132 bp, Unknown
  Bacterial polypeptide expressing nucleotide sequence isolated from the Sargasso Sea
caaattaattctaccttatttagatttaggcattgagtattacgatctaggaatgaaaagcagggatgatacagatgacaaaattactatcgactgtgctaatgcaatcaagaaaaatggggtaggtatcaaatgcgcaactattactcctgacgaggccagagttgaagaattcaaattaaagaaaatgtggagatctccgaatggaacaataagaaatattattggaggaacagtatttagagaaccgataatttgtaaaaatattcctaaacttgtcccatcttggacagatccattaattattggaaggcatgcttttggtgatcaatacaaagctacagattttttagttccaggaaaaggtaaattagaagttaagtggacatcggaagatggaagtgatgaaaaaaaatatgaagtatttgactttccaggacctggtattgctctttcaatgtataatttagataaatcaattgaagactttgcaaggtcatgtttcaattacggtctaattaaaaaatggcctgtatatttatcaactaagaataccatactaaaaaaatatgacggtagatttaaagatatatttcaaaatgtttttgaaaaagattttaaatcagaatttgaagaaaataatataacttatgaacataggttaatcgatgatatggttgcttgtgctatgaagtggcatggcaaatatatctgggcttgtaaaaattatgatggtgatgttcagtcagacactgttgctcaaggttatggttctttaggtttaatgacaagtgttttattagcacctgatggcagaacaatggaagcagaagcggctcatggaactgttactcgacattttagaatgcatcagcaaggtaaagaaacatcaaccaatccaattgcatctatatttgcttggacaagaggtttggcgcatagaggaaagttagatagcaataatgaattaattaaatttgccaaaacacttgaagaagtatgtgttaattcggttgaatcaggatcaatgacgaaagatttggcaatacttattggtccttctacaaaatatttaacaactaatcagtttttagatgtaattgatggaagtttaaaacaaaaattaaattaa

SEQ ID NO: 208033 - DNA, 808 bp, Unknown
  Bacterial polypeptide expressing nucleotide sequence isolated from the Sargasso Sea
catggtgatcttccgcgagaactcggaagacatttatgccggcatcgaatggcctgccggctcggaagacgcgaagaaggtcatcaagttcctgcgcgaggaaatgggtgtgaagaagatccgcttcccggaaacctcggggatcggtgtcaagcccgtgtcgcgcgaaggcacggagcgtctggtgcgcaaggcgatccagtatgcgatcgacaacgagcgccgctcggtcacgcttgtgcacaagggcaacatcatgaagttcacggaaggcgcattccgcgactacggctatgcgctggcgcaaaaggaattcgcggcggagctgatcgacggcggtccgtggatgaagataaagaacccgaaaacgggtggcgacatcgtggtgaaagacgtgattgccgacgcgttccttcagcaaatcctgctgcgcccggccgaatacgacgtgatcgccacgctgaatctgaacggcgactatgtttcggacgcgctggccgcgcaagtcggcggtatcggaattgcaccgggtgcaaatatgtcggattcggtcgccatgttcgaagccacgcacggcacggcgccgaaatacgccggcaaagactatgtaaatccgggttcggaaattctctcggccgagatgatgctgcgtcacctgggctggaccgaagcggcggatctgatcatcaaatcgatggaaaagtcgattctgcaaaaacgggtcacgtatgacttcgcgcgcctgatggaaggcgcgacgcaagtgtcctgttcgggcttcggtcaggtgttgatcgaaaacatgtaa

SEQ ID NO: 208034 - DNA, 1219 bp, Unknown
  Bacterial polypeptide expressing nucleotide sequence isolated from the Sargasso Sea
atggcaaaaaagatcaaagcaaaagggcccgttgttgaactcgatggggatgaaatgaccagaattatctgggagttcattaaggagaaactaattcttcagtatgttgatgtagacctccgctattttgatctgtcggttcaaagtcgagactcaacagatgaccagattacggtcgatgcagctcatgcgattcaggagtgtggcgtaggtgtgaaatgtgccacgattacgccagatgaagcaagagtagaagagtttggtttgaagaaaatgtggcgtagtccgaacggtacgattcgcaacattcttggcggagtgattttccgagaaccaataattattggaaatataccgcggttagttcctggttggacaaaaccaattgttgttggtcgtcacgcattcggagaccagtatcgcgcaacggatttaaaaattcctggtccagggaagcttacattaacctatgccccggctgatggatccgcacctatggagatgaatgtctatgactttccgtccagtggtgtagcgatggcaatgtacaaccgggatgattcgatacgtgactttgctcgtgcaagctttcggtatggtctggcgcgaaattatcctgtttatctttcaaccaaaaacacaatcctaaaagcgtacgatggccgctttaaagacttgttccaagaagtgtttgatgctgaattcaaagaggagttcgcagcaaaaggaatcacctacgaacatcggcttattgacgacatggtggcatgtgccatgaagtgggaaggtggttacgtttgggcatgcaaaaactacgatggtgacgtgcagagcgatattgtcgcccaaggatttgggtcattaggcctgatgacaagtgtattgatgacgcctgacggaaagacagttgaggctgaagcagcccatggcacggtcacgaggcattaccgccagcatcagcagggaaaacccacgagcacgaatccgattgcgtcgatctttgcgtggacgcgaggcttagcacaccgaggcaagcttgatcagacacccgatgtgacagcctttgcagaaacgcttgaaaaagtctgtattggaacagttgaacaaggcaagatgacaaaagatctggccttactcgttgggaaagaccagccatatcttcagacacaagagtttctggatgcaattgatgaaaatcttcaatccgcaatggcttgat

SEQ ID NO: 208035 - DNA, 787 bp, Unknown
  Bacterial polypeptide expressing nucleotide sequence isolated from the Sargasso Sea
tatgagcaaaattaaggtcaaaaagcctattgttgagttagatggtgatgaaatgactagggtaatttgggattttataaaaaacaagctaattcttccctatattgacctaggaatagaatactttgacctaggaataaaaagtagagacaaaacaaatgatcaaataacaattgattgtgctaaggcaattaaaaaaaatggtgttggtattaagtgcgcaacaataactcctgatgaagaaagggtaaaagagtttaatctaaaaaaaatgtggagatccccaaatggaacaatacgaaatataattggaggtacagtttttagagaacctataatttgtaaaaatattccaaaattagttccaagttggactaacccaatttgtataggcagacatgcctttggtgatcaatatagagccacagattttcaagtccctggaaaaggtaaattagaattaaaatggacatctgaagatggtaaagaaaaaaaagagtttgaggtatttaattttcctgggccaggagtcgctctttcgatgtataatcttgatcaatccataaaagattttgcaagagcatgtatgaactatggcttaaatagaaaatggccagtttatctctcaactaaaaatacaatattgaaaaagtatgatggaagatttaaggatttatttgaagaagtttttcaaaaagaatttaaagaaaaatttaaagaaagaaaaataacatatgaacataggcttatagatgacatggtggcttgcgcaatgaaatggaatgga

SEQ ID NO: 208036 - DNA, 1261 bp, Unknown
  Bacterial polypeptide expressing nucleotide sequence isolated from the Sargasso Sea
tatgtatataaaaagaagaaattcaattaataagatacatcaaaaaatgagcaaaattaaggtaaaaaatccaattgtcgagttggatggtgatgaaatgacaagagtgatctgggagttcatcaaaaagaagttaatacttccctacattgatttgggaatagaatattatgatctcagtatgaaaaacagagatgacacaaatgaccaaataacgattgattgcgcaaaggcaattaaaaaaaatggcgtcggaattaaatgcgcaaccatcactgctgatgaaactagattagaagaattcaaattaaaaaaaatgtggcgatcacctaatggaactatcagaaatattattgggggtaccgtatttagagaaccaattatttgtaaaaatattcctaaactcgttccatcttggactaatcctttgattattggaaggcatgcatttggggaccagtacagagccacagactttttggttcctggaaaaggtaagctcgaaattaaatggacttcagaagatggaaatgaagaaaaaaaatatgaggtgttcgactttccaggacctggaattgctttatcaatgtacaatttagataagtctatagaagattttgcaagatcttgttttaattatggattaataaaaaaatggccagtttatctttcaacaaaaaatactattttaaaaaaatatgatggaagatttaaagatatttttcaaaaaatatttgaaaatgaatttaaatctaaatttgacaatattaacatcacatatgagcatcgattaatcgatgacatggttgcctgcgctatgaaatggagtggtaaatacatttgggcatgtaaaaattacgatggagatgttcaatcagacactgttgctcaaggatatggttcgttaggattaatgacgagcgttcttttagctcctgacggcaaaacaatggaagctgaagcggcccatggtactgttacaaggcattttagaatgcaccaacaaggaaaacaaacctcaactaaccctattgcatcaatctttgcatggacgaggggattatcgcatagaggaaaattagacaataatgataaacttataaattttgcaaatattttagaaaatatttgtatagagtgtgtcgaaaatggctctatgacaaaagatcttgcaatattaattgggccttcaactaaatacttaacaactaatcagtttttagatgaaattgacttaagtttaaaaaataaattaaattaa

SEQ ID NO: 208037 - DNA, 1231 bp, Unknown
  Bacterial polypeptide expressing nucleotide sequence isolated from the Sargasso Sea
atgtcagagggagaacaaatatcaatttctaatggggaattagaagttcccaacaaccccttgattcattttattgaaggggatgggatcggcgtagatattaccccggttatgatcgatgtcgttgatagttcagttgaattagcatattctggagacaggaagatccactggagggaagtactagccggacagaaagcattcgactccaccggggaatggcttcccgaggaaaccaagaagtcaatgagagagaacctgatttctatcaaaggcccactaaccactccagttggaggcgggattaggagcttaaacgtggcacttaggcagcaattggatctattcgcctgtgttaggccggtaaggtggtttgaaggaacccctagtccagtcaaggatccaggctcggttgacatggtgatattcagggaaaatagcgaggatgtctacgcggggatagagtgggaggcaggtagtccagaggttgcaaaggtcatagatttccttcagaacgagatgggtgttgacaaaatccgatttccagatacatctggtttgggaatcaagcccattagtgaacaaggaacttctaggatagtcagagccgcgattaagtatgcaatagaaaacgacaggaacagcgtcacactggttcacaaaggcaacatcatgaagttcaccgagggaggtttcagggattggggctacggtatcgcgaagacggagtttggtgcatccgagatcgatggtggcccatggtgctcatttacgaacccgaatacaggtactgagataattgtgaaggacgtaattgcggatgcgatgcttcagcagatattgacacgacctagagaatatgaggtactggctactatgaatctgaatggtgactacatctcagatgcactagctgcacaagtggggggaattggcattgctcccggtgccaacatcaactatgacacgggtgtagcaattttcgaggccactcacggcacggctcctaagtatgcgggacagaacaaggttaaccccggaagtctgattctgtctgcagagatgatgctcaggcacatgggttggacagaatcagcagatttgattgtaaagggcatggagggagcaatttcctctaagaaagtgacatatgactttgagagactaatggaagacgctaccctcctttcctgttcagatttcggtcgagcaatcgtgtctcacatgtagg

SEQ ID NO: 208038 - DNA, 1216 bp, Unknown
  Bacterial polypeptide expressing nucleotide sequence isolated from the Sargasso Sea
aatgagtaaaattaaggttaaaaaccccattgtagagttagatggcgatgaaatgaccagagttatatgggacttcataaaaaacaagctcgttttaacttaccttgatctcaaaattgagtactacgatttgggaatggaaagtagagacaaaacagaagataaaattacaattgaatgtgctaatgcaattaaaagaaatggtgtcggtattaagtgtgcaaccatcacacctgatgaagctagagtaagagaatttaatcttaaaaaaatgtggagatctccaaatggtacaataagaaatataattggaggaactgtttttagagaacctataatttgtaaaaatattccaaaacttgtgccctcatggacagatccattgatcataggtagacatgcttttggtgatcaatacagagcaacagactttacagtacccggtaaaggtaagttagaaatcaaatggactgctgaagatggttctgatgagagaaagtatgaagtcttcaatttcccaggtcctgggattgcattatcaatgtataatttggacaaatcaatagaggactttgcaagatcttgctttaactatggattaattaaaaaatggccagtttacctttctactaaaaatacaattttaaaaagatacgacggaagatttaaagatatttttgaggaagtttttgaaaaagaatttaaggatagatttgatcaaaataaaattacttatgaacatagattgatagatgacatggtagcatgcgcaatgaaatggcatggtaaatatatttgggcgtgcaaaaattatgatggagatgtacaatcagatacagttgctcaaggatatggatctttaggtttaatgacaagtgtcttgcttgctccagatggcaaaacaatggaagctgaagctgcacatggaacagtaacaagacattttagaatgcatcaacaaggtaaagaaacctcaacaaatcctattgcatctatttttgcatggacaagaggtttggctcatagaggaaaattagatggaaatgaggaattaataaagtttgcagaaacactagaaaaagtatgtgttgattgtgttgaagaaggctcaatgactaaggacttagctattttgataggaccttcaacaaagtatttaacaactaatcaatttttagatactttagatggtaagttgagacaaaaactaaattaa

SEQ ID NO: 208039 - DNA, 1228 bp, Unknown
  Bacterial polypeptide expressing nucleotide sequence isolated from the Sargasso Sea
gatgtccaaaattaaagtcaaaaaccctgttgttgagcttgatggtgatgaaatgacaaggataatatgggattatatcaaacaaaaactcattcttccatacattgatcttgacatcaaatattatgatttaggtattaaaaacagagattttactgacgatcaggttactgttgatgctgctaatgctattaaaaaatataatgtaggaataaaatgtgctacaatcacacctgatgagcaaagggtgaaggagtacactttaaaaaagatgtggaaatctcctaacggaacaatacgaaatattattggtggtactgtttttagagaacctattataatgaaaaacattccacgatatgttcaaggatgggttaaaccaatctgcataggaagacatgcttttggagatcaatacagagcaactgattttgttactcatggaaaaggtaaactaacaatgacatttactccagaaaatggtgatgatgagaagacatgggaaatatataattttcaagaggatggtattgcaatgggtatgtacaatattgaatcatcgatttatggttttgcaagatcttgtatgaatagagcagtttcaaaacagtggccactgtacttatcaaccaaaaacaccattttaaaagcatacgatggaagattcaaggatattttccacgaagtttttgaaaatgaatttaaagataagttttatgaacttggaataacttatgaacatagacttattgatgacatggtagcggcagcaatgaaatgggaaggtggtttcgtttgggcatgtaaaaactatgatggtgatgtacaatctgatactgtagcgcaaggttttggatctttgggccttatgacttcaactttactaacaccagatggcaaaactatggaagctgaggctgctcatggtacagtaacaagacattataggttgcatcagaaaggaaaagaaacctcaaccaacccaattgcttcaatttttgcttggacaagaggattaattcacagagcagaattggattctaatgataaactgctaattttttgcaatcttttggaaaaagtttgcatcgaaacagttgaatctggtaaaatgacaaaagatctagctcttctaatacatggaagtaatttgaaaagacagcattacttaaacactcaagagtttttaaatgcaatcaagataaaccttgattcaaaagtatcatag

SEQ ID NO: 208040 - DNA, 853 bp, Unknown
  Bacterial polypeptide expressing nucleotide sequence isolated from the Sargasso Sea
tcctagttggacccaaccaattgtgataggaaggcatgctttcggtgatcaatatagagctactgattttttggtacctggtgaaggaagtttagaagttaaatggatttcaaaggatggaaaaaataagaaagagtttaaggtttttgatttttcaggatctggaactgctctagcaatgtacaatctagatgactctataaaaaattttgcaagagcatgtatgaattatggtcttgaaagaaaatggccagtttatttatcaactaaaaatacaatacttaaagcttatgatggacgatttaaggatctttttcaagaaatttttgagaaagaattttctgataaatttaagaaagcaaatattacttatgaacatagattaattgatgacatggttgcttgcgctatgaaatggaatggcggttatatttgggcctgtaagaattatgatggtgacgtgcaatccgatactgttgcccaagggtttggatccttagggcttatgacaagcgttttaatgactccagatggcaaaacggtagagtccgaagcggctcatggaactgtgactagacactatagaatgcatcaacaaggaaaggaaacttcaacaaatccaatagcttctatatttgcctggacaagaggattagctcacaggggaaaactcgatagcaatgaacaactaattaaattttcaaaaaatgttgaagacgtatgtattcaaacagttgaaagtggttcaatgactaaagatttgtcaattttgattgataaatcaaataaatacttaactacaaatcaatttctagaagcgattgatggtaatctgaaaaagaaacttaattaa

SEQ ID NO: 208041 - DNA, 1195 bp, Unknown
  Bacterial polypeptide expressing nucleotide sequence isolated from the Sargasso Sea
cgagctctacggcacttatcaatacctgcctgaagacactctcgaagcaattcgccgcttcggcgtcgcgatcaagggtccgctgaccacacccgtgggcggaggcatccgatccctcaatgtggccctgcgccagattttcgacctgtattcctgtgtgcgtccctgccggtactacgccggcaccccaagtccccacaagcgtccccaggacctggacgtgatcgtttaccgggaaaacaccgaagacatctacatgggcgtcgaatgggaagccgatgacgccgtcggccaagaactacgcaagcacctcaacgaggtggtgattcctgcgaatggcaagctcggccaacgccagattccagaaggatcaggcatcggcatcaagcccgtgagcaagcacggcagccagcgccacatccgcaaggcgattcaacacgctctgcgcctggaaggaaacaagcgccacgtcacgctggtgcacaagggcaacatcatgaagttcacggaaggggccttccgcgactggggctatgaattggccaccagcgaattccgcgacgtctgcatcacggaacgggagagctggatccttgggaacctggaaaaggattcaagcctgagcgtggaggccaacgcccgcatgattgaacctggctacgacagccttacccctgaaaagaaatcagacatcgacgccgaagtacaagcggtgattgattccatcggcagcagccacggtggcggcaaatggaagcagatggtgctggtcgatgaccgcatcgccgacagcatcttccagcagattcaaacccggccccaggagtattcgatcctggccaccctcaatctcaacggcgactacatctccgatgccgctgctgcaatggtggggggtctgggcatggcccccggcgccaacatcggtgaaaacgctgccatcttcgaagccacccatggcaccgctccgaaacatgcgggactcgaccggatcaatccaggctcggtgattctcagcggcgtgatgatgctggaattcctgggctggcaagacgctgctgacctggtcaccaaaggcctgagtgctgcgatcgccgacaaacaggtcacctatgacctggcccgactgatggaaccccaggttgatccggtgagctgcagcggcttcgctgaagcgatcatccagcgcttctaa

SEQ ID NO: 208042 - DNA, 1011 bp, Unknown
  Bacterial polypeptide expressing nucleotide sequence isolated from the Sargasso Sea
tcggtatcaaatgtgcaactataactccagatgaagcacgagttgaagagtttaaattaaagaaaatgtggagatctccaaacggaactatccggaatattattgggggaactgtatttagagaacccataatttgttctaacattccaaagctcgttccctcttggtcagacccagtagtgatcgggagacatgcatttggagatcaatatagagcaacagatttcaaagtgcctggtaaaggcaagatggaagtaaaatggacttctgaagatggtaaagatgaaattaaatatgaagtatttaattttactggtccaggtgttgcgctctcaatgtataatttagataaatcaatcgaggatttcgcaagatcctgttttagttatggattaattaagaattggccagtttacttatcaactaaaaatacaattctaaaaaaatacgatgggagatttaaagatatatttgaagaggtctataataaagaattcaagaaaaaatttgaggatgcaaaaattacttatgaacacagattaattgatgacatggtagcgtgtgcaatgaaatggagtggcaagtatatatgggcatgtaaaaattatgatggtgatgttcaatcagataccatggctcaaggatatggttcacttggtttaatgaccagtacactgcttacacctgatggaaaaataatggaggcagaagcagctcacggaacagtaactagacattatagaatgcaccaacaaggtaaagaaacttccacaaatccaattgcctcgatttttgcatggacaagaggattagcacacagaggaaaacttgatggtaatgacgaacttatcaaatttgcaaatacaattgaaaaagtttgtattgaaagtgttgaaaatggctccatgacaaaagatcttgcaatattggttggaccttcaagcaaatatttaacaactaatcaatttctggatgtaattgataacaatcttaaacagaagctaaattaaa

SEQ ID NO: 208043 - DNA, 724 bp, Unknown
  Bacterial polypeptide expressing nucleotide sequence isolated from the Sargasso Sea
taaaatattaaaatcaaaatttgatgtaactaaaataaggtttgaagaaaacgttggctttggtataaagccaatttctgaagagggtactcataggctcgttaaaaaagctattgactatgcaatagacaataatcgatcatccgtaacgctagttcataagggtaatattatgaaatttactgaaggcgcatttcgagactggggttatgagttatctaagaactcctatggtggagtagaaatagatgatggaccatggcaggaaatagtaaacccaaataatggaaagaaaattgtaattaaggatgtaatttgcgacgcatttttacaacaaatacttttaagaccaacggaatatgatgtaatcgcaactatgaacttaaatggtgattatatatcagatgcacttgcggcaatggttggcggtattggtatagctcctggagcaaacatttctgatcaatatgctgtatttgaagcaacgcatggaacagcgccaaaatatgctggacaaaataaagtaaatcctggaagtttaatcttatctgctgaaatgatgctacgccatatgggttggattgaagctgcagacctaattataaaatcgatggatagaacaattagtgctaaaaaagttacttatgattttgcaagaatgatgactgattcagacatggtctcttcatctggatttgcagatgaaatgattaaaaggatgtaa

SEQ ID NO: 208044 - DNA, 892 bp, Unknown
  Bacterial polypeptide expressing nucleotide sequence isolated from the Sargasso Sea
atattagatctatatgttgccctgagaccaataagatattttaatggagttccatctccagtaaaaagaccacaagatactgatatggttatttttagagaaaattctgaagatatatattgtggtgttgagttcgaaggaaattcttcagcttctaaaaatctagtaaaaaccctaaaaaaagattttaaagtaaaaaaaattagatttgataaaaatgtcggtataggtatcaaacctatatctgaagaaggtacttcacgattagttaaaaaagctattgattatgctgtagacaataatagatcttctgtaactttagttcataaaggtaatattatgaagtacacagaaggtgcttttagagattggggttatgaaattgcaaaaaaagattatggcggcattgaaattgatgatgggccatggcaggaaataataaatccaaataatggaaagaaaattgtaatcaaagacgtaatatgcgatgcatttttgcaacaaattctaacaagaccaactgaatatgatgttatagcaactatgaacttaaatggtgattatatatctgatgcacttgctgcgatagtaggcggcatcggtattgcgcctggagccaatatctcagatgattatgcagtatttgaagcaacccatggaactgctccaaaatatgcaggcaaaaataaagttaatccaggaagtttaattctttctgcagaaatgatgttaagacatatggggtggacagaagccgctgatttaatcatatcatctatggatagagcgattggagctaagaaagtaacttatgatttcgaaagaatgatggataatgctgacttagttacatcttctggatttgccgatgaaatgataaaaaggatgtaat

SEQ ID NO: 208045 - DNA, 1039 bp, Unknown
  Bacterial polypeptide expressing nucleotide sequence isolated from the Sargasso Sea
tgaaaaatctactcaagtttatgatgctgatacgtggttaccagatgaaacaatcgaagcattaaaagaatatattgtcagcataaagggacctttgactacgcctgtaggaggaggaattagatccttaaatgtttctcttcgtcaaattcttgacctctatgtttgcctgcgaccaattagatatttttcaggtgtcccaagcccagtcaagaatccctctcatgttgatatggtgatctttagagaaaattctgaagatatatatgcgggtgtggaatttgaagctggatcgccagaatctgacgctatggtaaaggtcctgcaagagcagtttggcgtaactcaaataaggtttccatcagaagttggtctcggcgttaagccaatatctaaacaaggtacagaaaggcttgttaaacaagctgttgattatgctattaaaaatgatagatcatccgtcacacttgttcataaaggcaacatcatgaaatttacagaaggggcattcagggattggggttatgaactcagtatgaattcttataacggagagttattagatgggggtccatgggtcactattaaaaatccaaatactggaaaaaatattattgtaaaagacgttatttgtgatgcctttcttcagcaaatactaaccagacctaaagaatatgatgttattgcaaccatgaatcttaatggcgattatatttctgatgctttggctgcttgtgttggaggtattggtattgctccaggagcaaacattggagatgattcagcattatttgaagcaacacatggaactgcgcctaaatatgcaggtcaggataaagttaacccaggttctttaattttgtcagcagaaatgatgttaagacacatgggttgggttgaagcagcagatcttataatttcttcaatggaagcagcgataacagataagatggtgacctatgactttgaaaggttaatggatggtgcaaatctagtttcttgctctggctttgccaaggaaatgattaaaagaatgtga

SEQ ID NO: 208046 - DNA, 675 bp, Unknown
  Bacterial polypeptide expressing nucleotide sequence isolated from the Sargasso Sea
tgtacaatttagatgattctataaaaaattttgcaagagcatgtatgaattacggtcttggaagaaaatggccagtttatttatcaactaaaaatacaatccttaaggcttatgacggacggtttaaagatctttttcaagaagtttttgtaaaagaattttctggtaaatttaagaaagcaaatattacttatgaacatagattaattgatgacatggtagcttgtgctatgaaatggaatggtgggtacatttgggcttgtaagaattatgatggtgacgtgcaatctgacactgttgctcagggatttgggtctttaggacttatgaccagcgttttaatgacaccagatggaaatacagtagagtctgaggcggctcatggaactgtaactaggcactatagaatgcatcaacaaggaaaagaaacttcaactaacccaatagcgtctatatttgcctggacaagaggattagctcatagaggtaaactcgatggtaatgaagaactaattaaattttcaaaaaatgttgaagacgtgtgtgtaaaaacagttgaaagtggttcaatgactaaagatttgtcaattttgatagataaatcaaataaattcctaactacgaatcaattcttagaagtgattgacggaaatctgaaaaagaaacttaattaat

SEQ ID NO: 208047 - DNA, 1280 bp, Unknown
  Bacterial polypeptide expressing nucleotide sequence isolated from the Sargasso Sea
cattcaagatggttcgatagtaacacctgataaacctatagtaccttatataattggtgatggtatcggcattgatgttacgcctgttatgaagagagtcttaaattatgctattggcaaagcctatggcgtatctaaagaaattaaatggatggaaatatatgctggtcaacaggctttagatatatgtgggcaactattacctcaagaaaccattgatgcaatgaaaaaatatcgagtctcaattaagggaccgctaacaacgccgattggaaatgggtttaaatccatcaatgttagtattagacaacaattagatttatttgcatgtgtaagaccaattagatattttcctggcacgaacagccccatggttgaatcaaatctaactgacatggttgttttcagagaaaatactgaagacttatatagcggtatagagtggaagccagactctgatggagcaaaaaaaattattgaattcattaagaatgaacttggcgaatcgccttttcgttttgaaaaaaattgtggtataggcataaaacctgtttctaaagaaggttctgaaagattgattaatatggctattgattttgcactaaacgaaaaaagagattctcttactattgttcataaaggtaatattatgaagtacacagaaggagcatttagagattgggcttatgaacttgttaaaaataaatatcatggttcagttaacaagaacggaacttatactattaaatgtcctaaatcaaatcatgtactgactattaaagattgtatagcagataattttcttcaacagatcatattagttccagagcaacacgaggttattgccactctaaatttaaatggtgactatatctctgatgccttggctgcgcaagttgggggaataggtatcgctccaggagcaaatattggagatggttatggtgtatttgaggcgactcatggatcagcagaatcctttgcaggtaaaaatagagttaatccaagctcaattatcttatctggagaaatgatgcttagatatatgggttgggatgaggctgctgattatgtcttaaaaggcgttataggcgctatacagaaaaagcaattaacatttgacttagctagagctagagcaggtaaaaaatttattagacctaaatccaaagaaaagaatacagctgaagaaattaaacaagagcttatgaaattagttccaggagctaccttggtaagtactcaaggcttcggtgatgctgtaatagataatatgtaga

SEQ ID NO: 208048 - DNA, 841 bp, Unknown
  Bacterial polypeptide expressing nucleotide sequence isolated from the Sargasso Sea
aggacgacacgcatttggagatcaatatagagcgacagattttaaagttcctggtaaaggaaaattaagtattaagtggacgcctgatgaccctaaccaagaaccgattgaaaaagaggtttatgagtttcaatctagtggcgttgcaatggcaatgtacaataccgatgagtccatacgtgattttgctagatcgtgtatgaattacgctcttatgagagagtggccagtctatttatcgacaaaaaatactattctcaaaaaatatgatggacgatttaaagatttatttcaggaaatttatgataaagaatttgctgatcaattcaaatctttggaacttgattatgaacatagattaattgatgacatggtcgcatctgcattaaaatggaatggaaaatttgtttgggcatgtaagaattatgatggagatgttcaatcagatactgtcgctcaaggttttggctctcttggattaatgacaagcgtgttgatgacacctgatggaaaaacaattgaggctgaagctgctcacggaactgtaacgaggcactatagacttcatcaagaaggaaaacaaacatctacaaatccaatagcatcaatttttgcatggtcaagaggtctaaagtatagaggaaaacttgacggtaatgatgaactaattaagtttgctgatactcttgagaaagtctgtgtaaaaacagttgaacgcggctcaatgacaaaggatttagcgctccttatgccccatgagcaagattggcacagtactgaagattttcttgaaatcattgaacgaaatttagataaagcgcttaatccaacttatcagtaa

SEQ ID NO: 208049 - DNA, 858 bp, Unknown
  Bacterial polypeptide expressing nucleotide sequence isolated from the Sargasso Sea
agaagacgttgttgatcttctcgatgtgcctaggaagattttattgtttgtccccgctggagacccagttagtgaaacagttgcgaggctttcggaaatactggattccaacgatattctcgtagattgtggtaattcccactatttggattcaatcgatagagagcgagcagcaaggttggatcaagttcatttcgttggtcttggtgtgtcaggcggggcttcgggtgctttgaatggtccaagcatgatgtacggaggcaatgaaaatacatggaaagagttatcccccatattaatgacaatagcagcggagggacaatctggaccctgtgtgcatagatttggagatgccggagctgggcactttgtgaaaatggtacacaatggcatcgaatacgccgatatgcagattattgctgaggcgcacgatctcatgtcgagaggattgcacctctcccaagctgatcaatccgaattctttagaaaagcgaataagggcagcctctcgagttttctcattgagttagctggccgcgttctagattcggaaacgacggacctcgacaacatcatcgatgccgctgaacaaaaagggacagggtcttggtcagtcaaggcagcacttgaactcggcgtatcgacaccatgtattgacgctgcagtcggcgcgcgtctggtttccagcttctgggcggagaggcagcaactcgcttccgtcttgagcattagtgctaatgaaagcccctctctttcttttgaattgtatcaattagagcaggcgatctggtttgcgaagatttgtgcatatattcaagggttcgatctgatcaaacagggaagtcaggtctatggttg

SEQ ID NO: 208050 - DNA, 856 bp, Unknown
  Bacterial polypeptide expressing nucleotide sequence isolated from the Sargasso Sea
tttgttaataagctagagagacctagaagaattctaatgatggtaaaagctgggcccgcaacagatgctgtcattgataatatttctggatatctcgaggaaggggatttattaatagatggcggcaactctcaatttaaagacacagaaagaagggtgaatactcttgaaagtaaaagttttggatacattgggatgggagtctctggaggggctaaaggagctttagagggtccaagtatgatgcccggtggtactaaggcttcctatgatgcaatagaaagcttattaacaaaaatggctgccaaagttgaagacggaccatgtgttgcatatgttggaccaggaggttcaggtcattttgtgaaaactgttcataacggaattgaatatggaattgaacaaatacttgcagaagcttatgaccttatgaagagagtcaaaggtatgaacggtcagcaaatgtcagaggtatttggtatttggaataatactgatgaattagcttcttatcttgttgagataacagagatttgtctaaatacaaaagatgagataactggagatgatgtcgtggaaaaaatattagataaagctggccagaaaggtacagggttatggactgttgtaagtgctctagaactgggggtatcagtcccaactatttatgcctctttaaatgcaagagtaatgagttctttaaaagagcaacgtagtgagattgaaaaaactattccatctaaagagataggggattttgatttaggaaatatatcagatggaatgaaacctttatttgatgctgtagtccttgccacaatagctagctatgcccagggtatggacattttaagag

SEQ ID NO: 208051 - DNA, 199 bp, Unknown
  Bacterial polypeptide expressing nucleotide sequence isolated from the Sargasso Sea
atgtccaagcaacagatcggcgtcgtcggtatggcagtgatggggcgcaacctggcgctcaacatcgaaagccgtggttataccgtctccatcttcaaccgctcccgcgagaaaactgaagaagttgttgccgagaacccgcgtaagaaactggttccttattacacggtgaaagagttcgtcgagtctctgaaacccc

SEQ ID NO: 208052 - DNA, 837 bp, Unknown
  Bacterial polypeptide expressing nucleotide sequence isolated from the Sargasso Sea
gaacggattttctagtgtagtttttaatagaacctattcaaaaactcaagaattcttagaaggtagaggtttaggaaagaatgtagaaggagctaaaacacttcaagaatttgtgaataaacttgagagaccaagaagaattttaatgatggttaaagccggggcagctacagatgctgttattgataatatttctgaatatcttgaagaaggtgatttattaattgatggaggtaattctcagtttaaagatactgaaagaagagttgcgactcttgaaagtaaaagctttggatatataggaatgggtgtctctggaggggctaaaggagccttggaggggccaagcatgatgcctggtggaactaaagcctcttatgacgctatagaaagtttgttgactaaaatggctgcgaaagtagaagacggtccttgtgtagcttatgttggacccggtggttcaggccacttcgttaaaactgttcataatggtattgaatatggcattgagcaaattcttgcagaagcatatgaccttatgaaaagagtcaaaaatatgaatggatcacaaatggctgaggtttttggtctttggaataatactgatgaattggcatcttatcttgtagaaataacgcagatatgtttaaacaccaaagatgaactaacaggcgaagatgttgtggaaaaaatattggataaagctggccaaaaaggtactggattgtggactgttgttagtgccttagaactgggcatatcagttcccactatttatgcatcattaaatgcaagggttatgagttctcttaaggttcaacgtagtgaaatcgagaa

SEQ ID NO: 208053 - DNA, 363 bp, Unknown
  Bacterial polypeptide expressing nucleotide sequence isolated from the Sargasso Sea
tatgaaatatgattttggattggttggattaggtgttatgggaagaaactttatcttaaatgtagcagaaaatggattttcagccattggattatcatcaagaaatgaatctattgaaaaattagagaatgatggaaaagattttgtagtaaaaggaactagtgacactaaagtttttatagaaagccttacaatcccaagaaaaataatgcttcttgttccggcaggaaatccagttgattcagttcttgataactttttacctcatctatctcctggtgatataattatagatggaggaaattctcactattttgataccgaaagaagatttgaaaaactagataaattaaatatacattt

SEQ ID NO: 208054 - DNA, 516 bp, Unknown
  Bacterial polypeptide expressing nucleotide sequence isolated from the Sargasso Sea
cgatggatgatgctcaaaaagccgttttaatcgatgccttagagcgcgcgctctattgcgctaaagtgtgttgctacgcccagggtttccaactcatggcgatgacggcgcaggagcaaaaatggcagctcgattttgctgaaatcgcgaagatttggcgtgcgggttgtattattcgtgccaccttcttgcaatctatcactcaagcttatcaagcgaatgcggacttaagctgtttattgatggccgacacctttgcaactaccttgtcggaaaaacaaaccgagtggcgcagtgctgtggcggctgctgtgatgcaagggatccccgtgccttgtattagttcggcattggcctattacgacagttaccgcagtgagaccctgccagcaaacttgcttcaaggtcaaagggactttttcggtgcccatacctttgagcgcttagataagcccgctggcgagaaatatcatttagattggagtgccccaaacagggtattaatcaaactctaaa

SEQ ID NO: 208055 - DNA, 739 bp, Unknown
  Bacterial polypeptide expressing nucleotide sequence isolated from the Sargasso Sea
cggtcctggtggatcaggtcatctggtcaagacggtccacaacggcatcgagtacggcatcgagcagatcctggccgagggctacgacctgatgaagcgggtcaagggaatgaccggtgtgcagatggctgatgttctcgctcaatggaatgccactgaggagttgtcgtcctacctggtggagatcacggaggtgtgtctgcgcaccaaggatcctgaagatggaactgatctggtcgagaagatcacggatcaggctggccagaagggtacgggcctctggactgtggtgacggcactgcagatgggtgcctcggtgcccaccatctatgcatcgctcaatgcgcgtgtgatgagctccatgaggccccaacggatggctgctgaatccatcctcaagggtcccgcaatcaaggactttgatctgggtacgtctgacgatgccatggctcctttgatggatgccacggtgctgagctgcatcgccagttatgcccagggcatggaactgctccgcattgcgtcccaggatctcgactatgagctccacatgccttccatcgctcagatctggaaaggcggctgcatcattcgcgcgcgcctgctcaagcggattcaggatgcctttgacgctgatccacaactgcccaacctgatggtggatccttggttcgccgagcagatcaaccgccgtctccccggcctggccaaggtggttgccggtgtgcagaagctggca

SEQ ID NO: 208056 - DNA, 615 bp, Unknown
  Bacterial polypeptide expressing nucleotide sequence isolated from the Sargasso Sea
tatggctggccgtggcgccggcaaacagattcagccggcctattccctgcaggagtttgtcgacaagctggaaaggccccgccgcatcttgatgatggtgaaggccggtggtgccgtggatgcggtcatcgatcaaatctcgccgtatctcgaagccggcgacctgctgattgacggcggcaactcggagtacaaagacaccgaacgccgcgtcgccaaactcgaaagccagagcttcggcttcatcggcatgggcgtctcaggcggcgccaagggtgctctggaaggacccagcatgatgccgggaggaaccaaggcgtcttatgacgccatcgaaagcctggtcaccaagatggccgcccaggtggaagacggcccctgtgtcacctacatcggtcctggcggttccggccatttcgtcaagaccgtccacaacggcattgagtacggcattgagcaaatcttggccgaggcctatgacctaatgaagcgggtcaagggcatgaacggcgagcagatcgctgatgtgttcaaggcctggaacgcgaccgaagagctcaactcctacctggtggagatcactgaagtgtgcctgcgcaccaagatcccgatgac

SEQ ID NO: 208057 - DNA, 922 bp, Unknown
  Bacterial polypeptide expressing nucleotide sequence isolated from the Sargasso Sea
aaaccaacatttgatatggcaaaaaaagtaattaactatctcgaaccaaatgacatattgattgacgggggtaatgcatattatcttgacagcaacagactgggtgctctgtgtgctgagaaagagatagattttataggaatgggtgtttcgggaggagaagagggtgcaagaaatggcccggccttaatgattggttcagagaaatcaattaatagtgaattaaaagattctttatcttcaatagctgcgagttatgaaaactcaccaagtattgggttttataaaggttatggaactggccattttattaaaatgcttcataacggtattgagtacgctgaaatgcaaattattactgaggcttaccatattttaaaaagagcaaactataccaatattgagataagtgagtttttcaaggaattttccacacaaaacagatcttcatatttaattgaaataacttcagaaattttattaaagaaaaatgattcaggctatttacttgatcaaatacagtctaatgcaaatcataaaggaacaggcaaacttacagttgagacatcacttaactatggttttccattacctagtgtcttcgaagcattcaatgcaagagtagagagtaactatgaaaacttatggtcaaaaaatgttggtgaacagttaatagatatttcttcagaatctttaaacaacgcaatatattttgcaagactagcaacgatgattcaaggtttgctctttatccagcatgtgagtaacaaagagcaattagatatagatttgaaagagatcttgcagaattgggcagctggttgcattattagatctgaccttctaaatgaattgggtaatgcaaagctgctgaaccctattactacaaccaattctattcaagatttattacagaataatc

SEQ ID NO: 208058 - DNA, 712 bp, Unknown
  Bacterial polypeptide expressing nucleotide sequence isolated from the Sargasso Sea
tatggtcccgtcaggcgaagcaaccgaaaacacacttaatgagcttagctctattatggacgccggtgatattataatcgatggcggaaattcttattacaaagactctataaaaaaataccattcattagcgaaaaaaaatatatctttgttggattctggaacaagtggaggtgtgtggggcgaaaaagatgggtactgcctcatgattgggggcgataaaggctcctatgattactgtgaaccaatttttttagctttatcttctaatggtaagggttacggcttcatgggtcctagcggatcaggccactttgttaaaatgatacataatggaatcgaatatggcatgatgcaatctatggctgaaggcattgaaatattaaaccaaaaaaaagaatttgatcttaatttagttaaaataacttctttatggcagcatggaagtgttgttaggtcatggcttttagatttattaaaagaggctttagatgaaaaccctaaattagaaggaatagccccttatgtagaagattctggagaaggtagatggactattcaagaagcaattgacttagatgtaccggcacattcaataacttcatcattgtattcaagattttattcaagaaataatgattcgtttggatttaaggtgctttcatcgcttagaaatcaattcggtggtcataaaataaaaaaatctaactaa

SEQ ID NO: 208059 - DNA, 754 bp, Unknown
  Bacterial polypeptide expressing nucleotide sequence isolated from the Sargasso Sea
catcaaacatttacgcagtggaataaaggaaaactaaattcatatatgatagaaataacagctgacatatttaaagctaaagatgttgagactggtgaatatttagttgaccttattctagataaggcaaaacaaaagggaactggaaagtggacttcacaaagtgcaatggattttggtgttgcagtacccactattgactccgctgtatctatgagaataatttcttcatttaaggagacaagacgttcgggagaaaaaattttttctaaacctaaatcaattacaggtgatatcgaagtaaatgatatcgaaaatgctttgctatatggttttacaatgtgttatgctcaaggtctatctcagttaaaaatcacttctaaagaaaaaaaatacaatcttaattatgaggaggtatgtaagatatggagaggaggttgtattattagagctaaaatgcttgaaaattttatgacagcttttcagagaaaaccagatttagataatttggtttttgatagcggaatatcacaaacgataaaggaaactgattattatgctagaaaagttagtgtttttgcaataaataataaaataccatctctagctttgaattcttcaattagttatttagattctttatctacagagaaattaccaatgaatctaatacaggcacaaagagactgtttcggtgagcatacgtttgaaaggatagatatggatggtacattccataatgaaaattggtagt

SEQ ID NO: 208060 - DNA, 1420 bp, Unknown
  Bacterial polypeptide expressing nucleotide sequence isolated from the Sargasso Sea
tatgtccaaggcacattttggtttaataggtcttggtgttatgggcgaaaatttagttcttaacgcagagagaaatggattttctagtgtagtttttaataggacttactcaaaaactgaagaatttttacaaggtcgcggtcttgggaagaatatagagggagctgaaactctccaagaatttgttaacaagctagagagacctagaagaattctaatgatggtaaaagctggacccgcgacagatgctgtaatagataatatttctggatatctcgaggaaggagatttattaatagatggcggtaattctcaatttaaagatacagaaagaagggtaaatactcttgaaagtaaaagttttggatacattggaatgggagtatcaggtggtgccaaaggagctctagaaggcccaagtatgatgcctggcggtactaaggcttcatatgatgcaatagaaagcttattaacaaaaatggctgctaaagttgatgatggaccatgtgttgcatatgttggaccaggaggttcaggtcattttgtgaaaactgttcataacggaattgaatacggaattgaacaaatactcgcagaagcttatgaccttatgaagagagtcaaaggtatgaatggaccgcagatgtcagaggtatttggtatttggaataatactgatgaattagcttcttatcttgttgagataacagagatttgtctaaatacaaaagatgagataactggagatgatgtcgtggaaaaaatattagataaagctggccagaaaggtacagggttatggactgttgtaagtgctctagagctgggggtatcagtcccaactatttatgcatctttaaatgcaagagtaatgagttctttaaaagagcaacgtagtgagattgaaaaaactattccatctaaagagatagaggattttgatttaggaaatatatcagatggaatgaaacctttatttgacgctgtagtccttgccacaattgctagctatgcccaaggtatggatattttaagagaagcttctgaagtatatgattatggtttgaatatgccgtcaattgctcaaatatggaaaggtggttgcataattagatcaaaattattaagtaaaattcaagatgcttataacaaagaccctaatctaaaaaatttaatttttgatgattggtttaacaatgaaattgcgacaagattagataacttagctaaaatagtttctctatctacaaaggcaggtataccagtcccatgtttatccagtactttagattatctgaacagttatagaaccaatagacttcctcagaatcttgttcaggcaatgagagactgttttggctctcatacatatgaaagaattgatagggaaggtagttttcatactgaatggatgaaatga

SEQ ID NO: 208061 - DNA, 1420 bp, Unknown
  Bacterial polypeptide expressing nucleotide sequence isolated from the Sargasso Sea
tatgtccaaggcacattttggtttaatcggtcttggagttatgggggagaatttagttcttaatgcagaaaggaacggattttctagtgtagtttttaatagaacctattcaaaaactcaagaattcttagaaggtagaggtttaggaaagaatgtagaaggagctaaaacacttcaagaatttgtgaataaacttgagagaccaagaagaattttaatgatggttaaagccggggcagctacagatgctgttattgataatatttctgaatatcttgaagaaggtgatttattaattgatggaggtaattctcagtttaaagatactgaaagaagagttgcgactcttgaaagtaaaagctttggatatataggaatgggtgtctctggaggggccaaaggagccttggaggggccaagcatgatgcctggaggaactaaagcctcttatgacgctatagaaagtttattgactaaaatggctgcgaaagtagaagacggtccttgtgttgcttatgttggacccggtggttcaggccatttcgttaaaactgttcacaatggtattgaatatggcattgagcaaattcttgcagaagcttatgaccttatgaaaagagtcaaaaatatgaatggatcacaaatggctgacgtttttggtctttggaataatactgatgaattggcatcttatcttgtagaaataacgcagatatgtttaaacaccaaagatgaactaacaggcgaagatgttgtggaaaatatattggataaagctggccaaaaaggtactggattgtggactgttgttagtgccttagaacttggtatatcagttcccactatttatgcttcattaaatgcaagggttatgagttcccttaaggttcaacgtagtgaaatcgagaaaacaattccaatggcagctattgaagattttgatttaggagaaatttctaatggtatgaaacctttgtttgatgcagtcgttcttgctactattgctagttacgctcaagggatggatatattaagtgaagcttcatcagtttataattatgagctaaatatgccatctattgctcaaatatggaaaggtggttgcattattagatcaaaattattaaaaaagattcaagacgcatatcaaaaagatccaaatttgaagaatcttatttttgatgattggttcaacaacgaaatttctacaagaattgataatttagcaagtgttgtatcttcttcaactaaggctggtattccagtgccttgtttatcaagcactttagattatttaaatagttacagaacaaacagactccctcagaatttagttcaagccatgagagattgttttggctcacatacttacgaaagagttgataaggaaggaagttttcatactgaatggatgaaatga

SEQ ID NO: 208062 - DNA, 1420 bp, Unknown
  Bacterial polypeptide expressing nucleotide sequence isolated from the Sargasso Sea
tatgtccaaggcacattttggtttagtaggtcttggtgttatgggcgaaaatttagttcttaacgcagagagaaatggattttctagtgtagtttttaatagaacttactcaaaaactgaagaattcttacagggtcgaggccttgggaagaatatagaaggagctgaaactcttcaggaatttgttaataagttagagagacctagaagaattcttatgatggttaaagctgggccagcaacagatgctgtcattgataatatttctggatatctcgaggaaggagatttattaatagatggcggtaactctcaatttaaagatacagaaagaagggtgaatactcttgaaagtaaaagttttggatacatcggaatgggagtctctgggggtgccaaaggagctctagagggtccaagcatgatgcccggtggtactaaggcttcatatgatgcaatagagagcttactaacaaaaatggctgccaaagttgaagacggaccatgtgttgcatatgttggcccaggcggctcaggtcattttgtaaaaactgttcataacggaattgaatatggaattgaacaaatacttgcagaagcttatgaccttatgaagagagtcaaaggtatgaatggagagcagatgtcagaggtatttggtatttggaataatactgatgaattagcttcttatcttgttgagataacagagatttgtctaaatacaaaagatgatataactggagatgatgtcgtggaaaaaatattagataaagctggccagaaaggtacaggtttatggactgttgtgagtgctctagaactgggggtatcagtcccaactatttatgcatctttaaatgcaagagtaatgagttctttaaaagagcaacgtagtgagattgaaaaaactattccatctaaagagatagaggattttgatttaggaaatgtatcagatggaatgaaacctttatttgatgctgtagtccttgccacaattgctagctatgcccaaggtatggatattttaagagaagcatctgcagtatataactatggtttgaatatgccgtcaattgcacaaatatggaaaggtggttgcataattagatcaaaattattaagtaaaattcaagatgcttataacaaagatcctgatctaaaaaatttaatttttgatgattggtttaataatgaaattgcgacaagattagataacttagctaaggtagtttctctatccacaaaggcaggtataccagtcccatgtttatccagtactttagattatttgaatagttatagaaccaatagacttcctcagaatcttgtgcaggcaatgagagactgttttggctctcatacatatgaaagaattgatagggaaggtagttttcatactgaatggatgaaatga

SEQ ID NO: 208063 - DNA, 1295 bp, Unknown
  Bacterial polypeptide expressing nucleotide sequence isolated from the Sargasso Sea
tatgtccaaggcacattttggtttaataggtcttggtgttatgggcgaaaatttagttcttaatgcagagagaaatggattctctagtgtagtttttaataggacttactcaaaaactgaagaatttttagagggtagaggcttagggaagaatatagagggagctgaaactcttcaagaatttgttaataagctagagaaacctagaagaattctaatgatggtaaaggctggacccgcaactgatgctgtcatagacaatatttctggatatctcgaggaaggagatttattaatagatggcggtaattctcaatttaaagatacagaaagaagggtaaatactcttgagagtaaaagttttggatacattggaatgggagtctcaggcggtgccaaaggagctctagaagggccaagtatgatgcctggcggtactaaggcttcatatgatgcaatagaaagcttattaacaaaaatggctgccaaagttgaagacggaccatgtgtagcatatgttggaccaggaggctcaggtcattttgtaaaaactgttcataacggaattgaatatggaattgaacaaatactcgcagaagcttatgaccttatgaagagagtcaaaggtatgaatggacagcagatgtcagaggtatttggtatttggaataatactgatgaattagcttcttatcttgttgagataacagagatttgtctaaaaacaaaagataagataactggagatgatgtcgtggagaaaatattagataaagctggccagaaaggcactgggttatggactgttgtaagtgctttagaactgggggtatctgtcccaactatttatgcttctttaaatgcgagagtaatgagttctttaaaagagcaacgtagtgagattgaaaaaactattccatctaaagaaatagaggattttgatttaggaaatatatcagatggaatgaaacctttatttgatgctgtagttcttgccacaattgctagctatgcccaagggatggatattttaagagaagcatcatctgtatataattatggtttgaatatgccgtcaattgctcaaatatggaaaggtggttgcataattagatcaaaattattaagtaaaattcaaaatgcttataacaaagaccctaatctaaaaaatttaatttttgatgattggttcaataatgaaattgcgacgagattagataacttagctaaagtagtatctttatccacaaaagctggtataccagtcccatgtctatccagtactttagattatt

SEQ ID NO: 208064 - DNA, 866 bp, Unknown
  Bacterial polypeptide expressing nucleotide sequence isolated from the Sargasso Sea
tatgcaaaagaaaggtggtaattcgcacgaagacaagtcgtgtgatattggttttatcggtttaggggtgatgggtagtaaccttaccatgaacctagtggaccatggctatcgtgtagcgtgtttcgatttagaccaaaacaaagttgagtctattcttgccaaagacgcaagcgaaagagctgaaaatactgagcctcgcgttgaaggctgcagttcttacaccgagcttttaagcaagttaaaagccccgcatcttattattatctctgtgcctgctggcgatcctgttgaccacgtttgcaatcatcttattgacgccggaattcacgctgacgatatcgtggttgatactggcaacagtttgtggacagactctgtagcacgtgaagagcagtacaaaggtaaatttatcttcttctctaccgccgtgtcaggtggtgaagtaggcgctcgtttcgggccatctcttatgccttcaggcaacccttatgcatggacacgcattgagcctgttcttaaagctattgctgcaaaggttgacccagaaacaggtaaaccattagaaagccatacgccaggtcaaccagtgttagaaggcgaaccatgtgcgacctacatcggtccggttggagccgggcactatgtaaaaatggtgcacaacggtatcgaatacgccgacatgcagcttatctgcgaaacttaccatgttatgcgcgaagcgctacatatggcgccagctgaaatagcagaggtgtttcgtcgctggaacgaaggcaagctgaatagctacctgatggaaattagtgctgaagttcttgagcaaatggatccagaaacacagcagccgttggttgatgtgatct

SEQ ID NO: 208065 - DNA, 472 bp, Unknown
  Bacterial polypeptide expressing nucleotide sequence isolated from the Sargasso Sea
atggaaattggagttgtgggtttaggtaaaatgggaagccaaattgcccaaaagcttagtgattcatcatttaaagtttttggatatgatcaagatgaagaattatctaaaaacttagatagttcttatgaaattgataataatttatctagcttaatggataggtttacttccaaaaaaattatatggttgatggtgccaagtggagacccgaccaatagtctcgttagggaattatctaaacttatgaataatggagatataataattgatggtggaaatagttattataaagattctataaaaaattcggatatttgctctcaaaatggaataagcttcttggactgtggtacaagcggaggtgtttggggtttaaaaaatggtttttgcttgactattggaggttcagaaaatacctataaagaagttttagaaatttttaacacattgtctactgtagaaactaaag

SEQ ID NO: 208066 - DNA, 1488 bp, Unknown
  Bacterial polypeptide expressing nucleotide sequence isolated from the Sargasso Sea
ccaatgcccagacgtgggtgaacctgcacctcctgttcactcacggcaacggtgtcgtgatgtcgccagtcaccgaaaaatcgccggaaggtctgccctctttctatctgcaggatattccgccggtcgctcacggcggaccggtgattcgcgagccgcggctgtatttcggcgaagggggtgaaggctatgtcatcgtgaaaagcagtgttcccgaattcgactacccaaagggcaaagataatgtctacaccacgtacagtgggcgcgatgggattgcgatcggcagcatcgcgcgccgcagtctgttcgcgtggcacttcggagatctgaacattctgctgaccggctacatcacgcatgccagccgcatcctgctgcaccgtaacattcaggaccgggtgcgtacgattgctccgttcctgcgtctcgatcacgatccctatctcgtcacaagcaacgggcgtctcttctggatgcaggacgcctatacgacgagcaactggttcccctacgctcaggcggatttcgacaacggcgccaataccatccgtaacgcggtcaaggtggtaatcgacgcgtacaacggcacggtcgatttctatgtcagcgatccggccgatccgatcctgcggacttatcagcgcatcttcccgggtctgttcaagcctctcgcggcgatgccgcaagacctgcagcaacatatccgctaccccgaagatctgttccaggttcaggcgcagctatatcgggcttaccacatggatgcgccggaggttttctacaaccgcgaggacctctggcagttcccccgggaactggtcggcattgacgggggaaatagtcccggcacaccgatgacgccctactacatgatcatgcgcttgcctcacgaatcgcgcgaggagttcgtcctgatgctgccgatggtgcccagccagcgcgacaacatgatcgcgtggctcgccgcgcgttgcgatccgcccaactacggcaagctcgtcgtctactcgtttccgaaagacaagctcgtctacgggccattccagatcgaggcgcgcattcagcaaaacaccgagatttcccagcagatatcgctgtggaaccagatgggttcgcgtgtcattcgcggccatttgctcgtcgtgccgattgagaactcactcctctacgtctcgccgctctatctgcgcgcggagtcgggtcagttacccgagttgaagcgcgtgatcgccgcgtatggggaccgggtggtgatgaaagagaccttgggtgaagcgctggcggcgctcttcgaagaaagcgcgccgcttgcatcgccgcctcagggcacggcggacgcgcgtgcccgcgaagcgcttgcacactatgaccgcgccatcgcacgattgaaggcgggtgactggagcggtttcggcgcggaactggatgcgttgcggccactgctcgaggcgctgggcggcggccgttcggacgggcaacaatgat

SEQ ID NO: 208067 - DNA, 848 bp, Unknown
  Bacterial polypeptide expressing nucleotide sequence isolated from the Sargasso Sea
aatgaaaaaacttgatgacattaagaaagaattttcaaatgaatttataggctataccaatcttgaagaatttgttgagagcttagaaaccccaaaaacaatattgcttatggttccatcaggcaaagcaaccaaagaagtaatagaaagactggctgatttattggaagagggaagcatgattattgatggaggtaattctttttatgtagacagtattgataacggaaagtatctctcagaaaaatctatacattttattggaatgggagtttcaggtggtgaagatggagcccgtaatggccctgcattaatggtcggttcagatttatctttagagacttctcttttaaatacactcaaaaatattgctgcaaaaagtgaagttgagtgtctgggagtatatcaaggtcacggaacaggtcactttataaaaatggtacataacggcattgaatatgctgagatgcaaacaatcgctgagatatatttaatattgaaaaatttgaataaaacaaatgaggatatgtccaatttcttttcctctcaaacagaaaagagtaaatcatcttaccttattgaaatcacatcagaaattcttcaaaaaaaagatggagataaatttattattgatcaaataaaaccagtcgcacaaaataaaggtactggaagactgacaatacaaacttcattagcattaaatgtgtcaataccctctattgcagcctcttacgatgcacgtgttcagagtagtaatcaatacgctacaaaaattaatcaggaactagtaagtgaggatatatctactaaagaactgagtgatgcactatatttttctagagtgtgct

SEQ ID NO: 208068 - DNA, 616 bp, Unknown
  Bacterial polypeptide expressing nucleotide sequence isolated from the Sargasso Sea
accatcacttctgcggtattcgcgcgcagtatttctagtttgaaagacgagcgtttagctgcgagcaaggttcttgcaggcccagatgcgccatcattcagcgatgatgagaaaatgtcgatcatcaacaagctagagcaagcgctttattgctctaaaatctgtgcgtacgcacagggcttccagttaatggcaatggcaggcaaagaacacggctggacactggagtttggtgaaatagctaaaatatggcgtgcgggctgtattattcgcgccgtatttcttcagtctatttctcaggcctacgagaataacgaagacttagccaacttgcttatggacccattctttgcagagcaaattacacagtaccaatctgattggcgcgagtctatcgcccaagcgacactggctggcgtgccttgccctgccatgatgtcggcgctaagctattacgattcatatcgcacagctgtgttacctgctaatttgctgcaaggccagcgcgattattttggcgcacatacttatcagcgtgtagataagccagcaggtaaaaagtatcacatcgagtggagtgatcctgcacgtccgcaaaccgctatcaaaaaatagt

SEQ ID NO: 208069 - DNA, 341 bp, Unknown
  Bacterial polypeptide expressing nucleotide sequence isolated from the Sargasso Sea
gcttgccgacgttggtcttattggtttggccgtcatgggtcagaacttgatccttaacatgaacgacaagggtttcaaggtctgtgcctacaaccgaaccgtcgccaaggtcgaccacttcctcgcgaacgaggctaagggcaccaacgtcattggcgcccactccgttaaggagctctgctctaagctcaagaggcctaggcgaatcatccttctcgtcaaggctggtaaggccgtcgacgacttcattgctcagctcgagccttacctcgagaagggtgacatcatcattgacggtggtaactctcactaccccgactctattcgtcgaacccacgagc

SEQ ID NO: 208070 - DNA, 400 bp, Unknown
  Bacterial polypeptide expressing nucleotide sequence isolated from the Sargasso Sea
ggttggcagctgaactttgctgagattgcaaaaatttggcgtgcaggttgtattatccgtgcagtgtttttgcagtctattaccgaagcttatgagcgtaacgatgatttacagaacttgttgctggatccatttttctccaaacaaatttctgtcaatcagatgaattggcgccgcgctgtagcagaagctgccatgacaggtattccggtatctgctttaagctcagcgttaagttattacgattcataccgcactgcggtgttgcctgcgaatttactgcaaggacaacgggattattttggcgctcatacctttgagcgcactgataaagccaaaggtaaaacttttcacgtcgactggagtcataacgacaggccgatgcaaaaaattaagtaaa

SEQ ID NO: 208071 - DNA, 799 bp, Unknown
  Bacterial polypeptide expressing nucleotide sequence isolated from the Sargasso Sea
ttgaccaacgccgagttggccgcggcgttctccgactggaacgccgcggagctcgactcgttcctcatcgagatctcgggcctcatcctcgccaaggaggacgaccagaagcccggggaggggtacctcgtggataagatcctggacaagaccgggatgaagggcacggggaagtggacggtgcagcaagccgcggagctctccgtggcgattcccaccgtggccagcagcctggacgcccgcttcctcagcgggctcaaggacgagcgcgtcgcggcggagaaggcctacgtcgccgccggcctcgcccccgcggacgccagcgcgccgtcgctcaccgccgaggagaagcagctgttggtggacgacgtccgcgccgcgctgtacgcgtcgaagatttgctcgtacgcgcagggcatgaacctcattcgcgccaagagcgacgagcagggctgggacctggacctgggcgagatggcgcgcatctggaagggcgggtgcatcatccgcgcgcggttcctcgaccgcatcaagcaggcgtacgaccgggacgccgcgctgccctccctcctcgtcgacggcgagttcgccgccgagctcgtggcgaggaacgacgggtggcgccgcgtcgtcacgcgagcggtggacgcgggaatcgcgacgccgtccatgtccggatcgctcgcgtacttcgactcgtacaggcgagggaggctcccggcgaacctcgtgcaggcgcagcgagacttcttcggatcgcacacgtacgagaggacggacatggaggggtggcaccaca

SEQ ID NO: 208072 - DNA, 558 bp, Unknown
  Bacterial polypeptide expressing nucleotide sequence isolated from the Sargasso Sea
tatgagtgaaaaatcaaatattggtttaattggtttagctgtcatgggcgaaaatttagtattgaatatggagagtaatggattttctgtttctgtatttaatcggacagtcaatagggttgaagcttttttaaaaggacgtggatcgggtaaaaaaatacgaggatctaaatccatcgaagaattttgtgcacaattagaaacacctcgtaaaataatgatgcttgtaaaggccggagctgctgttgatgatttaatcgaacagatattaccatatttagacgagggtgacataattatagatggtggaaatagttactataaagatacaattcgtagaactgcttatgttgaaaagaaggggtttttatatctaggcgctggggtttcaggtggagaagaaggtgccttaaaaggaccatcagtgatgcctggtggatctgaggcggcatggttgattatgaagcctattttacaaaaaatttcagccaagacagagtcaggtgatccatgttgtgattgggtgagtcgtgatggatccggacattttgttaaaat

SEQ ID NO: 208073 - DNA, 898 bp, Unknown
  Bacterial polypeptide expressing nucleotide sequence isolated from the Sargasso Sea
atgtccaagtctcacttcggtctgatcggtctcggtgtgatgggcgaaaatctcgtcctcaacgcggaacgcaacggcttctcaagcgttgtgtacaaccgcacctacgccaaaaccgaggattttctgaacggccgtggtcaaggcaaaaacatccagggagcaacggatctccaggatttcgttggcaagctggagcgtccacgccgcatcttgatgatggtcaaggcgggtccagccgttgatgccgttgtggatcaaatctccccttatctcgaagagggtgatctcctgattgacggcggcaattccgattatcacgacaccgagaggcgcgtgaagcagctggaaagcaagagcttcgggttcatcggcatgggtgtttcaggcggtgccaagggggcgctggaagggccgagcatgatgccgggcggcacaaagtcctcctacgacgccatcgaaagcctggtgaacaagatggccgctcaggtcgaggacggcccctgcgtcacctacatcggacccggtggatccggtcatctggtgaagaccgtccacaacggcatcgagtacggcattgagcagatccttgctgagggctatgacctgatgaagcgggtcaaaggcatgaccggtgtgcagatggcggatgtgcttggtcagtggaacgccactgaagagctctcctcttatctcgttgagatcaccgaggtgtgcctgcgcacgaaggatccggaagatggcgctgatctggtcgaaaagatcatggatcaggccggccagaagggcaccggtctctggaccgtggtcacggcgctgcagatgggtgcttcagtccccaccatctacgcctctctcaacgggcgtgtgatgagttccctgaagcctgagcgcgggc

SEQ ID NO: 208074 - DNA, 814 bp, Unknown
  Bacterial polypeptide expressing nucleotide sequence isolated from the Sargasso Sea
atgccaggtggagataaagattcttatgaaatcattaaaccaatatttgaaagtgtttctgctaaaattaatggagaaccttgtgtaacataccttgggaatacttcttcaggacattatgtaaagatgatacataatggtattgaatatggaattatgcaattaatatctgaatcttaccacatattaaaaaatggattaaaaaaagaaaattttgatatttataatatctttaaaaaatggaataaagggatgctaaactcctatcttattgaaattactagagatatttttaatgttaaagataaaaattcggataactatttaattgatttaattttagataaagcaaagcaaaaaggaacgggaaaatggacttcacaaagcgcgatggattttggtataagtattcctactattgattcatctgtatcaatgaggataatttcatcattcaaagatactaggattagagctgagaaaatttatgataaaaaaatagttccctcatcatcatcaataaaaactgaagatatagaaaatgctttaaaatttagttttatcataacttttgctcaaggtttatcacaattgaaagttgtatctgaagaaaaatcttataatttaaattatgaaaaaatttgtaaaatttggagaggtggatgtattattagagcaaaaatgcttgatgattttatgcgagcctataacaaaaactcatctttggaaaatctgatttttgataaaaatatttctgaaataattaaagaaacagactcttcaattcgaaaggtttcaattttttgtattgaaa

SEQ ID NO: 208075 - DNA, 390 bp, Unknown
  Bacterial polypeptide expressing nucleotide sequence isolated from the Sargasso Sea
actttggggaaatagcaaaaatatggcgagctggatgtattatccgcgccgtattcttacagtctatttcaaaagcttatgaaaataacgaagacctggctaatttgttaatggacccgtattttgcagagcaaattaccgagtatcaggctgattggcgtgagtctattgcgcaatctgcactagcaggaattccttgccctgcaatgatgtcggcactcagctattacgactcgtaccgttcagcagtattaccggcaaatctgcttcaagggcagcgtgattactttggagcgcatacctaccagcgcgttgataagccagcgggtaaaaagtaccacatcgagtggagtgatcctgcaagaccagagactgctataaaacgttaac

SEQ ID NO: 208076 - DNA, 937 bp, Unknown
  Bacterial polypeptide expressing nucleotide sequence isolated from the Sargasso Sea
tttgcatcccaaggacatactgttgctttatacaatcgtttcgtgaaaggaaaagaagaaaatattgcattaaaatgtactcaagaatattctgaattgaaaaatgctctagcctttgaagagctcgatttatttgtcagtgccttaaaatttcctagaaaaatattgctaatgattccttcaggtttggcattagagaaaattttagaggaactaatcccgatgctttcacaaggtgatgtcttaattgatggagggaactcacattacaatgataccgaaaaaagagcttccctattaaatgaaaaaaaaattcattttttaggtatgggagtttctggaggaaaaattggtgccttaaatggcccctcattaatgataggtggtaatttagatggttacaaagtagttaatcgagatcttgaaagcatcgcagctaaagatatttatggaacaagatgttgcagctatttgggtttagggggagcgggacattatattaaaatggttcacaacggaattgaatatgctgaaatgcaattactcgctgaaatttttgaactttctatgacttctccagccctaaattttacttcgatacataaggaattgtcggtttggcaaaaaagctttagtcaaagttatcttttagaaataacatcagaaattttaacttataatgatgacggaataccatttataaataaaattttagataaagcttctaataaagggactgtggcatgggcaatagcaaatggagctcttttgggatctccaaatagtcttatggcttcagctcttcacgctcgatttacatcttcattaaaatctaaacgtgaaaagctttcaaaaagctataaaatccaaaaaggaaaatatgaaacacctttaaaaaaaataaaaaaggtatatgacgtctccccgtttaattaat

SEQ ID NO: 208077 - DNA, 1420 bp, Unknown
  Bacterial polypeptide expressing nucleotide sequence isolated from the Sargasso Sea
catgtccaagtctcacttcggtctaatcggtctcggtgtgatgggcgagaacctcgtccttaacgccgaacgcaatggtttttccagcgttgtttacaaccgtacctatgccaaaaccgaagaattcctgaacggtcgcggtcagggcaaaaacattcaaggtgcctcggatctagaggactttgtcggcaagttggagcgtcctcgccgcatcctgatgatggtgaaggctggtcctgcggtggatgcagtcgttgatcagatctctccacatctcgaggaaggagatctgttgattgatggcggcaattccgattatcacgacaccgaacgtcgtgtgaagcagctcgaaagcaaaagcttcggcttcatcggtatgggtgtgtcaggtggtgccaaaggcgctctagaagggccgagcatgatgcctggtggaaccaaggcctcgtacgacgcgatcgagagtctcgtcaacaagatggccgcacaggtcgaggatggaccctgcgtcacctacatcggtcctggaggatccggtcatcttgtgaagaccgtccacaacggaatcgagtacggcatcgaacagatccttgctgagggttacgacctgatgaagcgggtcaaagggatgaacggcgatcagatggccgacgttctgggccagtggaacgccacggaggagctgtcctcttatctcgtggagatcaccgaggtttgccttcgcaccaaggatcccgaggacgggcaggatctcgtcgagaaaataatggatcaggccgggcagaagggaacgggcctctggactgtcgtgacggctctgcagatgggtgcatcagtgcccaccatttacgcctccctaaatgggcgggtgatgagctcgatgaaggagcagcgcgtcaaggccgagaacgttctcaaggggccggcgatcaaggacttcgatctcggcactcccgccgatgcgatgtcccccctaatggatgccacggtgctcagctgcgtcgccagttatgcccagggaatggagctgttgcggatcgcctcgaacgatctcgactacgaccttcacatgccctcgatcgctcagatctggaagggcggttgcatcatcagagccaggcttctcaagcgcattcaggacgccttcaacaaggatccgcagctgcccaatctgatgctggatccatggttcgctgaacaggtgaaccggcgtcttcccggactggccaaggtggtggctggtgccgctgagtgcggcattcccgttccctgtttcagcagcacgctggattacatcaacagctaccgcaccgggcgtcttccccagaacctcgtgcaggccatgcgcgattgctttgggtcccacacctacaagcgtgtcgacaaggaaggcaccttccacaccgaatggctgtcctga

SEQ ID NO: 208078 - DNA, 1162 bp, Unknown
  Bacterial polypeptide expressing nucleotide sequence isolated from the Sargasso Sea
aatgcttaaagaaattggacttattggtttaggagtaatgggcaaaaatattgctttaaacctttcagataatggtgtagctatcaaagcctttaatgattcaaaagaaaaactagaagaaatcaaaaaagaattttcagatacttttgaagggcatacagatgttaataatctaatcaatagtctctcgaaaccaagaacgattttactgatggtcccttcgggcaaagcaacaaaagatgttattgaaaaaattaaggatttacttgatgagggggacctagttattgatggtggaaattctttttatcttgatagtgaagaaaatggattggctttagagcagaagaaaataaaatttatgggaatgggtgtctctggtggtgaggaaggtgcaagaaacggtccagcaataatggttggttataagaataaaattagtgaagatttaaaaaatactttaagtgccatttctgcaaaaactgatcaagactgtataggtttctatgaggggtatgggtctggtcattttataaaaatggtacacaatggtattgaatatgctgaaatgcaattgattgcagagatttatgaaatattaagaaggtctaaaaaaacaaatgaagagatagctaatttttttgataatttaaaggaagaaaatagatcgtcatatcttattgaaataacatcgaaaattttaagacaaaaaaaagatgaggtttatgtccttgatgaaataaaaccttttgcaagcaacaagggtactggaaagctcactgtcgaaacttctttaaatctaaaggttcctactccctcaatttatgctgcttatgatgcaagagttcaaagtaataataaaaatgattgggatgaaatcaatatggagtctgaggtaacttctgaagaagatctaagcaactgtttatattttggaagagttgcttcaatgattcaggggctggagttgatagctaagcacatggtaaatataaattttggtacagttctaaataactggatgggaggttgtattattagatccaacttattaaaagagttgaatgttttaagttcagcatcaaaagactttcttggtgattcaaaacttaaaaaaatatttaaagataatttggtatcaacaaaaaaaattatcttctga

SEQ ID NO: 208079 - DNA, 1351 bp, Unknown
  Bacterial polypeptide expressing nucleotide sequence isolated from the Sargasso Sea
aatgctgaatgaaattggattagttggccttggtgtcatgggtaaaaatatagctctaaatttatcagataaaggaataacaattaaatcgttcaatgattcaatgaaaaaacttgatgatattaagaaagaattttcaaatgaatttataggctacaccaatcttgaagaatttgttgagagcttagaaactccaaaaacaatattgcttatggtcccatcaggcaaagcaactaaagaagtaatagaaagactggctgatttattggaagagggaagcatgattattgatggaggtaattctttttatgtagacagtattgataacgggaagtatctctcagaaaaatctatacattttattggaatgggagtttcaggtggtcaagatggagctcgtaatggccctgcattaatggtcggttcagatttatctttagagacttctcttttggatacactcaaaaatattgctgcaaaaagtgaagtggagtgtctgggagtatatcaaggtcccgaaacaggtcactttataaaaatggtacataacggcattgaatacgctgagatgcaaacaatcgctgagatatatttaatattaaaaaatttaaataaaacaaatgaggatatgtccaatttcttttcctctcaaacagaaaagaataaatcatcttaccttattgaaatcacatcagaaattcttcaaaaaaaagatggagataaatttattattgatcaaataaaaccagtcgcacaaaataaaggtactggaagactgacaatacaaacttcattggaattaaatgtgtccataccatctattgcagcctcttacgatgcacgtgttcagagtagtaatcaatacactacaaaaattaatcaggaactaataagtgagaatatatctactaaagaactcagtgatgcactatatttttctagagtgtgctcaatgattcaaggtttagaattaatatcaaaatttagtaatgatgaaaaacacaacatatcaatcttagaagttcttgataattggagtggaggatgcatcattagatccaatttattatccgaattaaaaaaagaatttggcgaaagtaatgatgtatttaatttaaatactatttttagtactttgaacaaaaacagagcatctatcagcaacgttctgcaaataacaactaaatacaacataccaacacctgtactatcagcatctttaaattggttcaataatgtgacttctgtagataatccatcgaacatgattcaggctcaaagagattattttggaagacacaaagttcaactaattgactcatccaacgacataaatattgattgggattaa

SEQ ID NO: 208080 - DNA, 1351 bp, Unknown
  Bacterial polypeptide expressing nucleotide sequence isolated from the Sargasso Sea
aatgcttaaagaaatcggattaataggtctgggtgtcatgggtaaaaatattgctcttaatctatcagataatggagtaatcattaaagcatttaataattcagaaaataaactaaatgatgttaaaaaagaatttaaaaatgactttattccctttgataaccttgagcaatttgtagaaaatttagaagatcccaaaactatattactaatggttccctcgggtgaagctaccaaagaggtaatagaaaaattagtaagtctgttaggagaaggtgggacgattattgatggaggcaattccttctatttagacagtattgaaaatggagaatatttaaaaaagaattctatcaactttattggcatgggtgtatccggcggtgaagacggtgctcgcaatggtccagctttgatggttggttctgaaacatctatagaaacatctttatttgatacactaaaaaatatcgcagctaaagctgaagttgagtgcttgggaatataccagggacctggaactggtcactttatcaaaatggtacataacggtattgaatattctgagatgcagtcaatagcggaaatgtatttgatactaaaaaaattaaataaaacaaataaggaaatatcaagctttttttcttctcagtcagaaaataacaattcatcatatttaattgaaatcacatcaaaaattctccaaaaaaaagatggggatgaatttgttatcgatcagataaaacctattgctcaaaataaaggtacgggaagattaacaatacaaacatcattagatttagatgtatccattccttctatttcggcggcttacgatgcgcgccttcaaagtaataatcagtacactacaaaaactagcatggaatcaattgatgaggatatatcagataaaaatttgagtgatgcattatatttttcaagagtttgttcgatgattcaaggtttggagttgattacaaaatttagtgagagcgaaaatcatgaaatatcaattgtcgaagtgttagaaaattggcgtggaggatgcatcattagatctaacctattgttggatttaaaaaaggaattttcagaaaataatagtttttatagcttagataatatttttaataatttacaacaaaatagagcagctattagcaaagttcttcaaataacaacaaaaaacaatattccgacaccagtactgtcagcgtcttttaactggtttaataatttaacttctgtcgataatccatcaaatctaattcaggcacagagagacttttttggtcgacataaagttcaaaaggtcgactcttccgaagacataaatattgattgggattaa

SEQ ID NO: 208081 - DNA, 1039 bp, Unknown
  Bacterial polypeptide expressing nucleotide sequence isolated from the Sargasso Sea
tatgcagctaggcatgattggattgggacgcatgggcgcggacatggtgcgccgcctgacgaagggcggtcagcaatgcatcgcttacgacgtacagccggccgcagtggacaagctgaagcaggaaggcgtggcaggtgccgcgtcgcttgaagatctggtcgcgcaattgcaaaaaccgcgcgcggtgtggctgatggtgcccgccgcggtggtcgaccagacgctcgacaagctcgtgcccttgctcgaacccggcgacatcgtgatcgacggcggcaactcctattaccacgacgacattcgccgcggcgccgaactggcgaagcgtcagcttcactatgtcgacgtcggcaccagcggcggcgtcgcgggacgtgagcgcggctactgtctgatgatcggcggcgaggccgaagtcgtgaagcggctcgagccgattttctcgaccctcgcgccgggtgcgggcgccgcgcccgccacgccgggccgcgcagccggcgccagcaccgcggatcagggcttcctgcattgcggcccgcagggcgcggggcactttgtgaagatggttcacaacggtatcgaatacggcatgatggccgcgtatgccgaaggcctgaacattctgcgccatgccgacgccggcaaacacgcgcgcgaagccgatgccgaaacatcgccgctgcgccgtcccgagctttaccaatacgacctggatctcgccgaggtcgccgaggtctggcggcgcggcagcgtaatcggttcgtggctgctggacctgatagcgggatcgctggccggcgacgccgatctgcaaagctacgcgggacgcgtatcggattcgggcgaagggcgctggaccgtcgcggcggcaatcgacgaaggcgtgccgacaccggtgctgagcgccgcgctattcgcgcgtttcagttcgcggggtgacgcggactttgcgaaccgggtgttatcggcgatgcggcacgacttcggcggccacgttgaaaaagcggccacgccggtcgacgggcataagagctaa

SEQ ID NO: 208082 - DNA, 1339 bp, Unknown
  Bacterial polypeptide expressing nucleotide sequence isolated from the Sargasso Sea
gatggggagtgctctggcggaggctttcgtgcgtgcggattatgaagtgtacgccgtcgatccggcggttaccggaaaacatttttcgttaaagggcttaatagttaagccaaatttattgacgatgattaaagcgatggtgaggcctcgccggatatttttaatggttaccgcaggccagccggttgatagcgcaattgacgaactcgttccgcttcttgatacgggggatgtaattatagacggaggcaattcgaattttacagacaccatgcgcagagcgacgagagttaaagaactcggattgatgtatgttggaactggaatttcagggggtgaagcgggcgcacgaaatggtgcggcagttatggcaggtggtacggcagaagcatttgaccagtcccgtgatgttttggagacagtagccgcaaagcatggggagggtttatgctgtgcccatgtgggctcagatggcgccgggcatttcgtcaagatggtccataacggtattgaatacggcataatgcaagcgatcggcgaggcgcattttataataaaccatggtcttcgcctaacacacgcagagtccgccaccgtttttcgatcttggaataagggccagctggaatcgtttttaatatctgttacggcaagaattttagaccgtatggatgaaaattcaggtgatccgctgattgatttccttgatgacgccgcagaacaaaccggcactggccaatggatggtaggagcggcgatggagctcggtgtacctgtgccgacaattgcggaggccgtatcggcgcgcagcctatcgggaggcaacgatgttcgccgcgttattcaaaatggaacaccacgacacttaaaggaaatcacattttcgattgacggtattcgtgatgctttgattgcaacaattttgtgctgctatgcccagggctttgcggttctcgcggcgggagcaacagaatatggttggccgcgcaaggaagcggagatagcacgtatctggcaaaaaggctgcattatccgggctgatattttggagacggttaggcaggcattcatgcaacgagctgacctgccacatctttttgcaaataaatcgatagcaagcattgttgatcataaaacaaagaattggcgaagcaccgtctctactgcgattgctgcagggataccagtgccaaccctggcatccgcgatcagttacgctgaggctttgaaaacaaagcgtttgtggacagccctaactcaggcacaacgtgacgcttttggtgcccatggatatcggcggatagaccgagatgggacattccatagcgactggtcgtaa

SEQ ID NO: 208083 - DNA, 1375 bp, Unknown
  Bacterial polypeptide expressing nucleotide sequence isolated from the Sargasso Sea
aatgcaagttgcattagtcgggttaggcgttatggggaaaaatcttgccctaaatttgatagaaaaggggataacgcttgttgcttatgacaaaaacccacatgcgggtgaagagttaataagttgtgctaaatctcaaggcatggctgacaaacttcacattgtttctgatttaggagacatggtaaggcgtttagaagcacctcgttctattttattacttgttcctgcgggtgagttagtagataccgtttgtaatgaactggtaaacgcaggcgtagagtgtgatgatattatagttgattgtggtaacagtaattataaagatggtattacgcgtaaacttaaataccaaaataaatttgagtttgccaccatgggtatttcaggtggtgcagaaggtgcccgccatggcccagcaatgatggccagtgggtcagaaggtggctgggaacgtattgaaccatggtttgaaaaagtagctgcaagttacaatggtagctcttgttttgcacgtgttggccaatcggcaagtggacactttgttaaaatggttcacaacggcattgaatatgcacttatgcaactcattgcagaaatgtatcaattactacgctcaggaactaaccgttctccaaaagaagtagctgcaatatttgatgagtggtcacaagggcagttaaatagttacttactttctatctctagccacatattaacccttgaaaatgataaaaatgagccactagtcgaccttattgataataaagttggcgctaaaggtacaggtttgtggactgcacaaaacgcgctagagttaggaattgcagtgccatcacttgtcgctgctgttcaagccagacacctaaccaatgcctgcgatacaaccgctgcacaagaaatgacgtacgcttcaaaatcaaccaatatcgttgatattgatctcgaagagcttaaagatgcatttacacttgctagtttacttgcgtatcgccaaggtttagcactaattaaaggcgcatctcgtacacaccagtggaaagttgatttgtcgaaaacattacaaacttggcgtgcaggttgtattattcgagctgactacctagatagcgtggcgcaaggagtcgaatttatagattcactcgataaagaggcgaatgcactacgtaagataacaggacaagctgttatgtctggtttggcgtttcctgtattaagctctacacaaacttacctagcaacgttaacaacaccaagtaatgggcacctagttcaagcccagcgtgattattttggtgagcatggcattaaaacccatagtggtgaaacctgccatttgactgacctagttgagattgacgctaaagttcgttaa

SEQ ID NO: 208084 - DNA, 1336 bp, Unknown
  Bacterial polypeptide expressing nucleotide sequence isolated from the Sargasso Sea
atgcttaaagaaattggacttattggtttaggagtaatgggcaaaaatattgctttaaacctttcagataatggtgtatccatcaaagcctttaatgattcaaaagaaaaactagaagaaattaaaaaagaattttcagatacttttgagggtcacacagatattaataatctaatcaatagtctctcgaaaccaagaacgattttattgatggtcccttcgggcaaagcaacaaaagatgttattgaaaaaatcaaggatttacttgatgagggcgacctagttatcgatggtgggaattctttttatcttgatagtgaagaaaatggattggctttagaacagaagaaaataaattttatgggaatgggcgtctctggtggtgaagagggagcaagaaatggtccagcaataatggttggttataagaataaaattagtgaagatttaaaaaatactttaagtgccatttctgcaaaaactgatcaagactgtataggtttttataaagggcatgggtctggtcattttataaaaatggtacacaatggtattgaatatgctgaaatgcaattgattgcggaaatttatgaaatattaagaaggtctaaaaaaacaaatgaagagatagctaatttttttgataatttaaaggaagaaaatagatcatcgtatcttattgaaataacatcgaaaattttaagacaaaaaaaagatgaggtttatgttcttgatgaaataaaaccttttgcgagtaataagggtactggaaaactcactgtcgaaacttctttaaatctaaaagttcctactccttcaatttatgctgcttatgatgcaagagttcaaagtaataataaaaatgattgggaagaaatcaatattgagtctgagataacttctgaaatagatttaagcaactgtttgtattttggaagagttgcttcaatgattcaggggttggagttgatagctaaacacatggtaaatatagattttggtatagttctaaataactggatgggcggttgtattattagatctaacttattaaaagaattgaatgttgtaagttcagcctcaaaagactttcttggtgatttaaaacttaataaaatatttaaagataatttggtatcaacaaaaaaaattatctctgaagctgtgttaaatgatatctctactccagttttgtcagcctcacttaattggtatctaaatttaagctcttcaagtaacccatcaaatttaatacaagcccagagagacttttttggaagacacaaagttcaattagttgactctgaagaggacgtaaatatagattgggattaag

SEQ ID NO: 208085 - DNA, 514 bp, Unknown
  Bacterial polypeptide expressing nucleotide sequence isolated from the Sargasso Sea
ggaccaaaacaacctgcactcgaggatccggatgtgtttattgaacaggttcgtcacgccctctatgcatcaaaaatagcgagctacgcgcaaggatttgcacaacttgcagctgcagcacaagaacacgactgggaactcgactacaagtcaattgccatgctttggcgaggcggatgtattatccgtgcgcaatttctggaccggatagctgcagcctatggcgagaatgcaacacttgaaaacctcatgcttgccccctacttctcggctgctcttacagaaagccagaccgcgtggcgcacggttgtcgcgacggcggcagcacatggcatacctacaccagctttgatgacagcgctggcatactacgatgggtatcgaagttctcacttgccggcaaatctccttcaggcacagcgagattacttcggcgcgcacacgtatgagcgaacggacaaggaaggctcgttccacagtgaatggcttgaactccgcagaccggtaacgtaat

SEQ ID NO: 208086 - DNA, 532 bp, Unknown
  Bacterial polypeptide expressing nucleotide sequence isolated from the Sargasso Sea
atgagcctcgccgccgcagtgcctggcggctcggcgggggcttggccgcacgtcaaggccatcatgcagggcatctccgccaaggcgggcgcgggcgacgagccgtgctgccagtgggtgggcaacgacggcgcggggcactacgtcaagatggtgcacaacggcatcgagtacggcgacatgcagctcatctgcgaagcgtaccacctgatgggctcggcgctcggcatgggctgcgacgagatggcggcggtcttcgccgagtggaaccagggcgagctcgactcgttcctcatcgagatcaccgcctccatcctcaagttcaaggacggcgacggccagccgctcgtcgagaagatctccgacacggcgggccagaagggcacgggcaagtggaccagctccgtgagagggccgtccacccaggacagcgcctcatctgcctgcatgcaccatttgaaggctcggggcgcgccaacgcaccccggagcgccgcctgagcagcctggaagcttgccgtggccccagtagc

SEQ ID NO: 208087 - DNA, 775 bp, Unknown
  Bacterial polypeptide expressing nucleotide sequence isolated from the Sargasso Sea
catattaaatagttacctgatggaaatcagtgccgaagtgctggccactaaagattcagaaacgggtttacctttggtagatgtgatcctggataaagcagggcaaaaaggcacaggcctgtggacagcagtcagcagcctggaattaggttgcccggcaccgaccatcagcgaagctgtatttgcccgttctatgtcaacattaaaagatcagcgtgtattggcttcgaccttattggctggcccggtgcgtgaacattgtaccaaccaaaccgctgagcaaatgatcaagcaactgcatgacgcgctctactgcgccaaaatctgtgtgtatgctcagggtttcgatttaatgaaaacagcagcagcagagcatggctggcagttgaactttgctgaaattgctaaaatctggcgtgctggttgtattatccgtgctgtgtttttacagtctattaccgacgcttatgagcgtaacgacgatttacagaatttgttgctggatccgtttttctccaaacaaatttctgtcaatcagatgaattggcgccgcgctgtagcagaagctgcaatgacaggtattccggtatccgcattaagctcagctttaagttattacgactcgtaccgtaccgctgtattgcctgctaatttgctgcaaggacaacgggattattttggcgctcacacctttgagcgcactgataaagccaaaggtaaaacttttcacgtcgactggagtcataacgacaggccgatgcaaaaaattaaataa

SEQ ID NO: 208088 - DNA, 817 bp, Unknown
  Bacterial polypeptide expressing nucleotide sequence isolated from the Sargasso Sea
caacggtattgaatatggcgatatgcagctcatcgctgaagcctattctctgctgaaaggcggcctgaatctctctaatgaagagctggccagcacctttactgaatggaacaatggcgagctcagcagctacctgattgatatcactaaagacatcttcaccaaaaaagatgaagagggtaaatacctcgttgatgtcattctggacgaagcggcaaacaaaggtaccggtaagtggacaagccaaagttctctggatctcggcgaaccgctgtctttgatcactgaatccgtttttgcgcgttacatctcctcgctgaaagaccagcgtgtggcggcttctaaggtcctgaccggtccgaaagcacagcctgcgggtgataaagttgagtttattgagaaagtgcgccgtgcgctgtaccttggtaaaatcgtttcctatgcgcaaggcttctcgcagctacgtgcggcgtccgacgagtacaactgggatctgaattacggtgaaatcgcgaagattttccgtgctggttgcattattcgtgcgcagttcctgcagaagatcacggacgcctacgcgaaaaatgcaggcattgccaatctgctattggatccgtacttcaagaacatcgctgatgaataccaacaggcgctgcgtgatgttgttgcctacgcggttcagaatggcatcccggtaccgactttctctgcggctgttgcctactacgacagctatcgcgctgaagtattgccagctaacctgatccaggcacaacgtgattacttcggtgcgcatacctataaacgtactgataaa

SEQ ID NO: 208089 - DNA, 703 bp, Unknown
  Bacterial polypeptide expressing nucleotide sequence isolated from the Sargasso Sea
cgatcgtattctcgataaagctggtgcgaaaggtacaggcaaatggatgagtcagcttgcccttgacctcggtgtaccgagtactctggtcactgaagccgtgtatgcacgttgtttgtcagccctcaaggatgcacgcgttcgtgccagcaaggtactcagtggtcctgacctcaacacgcacgatgatccactgacgttcatcgaacaagtacgacaggctctctatgcatcgaagattgcaagttatgcccaaggttacgtccaacttgcggcagcggcaaaggaacacgactggtcactgaattacggtgatatcgcaatgatgtggcgaggcggctgtattattcgtgctcagtttctcgaaagaattcatgaggcctatcagaatcagccagacctcgaaaacctgatgcttgctccatatttcagaaaagccctcacggatacccaaaagtcttggagacatgttgttgccactgccgcaacgattggaatacctgttcctgcattcatgacagctcttgcgtattacgatggttatcgacatgccaaccttccagctaatcttttgcaagcacagcgtgattattttggtgcgcatacatatgaacgaattgataatccaggtacgtttcataccgagtggcttgagttacgccgaccagtcgaaacgtcttcacattcaaaggaaaacgcatga

SEQ ID NO: 208090 - DNA, 316 bp, Unknown
  Bacterial polypeptide expressing nucleotide sequence isolated from the Sargasso Sea
atcattcgtgcgcaattcctgcagaaaatcaccgacgcctatgctcaaaacaaaggcatcgcgaacctgttgctggctccgtatttcaaaaatatcgctgacgaatatcagcaagcgctacgtgatgtagtggcttatgctgtgcagaacggtattccggtaccgaccttctctgcagcgatagcctactacgacagctaccgctctgcggtactgccggctaacctgatccaggcccagcgcgactactttggtgcacatacgtataaacgcaccgataaagaaggcgtgttccataccgaatggctggattaat

SEQ ID NO: 208091 - DNA, 779 bp, Unknown
  Bacterial polypeptide expressing nucleotide sequence isolated from the Sargasso Sea
tttgccaccgattggcgcaaatcaagctccgactcttccctcgttagtcgcggaactagaacctccgcgcaagatactactgatggtaaaggctggaagtggagtagatgaaatcattaatcagttaaccggctatctcgaaaaaggcgatattataattgatggaggaaattcccatttttctgatacagaacggagagtatcagccttaaagagattggggttgggttatattggggccggtatttccgggggtgaacaaggcgcactatcgggggcctctattatggttggaggtccgaaggaatgtttcaaagccgttagagagtttctggaagcgatagcggcagcagacgataagaaaatatattgtaaacattttggctctgggggagtagggcattttataaagatggttcacaatggcatagaatatggtctgcttcaggcaattggcgaggcctatcttttgctaaaccaaggcttgcgtctaaatcatgtggactgtgcttccgtatttgacgattggcagcagggggcattgaattcgtatttgattggcattaccgctgaaattttaaagaaagaagaagaatccggtgaccatttaattgcatttattgacgatagtgcagatcaaacgggtacggggcgctggatggttaatgaggctatgaaccttgggattcctgtaccgtccatttacgaggccgttgctgcacgcagcttgtcgggaaaccagaaggaaaggagagaaatagtaaaaataggttgggaag

SEQ ID NO: 208092 - DNA, 1485 bp, Unknown
  Bacterial polypeptide expressing nucleotide sequence isolated from the Sargasso Sea
aatgcaaaaccacagcaatcttaatgacattggcgtgattggccttggcgtgatgggcaaaaacctcgcgctaaacattgccgacaatcaatatagcgtcagtgctttcgacctcgatcctgttaaagtcaacggtgttttacagcaagaaaaacaagaacgtgtaggacaggaactgcgtattactggctgtgctaatctttcagaaatgttagcaagcctcgctcacccccgtattctcgtgctgtctgtccctgcgggtgcgcctgtggatggggtatgtcatgccttgatttctgccggcatcgaagcggacgatatcgttatcgatacgggcaacagtctttggacggacaccgttgagcgcgaaaagcgttaccaagggaaatttatcttcttcagctcggcggtttctggtggggaagtcggtgcccgttttggcccttccttaatgccaagtggcgatcttggggcttggcagcatgtggcgccgatttggaaggccattgccgctaaggttgatcctcaaacagggctgccgattgagcgttttgagccgggtaatcccgtgaccgaaggtgagccttgcacgacctatattggtcctgctggcgccgggcattatgtgaaaatggtgcataacgggattgaatacgccgatatgcaactgatttgcgaagcctatcagttaatgcacgatggtttaggcatgagtgcagcacaagtgggtgaggtgtttgaacgctggaataagggcagtttaaatagctatctgatggggatcagcgccgaagtactcaaacaggcggatccactaaccggtcagccgttagttgagatgatcctcgataaagctgggcaaaagggcaccgggctttggactgcggtcagcagtttgcaaattggttgtccggcgcccactattgccgaagcggtttatgcgcgcgcggtgagcacccaaaaatccctccgtgttgagctcagtaaaaagctcgcaggtcctgcctcagtggcgatggatgatgctcaaaaagccagtttaatcgatgccttagagagtgcgctctactgcgcgaaagtgtgttgctacgcccagggtttccaactgatggcgatgacggcgcaggagcagaaatggcagctcgattttgctgaaatcgcgaagatttggcgtgcgggttgtattattcgtgccaccttcttgcaatcgatcactcaagcttatcaagcggatgcggacttaagctgtttattgatggcagacacctttgcaactaccttatcggaaaaacaaactgagtggcgcagtgctgtagcggcggctgtgatgcaagggatccccgtgccttgtattagttcggcactggcctattacgacagttaccgcagcgagaccctgccagcaaacttgcttcaaggccaaagggactttttcggtgcccatacctttgagcgcttagataagcccgctggtgaaaaaaatat

SEQ ID NO: 208093 - DNA, 955 bp, Unknown
  Bacterial polypeptide expressing nucleotide sequence isolated from the Sargasso Sea
tccggcaacttcgtcaagatggttcacaacggcatcgagtacggcgacatgcagctcatctccgaggcgtacgacgtgctcaagacggtgggcggcttgaacaactcggagctcgccgcggcgttcaacgagtggaacgcggccgagctggactccttcctcatcgagatctccgcgctgatcctcgccaaggaggacgaccagaagcccggcgagggtttcctcgttgacaagatcctcgacaagactggcatgaagggcaccggcaagtggaccgttcagcaagccgccgagctctccgtcgccatccccaccgtcgcgtcctccctcgacgcccgcttcatctccggcgtcaaggatgagcgcgtcgcagcgcaggccacctacatgtccgcgggcctcgagcccgcggacgccaaggtggcggcgctcaccccggaggagaagcagcaactcgtggacgacgtccgagccgcgctctatgcgagcaagatttgctcctacgcccagggcatgaacctgatcagggccaagtccaacgagcagggttggaacctggatctcggcgagatggccaggatctggaagggcggctgcatcatccgcgcgcgcttcctcgaccgcatcaagaaggcttacgaccgcgacgccgacctcccgtcgctgctcgtcgacggcgagtttgccaaggagctcgtggagcgcaacgacgcgtggaggcgggtcgtcacgagcgcgatcaacgcgggggtcgccaccccctcgatgtcctcgtccctggcctacttcgactcctaccgccgcggcagacttccggcgaacctggtgcaggcgcagcgcgatttctttggatcgcacacgtacgagcgcgtcgacatggatggctggcaccacaccgtgtggtccgacatgaactccgcggactccatcaccacctccgggtacagcgcgtgaa

SEQ ID NO: 208094 - DNA, 1528 bp, Unknown
  Bacterial polypeptide expressing nucleotide sequence isolated from the Sargasso Sea
atgcaaaaccacagcaattttaatgagattggcgtgataggccttggcgtaatgggtaaaaaccttgcgctaaacatcgccgacaatcaatatcgcgtcagtgccttcgatctcgatcctgttaaagtcaacggggttttacaacaagaaaaacaagaacgtgtaggacaggacctgcgtattacaggctgtgctaatctttcagaaatgttagcaagcctcgctcaaccccgtattctcgtgctgtctgtccctgcgggtgcgcctgtggatggggtatgccatgccctgatttctgctggtatcgaagcggatgacatcgtaatcgatacgggcaacagtctttggactgacaccgttgaacgcgaaaagcgttatcaaggcaaatttatcttcttcagctcagccgtttcgggcggtgaggttggtgcgcgttttgggccttcattaatgccaagcggcgatcttggcgcatggcaacatgttgcgccgatttggaaggctattgccgctaaggttgaccctaaaacggggctgccgattgagcgttttgagccgggaaatccggtgaccgaaggcgaaccttgcacgacctatattgggcctgcgggtgctgggcattatgtgaaaatggtgcataacggtattgaatacgccgatatgcagctgatttgcgaagcctatcaattaatgcacgatggcttaggcatgagcgcagcgcaggtaggtgaggtgttcgaacgctggaataagggcagtttaaacagttatctgatggggatcagcgccgaggtgctcaaacaggcggatccgctaacgggtaaaccgttagttgagatgatcctcgataaagcagggcagaagggcactggactttggactgcggtgagcagtttacaaataggttgtccggctcccactattgccgaagcggtttatgcgcgcgcggtgagcacccaaaaatcccttcgtgttgagctcagtaaaaagcttgctggccccttatctcctgcgatggatgaaaaccaaaaagccaccttaatcgatgccttagagagtgcgctctattgcgctaaggtctgttgctacgctcaaggtttccaactgatggcgatgacggcgcaggagcaaaaatggcaactcgattttgctgagattgcgaaaatctggcgtgcgggttgtattattcgtgccaccttcttgcaatcgataacccaagcttatcaagcggatgctgacttaagttgtttgttaatggcagacacctttgcaactaccttatcagaaaaacaaacagcgtggcgcagtgctgtggcggcggcggttatgcaagggatcccagtgccttgcattagctcggcactggcctattacgacagttatcgcagtgagaccttgccagctaatttgctccaaggacaacgggacttttttggtgcccatacttttgaacgtttagataagccagccggtgagaaataccatttagattggagtgccacaaacagagttttaattaaactctaga

SEQ ID NO: 208095 - DNA, 1046 bp, Unknown
  Bacterial polypeptide expressing nucleotide sequence isolated from the Sargasso Sea
catcggcacgggcgtgtcgggcggcgaagagggcgcattgaaaggcccgtcgatcatgccgggcggacagcgcgacgcgtatgacctggtcgccccgatcctcaccgagatcgccgccaaggcgccggacggcgagccgtgcgtggcgtacatgggaccggacggcgcgggtcacttcgtgaaaatggtgcacaacggcatcgaatatggcgacatgcagttgatcgccgagagctatgcggtgctcaagcaggtggtcggcctgtcgaacgaagagttgggcgaggtctacacggaatggaacaaaggcgaactcgacagctacctgatcgagatcacctcgaagattttcgacaagaaagacgaagaaaccggcaaggacctggtcgacgtgatcctcgatcgcgcggcgcagaagggcaccggcaagtggaccagccagaacgcgctcgacctcggcgcaccgctgccgctgatcacggaagccgtgttcgcgcgcgtgctgtcgtcgctgaagactcagcgcgtggccgcgagcaaggtgctggaagggccggcagcgaagccgctgggcgtggagcgtgacgccttcatcgaatcggtgcgccgtgcgctgtacttcagcaaggtgatttcgtacgcgcaaggttttgcgcaattgcgggccgcctcggaagagtacaagtgggatctcgattacggcactatcgcgaagattttccgcgccggctgtatcatccgcgcccgcttcctgcagaagatcacggacgcttatacgaaagacaaggcgattgccaatctgctgctcgatccgtacttccgcgacatcgcgaagaactaccagtcggcattgcgcgaggtcgtgattgccgccgtcaatgcgggcgtgccggtgccggccttcgcatcggccgtggcgtatttcgacgcgtatcgttcggaacgcctgccggcaaacctggtacaggcccagcgcgatttcttcggcgcacatacgttcgagcgtatcgacaagccaggcagcttccacgcgaactggaattgat

SEQ ID NO: 208096 - DNA, 1528 bp, Unknown
  Bacterial polypeptide expressing nucleotide sequence isolated from the Sargasso Sea
atgcaaaaccacagcaatcttaatgacattggcgtgattggccttggcgtgatgggcaaaaacctcgcgctaaacattgccgacaatcaatatcgcgtcagtgccttcgacctcgatcctgttaaagtcaacggtgttttacagcaagaaaaacaagaacgtgtaggacaggatctgcgtattacaggctgtgctaatctttcagaaatgttagcaagcctcgctcaaccccgtattctcgtgctgtcagtccctgcgggggcgcctgtggatggggtatgtcatgccttgatttctgccggtatcgaagcggacgacatcgttatcgatacgggcaacagtctttggacagacaccgttgagcgcgaaaagcgttaccaagggaaatttatcttctttagctcagcggtttcgggcggagaagtgggtgctcgttttggcccttcattaatgccaagtggcgatcttggggcttggcagcatgtggcgccgatttggaaggctattgccgcaaaggttgatcctcaaacagggctgccgattgagcgttttgagccgggtaatcccgtgaccgaaggtgagccttgcacgacctatattggtcctgctggcgccggacattatgtgaaaatggtgcataacgggattgaatacgccgatatgcagctgatttgcgaagcctatcagttaatgcacgatggcttaggcatgagtgcagcacaagtgggtgaggtgtttgaacgctggaataagggcagtttaaacagctatctgatggggatcagcgccgaggtgctcaaacaggcggatccgctaacgggtcagccattagttgagatgatcctcgataaagcagggcaaaagggcacaggcctatggactgcggtaagcagtttgcaaattggttgtccggctcccaccattgccgaagcggtttatgcgcgcgcggtcagcacccaaaaatccctccgtgttgagctcagtaaaaagctctcaggtcctgcctctgtggcgatggatgatgctcaaaaagccgttttaatcgatgccttagagagcgcgctctattgcgctaaagtgtgttgctacgcccagggtttccaactcatggcgatgacggcgcaggagcaaaaatggcagctcgattttgctgaaatcgcgaagatttggcgtgcgggttgtattattcgtgccaccttcttgcaatctatcactcaagcttatcaagcgaatgcggacttaagctgtttattgatggccgacacctttgcaactaccttgtcggaaaaacaaaccgagtggcgcagtgctgtggcggctgctgtgatgcaagggatccccgtgccttgtattagttcggcattggcctattacgacagttaccgcagtgagaccctgccagcaaacttgcttcaaggtcaaagggactttttcggtgcccatacctttgagcgcttagataagcccgctggcgagaaatatcatttagattggagtgccccaaacagggtattaatcaaactctaaa

SEQ ID NO: 208097 - DNA, 1531 bp, Unknown
  Bacterial polypeptide expressing nucleotide sequence isolated from the Sargasso Sea
aatgtctgagacatccgtattatgtgatataggttttgtcggcgcaggtgtcatggggaagaacctcattttaaacctggctgatcacggttatcgggttgccgcttttgatttagaccataaaaaactggaagctgtgatagcgcaggacaaagccgagcggggcgataaacctgcccgggtcatcagctgcagctcttatacagaactcctgtcgcgtttatcctctcctcatttagtgatcttatctgtgccagccggcaagcctgttgatgatgtctgtttaaaactgatcgatgccggtattcaggccgatgacattattgttgatacaggcaatagcttgtggacagacacggtgcgccgtgaaaaacactacgaaggcaaatttattttcttcagtacagcggtctctggtggtgaagtgggggcccgttttggcccttccttgatgccaagtggcgatccttatgcatggaccaggattgaacctatctggcgcgctattgcggccaaagttgacccggcaacaggtcgtccgctggaacggcacgaacccggtaatccggtgacagagggagaatcctgcgccacttatattgggccgggcggttcaggtcactatgtcaaaatggtgcacaacggtatcgaatatgccgatatgcagctgatttgtgaagtctatcaggtgatgcgtgacgcacttggtatgagtgcagagcaggtatccaaagtatttaaagagtggaatcaaggcatattaaacagttacctgatggaaatcagcgctgaagtgctggccacgaaagattcagaaacaggcttacccctggtcgatgtgatactggataaagccggacaaaaaggcactggtctttggactgcagtcagcagtctggaattaggttgtcctgcacctacgatcagcgaagctgtatttgcccgttctatgtcgactttaaaagatcagcgggtgttagcatctacgttgttatctggtcctgtgcgtgaacattgcacaaatcagactgctgagcagatgatcaagcagctgcatgacgcactgtactgcgccaaaatttgtgtgtatgcacaaggctttgatttaatgaagaccgcagcagccgagcatggttggcaactgaattttgctgagattgcaaaaatctggcgcgcaggttgtatcattcgcgcagtgtttttacagtctattactgaagcttatgagcgtaacgacgatttacagaatttactgttggatccgtttttctccaaacaaatttctgtcaatcagatgaactggcgtcgggctgtggctgaagcagccatgacaggtattccggtatctgcattaagctcagctttaagttattacgactcgtaccgtactgccgtcttgcctgctaacttgctgcaagggcagagggattattttggcgctcacacctttgagcgtacggataaagctaaaggtaaaacttttcatgtcgactggggtcataccgacaggccgatgcaaaaaattaagtaa

SEQ ID NO: 208098 - DNA, 539 bp, Unknown
  Bacterial polypeptide expressing nucleotide sequence isolated from the Sargasso Sea
caccacggagacctacgtcgccatgaagctgttcgtcgacaactggcgttggcagggggtccccttctacgtccgcacaggcaagcggctggccaaacgcctcagcgaggtggtgctcaccttccgcgaagcaccagtgcatctcttcgatgcagccaccggcggccccacggccaaccagttgattctgcgcatccagcccgacgaaggggcggaattccgcttcgaagtgaaatcccccgggtccggcatgcgcagccgtccgatcgacatggagttctcctacgacgagtccttcggggagccctccgatgagggctatgtccgcctgctggcggacgccatgctcagcgatccgaccctgttcacccgcagtgacgaggtggaagcggcctggcgtctgtacaccccgctgctggagctgatcgaagacagcccttggcagctgccgatccatccctacgaatcccgcacctggggacctgccgccgctgatgccctgctggcccgtgacggactgctctggcgtcgtccctgac

SEQ ID NO: 208099 - DNA, 574 bp, Unknown
  Bacterial polypeptide expressing nucleotide sequence isolated from the Sargasso Sea
aatgggcaaatcaattggagccaaggcttgtgacttcgtactttttggtacaaaaggcgatttagcgaggcgtaagttattaccttctttataccagctagataaagcagagctactcgataaagaaaccaaggttattggtgttgcaaaagatgcattcacccgcgatgaattcattgcgcttgtaaccaaagcattaaacacgtttgttaaagacgacatttgcccaaccacgctagagcgtttcctgagtcgttgtcactacatcggcaccaattttaccgagccagaaggttatcaggccttccatgacttacttgaaccaagtaagcgtgtcatggtgaactactttgccactccgccttctatttttggtgccatttgtcgctgcttgcatgagcaagggttaattaaaccagatacccgtgtggtgttagaaaaacccattggtaccgatttagcctcttcgcatgtgattaacgatcaagtggcagagttctttaatgaaaaccaggtttaccgtattgaccattacttaggtaaagaaacagtacaaaacctaatcgcactgcgt

SEQ ID NO: 208100 - DNA, 475 bp, Unknown
  Bacterial polypeptide expressing nucleotide sequence isolated from the Sargasso Sea
ttttatttgaggacagggaaaagactacctaaaagacttggcgaaatagtcttgacttttaaagacgtccctgttcatttatttgaatcaacaataataaatcctgccccaaatcaacttatccttagaattcaaccaaatgaaggtgctactttcaaatttgaggtaaagtctcctggttctgggatgaaatcaagacctgttgagatggaattttcttatgatgaatcctttggggaaccctcagatgaaggctatgtaagattattagctgatgcaatgctttctgacccaaccttattcactagaagtgatgaagtagaggcagcctggaaactttatacgccattaatagaattgatggataactctccttggaagttacctatttataattatgaatccatgacgtggggaccacctgaatccgatcaattactttcaaaagataatattttctggcgtagaccttaaa

SEQ ID NO: 208101 - DNA, 565 bp, Unknown
  Bacterial polypeptide expressing nucleotide sequence isolated from the Sargasso Sea
ggtgctggaaaagcccctgggccacgacctgcagtccaaccaggccatcaatgacacgctgcgccgcgtgctcaaggaagaacaggtcttccgcatcgaccactatctgggcaagccctcggtgcagaacctgtttgcgctgcgctttggcaatgcgctgttcgaacccctgtggcgccgcgagaccattgccaacatccagatcacgattgccgaagagctgggcgtggagtcgcgcggcgcgttctatgaccaaaccggcgcgctgcgtgacatggtgcaaaaccatgcgctgcagctgctgtgcgccatcggcatggagccgcccatcaactccagcgccaacgccatccgcgacgaaaagctcaaggtgctgcagtcgctcaagccctggacgctggagaccatcggccagcatgtgatccgtgggcagtacgccgccggcaaccaccaaggccagcccgtgcccggctacgcgcaagaaaagggcgtggcccccagcagcaccaccgagacctttgtggcgctgcgcaccgagatcagcaactggcgctgggcaggcgtg

SEQ ID NO: 208102 - DNA, 649 bp, Unknown
  Bacterial polypeptide expressing nucleotide sequence isolated from the Sargasso Sea
gatgatatttctataggacagtatggaagcaaaactattaaaaagaaagataaaataccatcttatcttcaagattcaggaaattatgaaagcaatacagaaagctttgctgctctaaaagtcaatgtaaataattggagatggacaggtgttcctttttttttaagaacaggcaaaagattaaaaagaaggtcatcagaaatagtgattacattcaaacctgttaaacactttatttttgatgaaagtgttgaaaaacttatcaagccaaaccaacttattattagacttcaacctgatgaaggcttgaagttactactcatgagtaaagagcctggtcctgggggtatgagaattgctccatcatatttaaatctttctttctcagatacatttaaaaaaagggtgcctgatgcttatgagagattattaatggatgtagtgagaggaaatcaaacactatttatgagaaaagacgaagttgaggctgcatggaattggattgatccaattatcgaaatgattagaaaaaataatttaaaacctgaaatatacaacccaggatcatggggcccagtttcatcaaatacacttattagtaaaaatgaatttgaatggcatgaacccgactcaaaaggtttaaactaaa

SEQ ID NO: 208103 - DNA, 598 bp, Unknown
  Bacterial polypeptide expressing nucleotide sequence isolated from the Sargasso Sea
agcgctggtgcttggccaatatgaggattacacagacgaactgggcacctcgtcaactacggaaacctttgttgcgatgaagctggcgattgataactggcgctgggcaggcgtgccgttctatatcaggacgggcaagaagctgcgccagcgcgcctctgaaatcatcatcaccttcaaggaccggccgcatgatatcttttccaattcccgagatggtacaattctgggacagccgaaccgcctaatcatcaggttacagccaagtgagggcctgcgtctgcagatgacgtcaaagcaacccggccccggtggcatgcggctgttcccatcagacctcaatctgagctttgatgaaacctttgaggaacgtctgcctgacgcctatgaacggcttttaatggacaccgcgcgtggcaatcagaccctattcatgcgggtcgatgaggtacttgccgcctgggagttcattgacccgattctggcgctagcaaaaacccgaacacccgtgtcatacaagcttggttcaatggggccaacggacgatttgctccaggctgatggtcgctcgtggatcgacccgcatgaggattggtag

SEQ ID NO: 208104 - DNA, 461 bp, Unknown
  Bacterial polypeptide expressing nucleotide sequence isolated from the Sargasso Sea
attggaaaagtccggtctgttgcatgccgacagtcaggtcattggcgttgcccgcgacgaattaagtctggatggctacaaagatctggttgaaaccaacttacaaaaattcattaaagagccgctggatgcagacgtattagcgcgcctaaaagccaaactgcagtatgtgcaggtagatttaactaaagaagacgcgtacaaagcgcttaaaaatgtcactgacccgaaaaaacgtattccggtcagctacttcgctactgctccttctttgtttggcaatatctgtaaaggtctgtctatcgcgggtttatcggcacaaccggcccgtgtggtactggaaaaacctattggtcacgatttagcttcgtctaaagtgatcaacgatgaagtcgccaaatattttggtgaatgccaaatctaccgcatcgaccactatttaggtaaagaaaccagtactg

SEQ ID NO: 208105 - DNA, 1639 bp, Unknown
  Bacterial polypeptide expressing nucleotide sequence isolated from the Sargasso Sea
atgaaaaacattgtcccttatcttgttgccctaataatcgtcgcatgcagtgctcctgaaccaccaaaatccgatattaattctaatgcaatggcggtagattccattcaatcgaatcaaaatgtgagctctaataaaaataacacagagatgaattcggccttagacaataatgggaataataatgatgataaaggtgatgattttaggtcgcactggggacaaatgggcgattctgaaaaacaatatttcatcaatcagcttaacaaaaatatgggaacctctttcgatttcaaaaaaattaatgaaaatcctaatgagctattctcggtaatatcaggcctgcaaaatgtaatggatatcggggcactaagggatatggttcctaaatctgacactaaagatacctttgaattgatacaagaacaatctgctggttttagtgtgccagccttggatttttttgctacaaataaaagcgatcgattcttagttgatttcgaagatatcatagctggtcatccgttagttggagcgaattcacctagacctcacaatgatgctcaagtttatttttctaataccgatagtcgttgggtgaacgctacccaaccagaagattatccgccaatttatgcagtagctgacggatatgtgaatttacccaaattaagcttttacaacgttgtagatcattcgaactcagatccaccatggtggcatgtcgcttacgtttttactcttcgtattgcaactgatgatggaagcaatgtggaattcttatatcagatggagccgtatatgatccctgatctggtaggtaagccgaaggatttttataggcaatttattaaagttgagaatggtcaatttgttaagaaaggagacatattagggtatatgtatgttcctgctttagaagaaatggttggaaataaagaagcatcttctcatattgctttttctttgatgaagcaaccttcaactgtttttagtccatctattttctctgaagatgtggtccgccaatttggcaatctgtataggaatccttcggaaggatgggagagtaaaagttttggttatgattggaaccgagctagaggtctacccgatagtatgggctggatgataaatggagctgaaaatcccttttctgataatgacttgggtgttttgattcatgatgggataaaggatcaggatttggatcaccgtgctatggtaaaaccacaagatttagggtttgaatctgacagaatactctatagtgaattcggatgggggaatactgttctaagagatatagaaattaatggagattggcagctactgtttgcaggaatgggtggtccgatgaggttaactttttctatggaagataatggccaaatgagagaaagcaaagtgtttgaattacgagaagggcaaaattttaggttggatcataaagataaatttacggggaatgccgataaattcgatatatctattgtcgatgccaacagctggggatggagtttggcatttgccgatgcggaagccagttacacagtccctggaacaaccagagacattaagagtgtttgtccccctggctgtcctccgagtcctaatccttataagcttaagaagtaaa

SEQ ID NO: 208106 - DNA, 877 bp, Unknown
  Bacterial polypeptide expressing nucleotide sequence isolated from the Sargasso Sea
caacatgctgttcgagccgctgtgaatgcccaatacgtcgatcatatccagatcaccgtggccgaaaccgtgggcgtcggcgggcgcggtgagtattacgacaagtccggcgccatgcgggacatggtgcagaaccacctgatgcaactgctgtgcctgatcgccatggagccgccggcgaagttcgaccacgacgcggtgcgcgatgaaaagctgaaggtgatccgcgccctggatcaggtgccgctggacgatgtggtgcgcggccagtacctggccgacggccccgacaagaagggctatctcgaacatgtcgagaaccccgagagcaagaccgaaagctttatcgccatgaagctgcaagtgtcgaactggagatgggccggcacccccatctacctgcgcaccggcaagcggctgaaggcgcgcagctcggagattgccgtggtcttcaaggagaccccgcattcgatcttcggcgccgatgccgggcggcaccgcaacgtgctgaccatccgtctgcaaccgaacgaggggatggacctcttcgtcaccatcaaggaacccggccccggtgggatgcgtctggtcgacgtgcccctcgacatgacctttgccgaggccctgggccccgatgccgaggatgtgccggacgcctacgagcggctgatcatggatgtgatccgcggcaaccagaccctgttcatgcgcggcgatgaggtcgaggccgcctgggcctgggccgatccgctgatcgaatcctgggaagagcgcggcgaccgcccggtgccctacgagaccggctcgaccgggccggaagaggcgttggcgctgatgcatcgcgacggtcggcgctggcgcgagatccgcgcctgag

SEQ ID NO: 208107 - DNA, 607 bp, Unknown
  Bacterial polypeptide expressing nucleotide sequence isolated from the Sargasso Sea
agcgagatacaaataggacagtatgagaattacactcaagaattagaacaagaaagtaaaactgaaacatttgttgcgatgaaagtaaatgtagataattggcggtgggctggtgttcctttttatattcgcactgggaaaaaacttgggctaagagctagcgagattgtaattacgtttaaaaatcggccacatgatatttttgcaaaaaatggtgcggcagtggcagaagattatccaaatcgtcttgtaataagggtgcaacctcaagagggattaagactacatctgacatctaagaaaccaggtcctggcggaatgagattatttccgtctgagttaaacctctcatttgatgaagcattcgctgaaagactccccgatgcttatgagagactgctgatggacattgctcgcggtaaccaaacattatttatgcgctctgacgaggttttagcggcctgggattatatagatcctatcatctcaatggtacgtaacaaaacaccagagatttattctcacaacaagatggggccggaggataaaatattaaaaagagagggtagacactggtttaaccctgaattggataaagatatatgac

SEQ ID NO: 208108 - DNA, 673 bp, Unknown
  Bacterial polypeptide expressing nucleotide sequence isolated from the Sargasso Sea
ggttcttcaagcttcaaacttgctgacgaaaatgaaccttggaattgttgcataagaggtcaatatggagaaggagggaatatttcaaatcgactaaaaggatataggcaggaagatggtgttaattgtaatagcacaacagaaacttatattgcgacaaaagttttcgttgataactggcgttggcaaggggttcctttttatttgagaacaggtaaaagactacctaaaagacttggggaaatagtcttaacttttaaagacgttcctgttcatttatttgaatcaacaattataaatcctgccccaaatcaacttatccttagaattcagccaaatgaaggtgctactttcaaatttgaggtaaaatcccctggttctggaatgaaatcaagacctgttgagatggaattttcttatgatgaatcatttggagaaccctcagatgaaggctatgtaagattattagctgatgcaatgctttctgacccaaccctatttactcgaagtgatgaagtagaagcagcctggaaactctatacgccattaattgaattgatggataattctccttggaagttacctatttataattatgaatctatgacatggggacctcctgagtctgatcaattaatttcaaaagataatatgttctggcgtagaccttaaa

SEQ ID NO: 208109 - DNA, 511 bp, Unknown
  Bacterial polypeptide expressing nucleotide sequence isolated from the Sargasso Sea
agttttcgttgataactggcgttggcaaggggttcctttttatttgagaacaggtaaaagactacctaaaagactgggagaaatagtcttgacttttaaagatgttcctgttcatttatttgaatcaacaataataaatcctgccccaaatcaacttatccttagaattcagccaaatgaaggtgctactttcaaatttgaggtaaaatctcctggttctggaatgaaatcaagacctgttgagatggaattctcttatgatgaatcatttggagaaccttctgatgaaggctatgtaagattattagctgatgcgatgctttctgacccaaccttatttacacgaagtgatgaagttgaggcagcctggaaactttatacgccattaattgaattgatggataattctccttggaagttacctatttataattatgaatctatgacgtggggtcctccagaatctgatcaattaatttcaaaagataatattttctggcgtagaccttaa

SEQ ID NO: 208110 - DNA, 793 bp, Unknown
  Bacterial polypeptide expressing nucleotide sequence isolated from the Sargasso Sea
caatgatcttcagtcatctattgatattaatgaatcattagctctatattttaatgaaaaccaaatctttagaattgaccattatcttggtaaggaagcagtacaaaatcttctagcgctaagatttggaaatattttatttgaaaaaatatggtccaatgtcgccgtagaccatgttcagattacagttgctgaaacgctaggattggaaaaaagaggatcctactacgatcaaaccggagccataaaagacatgctacaaaatcaccttctccagattctgtgcttggtagcaatggaaccgcctacaaacataaattcagagtcaatcagagatgagaaattaaaggtcctaagatcgcttaggccttttagaacaaatgagactagtgaccatcttgtgatcggtcaatataaggatggtgccataaactcaaagacaattacctcatacatagatgaaattggagtaaatcaagaaagtaatactgaaacttttgttgcactaaagttatggatcgataattggcgatggtcaggggtccccttctttttaagaactggcaaaagaatggcagaaaagcggtcagagatagttatacaatttaaatctgttccccataatatttttgattcaaaaagcaaacaaaaagataatcaattaattataagactgcagcctgaagaaagtataaagctaaaaataatgattaaaaagccttccgcttctggcttccatctacaagaacttcctcttgacttattgtttgatgattactatgaagatgatcat

SEQ ID NO: 208111 - DNA, 508 bp, Unknown
  Bacterial polypeptide expressing nucleotide sequence isolated from the Sargasso Sea
gttgagacttctccgctcccacccacaggtccagctcctctttaaggaggacctgggcaccggcggccgcggcgggtacttcgacacctttggcatcatccgcgacatcatgcagaaccacctgctgcaggcgttcatgtggctcgcgatggagccgccttcgtcgatgacgggcgacgcgatcacggccgccaagtgcgagctgctccgctccgtcaagacgctcgcgctcgacccgagcgagtgcttcctcggccagttcgcagcgcacggcgacgactcgggctaccttgacgacccgaccgtccccgccggctcgaagtgcccgacgttcgcgtcgctcgtgctgtcggtcgacacgccgcgctggcggggcgtccccttcctcttcacggcggggaaggggatggacgagcgcgtctgcgagctgcgcgtccgcacagctggtggaaagtgccgtctgcgctgcttgacgacagcgccccatctgcctccctggaccttctga

SEQ ID NO: 208112 - DNA, 732 bp, Unknown
  Bacterial polypeptide expressing nucleotide sequence isolated from the Sargasso Sea
tatgaataatgcgcttccagaaactgcgattacgcatgatagtgattttattatatttggaggtagcggcgatttatcagttcgaaaaatatttcccgcgttattctggcgtttcttaaacggccaaataacagaaaattttcgtctgatttcctgcatgagaacagtcgttacgactaaacaattcgcaaataaatttcgaccattttgtgagcaagcctttgaaagtggtattgcagatgagcaaagctgggagaattttcttaagctcattcaaattttagaattagacattgttaacgatattggcggtgaaaagttatacaataccctcaaatctgaactttccgaagaaagaccctgtattttttatcttgctgttgctccaaaattatttggtgttagttgcgaattgttgcataggaacaatctggttctcccacaaagtagagttgtcgtagaaaaaccgtttggccatgacaaagcttccgcgttggcgttaaaccaagaaatacttcacgtatttgatgaaggccagatatatcgaatagaccattatttaggcaaagaaactgtccaaaatctgatggcgctaagattcgcaaatgttatttttgaatcacaatggaataatcattatatagatcatattcaaataacaacagccgagacggttggagttgggcaacgtgcatcctattatgattcctatggagcattgcgcgatatggt

SEQ ID NO: 208113 - DNA, 782 bp, Unknown
  Bacterial polypeptide expressing nucleotide sequence isolated from the Sargasso Sea
ggttggtgctgcccgatcaagtttatcacaaaaaacattcaatgatctcgtagaaaattctatcaaaagctttgctgaaataaattttaaaggtgatgatcttaaaaattttttaaattgcctaaattacatccagattgatgctactggttcaaatgggtggaatgaattaaaaacagctcttagaccaaaaaaaatacgcgctttttacttttctgtttcaccttcattatttggaagtttagcagagcgtttacataaacatgaaataactactgaaaatagtcgtattgttgtcgaaaaaccatttgggcgaaatttgaaaacttcaaaacaactgaacgcaattttagcagagcatttttctgaagagcaaatatatcgcatcgaccactacttgggcaaagaaacagtacagaacttaatggctataagatttgggaatatgttgtttgagcctctttggaacgctcagtatgttgatcatatacaaattacagtatccgaaactgttggggttggggatcgaggtgaatattatgatcattcgggcgcaatgagagatatggttcaaaaccacctaatgcaattattatgcttaattgctatggagcctcctgcgcgcttcgaacctgactctgtgcgagatgaaaaattaaaggtaataagagcacttgatcccgtggctccacatcatatcgtacggggtcagtatggaccaggcgttgatcacccagattatcggacaggtgtcggcaataaaaactccaagactgaaagtt

SEQ ID NO: 208114 - DNA, 552 bp, Unknown
  Bacterial polypeptide expressing nucleotide sequence isolated from the Sargasso Sea
tatggtatctcgagttattcccgttgagtcatttgatttggtcatttttggagcaacaggtgatctggcaaagagaaagatttttcctggattgtttagaaggtttcttgcaggtcaaatgccgacggactctcaagtggttggtgctgcccgctcaaatttatcacaaaaaaaattcagtgatcttgtagaaaattctatcaaaagttttaccgaaataaattttagagatgatgatcttaaaaattttttaaattgtctaaattatatccagattgatgctactggttcgaatggatggagtgcattgaaatcagctcttaggccaaaaaaaatactggcattttatttttctgtttcaccttcattatttggaagtttagcggagcgtttgcatgaacacgcaatcactactgaaaatagtagaattgttgtagaaaaaccatttggacgagatttggcgacttcaaaacaattaaacgcaattttagcagagcactttactgaaaaacaaatatatcgcatcgaccattacttgggaaaagaaacagt

SEQ ID NO: 208115 - DNA, 577 bp, Unknown
  Bacterial polypeptide expressing nucleotide sequence isolated from the Sargasso Sea
ctttgagccaattattcactatcaacctggtgatattgaaagcacggcagacttcgaaaagcttcagcagcggctttgctccctcgaagaaggaaacccaacccctcgggtctactatcttgctaccgcaccgcgtttctacacccctgcaattgctgcgctcggcaacctcaacatggcctcagaggatcatggcgatcgtcggatcgttattgaaaaaccattcgggactgaccttgctactgctcaggcattgaacaactacattcacactgtatttcaagaatctcaggtctaccgtatcgatcactacctcggaaaagaatctgttcagaacattctggcgctgcggtttgcaaacacaatctttgagcccatctggaaccgccgctatatcgatcatgttcagattacagtcgcagaagaagtgcctgttggtcgacgaggcagctactacgactcagccggcgtgctccgtgacatgttccaaaaccacctcctgcaattgctgatggtcactgcaatggaagcgcctgtacggttcaacgccgacgctgtccgtaatgaaaaaagttaa

SEQ ID NO: 208116 - DNA, 664 bp, Unknown
  Bacterial polypeptide expressing nucleotide sequence isolated from the Sargasso Sea
atgctgtcattcgtcgtcttcggcgcgagcggcgatttggccaagaagaagatttatcccgcgttgtttgcgctgtatttcgacgggagattaccggagaatttcatgatttacggatacgcgcgatcgagcatgacgacggaggagtttcgggataagattggggcgtcgttgacgtgtcgcatcgattgggacagggctggcgggagcagttgcgcggagaagacggaggagtttttctctcggtgcgtgtacgtgccggggcagtacgatcaggcgaacgatttcaggtcgctcgatgcgctcatgacggagaacgaacgcggggcggaaaaggtgaagcgggtgttttatctgagcattccgccgagcatcttcgtgccggtggcgcaaaacgcggcgagagagtgccagactggtgacacgcgcgtcatcgtggagaaacctttcgggagagacttgcaaagctcgcgcgagctcacagcggcgctcgcgagtgaattgagcgaagaacaaacctatcgcatcgatcactatctcgggaaggagttgattgaaaacttaaccgtgttgcgtttttcaaacatcatgttccaaccgcttggaacagaaactacattcgcaacgtacagatcaactttagcgaaaacttggcaccgaagtc

SEQ ID NO: 208117 - DNA, 709 bp, Unknown
  Bacterial polypeptide expressing nucleotide sequence isolated from the Sargasso Sea
atttgaaccagaagcaataagaaatgaaaaagctaaggttcttcaagcttcaaaacttgctgacgaaaatgaaccgtggaattgttgtataagaggtcaatatgtagagggaggaaatatctcaaatcgactcaaaggatataggcaagaagatggtgttcattgtaatagcacgacagaaacttatcttgcggcaaaagttttcgttgataactggcgttggcaaggggtacctttttatttgagaacggggaaaagactacccaaaagacttggagaaatagtcttaactttcaaagacgttcctgttcatttgtttgaatcaacaataataaatcctgcaccaaatcaacttgttcttagaattcagccaaatgaaggcgctacttttaaattcgaggtaaagtcacctggctctggaatgaaatccagacctgttgagatggaattttcttatgatgaatcatttggagagccttcagatgaaggctatgtaagattattagccgatgcaatgctttctgatccaaccttatttacaagaagtgatgaagtagaggctgcgtggaaactttatacgccattaatagaattgatggataattctccttggaagttacctatttataattatgaatctatgacgtggggacctcctgagtctgatcagttactttcaaaagataatattttctggcgcagaccttaa

SEQ ID NO: 208118 - DNA, 895 bp, Unknown
  Bacterial polypeptide expressing nucleotide sequence isolated from the Sargasso Sea
gcgttccgagctgacatcggagcagttccgcgagcatgccgacaaggcgctgaaggagcatctgaaggacggcgagtacgacaaggacgaagtggcgaaattcctcgcccggatcgaatatgtgccggttgacgcgaccagcaacaagggctgggatgcgctgaagaagatgctggagcccggcaaggaccgggtgcgcgccttctacatggccgtcgccccctcgatcttcggtccgatctgcgacggcattcgcgaccacaagctgatcaccaagcagacccgcatcgtcgttgaaaagccgctcggccgcgacctcgcctccgcgctggaactcaacaacatgattgccaagaccttccacgaggaacaggtcttccgtatcgaccactatctcggcaaggagacggtgcagaacctgatggcgctgcgtttcgccaacatgctctacgcgccgctgtggaacgccaaccatatcgaccatatccagatcacggtcggcgaggaagtcgggcttgagggccgcgccggctattacgacaagtcgggcgcgctgcgcgacatggtgcagaaccacatcctcaacgtgctctgcatggtggcgatggaaacgccttcttcgatggaggccgaggccgtccgcgacgagaagctcaaggtgctgcgctcgctgaagccgatcaccgaggacaacgccagcgcgatgaccgttcgcggccaataccgcgctggcgcctccaagggcggcgcggtcaagggctatctggaggaactcggcggcgaatccgacaccgagaccttcgtggcgatcaaggccgagatcgaaaactggcgctggggcggggcgtgccttctacatccgcaccggcaagcggctcgccagccggcttttcgg

SEQ ID NO: 208119 - DNA, 674 bp, Unknown
  Bacterial polypeptide expressing nucleotide sequence isolated from the Sargasso Sea
tatgccatcaactttaagtaatcctctaagattaggtttacggcaggaaagagtcatatctccacaatgtttagtaatttttggcgctagtggagaccttactcatagaaaattaataccagccttatttgaactctatttgcaaagaagaattcctagtgaatttggaatagttggttgtgctagaagaccttggactgataatgagtttagagaaaagatgaaagtaaagttatcaaatcaaatatctggtaaagaaagggagtgggaacaattttccaattatcttttctatgaaccagttgacctacaacaaagtgatcatgtcgtaaggctttctagaagattaaatgaaattgacaaaacacaagctactcatgggaatagaacattttatttatcagtatctccgaatttctatgcaagtggatgtaaagctctaaaagtggctggccttttagatgaccctaagaaaagtcgtttagtaattgaaaaaccttttggaagagattattcaagtgcaaaaaaattgaataagatagttcaaagttgcgctgaagaaagtcagatttataggattgatcattatttaggtaaagagacagttcagaatattcttgttttgaggtttgctaacactatttttgaaccaatctggaacaggaattatatat

SEQ ID NO: 208120 - DNA, 781 bp, Unknown
  Bacterial polypeptide expressing nucleotide sequence isolated from the Sargasso Sea
tttggagtttcggcacagtttattaagagagaataatttagcaaataacaaaactagaattattgtagaaaaaccaattggtaaggacttaatttcagctatagatattaataaggctataaattcttattttgacgaggatcaaatttacagaattgatcattatttagggaaagaaaccgttcaaaacctaatggttatgcggtttgccaatcaattatttgaagcgcattggaataataactctattagcaatgttcaaataactgtgtctgaagaaattggtatcaaaggaagagaaaactattatgattcctacggcgcaattaaagatatgatgcaaaatcatattcttcaattagtatgccttgtagcaatggaaccgccatcaaaatttgatgcgaaacttataagagacgaaaaacttaaggtccttcagtcattgaaaaagatagaaaatttaaacgaaatctgtatagggcaatatggattaaagaatgacaatgaagaccaaattgcttcttatactcaagattcaaaaaaacatgatagcaaaactgagacatttgtagcattgattgcaaaaattgataactggagatgggctggcgttcctttctttttaagaaactggaaaagattaaaaataagagcatcagaaattgtaataactttcaaaccaatccaacactttatttttgataaaaaccgaaagaataatacactacctaaccaactgataattagactttcaccagatgaaggcctaaaattctactat

SEQ ID NO: 208121 - DNA, 623 bp, Unknown
  Bacterial polypeptide expressing nucleotide sequence isolated from the Sargasso Sea
tatgatacatccaaattcagaaatatccgaattcgacattattataattggagcaacaggtgacctttcaataagaaaaatcatacctgccttatttaaaagatatgctgatgggcaaattccagaaaaatctaaaatttattgtttggcaaggcaaaaattagataactcaagttttactcaaaaaatctgtcaacaaaataagattgatttgaaaaattctaaaatactaaaggaatttttaaaaaaaataaattacttatgcattgatataaaaagtccagattcaaaaaatttattttcacttcaaaaaatgttatcaaaagatcgtgtaagacttttttatctggctactgctcctgaattatttggtgtttctgcacagtttattagcgagaataatttagaaaataacaaaactagaattattgtagaaaaaccaattggtaaggacttaatttcagctatagatattaataaggttttaaattcttattttgacgaggatcaaatttacagaattgatcattatttagggaaagaaactgttcaaaacttaatgattatgcggtttgccaatcaattatttgaagcgcattggaataataattctattagcaatg

SEQ ID NO: 208122 - DNA, 726 bp, Unknown
  Bacterial polypeptide expressing nucleotide sequence isolated from the Sargasso Sea
attattgtagaaaaaccaattggtaaggacttaatttcagctatagatattaataaggctttaaattcttattttgacgaggatcaaatttacagaattgatcattatttagggaaagaaacagttcaaaacctaatggttatgcggtttgccaatcaattatttgaagcgcattggaataataactctattagcaatgttcaaataactgtgtctgaagaaattggtataaaaggaagagaaaactattatgattcctacggcgcaattaaagatatgatgcaaaatcatattcttcaattagtatgccttgttgcaatggaaccgccatcaaaatttgacgcgaaccttgtaagagacgaaaaactgaaggtccttcagtcattgaaaaaaatagaagatttaaacgaaatctgtatagggcaatatggattaaagaatgatgatgaagaccaaattgcttcttacactcaagattcaaaaaaacatgatagcaaaactgagacatttgtagcattgatagcaaaaattgataattggagatgggctggtgttcctttctttttaagaactggaaaaagattaaaaacaagagcatcagaaattgtaataactttcaaaccaatccaacactttatttttgataaaaccgaaaagattaatactctacctaaccaattgataattagacttcaaccagatgaaggcctaaaaattctactaatg

SEQ ID NO: 208123 - DNA, 739 bp, Unknown
  Bacterial polypeptide expressing nucleotide sequence isolated from the Sargasso Sea
atgacagaaaacacatcctcaacgatcgtgatttttggggcgtccggcgatcttacgagccgtaaactcgttccggcgctctataacctccaccgaacaggcgaattacctgctcatacgagaattgtggggttctctcgaacaccgatgtcggatgaggcctggagacaatcgctacgcgaaacgacagcgaatcatacagatgattttgatgagccatcgtggataacgtttgccaacaatattttctaccaaccgggagacattcagaagagatcagacttcgattcccttcagcacaaactcgacaccattgaacaaaaacgtcttgcgacacgcgtctactaccttgccactgcaccacagttttactggcctgtggcctcgaatctgggcagccttggaatgaacgatgaatcgcatggcccaagaaggattgtcgttgagaaaccatttggcactgacctttcatcagctcaaattcttaattcaaaactccattccgtttttgatgaaagccagatctatcgcatcgatcactatctagggaaagaatccgttcaaaacatattggcattgcgatttgccaatacgattttcgagcctgtttggaatcgtcgttacatcgatcacgtacagattaccgttgcagaaaaagtttctgtaggacgacgaggagactactatgacaagtccggagtacttcgagacatgtttcaaaaccatttgctgcagttac

SEQ ID NO: 208124 - DNA, 633 bp, Unknown
  Bacterial polypeptide expressing nucleotide sequence isolated from the Sargasso Sea
ggaatgtttgcataagaggtcaatatggaaagggagggaatatttcaaatcgactcaaaggatataggcaggaagatggtgttaattccaatagcacaacagaaacttatatcgcgacaaaagttttcgttgataactggcgttggcaaggtgttccattttatttgagaacaggtaaaagactacctaaaagacttggagaaatagtcttgacttttaaagacgttcctgttcatttatttgaatcaacaataataaatccttcctcaaatcaacttatccttagaattcagccaaatgaaggggcgactttcaagtttgaggtaaaatctcctggttctggaatgaaatcaagacctgttgaaatggaattttcttatgatgaatcatttggagaaccatcagatgaaggctatgtaagattattagcagatgcaatgctttctgacccaaccttatttactcgaagcgatgaagtagaggcagcctggaaactttatacgccattaatagaattgatggataattctccttggaagttgcctatttataattatgaatctatgacatggggacctcctgaatctgatcaattactctcaaaagataatattttctggcgtagaccttaaa

SEQ ID NO: 208125 - DNA, 722 bp, Unknown
  Bacterial polypeptide expressing nucleotide sequence isolated from the Sargasso Sea
gatggtcgccaccgccaccaaccccctgcgggtcggactccgacaggaacgggtcattgcaccccaatgtctggtgattttcggcgccagtggtgacctgacacaccgcaaattggtccccgcactgttcgaactgttcaagcagcgcagactccccagcgaattcgcccttctgggctgcgctcgccggccctggagcgacgaggagttccggggaaagatggctgaggctctggcgagcaagatcgctgagaaccaggaggcctgggatcagttcgcgtcgaagttgttctacgagcccgtcgatctacagaaaccggaggacgtggttcgcctgggcgggcgcctggagaccattgaccagcagtgcgccacccgcggcaaccggaccttttacctgtcggtgtcaccgaagttttacggcagtggctgtcgcgcgctggcggacgcagggctgttgaaggatccccagcgcagccgtgtggtgatcgagaagcccttcggccgggactacggcagtgctcaagccctgaaccgcgttgtgaagagctgcggacaggagaaccagatcttcaggattgaccactacctgggcaaggagacggtccagaacatcatggtgttgcgctttgccaacacgattttcgagccgatctggaaccggaactacatctccagtgttcagatcaccgcagccgagaccgtcggtgtcgaggaacgcg

SEQ ID NO: 208126 - DNA, 522 bp, Unknown
  Bacterial polypeptide expressing nucleotide sequence isolated from the Sargasso Sea
ttaaagttaacataagtaattatcgctgggctggcgtacctttttatctgcgtactggtaaacgacttaaagcacgaacatctgaaatagctgtcatatttaaggaaaaacctcatagtatttttggcccagaagcaggaaaccatcaaaatgctcttattattagacttcagcctgacgaaggaattacaatggatgtgactataaaagagcccggtccgggtggtatgcgtttgattgacgtgccattggatatgacattttctgaaaccctgggaattgaagaaaatgcagtgccggacgcctatgaaagattgataatggacgtcattcgaggaaatcaaacgctatttatgcgaggagacgaggttgaggcggcgtgggaatggacagacccgataattaatggatgggttgacagaaacgacgttccaaaaccttatgatagtggaagttctggtccgcaggatagcctgacacttttggagcgtgaaggtcgcaagtggcgcgaaatacattgat

SEQ ID NO: 208127 - DNA, 222 bp, Unknown
  Bacterial polypeptide expressing nucleotide sequence isolated from the Sargasso Sea
ttggcaaggggttcctttttatttgagaacaggtaaaagactacctaaaagacttggagaaatagtcttgacttttaaagacgttccggtacatttatttgaatcaacaataataaatccggccccaaatcaacttatccttagaattcagccaaatgaaggggctactttcaaatttgaggtaaaatctccgggttctggaatgaaatcaagaccggttga

SEQ ID NO: 208128 - DNA, 769 bp, Unknown
  Bacterial polypeptide expressing nucleotide sequence isolated from the Sargasso Sea
atgatacatccaaattcagaaatatccgaattcgacattattataattggagcaacaggtgacctttcaataagaaaaatcatacctgccttatttaaaagatatactgatgggcaaattccagagaaatctaaaatttattgtctggcaagacaaaaattagataactcaagttttactcaaaaaatcagtcaacaaaataagattgattttaaaaattcaaaaatactaaaaaaattttttgataaaataaattacttatgcattgatataaaaagtccagattcaaaaaatttattttcacttcaaaaaaggttgacaaaagatcgtgtaagacttttttatctggctactgctcctgaattatttggagtttcagcaaagtttattagagagaataatttagcaaataacaaaactagaattattgtagaaaaacctattggtaaggacttaatttcagctatagatattaataaggctttaaattcttattttgacgaggatcaaatttacagaattgatcattatttagggaaagaaactgttcaaaacctaatggttatgcggtttgccaatcaattgtttgaagcgcattggaataataactctattagcaatgttcaaataactgtgtctgaagaaattggtataaaaggaagagaaaactattatgattcctacggcgcaattaaagatatgatgcaaaatcatattcttcaattagtatgccttgtagcaatggaaccgccatcaaaattgacgcgaa

SEQ ID NO: 208129 - DNA, 514 bp, Unknown
  Bacterial polypeptide expressing nucleotide sequence isolated from the Sargasso Sea
aaagttttcgttgataattggcgttggcaaggggttcctttttatttgagaacagggaaaagacttcctaaaagacttggagaaatagtcttaacttttaaagacgttcctgttcatttatttgagtcaacaataataaatcctgctccaaatcaacttatacttagaattcagccaaatgaaggtgctactttcaaatttgaggtaaaatctcctggttctggaatgaaatctagacctgttgagatggagttttcttatgatgaatcatttggagaaccctcagatgaaggctatgtaagattattagctgatgcaatgctttctgatccaaccttatttactagaagtgatgaagtagaggcagcctggaaactttatacgccattaatagaattgatggataattctccttggaagttacctattcataattatgaatctatgacgtggggacctcctgagtctgatcaattactttcaaaagataatattttctggcgtagaccttaga

SEQ ID NO: 208130 - DNA, 640 bp, Unknown
  Bacterial polypeptide expressing nucleotide sequence isolated from the Sargasso Sea
attggataattcctacgaaccctgtgattttgtacttttcggtacactgggagatctttcacgacgcaagttgttgccttctttatatcagcttgaaaaagcaaacttgatgcacccagacaccactattgtgggtgttgcgcgtcaagaaatggagctggatgcctatattgaagaagttcatgccaacctaatcaagtttggcgagaagaacttgtgtgaagccacttgggaaaaaatgaaagcgcgtttgcactatgcatgcgtagacatgaaggacgttgaaagctattgcgtattagacgaccacgttgacccaagccgcaccatggtttgttatttagcgacgccaccggcgatatacggtgatatctgtcgtggcctgcatagctgcaaaattatcgactcaagcgttcgcgttgtgctagaaaagccaattggtcacgatttggcatcgtctaaagtgatcaatgagcaagttgcagaatacttcgacgaaaagcaaatttaccgcattgaccattaccttggtaaagagacagtactaaacctcgtatcactgcgttttgccaattctatttttgctactaactgggaccacaactgcattgaccatgttcaaatctcagttgcagagtca

SEQ ID NO: 208131 - DNA, 742 bp, Unknown
  Bacterial polypeptide expressing nucleotide sequence isolated from the Sargasso Sea
catggtcgctaccgccaccaatcccctgcgggtcggactccgacaggaacgggttatcgcaccgcaatgtctggtgattttcggcgccagtggtgacctgacccaccgcaaactcgtccccgcgctgttcgaactgttcaagcagcggcgacttcccagtgaattcgcccttctcggctgcgcgcgccggccctggagcgacgacgagtttcgcggaaaaatggccgaggccctggccagcaaaatcgtcgagaaccaggaagcctgggatcagttcgccacgaagttgttctacgaacccgtcgatctacagcaaccggaggacgtggttcgcctgggaggacggctggagaccattgatcaacagtgcgccacccgcggcaaccgaaccttctatctctcggtgtcaccgaagttctacggcagtggctgtcgcgcgcttgcggatgccggtctgctgaaggacccccaacgcagccgcgtggtgatcgagaagcctttcggtcgtgactacggcagtgcacaagccctgaaccgtgttgtgaagagctgcgggcaagagaatcagatcttcaggatcgaccattacctgggcaaggaaacggtccagaacatcatggtgctgcgctttgccaacaccattttcgaaccgatctggaaccggaactacatctccagtgttcagatcaccgccgccgagaccgttggagtcgaggagcgagccgggtattacgagacctcc

SEQ ID NO: 208132 - DNA, 885 bp, Unknown
  Bacterial polypeptide expressing nucleotide sequence isolated from the Sargasso Sea
tttgaggtttgctaacactatttttgaaccaatctggaacaggaattatatatcaagtgttcaaattacttcgtctgaaacagttggtgttgaagatagagcaggttattacgaaagctcaggtgctttacgggatatgcttcaaaatcatatgactcaaatgcttgcagttactgcaatggaacctcctggaaaatttgaaccagaagcaataaggaatgaaaaagctaaggttcttcaagcttcaaaactttctgacgaaaatgaaccgtggaattgctgcataagaggtcaatatggagagggagggaatatttcaaatcgactcaaaggatataggcaggaagatggtgttaatagtaatagcacaacagaaacttatattgcgacgaaagttttcgttgataactggcgttggcaaggggttcctttttatttgagaacaggtaaaagactaccaaaaagacttggagaaatagtcttgacttttaaagacgttcctgttcatttatttgaatcaacaataataaatcctgccccaaatcaacttgtccttagaattcagccaaatgaaggtgctactttcaaatttgaggtaaaatctcctggttctggaatgaaatcaagacctgttgagatggaattttcttatgatgaatcatttggagaaccctcagatgaaggctatgtaagattattagctgatgcaatgctctctgacccaacattatttactcgaagtgatgaggtagaggcagcctggaaactttatactccattaatagaattgatggataattctccttggaagttacctatttataattatgaatctatgacatggggacctgctgagtcagatcaattaattcaaaagataatatt

SEQ ID NO: 208133 - DNA, 976 bp, Unknown
  Bacterial polypeptide expressing nucleotide sequence isolated from the Sargasso Sea
acttttaagtaatcctctaagattaggtttacggcaggaaagagttatatctccacaatgtttagtaatttttggcgctagtggagaccttactcatagaaaattaataccagccttatttgaactctatttgcaaagaagaattcctagtgaatttggaatagttggttgtgcgagaagaccttggactgataatgagtttagagaaaagatgaaagtaaagttatcaaatcaaatatctggtaaagaaagggagtgggatcaattttctaattatcttttctatgaaccagttgacctacaacaaagtgatcatgttgtaaggctttctagaagattaaatgaaattgataaaacacaagctactcatgggaatagaacattttatttatcagtatctccgaatttctatgcaagtggatgtaaagccctaaaaggggctggccttttagatgaccctaagaaaagtcgtttagtaattgaaaaaccttttggaagagattattcaagtgcaaaaaaattgaataagatcgttcaaagttgcgctgaagaaagtcagatttataggattgatcattatttaggtaaagagacagttcagaatattcttgttttgaggtttgctaacactatttttgaaccaatctggaacaggaattatatatcaagtgttcaaattacttcatctgaaacagttggtgttgaagatagagcaggttattacgaaagctctggagctttacgggatatgcttcaaaatcatatgactcaaatgcttgcagttactgcaatggaacctcccggaaaatttgaaccagaagcaataagaaatgaaaaagctaaggttcttcaagcttcaaaacttgctgacgaaaatgaaccgtggaattgttgcataagaggtcaatatggagagggagggaatatttcaaatcgacttaaaggatataggcaggaagatggtgttaatactaat

SEQ ID NO: 208134 - DNA, 960 bp, Unknown
  Bacterial polypeptide expressing nucleotide sequence isolated from the Sargasso Sea
cggctgtcgtgccctggcggatgccggcctgctgaaggatcccaagcgcagccgcgtggtgatcgaaaagcccttcgggcgcgattacggcagcgcccagtccctcaaccgggtggttcagagctgcggtcaggaaatccagattttccgcatcgaccactacctgggcaaggagacggtccagaacatcctggtgctgcgcttcgccaacacgatcttcgagccgatctggaacaggaactacatctccagcgttcagatcaccgccgccgagaccgtcggcgtcgaggaacgggccgggtactacgaaacctccggagccctgcgggacatggtgcagaaccacctgacccagatgctggcgattaccgccatggaggcacccggtcgcttcgaccaggaagcgatccgaaccgagaaggccaaggtgctgcaggccgcccggctcgctgatgaactggagccctggaactgctgcatccgcggccagtacggacccggtggcagccaggagtctcccctggccgggtaccgccaggaaccgggggtcgacccgaacagcaccacggagacctacgtcgccctgaagctgttcatcgacaactggcgctggcagggcgttcccttctacgtgcgcaccggcaagcgtctggccaagcgcgtcagtgaagtggtgctcaccttccgcgaggcaccggtgcacctgttcgatgccgcgaacggcggccccacctccaaccagctgatcctgcgcatccagccggatgaaggggctgaattccgcttcgaggtgaaatctcccggctccggcatgcgcagccggccgatagacatggagttctcctacgacgagtccttcggtgaaccctccgatgagggttacgtgcgcctgctggccgacgccatgctaagcgaccccaccctgttcacccgcagcgacgaggtggaggccgcctggcg

SEQ ID NO: 208135 - DNA, 681 bp, Unknown
  Bacterial polypeptide expressing nucleotide sequence isolated from the Sargasso Sea
cgactacctgcggctcgcggaagcggcgcgcggcgacgcgatccgcgtgttctacctgtcgacgtcgccggagctgttcaccaccatctgcgacaacctgtcggccgcgcacctcgtcgacaagcactcgcgcgtcgtcctcgaaaagccgctcggccacgatctcgcgtccgcgaaggcgatcaacgatgcggtcggcaagcacttcgaggaatcgcagatctatcggatcgaccactatctcggcaaggaaaccgtgcagaacctgatggtgctgcgcttcggcaacccgatcttcgggccgctgtggcaggcgccgagtatccgcagcgtgcagatcacggtggcggagacggtgggggtcggcagccgcgcgggcttctacgaccataccggcgcgctgcgcgacatggtgcagaaccacctgctgcaactgctgtgcatcgtcgcaatggagccgccggtgtcgctcgacccggacgcggtgcgcgacgagaagctgaaggtgctgcgctcgctgcggccgatggcgcaactgcaagaagtgctccccgaatacacggcgccaggccaaaccctctgggccgtgtacttatctcgcagctaccaacaagcgctagtgcgcgcctttatcgattttaccgctcagcaatggcagctcgatatcaataagtggacagc

SEQ ID NO: 208136 - DNA, 975 bp, Unknown
  Bacterial polypeptide expressing nucleotide sequence isolated from the Sargasso Sea
tcatagctcccaatgcttagtaatattcggtgctagtggagaccttactcatagaaaattaataccagctttatttgaactctatttgcaaagaagaattcctagtgaatttggaatagttggttgtgcgagaagaccttggactgataatgaatttagagaaaagatgaaagtaaagctatcgaatcaaatatctggtaaagaaagggagtgggatcaattttctaattatcttttctatgaaccagttgacttgcaacaaagtgatcatgtggtaaggctttctaaaagattaaatgaaattgataaaacacaagctactcatgggaatagaacattttatttatcagtatctccaaatttctatgcaagtgggtgtaaagctcttaaagcagctggtcttttagatgaccctaagaaaagccgtttagtaattgaaaaaccttttggaagagattattcaagtgcaaaaaaattgaataaggtcgtacaaagttgtgctgaagaaagtcagatatataggattgatcattatttaggtaaagagacagttcaaaatattcttgttatgagatttgctaacactatttttgaaccgatctggaacagaaattatatatcaagtgttcaaattacttcatctgaaacagttggagttgaagatagagcaggttattacgaaagctctggtgctttgagagatatgcttcaaaatcatatgactcaaatgcttgctgttactgctatggaacctcctggaaagttcgaaccagaagcaataagaaatgaaaaagctaaggttcttcaagcttcaaaacttgctgacgaaaatgaaccttggaattgttgcataagaggtcaatatggagcaggtggaaatatctcaaaatcactcaaaggatacaggcgggaagatggtgttaatagcattagcaccacagaaacttatattgcgacaaaagttttcgttgataa

SEQ ID NO: 208137 - DNA, 826 bp, Unknown
  Bacterial polypeptide expressing nucleotide sequence isolated from the Sargasso Sea
ggcgatatatggtgatatctgtcgtggcctgcatagctgtaaaattatcgactcaagcgttcgtgttgtgctagaaaagccaattggtcacgatttggcatcgtctaaagtgatcaatgagcaagttgcagaatacttcgacgaaaagcaaatttaccgcattgaccattaccttggtaaagagacagtactgaacttagtatcactgcgttttgccaattctatttttgctactaactgggatcacaactgcattgaccatgttcaaatctcagttgcagagtctgtgggtattgaagggcgttggggttactttgacgacgctggtcaaatgcgagatatggtgcaaaaccacttgctacaaattctaagcttagtagcgatggagcctccaacaacgctcgacgctgacagcattcgtgacgaaaaattgaaagtacttaaagcgcttcgtcctatcaactcgtttaatattaacgaaagcacagttcgcggtcagtatacctctggtttcgtgaagggcgaggaagtgcctggataccttgaagaagaagctgccaatacgcaaagtaaaactgaaacctttgttgcgattaaggcggaaattgataactggcgttgggctggtgtgccgttctacctacgcacaggtaagcgcatgccaacaaaggtgagtgaagttgttatttacttcaagcgtcagccgcacaacttattcggtgacagcttcaagaatcttccgccaaacaagctggttattcgtctgcagccggacgaaggtgtagaaatcactgtaatgaacaaagtgcctggcttaactagctct

SEQ ID NO: 208138 - DNA, 833 bp, Unknown
  Bacterial polypeptide expressing nucleotide sequence isolated from the Sargasso Sea
ttctgaaacagtaggtgttgaagatagagcaggttattacgaaagctctggtgctttaagagatatgcttcaaaatcatatgactcaaatgcttgctgttactgcgatggaacctcctgggaaatttgaaccagaagcaataagaaatgaaaaagctaaggttcttcaagcttcaaaacttgcggatgagaatgaaccgtggaattgttgcataagaggtcaatatggagagggaggaaatatctcaaatcgactcaaaggatataggcaggaagattgtgttaattttaatagcacaacagaaacttatattgcgacaaaagttttcgttgataactggcgttggcaaggggtacctttttatttgagaacagggaaaagacttcctaaaagacttggagaaatagtcttgacttttaaagacgttcctgttcatttatttgaatcgacaataataaatcctgccccaaatcaacttatccttagaattcagccaaatgaaggtgctactttcaaatttgaggtaaaatctcctggttctggaatgaaatccagacctgttgagatggaattttcttatgatgaatcatttggagaaccctcagatgaaggctatgtaagattgttagctgatgcaatgctttctgatccaactttatttacacgaagtgatgaagtagaggcggcctggaaactttatacgccattaatagaattgatggataattctccttggaagttacctatttataattatgaatccatgacgtggggacctcctgagtctgatcaattactttcaaaagataatattttctggcgcagaccttaaa

SEQ ID NO: 208139 - DNA, 955 bp, Unknown
  Bacterial polypeptide expressing nucleotide sequence isolated from the Sargasso Sea
gttgacttacaacaaagtgatcatgtcgtaaggctttctaaaagattaaatgaaattgataaaacacaagctactcatggaaatagaacattttatttatctgtatcacctaatttctatgcaagtggatgtaaagttcttaaagcagctggccttttagatgaccctaagaagagtcgtttagtgattgaaaaaccttttggaagagattattcaagtgcaaaaaaattgaacaagattgttcaaagttgtgctgaagaaagtcagatttataggattgatcattatttaggtaaagagacagttcaaaacattcttgttttaaggtttgccaatactatttttgaaccaatctggaacagaaattatatatcaagtgttcaaattacttcatctgaaacagtaggggttgaagatagagcaggttattacgaaagctctggcgctttaagagatatgcttcaaaatcatatgactcaaatgcttgctgttactgctatggaacctcctgggaaatttgaaccagaagcaataagaaatgaaaaagctaaggttcttcaagcttcaaaacttgctaacgaaaatgaaccgtggaattgttgtataagaggtcaatatgtagagggaggaaatatctcaaatagactcaaaggatataggcaagaagatggtgtgcattgtaatagcactacagaaacttatcttgcagcaaaagttttcgttgataactggcgttggcaaggggtacctttttatttgagaacggggaaaagactacccaaaagacttggagaaatagtcttaactttcaaagacgttcctgttcatttgtttgaatcaacaataataaatccggcaccaaatcaacttgttcttagaattcagccaaatgaaggtgctacttttaaattcgaggtgaagtcacctggttctggaatgaaatcccagaccctgt

SEQ ID NO: 208140 - DNA, 763 bp, Unknown
  Bacterial polypeptide expressing nucleotide sequence isolated from the Sargasso Sea
ctggccaccgccgaggcgctcaacgcctgcctgctcaaagtgatgagcgagaagcagatctaccgcattgaccattacctgggcaaggagacggtgcagaacatcctggtcagccgtttctccaacgtgctgttcgaagcgttctggaacaaccactacatcgatcacgtgcaaattactgccgctgaaaccgtcggcgttgaaacccggggcaacttcttcgagaagaccggcacactgcgggacatggtgcccaaccatctgttccaactgctggcaatggtcgccatggagccgccggcagcctttggtgccgacgcggttaggggtgagaaggccaaagtggtcggtgcgatccgcccctggtcgctggaagatgcgcgggccaactccgtgcgcggccaatacaccgccggagaaatcgccggcaagccattgcccggctatcgcgaagaagccaacgtcgcgccggacagcagcaccgagacgttcgtcgcgctaaaagtgatgattgataactggcgttgggtcggtgtgccgttttacctgcgtaccggcaagcgcatgagcatccgcgacaccgagatcgtgatctgcttcaagcaggcgccttatgcacaatttcgcgataccgaagtcgatgaactcaagcccacttacctgaaaatccagatccagcctaacgaaggcatgtggttcgacctgttggccaagcagcctgggccgaccctggagatggccaatatcgaattgggcttttgac

SEQ ID NO: 208141 - DNA, 789 bp, Unknown
  Bacterial polypeptide expressing nucleotide sequence isolated from the Sargasso Sea
gttgcagaatacttcgacgaaaagcaaatttaccgcattgaccattaccttggtaaagagacagtactaaacctcgtatcactgcgttttgccaattctatttttgctactaactgggaccacaactgcattgaccatgttcaaatctcagttgcagagtcagtgggtattgaagggcgttggggttactttgacgacgcgggtcaaatgcgagatatggtgcaaaaccacttgctacaaattttaagtttggtagcgatggagcctccgacaacgctcgacgctgacagcattcgtgacgaaaaattgaaagtgcttaaagcgcttcgtccgattaactcgtttaatattaatgacagcacagtacgcggtcagtatacctctggtttcgtgaagggcgaagaagtgcctgggtaccttgaagaagaaggtgctaatacgcaaagtaaaaccgaaacctttgttgctattaaagcggaaattgacaactggcgttgggctggtgtgccgttctacctacgcacaggcaagcgcatgccaactaaggtgagtgaagttgttatctacttcaagcgtcagccgcacaacttattcggtgacagcttcaagaatcttccgcctaacaagctggttattcgtctgcagccagacgaaggtgtagaaatcactgtaatgaacaaagtgcctggcttaactagctctggttctatggatctacaaaaatcgaagcttaacttaagcttctctgaagcgtttgccgatgagcgtattcctgacgcatacgaaaaa

SEQ ID NO: 208142 - DNA, 961 bp, Unknown
  Bacterial polypeptide expressing nucleotide sequence isolated from the Sargasso Sea
tctggcgttacgtaaactttttcccgcactgtatgaaatggaacgcaccgggcgtttcgatgatgagacccgtatctttggcgcatcgcgcagcgaacatagcgacgaagatttccgggccaagctggaagaagccggaaagaaattcattcccaaaggcgaattcgaacccgagacgtgggcgaagttcgccagccgcatcgcctatgtgcaggtttctgccggcgatgaaagcgggttcaaggtcctgtatgaaaagctgtccgatcagcctggtcgtgatcgcgtcttttatttctcgaccagtccgtcgctgtttgccgacatggcctttaatctgaaaaaggccggtctggtgacgccgaattcccgtgtcgtgcttgaaaagccgctgggccacgatcttgacagttgccgcgaaatcaacggccagatcggtgaagtgttcgaggaaaaccagattttccgtatcgaccactatcttggcaaggaaacggtgcagaaccttatgatcctgcgctttgccaacgcgatgttcgagccgctgtggaacagcgcgcatatcgatcacgttcagatcacggtcggcgaggaagtcggggttgaaggccgctggtcctattacgacgatgccggtgcgatgcgcgacatggtgcagaaccatatgttgcagcttctctgccttgtcgcgatggagccgccctatgtccttgatcaggacgcggtccgcgatgaaaaggtcaaggtgctgaaagcccttcagccgatcaacgatagcaatatcgacagttccactgtgcgcggccagtaccgcaatggcgctgtgggtggcaaggaagtgccgggttacctcgaagaggaaggggccaacaccgacagcaccacagaaacctttgtcgccatccgggcagagcttgataactggcgctggtcgggtgttccgttctatctgcgcacgggc

SEQ ID NO: 208143 - DNA, 873 bp, Unknown
  Bacterial polypeptide expressing nucleotide sequence isolated from the Sargasso Sea
ctcgctctactacgatcgccaccttccggagaacgtgctggtgtttggctacgcgcggagcaagatgaccaacgaggagttcaaggagaagatccgggagtccctcccgtgccgtatcagcgccgcgggcaactgcgacgacgtcatcgagtccttcctcgaacggttgcactacgtctcggggctctacgacgacccgaaggatttcaaggcgctggaccaggcgatggcggcggaggaggccaagatggggaagaaggccatgcggatcttttacctctccatcccgccctccatcttcgtgcccgtcgcgcagaacgcggcgagggagtgcagctcctccccgggtgagacgagggtgatcgtcgagaagccgttcgggcgggatctggaatcgtccagggagctcacctcgagcctcgcggaggttctcgccgaggagaacacctaccgcatcgaccactacctcggcaaggagctcatcgagaacatcaccgtcctccgcttcagcaacatcatgttccaacccctctggtcacgggcgtacatccgcaacgtgcagatttgcttctccgagaactttggcaccgagggccgcggcgggtactttgacaactacggcatcattcgcgacgtcatgcagaaccacctgctgcaggtcatggcgctgttcgccatggaggaacccgcgagtctggacgccgaggacatccgcgacgagaaggtcaaggtgattcgatgcatccgacccatcgagatggacaacgtcgtgctgggtcagtacaagggcaggcgagacggggacaagcagctccccgcgtacctcgacgacgagaccgtgccccccgggagtaagtgccccacgttcgcggc

SEQ ID NO: 208144 - DNA, 885 bp, Unknown
  Bacterial polypeptide expressing nucleotide sequence isolated from the Sargasso Sea
attggttaaaattttaaaagaaaaatttgacccaaatagacccataatattttacttagcaatagcatctagcttatttggtaatagctgtagattcattagagactctggtttaaatgttcctcagagcaggcttgtaattgaaaaaccaattggccaaaataaatcaacagccatacaaattaacaatgaaatatcaagcgtttttaaagaaagtcaaatttatagaatagatcattacttaggaaaggaaacagttcaaaatttaatggctttaaggtttgctaatacattttttgaaaatcaatggaacaataaaaatgtagacaatgttcaaattacagtttctgagacagttggtgttgaagatagaatttcttattataatgaatatggtgcaataagggacatgttacaaaatcatctcttacaacttgtatgtttgatagctatggaaccgccttcattttatgaagcagatcaacttagagacgaaaaattaagagttttgaaagctctcaaaccaataactgaagaagaaattcagacaggtcaatatagaagtttttcagatgaattaggagaaaactcaaatacagaaacttttgtatctctaaaagttgtaataaataattggagatgggctggagttccattttacatcagaacgggtaaaaaattatcaactagagcaagtgaaataattattacctttaaaaacaaaccacatgatattttttccaaatttacagcagatgctcatgacgaacccaatagacttataataagagtacagccagaagaaggcctcaaactaaaattaacttcaaaagcacctggcccaggtggcatgcgcttttttccttcagaactcaatttgtcctt

SEQ ID NO: 208145 - DNA, 927 bp, Unknown
  Bacterial polypeptide expressing nucleotide sequence isolated from the Sargasso Sea
cttgttgtcgaaaagccgctcggccatgatcgtgcctcatcgcgggaaatcaatgatgaattgctcgcagcattcaaggaagatcagatttaccggattgaccattatcttggtaaggaaaccgttcagaacctgatggccctgcgttttgccaatgtgatttttgaagcgctctggaataaccgttacatagacaatatccagatcacagtggcggaaaccttgggggtaggtagccgcgctgcctattacgacaattatggtgcaatcagagacatgctccagaaccaccttttgcaattgctttgtttggtagcgatggaacctccggcacgatttaatgccgatcaggttcgtaatgaaaaactgcgtgtgttgcaggcgcttcgccctgtgaacgcagaaaactgcgtcctcggccaatatcaggaatatccccacgaagttggcgcttcaacatcgacagaaacctatgttgcgttaaaagtgctgattgataactggcgttgggctggcgtgcctttttatatccggactgggaaaaagctcaaaacacgcgcctcagaaattgttattacattcaaaaatcgaccccatgatatctttgctggtgatgatgttacagataaagaggtcgagatccccaatcgcctcatcatcagggtacaaccacatgaagggcttaggttgctgttgacatctaaagagccggggccaggaggtatgcggttatttccctctgaattgaatctcagttttggagagacattcaatgaacgtctgcccgatgcatatgagcgcttgctgatggatattgcacgcggcaatcaaaccctgttcatgcgccttgatgaggtgctggccgcatgggattttattgatcctcttgtcgatatggccgccaaacgcttcccgctgttgtataat

SEQ ID NO: 208146 - DNA, 859 bp, Unknown
  Bacterial polypeptide expressing nucleotide sequence isolated from the Sargasso Sea
gaatttggaatagttggttgtgcgagaagaccttggactgataatgagtttagagaaaagatgaaagtaaagctatcaaatcaaatatctggaaaagaaagggagtgggagcatttttctaattatcttttctatgaaccagttgacttgcaacaaagtgatcatgttgtaaggctttctaaaagattaaatgaaattgataaaacacaagctactcatgggaatagaacattttatttatcagtatctccaaatttctatgcgagtggatgtaaagctcttaaagcctctggtcttttagatgaccctaagaaaagtcgtttagtaattgaaaaaccttttggaagagattattcaagtgcaaaaaaattgaataaggtcgttcaaagttgtgctgaagaaagtcagatttataggattgatcattatttaggtaaagagacagttcaaaatattcttgttttgagatttgctaatactatttttgaaccaatctggaatagaaattatatatcaaatgttcaaattacttcatctgaaacagttggtgttgaagatagagcaggttattacgaaagctctggtgctttaagagatatgcttcaaaatcatatgactcaaatgcttgctgttactgctatggaacctcctggaaagtttgagccagaagcaataagagatgaaaaagctaaggttcttcaagcttcaaaacttgctgacgaaaatgaaccttggaattgttgcataagaggtcaatatggagcgggagggaatatctcaaatcaagtcaaaggatacaggcgagaagatggtgttaatagcaatagcacaacagaaacttatattgcgacaaaagttt

SEQ ID NO: 208147 - DNA, 1474 bp, Unknown
  Bacterial polypeptide expressing nucleotide sequence isolated from the Sargasso Sea
atgggcaaaacaacatcaggcgccaaagcttgtgacttcgtactctttggtactaaaggcgacttggcacgacgcaagttgttaccttctttataccagctagataaagctgaacttctggataaaaacaccaaagtcattggggttgctaaagatgagttcagtcaggatgaatttagagaactcgtcatccttgcgttaaaaaccttcgtaaaagaagccctctgtgaagagactgtccaacgcttcttgtcccgctgccattatgtcggcacgaatttcaccgaatctgcaggctacagcgccttccatgaattgctcaaaccagaagagcgcgtcatggtcagttactttgccaccccacctgcgatttttggcgatatctgtcgctgtttacacgaacaaaatcttatccatagtgattctcgcgtggtactcgaaaagcccattggctccgatctcgcttcttcccgcgtgattaacgaccaagtttctgcctacttcaaagaaaaccaagtttatcgtatcgaccactacttaggtaaagagacggtacaaaatctgattgcactgcgtttcgctaactcgttattcgcgtctaagtgggacaaccggaccattgaccatgtccagatcaccgttgctgaagaagtggggatcgaaggccgctggggttacttcgataaagccggtcagatgcgcgacatgatccaaaaccacttactgcaagtgttgacactggttgccatggatccaccagttaacttagatgccgacagcattcgcgatgaaaaagtgaaagtactgaagtcgctgcgcccaatcaatgccgacaatgtgtatgaaaatactgtccgtggtcagtacagtgcgggcttcctcaagggcagtccagtgccaggctatttagaggaagagggcgccaaccttcagtcccacaccgaaacctttgtggcgctgcgtgtcgatatcgacaactggcgctgggctggcgtgccattttatctgcgtagcggtaaacgcatgccgttcaagagctctgaaattgtggtgtattttaaaaacccaccacacaacttgtatcgctcaagctaccgtaacttgccacctaacaagttaaccatccgtctgcaaccacacgaaggggtcgagatccagatgatgaacaaggtgccggggctagagcagaaacaacgtttacaaacaactaaactcgacttgagtttctcggatacctttaaaaacgagcgtatcgccgatgcttacgagcgtctgttgctcgaagccatgctcggtaaccaagccctgttcgttcgccgtgacgaagtggaacaagcttggacttgggtggatggcatcatccaatcatgggaacaaagtaacgagaaaccgaaaccttatcctgcgggcacctggggacctgtagcgtcggtcgcgctgatcactaaagacggccgttcgtgggatgaatagg

SEQ ID NO: 208148 - DNA, 1474 bp, Unknown
  Bacterial polypeptide expressing nucleotide sequence isolated from the Sargasso Sea
aatgggcaaaacatcatcaggcgccaaagcttgtgacttcgtactctttggtactaaaggcgacttggcaagacgcaagttgttaccttctttataccagttagataaggctgaacttctcgacaaagatactaaggtgatcggtgtcgcaaaagatgaatttagtcaggatgagtttagagagctagtcattcttgcgttaaacaccttcgtcaaagaacccctctgcgaagaaacgcttaaccgattcgtgtcccgttgtcattatgtcggcactaattttactgattcagcaggttacagcgccttccatgaattgctcaaaccagaagagcgtgtcatggtcagttactttgccactccaccgtcgatttttggggatatctgccgctgtttacatgaacaaaatctgatccacagcgactcgcgcgtcgttctcgaaaaacccattggctctgatctcgcatcttcccgtgtgattaacgatcaagtttctgcctactttaaagaaagccaagtctaccgtatcgaccattatctcggtaaagagaccgttcaaaacttaattgcgctgcgttttgctaactccttatttgcctctaaatgggataaccggaccattgaccatgtccagatcacggttgccgaagaagtgggtattgaaggccgttggggttacttcgataaagctggtcaaatgcgcgatatgatccaaaaccacttactgcaagtgttgacgctggttgcgatggatccacctgttaacttagatgctgacagtatccgcgatgaaaaggtgaaagtactgaagtcgctgcggccgattaatgctgacaatgtgtatgaaaacaccgtccgtggtcagtacagtgctggcttcctcaagggcagtccagtgcctggttatttagaggaagaaggggcgaacgtacactcgcatactgaaacctttgtggcgctgcgtgtcgacattgataactggcgttgggctggcgtgccgttctatctgcgcagcggtaagcgcatgccgtttaagagttctgaaattgtggtgtattttaaaaatccaccgcataacttgtatcgctctagctaccgtaacttgccacctaacaagttaaccatccgtctgcaaccacacgaaggggttgagatccagatgatgaacaaggtgccagggttagagcaaaaacaacgtctgcaaaccaccaaactcgacttgagtttctcggatactttcaaaaacgagcgcattgccgatgcctacgagcgtttattgcttgaagccatgctcggtaatcaagccttgttcgttcgccgagacgaagtggagcaagcttggacatgggttgatggcatcatccaagcatgggaacagagcaatgaaaaaccgaaaccttatcctgcgggcacttggggccccgtggcttccgtcgcgctgatcaccaaagacggtcgttcgtgggatgaatag

SEQ ID NO: 208149 - DNA, 1413 bp, Unknown
  Bacterial polypeptide expressing nucleotide sequence isolated from the Sargasso Sea
catgacaacaacagcaccactaaacaaagcctgtgatctgattctctttggcaccaaaggcgacttagctcgtcgtaagttattgccagcactctatcaattggaaaaatctggcctgttgcatgccgacagcaaagtcataggcgtggcccgtgacgaattaagcctggatggctataaagagctggttgaaaccaacttacagaaatttatcaaagaacctctggacgctgatgttttagttcgtctgaaggctaaattagagtacgttcaggtcgacctgaccaaagaagatgcatataaagccttaaaacaggtgaccgatcctaaaaaacgtattcctgtcagttattttgctactgctccttctttgtttggcaatatttgtaaaggcttgtctattgctggtttgtcggcagagccggcccgtgtcgtactggaaaaacctattggtcacgatttagcctcatctaaagtgatcaacgatgaagtggctaagtattttgctgaatgccaaatctaccgcatcgaccactatttaggtaaagagacagttctaaacctgttagctttgcgttttgccaactccatttttgccgccaactgggaccacaatgccattgaccatgtgcagattactgtggccgaagaagttggggtagaagggcgttggggttactacgatgacgctggtcaaatgcgcgacatggtacaaaaccacttattacaggtgttgtcgctgattgcgatggagccaccagctcgtctggatgccgacagtattcgtgatgagaagttaaaagtactcaaagctctgcgccctattaatgtatcgaacgtgcaagaaaagactgtacgtggccaatacgctggtggttatgtcgctggtactcctgtgcctggttatctggacgaagaagatgcgcgtccaaacagcaaaaccgaaacttttgtcgctatcaaagtggatatcgacaactggcgctgggctggtgtgccgttctatttaagaacaggcaaacgtatgccgaaaaaaatgagcgaactcgtcatttgctttaagccgcagccacacaatattttctttgaaacttataaacagttgccagccaataagctgatcatccgtttacagccagacgaaggcgtagaaattcagatcatgaacaaaattcctggtctgggcgaaagcatgcagctgcaacaaaccaaactggacttaagtttcgatgaaacctttaagtcgcagcgtatcgccgatgcctatgagcgtttattactggaagccatgttaggcaaccagtatctgttcgtgcgccgtgatgaagttgaacaggcctggaaatgggtcgacggtattttggatgcgtggaaagtgaccaacgagccgccaaaaccttatcaggccggtac

SEQ ID NO: 208150 - DNA, 872 bp, Unknown
  Bacterial polypeptide expressing nucleotide sequence isolated from the Sargasso Sea
catggttgccacgatgacgaaccccctcagggttggactgcgtcaggagcgcgtgatcgcgccgcagtgtctggtgatcttcggcgccagcggtgatctgacccaccggaaactggtgccagccctgtttgagctgttcaagcaacggcgtctacccagtgagttcgccctgctgggttgtgcgcgacgaccgtggagtgacaaggagttccgcggaaagatggcggaggcactggcaagcacgatcgaggacgatccccaggcctgggaacagttcgtgggcaaattgttctacgaacccgttgaccttcaacaaccgcaggatgtggttcggctgggcacacggctggagcagatcgatcaacagtgcgccacccgcggcaaccgcaccttttatctctccgtctcccccaagttctatggcagtggctgccgttcacttgccgacgctggcctgttgaaggaccccaaacgcagccgagtggtgatcgagaaacccttcggacgcgactacggcagtgcccaggccctcaatcgcgtggtgcaggcctgcggtcaggagaaccagatctttcgcatcgaccattacctgggcaaggaaaccgtccagaacatcatggttctgcgctttgccaacacgatcttcgagccgatctggaaccgcaattacatctcaagtgttcagatcaccgccgctgaaacggttggcgtggaggaaagggccgggtactacgaatcggccggtgccctgcgggacatggtgcagaaccacctgacccagatgctggcgatcaccgccatggaacctcccgggcgctttgacccggaggccatccgcaacgaaaaggccaaggtgctccaggctgcccgcc

SEQ ID NO: 208151 - DNA, 1525 bp, Unknown
  Bacterial polypeptide expressing nucleotide sequence isolated from the Sargasso Sea
atgccttcaactttaagtaatcctctaagattaggtttacggcaggaaagagtcatatctccacaatccttagtaatatttggtgctagtggagaccttactcatagaaaattaataccagccttatttgaactctatttgcaaagaagaattcctagtgaatttggaatagttggttgtgcgagaagaccttggactgataatgagtttagagaaaagatgaaagtaaagctatcaaatcaaatatctggtaaagaaagggagtgggaacaattttctaattatcttttctatgaaccagttgacttacaacaaagtgatcatgtcgtaaggctttctagaagattaaatgaaattgataaaacacaagctactcatgggaatagaacattttatttatcagtatctccgaatttctatgcaagtggatgtaaagctcttaaagcagctggccttttagatgaccctaagaaaagtcgtttagtgattgaaaaaccttttggaagagattattcaagtgcaaaaaaattgaataagatcgttcaaagttgcgctgaagaaagtcagatttataggattgatcattatttaggtaaagagacagttcagaatattcttgttttgaggtttgctaatactatttttgaaccaatctggaacagaaattatatatcaagtgttcaaattacttcatctgaaacagtgggtgttgaagatagagcaggttattacgaaagctctggtgctttaagggatatgcttcaaaatcatatgactcaaatgcttgctgttactgctatggaacctcctggaaagtttgaaccagaagcaataagaaatgaaaaagctaaggttcttcaagcttcaaaacttgctgacgaaaatgaaccgtggaattgttgcataagaggtcaatatggagagggaggaaatatttcaaatcgactcaaaggatataggcaggaagatggtgttaattgtaatagcacaacagaaacttatattgcgacaaaagttttcgttgataactggcgttggcaaggggttcctttttatttgagaacaggtaaaagactacctaaaagacttggagaaatagtcttgacttttaaagacgttcctgttcatttatttgaatcaacaataataaatcctgccccaaatcaacttatccttagaattcagccaaatgaaggtgctactttcaaatttgaggtaaaatctcctggttctggaatgaaatcaagacctgttgagatggaattttcttatgatgaatcatttggagaaccctcagatgaaggctatgtaagattattagctgatgcaatgctttctgacccaaccttatttactcgaagtgatgaagtagaagcagcctggaaactttatacgccattaattgaattgatggataattctccttggaagttacctatttataattatgaatctatgacatggggacctcctgagtctgatcaattaatttcaaaagataatattttctggcgtagaccttaaa

SEQ ID NO: 208152 - DNA, 869 bp, Unknown
  Bacterial polypeptide expressing nucleotide sequence isolated from the Sargasso Sea
catgcaaaccgattcaagcttcaccttcgttctgttcggcggaaccggcgatctgtcgatgcgcaagatcctgccggcactgtttgaagcgcaccgtgcaggtggcatgctggccgaaagtggcaagatcttcgcggtggcgcggcatgtggcggatcgcgccggctacctggaatgggtcaatgagcacgtcaagccgcacgtgtcgaagaacggtctggatgaaaccgcatgggcgagctttctcgaccgtatcgagttcgtgaagatcgacctgggcaagcccgaagacttcgtgctgctgcgcgacgccataagcggcctgcccggcattcgcgtgttctatctggcaacgggtccgtcgctgttcgtaccgatctgccacgcgctggcgtcggtggggctcaacgaaaattcgcgcatcgtgctggaaaagccgctcggctacgacctcaagtcgtccaacgcaattaatgatgcagtcggtgaaatcttcgccgaagaacagatctaccggatcgaccactacctcggtaaggagccggtgcagaacctgctcgcgctgcgcttcggcaatgtgctgttcgaaccgttgtggcgtcgcgaatgggtagagagcattcagattacgattgcggaagaactcggcgtggaagcacgcggcgacttctacgacaacaccggcgcattgcgcgacatggtgcagaaccacttgctgcaactgctttccatcgtcgcgatggaaccgccgcattcgatggactccgactcggtccgtgacgaaaagctacgcgtgctgcgcgcgttgaagccgatcgatccgcgcgatatcggcaaggtcgcggtgcgcggccagtatcatgcgggtg

SEQ ID NO: 208153 - DNA, 1450 bp, Unknown
  Bacterial polypeptide expressing nucleotide sequence isolated from the Sargasso Sea
aatggtctcacgtgtaatcccagttaaagcctttgatcttgtggtttttggtggaactggtgaccttgccagaagaaaaattttgccaagtctttttcgaagatttgttgcgggtcagatgccagataatgcttatgttataggggttgcacgatcagaatttgatactaatggctaccaagatttggttattgcggcactgcaagagtttgagccagagctgtcggcgtcaggtgaattgaaaagttttatcaaacaaatccaatatgtacagatagatgctcaaggtgaccttggttggtcagatttagcgggaatagttcgaaaagatgcaatacaagctttttatttttcagtatcgccgtccttgtttggtcctttagctgaaaagttgcatcaatattcaatttcatccaaaagttcacgaatagtattagaaaaaccctttggcagagatttaaactcagctcgtgctttaaatgcggtgctaaaagaacattttagcgaggagcaaatatacagaattgatcactacctaggcaaagaaacagttcaaaacctgatggccgttcgttttggaaatatgttatttgaaccgctgtggaattctcagtatatcgatcatattcaagtcactgttgctgagtcagtaggggtagaggggcgtggtagttattatgaccaagctggtgccatgcgggatatggtccagaaccaccttatgcaattgctttgtttaattgcgatggagccaccagctaagttttcaccagatgcagtgcgtgatgaaaagttgaaagttatacgtgctttagatccaattaattcaaaagatattgttcgtgggcaatatagtactgtgggcacagaaaagggttatcttgaggcggtagacaaccctagttcaaaaacagaaagttttattgcactgaaagttcaaatcagcaattggcgttgggctggtactcctttttatctaagaactggtaaaaaattaaaagcaagatgttctgaaatagcagtagttttcaaagaaacaccccattcaatttttggcccagatgcgggaagtcatagaaatgcacttgttatccggttgcaaccagatgaagggatgacgatggatctcactataaaagaaccgggacctggtggtatgcgactgattgatgttcctttggatatgactttcgctgaggctctcggtcctgagattggtgcagttccagatgcatacgaaaggcttattatggatgttatccgaggcaaccaaacgctattcatgcgaggcgatgaggttgaggcagcatggtcttggacagacccagtgattaatcaatgggtaagtaaaggcacttcacctgtctcttacgatgctggaagctctggccctgaagactctatgatgctcatgcatagagatggaagaaaatggcgtgaaatatcatga

SEQ ID NO: 208154 - DNA, 1000 bp, Unknown
  Bacterial polypeptide expressing nucleotide sequence isolated from the Sargasso Sea
ctcgctggaatcgccccgcgcgatcacgcccgccatcggcgccgtgttcgacgaggcgcgggtgtttcgcatcgaccataatctggcaaaggaaaccgtgcagaacctcatggcgctgcgcttcgccaacgccttgttcgaaccggtgtggcgtgccgggcatatcgatcacgtgcagatcagcgtctgtgaaacccttggcgtggaaaaccgcggcgcctactacgaccatgccggcgccatgcgcgacatgattcagaaccacctgctgcagctgctctgcctggtggccatggaagcgccggtgcgcttcgacgccgaggcggtgcgcaacgagaaggtgaagatcctcgaagcgctgaaacccatctccggcctcgacgtgcaggacaagaccgtgcgcggccagtacacagccggcaagatcggcggccatgacgtgcccgcctactacttcgagaagaacgtcgacaacgacagcgacaccgaaaccttcgtcgccgtgcaggtggaaatcgacaactggcgctgggcaggcgtgcccttctacctgcgcaccggcaagcgcctggcgaagaaaacctcggaaatcctcatccagttcaagccggtgccgcatcgtctgttccatgagggcgaagccaaccagttgctgatccgcctgcagccggaagagcgcatcagcctgcagctgatggccaagaaccccggcaagggcatgcacctcaaacccgtggagctggacctcaatctggccaatgccttcaaccagcagcgccgctgggacgcctacgaacgtctgctgctggacgtgatcgatggtgactcgacgctattcatgcgtcgcgatgaagtggaagcggcctggcagtgggtcgatcccatcctgcagggctggcaccagcactaccagagcccgcgcccctacccggccggcagcgatgggccggagcaactgcaacacctactggagcgccacgggcgccagtgggccgaatga

SEQ ID NO: 208155 - DNA, 814 bp, Unknown
  Bacterial polypeptide expressing nucleotide sequence isolated from the Sargasso Sea
agtatccgaaactgttggagttggagatcgaggtgaatattatgaccactcgggcgcaatgagagacatggttcaaaatcacctgatgcaattattatgcttaattgctatggagcctcctgcgcgcttcgaacctgactctgtgcgagatgaaaaattaaaggtaattagagcacttgatccggtggctccacatcacatcgtgcgaggtcagtatggaccaggcgttgaccacccagattatcggacaggtgtagataataaaacctccaaaactgaaagtttcgtagcccttaaggttaacataagtaattatcgctgggctggcgtacctttttatctgcgtactggtaaacgacttaaagcacggacatcggaaatagctgttatatttaaggaaaaacctcacagtatttttggcccagaagccggaaaccatcaaaatgctcttatcattaggcttcagcctgacgaaggaattacgatggatgtaaccataaaagagccgggtccgggtggtatgcgtttgattgatgttccattggatatgacattttctgaaaccctgggaattgaagaaaatacagtgccggacgcctatgaaagattgataatggacgtcattcgaggaaatcaaacgctatttatgcgaggagacgaggttgaggcggcgtgggaatggacggacccgataattaatggatggattgacagaaacgacgttccaaaaccttatgatagtcgaagttctggtccgcaggatagcctgacacttttggagcgtgaaggccgtaagtggcgcgaaataccttga

SEQ ID NO: 208156 - DNA, 874 bp, Unknown
  Bacterial polypeptide expressing nucleotide sequence isolated from the Sargasso Sea
gcctttgtagactggcaggttgatttgctgaacgaacataccgatctgaacgctggtgtggtcattgttcgtcctatcgaaagtaccttcccgccatctctgagtacgcaggatggcctctatactactatcattcgtggtttgaatgagaagggcgaggctgtcagcgatgctcgtctaattcgttcagttaaccgtgaaatcagcgtctatagcgaatacgatgtgttcctgaagctggcacataatcctgacatgcgttttgtgttctctaacaccacggaagcaggtatcagttaccacgcgggcgataagtttgacgacgcgccagcggtaagttatccggctaaactgacgcgtctgctgttcgaacgcttcagctattttaacggcgcattggataaaggctggattatcatcccgtgcgaactgattgattataacggtgatgcgctgcgtgaactggttctgcgctacgctcaggaatggatgctgccggaagcgtttattcagtggctggatcaggccaatgcattttgctctacgctggtggaccgtattgttaccggctatccgcgtgatgaggtagctaagctcgaagctgaactgggctatcatgacgctttcctcgacacggcagaacacttctatctgtttgtcattcaggggccgaagtcattagccgcagaactacgtctggataagtatccgctgaatgtcctgattgtggatgacatcaaaccgtacaaagagcgcaaagtggcgattctcaacggtgctcacactgcgctggttcctgttgcctggcaggcaggattggacaccgtgggcgaggcgatgaatgacgcagaaatttgcgccttcgtgaaaaagc

SEQ ID NO: 208157 - DNA, 172 bp, Unknown
  Bacterial polypeptide expressing nucleotide sequence isolated from the Sargasso Sea
aatgcagatttcgcttcaggtgcggaagttgtccgagattatcaatacggaccacgagaacgtcaagtacctcccggacatcaagctgccggcgaacgtgaaggcggtccccgacctcaagacggccgtcgagggggcgcacctgctcgtctgggtcttcttcgaggggtag

SEQ ID NO: 208158 - DNA, 355 bp, Unknown
  Bacterial polypeptide expressing nucleotide sequence isolated from the Sargasso Sea
atgccagagaaggtcgcgcttgtgggctccggcaactggggatcgtcgatcgccacgaagatgggcgtcaacaccgctgcgtgcgctgacttcgatgacgagatcatgatgtgggtgttcgaggagtacgtcaagcaggaggatggcaagtgggtgcgcccggcgcgtggcgccaagccgcccgagggaaagacctgggtggacgagggctattctccgctgacggccgtcatcaacaagctccacgagaacgtacgcaaagagcccctcccgaggagtcgcctgcgccgtcggatgtgcatgcgtccgtcacccggcgccgcgcgcgcgctccctcgctggctggcggcgtgac

SEQ ID NO: 208159 - DNA, 1063 bp, Unknown
  Bacterial polypeptide expressing nucleotide sequence isolated from the Sargasso Sea
atgaaaacttttgattatttaattattggtgctggatcggctggatgtgttcttgctaatagactagctactaataataaaagcatagctattttcgagtcaggaggatcaagtaatacttggaaagtagatatgccaagcgcacttttatacactatgcatgatccaaaaatgaattggaaatactattctgagccagaaccttacttaaataatagaagaatattttgccctcggggaaaaatgataggaggatgttcttcacataatggcatggtttttgttagaggacaccccaaagactatgatagatgggcttcatatggattgaaaaactggagttatgaaaaagttttaccatattttaaaaaattagaaacgtggtcaggtggagaaaatcaatacagaggtgctaatggccctttgaaagtaaatagatcaaaaattaatgataaatttccattatttcaagcagttcttaattctgcaagtgaggctggatttgaactatttgaagactcaaatggatataatcaagaaggttttggcacctttgatgttaccattaataaaggaaaacgtgttggagtaggaaaagcatatttaggtgaaataaaaaacaaatctaatgtaaaaatatttaccaattcaaatgttacaaagattttatttaaagataaggtagctatcggtatagaggttagtattaataataaaaaagaaaaatattttactaataaagaggttttattatctgctggtgcaattaattcatcaaaaatattattattatcaggcttaggtgagcccaaagagataaaaaaatttgatattgaagttatccatgatttgcctggagtaggacaaaatctccaagatcatttagaaatatatattcagcataaatcaaaaaaaagagaaactttgtatgatttatctacaaattatatatctcaaggaatagaaggtttgaaatggttcttatttaaaaaaggaaagttagcaaattctcatcttgaattaggaggctttgttaaaactaatgagaaatatctcatccaaa

SEQ ID NO: 208160 - DNA, 322 bp, Unknown
  Bacterial polypeptide expressing nucleotide sequence isolated from the Sargasso Sea
catggactcgaagaccatcaaggcaaatgtggactcctacatgacgaagctggcgaagaccgcgcagatcgagaagctgcaagtgtgcatcgtcggatccgggaactggggctcgacggcggcgaagatcgccggcgagaacatcctcgccgggggcgcggccgcgaagtgcttccaggaggaggtgcgcatgtgggtgttcgaggaggaggtgaagcaaaaagacggctccgtgcgcagcaggaacaggaacgatccctacccggggctcgcgagccccgatcaaatgcaaatttgtcggggcttaagtttttggctgtaa

SEQ ID NO: 208161 - DNA, 298 bp, Unknown
  Bacterial polypeptide expressing nucleotide sequence isolated from the Sargasso Sea
actgggatcagggaactggggaactgccgtggcgcggctcgtggcggagaacgtggcgcgccaaccccaattgtttacgtcgcgtgtgaaaatgtgggtggtggaggaaatcattgaggggcggaaactcacccatctgataaatttcaatcatgaaaacgtcaaatatcttccggagatcaaacttcctgagaatcttgtcgcggtccccgacttggtagacgtggtttctaacgcgacagtgttgatatttgtcattccgcaccaattcttggagagactcttaccaaccattaac

SEQ ID NO: 208162 - DNA, 634 bp, Unknown
  Bacterial polypeptide expressing nucleotide sequence isolated from the Sargasso Sea
atgagtaaaaaaaatatatttatttttcctggggatgaaataggtcctgagattacaactgaggctataaaaattatagatttccttaatgaatctaaagcgacggatattcattatgagtttggcgatataggaggggcttctcttgataagtataacaaaccaataacggatgaaactttagaaaaagcacgtaaatcggatgcagttttactagcctcagttggtacacccaagtatgacaataatactcgcgaacttaaacctgagcatggattacttgtattaagaaaacatctaaatctatatattaatattaggccgatatttgtgtttaatacattgtcagagttctcatctcttaaatctgagctaatcaatgatttagatttagtgataattagagagcttattggcgatgtttattttggagagcccagaggttttaaagatgtaaatggagataaagttggatacaacactatgcaatattcagaatctgaggttcaaaggattacaaaatttgcaattgatatcgcacttaaaagaaataaacatattacttctgttgataaagctaacgtacttgaatgttctcatttatggagacagactgttgatagagtaatacaag

SEQ ID NO: 208163 - DNA, 127 bp, Unknown
  Bacterial polypeptide expressing nucleotide sequence isolated from the Sargasso Sea
atggcccagcaccgcgtcgtcctgcttcctggagatggcattggcccggagatcacggctgtggcgcgccagttgctcgaggcggttagccagcggcatggttttgaactgtgttttgacgagcagt

SEQ ID NO: 208164 - DNA, 817 bp, Unknown
  Bacterial polypeptide expressing nucleotide sequence isolated from the Sargasso Sea
atgaaagaatacaaaatcgcctcaattgctggagatggtattggaaaagaggttgttccagaggctttaaaaataattaaagaagtagcaaatcaacatcaatttaaattaatgatagatgaatttgatttttcatcatgcgattattatgaaaagcacggaaaaatgctacctgatgattggaaacaacaaattggtaatcatgatgcgatattttttggtgcagtaggtatgccagataaatatccagatcatattactttatggggctccctacttcagtttagaagagaatttgatcaatttataaatttaaggccagtaaaattatttgaaggtgtaaatgcaccattagcaaataaaaaacctggcgacatagatatgatgatagtgcgtgaaaacactgagggcgaatattcttcggtaggtggaaaaatgtatcaaaatactgaaagagaaattgttatacaagaaactataatgtctaaacatggaatagatagagtgcaaaaatttgcatttgaattagcaaaaacaagagatagaaaaaaattaactaatgccacaaaatcaaatggtatttctataacaatgccatactgggaccaaagattttatgaaaataaaaaagatttccctgagattaaaacagatcagtttcatatcgatattttagctgcaagatttgttttaacgccagagtggtttgatgttgttgtagcatcaaatttatttggagatattttatccgatttgggtccagcatgtacgggaacaattggtatagctccatcaggaaatattaacccaacaaata

SEQ ID NO: 208165 - DNA, 820 bp, Unknown
  Bacterial polypeptide expressing nucleotide sequence isolated from the Sargasso Sea
aatgaaagagtataaaattgcatccattgcaggggatggaattggcaaagaagtagttccagaagctcaaaaaattttaaaagaagttgccaatcaacatcaatttaaattacgaattgatgaatttgatttttcatcgtgtgattattatgaaaaacacggaaaaatgctgcctgatgattggaaggataaaatagggagtcatgatgctatattttttggcgctgttggaatgccagatcgatacccagatcatgttactttatggggatcactacttcagtttagaagagaatttgatcaatttataaatctaagaccagtaaaattatttgaaggtgtaaatgccccactagctaacaagaaacccggcgatattgatatgatgatagttcgagaaaatacagagggagagtattcttcagttggtggaaagatgtatcaaaacactgaaagagaaattgtaattcaagaaactattatgtcaaaacatgggatagacagagtacaaaagtttgcatttgaattagcaaaaaaacgtaaaagaaaaaaattaactaatgctactaaatctaatggtatatcaattactatgccttactgggatgaaagatttaatgaaaacaagaaaagctatcctgaaattgaaactgatcaatttcatattgatatattaactgcaagatttgttttaactcctgaatggtttgatgttgtcgtggcttcaaacttatttggtgatattttatcagatctagggccagcatgtactggaactataggcattgcaccttctgggaatattaaccctacaaacaaa

SEQ ID NO: 208166 - DNA, 91 bp, Unknown
  Bacterial polypeptide expressing nucleotide sequence isolated from the Sargasso Sea
atggcccagcaccgcgtcgtcctgcttcccggcgatggcattggccctgagatcaccgctgtggcccgccagttgctggaggcggtgagcg

SEQ ID NO: 208167 - DNA, 406 bp, Unknown
  Bacterial polypeptide expressing nucleotide sequence isolated from the Sargasso Sea
aatggaattcttaagctacattcgctctctttttttactttccctcccattaattggaggtcatgtagcccaaattcttataggtgtcggcgacaccttgattgttggccgctattcgactgaagcacttgctgcactcgtcttgggaaccactatcttttttattatttttatttttggagctgggttttcatttgccgcgatggcgttagtctcaactacaaaaacagagggcgataccacaaaaattagaagaattactaggatggccttatggttaagccttgcttttggtttgctcgtttctccaatttttgttttttcagagcggcttcttttattattgggccaggaatttaatctcgcagctttggcttctgagtatcttattttttctggtattgcg

SEQ ID NO: 208168 - DNA, 139 bp, Unknown
  Bacterial polypeptide expressing nucleotide sequence isolated from the Sargasso Sea
atgattaaggtaaaaaaaagaaaaattcttttattacctggtgacggtattggtccagaggtaataggcgaagttagaaaaattattaattggtttaatgataagaaatcccttgactttgaaatagatgaagatcttg

SEQ ID NO: 208169 - DNA, 610 bp, Unknown
  Bacterial polypeptide expressing nucleotide sequence isolated from the Sargasso Sea
attgggtgctagcgagggacggttcgcggcaaaaattattactcgacctggaaccgaacaagtagccagattcgcttgtgaattagcgctgcaacgaagcgggcgactgacggtttccgccaaaacgaacatgctgcccgctacagaccgatggttctgcgaaattgcaagggagatatctgaggagtatgccggggttgaatatgaggagttcatcgtggacgacatggcacatcgcctagtggtccgaccgcaagacattgatgttcttcttttacctaacctgtatggcgacatactttctgatttgggagcgggcacgatcggtggcctcggactagcaccatctggctgttacgggcatgagttcgcgtatttcgaatcggcacacgggactgcgccagatttggccggtaaggggaccatcaaccccaccgcgaccctgctttcagctgcgatgatgctccgccatttacatctcaaagacgctgctgatcgtctagaaagagccctagaacatgtttatctctcgaactcagatctaacaccagatcagggaggcgcagccagtaccgagagattcgctgacgccgtgataggagcactgtga

SEQ ID NO: 208170 - DNA, 142 bp, Unknown
  Bacterial polypeptide expressing nucleotide sequence isolated from the Sargasso Sea
atgattaaagttaaaaaaaggaaaatattattacttcccggagacggaataggtccagaagttattggtgaggtaaaaaaaattattaaatggtttaatgataaaaaatctttagattttgaaatagatgaagacttagctg

SEQ ID NO: 208171 - DNA, 247 bp, Unknown
  Bacterial polypeptide expressing nucleotide sequence isolated from the Sargasso Sea
atgaaagaaaaagttaacttgctacttttaccaggtgatggaattggtcctgaagtttgtattcctgtaaaaagaattattaattgtttaaataattttactaatattgagttttccatagaagaagagttggtcggaggttcttcatatgatgaatttaaattaccgatcaccgaaaaagttatctctaaagctaaagccagtgacgggatattgttaggggcagtaggagctccccaagtatgaa

SEQ ID NO: 208172 - DNA, 507 bp, Unknown
  Bacterial polypeptide expressing nucleotide sequence isolated from the Sargasso Sea
ttctacgcagtatggtctttttccggaaaatctttgatgaacgggctttattgtttcccgatattcagagtgaccacaactatgtcgacgcgcaggctttggatctgatccgaagaccatgggaatttgacgtgttggtaatggaaaacatgtttgccgacatcctttccgatttgggtggtggattggtgggaggaatggggatggctccctgtgcggaaattggattaaagcatgggctgtttcagccggctcacggaagtgcgcctgatatcatgggaaaagatttggccaatcctacagcgatgtttctctcggcagccatgatgctggagtggttgggacaaaaatatcagaatgagtccttgatgaatgcagcaaaactacttaaaagtaagatcgaggaaggattccgtttaaaaagaacccagccaaaggaattcggaggccctcatggatgctctgagcacacacgaaatttattggagatcattgaagatctttagt

SEQ ID NO: 208173 - DNA, 724 bp, Unknown
  Bacterial polypeptide expressing nucleotide sequence isolated from the Sargasso Sea
attgaatattactgagttaattgtttgtatttccattggaatgtgccttggaagcttcgcttcagttctgatctacagaattcctagaaatataaatttgctactacctagatcccattgtccctattgcaataatacgctcaaagctatgcatctagtaccaatttttagctatgtcctcttaagaggaaaatgtgctttttgcagttcaaaaattagtagactatatccagtaaatgaattttttattacagcaatggttgtaataattacatatcatgctggaccatattcaattcatgggtggttagcaattacattaattttgtgcctatacgctcaagcagtaattgactttaaaacattgtctttatcaacctatcttagcgtaataattggtttattaggatttgcctttaattatttacacttcttcacatcaattattgatagtttggctggattgattttaggttattgtagcttgtggttaataaattatatttataaaaaaataaaaggtactgatggaatcggttcgggtgattatttattacttggagcagtaggaggtgttttcggttcaagttctttaggaattatcttattatcaagttcaataatttctataggattacatttctttaccagaacaattcacggtgagaggatacctcttggtacaggtattgctttatcaagcattattttcttagttctaata

SEQ ID NO: 208174 - DNA, 397 bp, Unknown
  Bacterial polypeptide expressing nucleotide sequence isolated from the Sargasso Sea
aaaaaacctggagatattgacatgatgattgttagagagaacactgaaggagaatattcatatgttggtggaagaatgtataaaaatacagatcgtgaaatagctattcaagaaacaattatgtcagctcatggaattgacagagttcaaaaatttgcttttgaattagcaaaaataagaaaaagaaaaaaattaacaaatgcaacaaaatcaaatggtatttcaatcaccatgccattttgggatgaacgttttgaaaaaatgaaaaaaaattatcctgaaattaacattgatcaatttcacatagatattttggtagcaagatttgttttaaaccatgagtggtttgatgtagttgtggcctcaaacctatttggagatattttgtctgatctcg

SEQ ID NO: 208175 - DNA, 853 bp, Unknown
  Bacterial polypeptide expressing nucleotide sequence isolated from the Sargasso Sea
atgaaagaatattctatagcgtcaattgctggtgacggtattggtaaagaagttgtgcctgaagcacaaaaaatattaaaagagatttctcaacaacatcaattcaaattgaatatagaagattatgattttgcatcatgtgattattacgaaaagcatggaaaaatgatgccagatgactggaaagataaattaactaaacacgatgcaattttctttggtgcagttggtatgccagataaatatcctgaccacataacactttggggatcgttgttaaaatttagaagagagttcgatcaatttattaacctaagacctgtaaaactttttgaaggtgtaaatgctccattggctaataaaaagccaggtgatattgacatgataatcgttagagaaaataccgaaggagaatattcatcagtcggtggaagaatgtatcagggaagtgatagagaagtggttattcaagaaacaataatgtcaaaatatggaatagatagagttcaacaatttgcatttgaattagctaaaaaaagaaaaagaaaaaaactaacaagtgctacaaaatcaaatggaatatctattacaatgccttattgggatgaaagatttaatgaaaataaaaaaaattatcctgatgttgaaactgatcagtatcacattgatatactagctgctagatttgttttaagtcctgaacgttttgatgtgatagtcgcatcaaacctttttggagatattttatcagatctagggccagcttgtactggaactattggaattgcaccatctggaaatattaatccaacaaataaatacccatcattatttgaacctgtgcatggatccg

SEQ ID NO: 208176 - DNA, 541 bp, Unknown
  Bacterial polypeptide expressing nucleotide sequence isolated from the Sargasso Sea
ccagaaaaaacatgttacatgcgtccataaatcaaatgttatgagaaagactgatggattgtttgccaaaagttgtaagtctgtatcagaagaatttcctgatgtaaaatttgatgaaatgtacgtagacgcatgttcgatgaatcttataagacagccacaagaatttgacgttattgtaactactaacttatttggtgatatattatcagaccagtcatcccaagtagttggcggattaggaatggctccagctgcaaatcttggtgataattttggattgtttgaacctgtccatggtgcagcatttgatattgctggaaagcagattgcaaacccaacatcattcattctatcaattaagatgatgcttcaatggcttggaagcaagaacaatgatcaaaattcaatatctgtagcacagacattagaacaaactgtattagaattagttaaatctggaattactaccaaggatgtaggtggagataaatccactaaggaatttactaaagaaattacaaacagattagtttcgtaa

SEQ ID NO: 208177 - DNA, 226 bp, Unknown
  Bacterial polypeptide expressing nucleotide sequence isolated from the Sargasso Sea
atgaagttaaagatagctgtactaccaggtgatgggataggaccagaagtaacaaatcagtcaataaaggtcttaaactgtattgcagataaatataatcacgaggttgaacttactgaaggacttgtgggtgcaattgctatagataaacataatgatccatacccagatagcactcataagctttgtaaggattctgatgcaattttatttggtgcaattggtg

SEQ ID NO: 208178 - DNA, 478 bp, Unknown
  Bacterial polypeptide expressing nucleotide sequence isolated from the Sargasso Sea
ggttgtgaatgatgtcagtaaagaatatccagatgtagatctgcgacatctttatgctgacaattgtgcttatcagcttgcaaaaaatcccaaacaatttgatgtgattctaaccgacaacctttttggagatttcctgtctgatctggcaggagcattgaccggttctctgggtatgcttccatctgcttcactgagtagcctgactaatgatctagcaattaatgcccccggaatttatgaaccggtgcatgggacagcacctgacattgaggggcaagggatagtcaaccccttgggaatgttgttgtcggtagggatgatgtttgaatatggatttggttattctagtgctgccgtaaaattgagatcttctgtagatattgctttatcaagaggagtgcggacacctgatattggaggcaatgcttctacaatagaaatgactgatgcggtaatacatgcttggaaaaattaa

SEQ ID NO: 208179 - DNA, 568 bp, Unknown
  Bacterial polypeptide expressing nucleotide sequence isolated from the Sargasso Sea
catgccacgcatagcacttatccctggtgatggaattggagtcgaagtcgttcgcgaagctcgacgggtgctcgaattcgttagggaaaccgagggtgtaaacttcgaattagtagaatgggatctcggagcagatcgattcctcagagatggaatcactataaccgatgacgagttcgtgtcacttgatcaggatcacgacgccgttcttttgggagctctaggggaccctcgagttccgagtaacaagcatgctaaggacatccttctcggaatgcgcttcaagctggatctctatgtgaatttccggccgtgcgtcctgatttcccctgagttgtctcccctcgcgtccgtttcttctcttcggcttgagatttttcgtgaaaacacggaaggcgaatataccggaatgggtggggtaaccaggaagaacacgccggccgaggtcgctatagaggagaaccttgcgacgcgacatggtgtggaaagaatcattcgggccgcctttcagtttgcagactcaagaggacgtgacagggtgacgttggttgataaagcgaatgttatg

SEQ ID NO: 208180 - DNA, 175 bp, Unknown
  Bacterial polypeptide expressing nucleotide sequence isolated from the Sargasso Sea
atgattaaggttaaaaagagaaaaatattattattaccaggtgatggtataggccccgaagtcattggtgaagttagaaagataataaattggtttaatgacaaaaaatctttagattttgaaattgatgaagatttggccggaggatgttcttatgacaaacatggaacccaca

SEQ ID NO: 208181 - DNA, 220 bp, Unknown
  Bacterial polypeptide expressing nucleotide sequence isolated from the Sargasso Sea
gacatcgccggccaggacaaggccaatccaatggcgatggtgctctcggccgcgatgatgctgcgaatcggtcttaagcagacggaggctgccgctgatctcgaggcggctgtggacaaggtgttggcggctggcttccgcaccggagatctgatggcagagggctgcaccgcgctgggatgccgtgccatgggcgacgcattgttgaaggctctctgag

SEQ ID NO: 208182 - DNA, 883 bp, Unknown
  Bacterial polypeptide expressing nucleotide sequence isolated from the Sargasso Sea
gagtcaaagagagattattacgaagttttaggtgtttctaaaggggcaagtgaatccgagttaaaaaaagcctacagaaagttggcaattaaataccatccggataaaaatccagatgataaagaagctgaggaaaaatttaaagaagccgcagaggcatatgaagtattaaataatccccagaagcgtcaacagtatgatcaatttggtcatgcaggaatgggccagggaggtttcggtggtggcggaatgaatatggacgatatattctctcaattcggaagtatttttggagattcttttggtggcggtagttttggtgggggtagaggaagatcacaaactgttaaaggaagcaacttaagagtaaaaatgaagctttctttagaggaaatagcagagggggttagtaaaaaaataaagctgaataaactcgtaaatgcatctggtgttacttataaaacttgtgaaagttgtaaaggatctggaagaattacaagaatggctcaaacatttctaggagccatgcaaactcaatctgtatgtaatacatgtcagggtagtggtaagtttatagataaaaaaccatctggtgctgattcaaatggcttgattagaaaagaagagattattgatctagatattcctgctggagttgttgatggaatgcaattaagtgttacaggtaaaggaaatgcaggaccttttgatggtattcctggagatttaattatcgtaattgaggagaaagaacatgaaaacttaagaagagatggagaaaatcttcattatgatgcgattataagttttgttgatgcggctttaggttcttcaatagaaatcccaaccttaactggtaaatctaaaattaaaattgaacctg

SEQ ID NO: 208183 - DNA, 754 bp, Unknown
  Bacterial polypeptide expressing nucleotide sequence isolated from the Sargasso Sea
ttgaaaaaaattattcttaaagggaaatatgctcttgtaacaggagcaggtaaaggcttaggacgcgcttgttcaatcgctctagctgaagcaggcgcaacaattattggtttgagcagaacatcctctgatcttgatagattagaaaaagacataaaaaaggtcaaaagtaaattaatcaaaattaattgtgatgtaatgaactacagcgaattacaggaaaaattaaaaaaaataaaaattattgatattcttgtaaataatgcagggactaatattccagaaccatttgagaaaataaaacagcaaagtatgaattatttggtagatctaaacttaaaagctgcctttaacgttgcacagttagttgtaaagaaaatgattaaaaataaaaaaagagctggatcaattataaatatgtcatctcaactcggtcatgtaggtatgtccggtagaaatatttacaatatgactaaatttggaattgaaggtttaacaaagggtatgggtgtagagttagcaacgaaaaatattagagtaaatacagttgccccgacatttgttgaaactcctatggtaaaaaaattttttaaaaataaaaagttcaaaaatttggctttaggcaatattcctatgggcaaagcagctaaagagagtgatgtagctacagctgtatgtttcttagcatcagatgctgctgcaatgataactggatcttctattctgatagatggaggttggacagcaaaataat

SEQ ID NO: 208184 - DNA, 240 bp, Unknown
  Bacterial polypeptide expressing nucleotide sequence isolated from the Sargasso Sea
cctggatataattgtggtgagcaaaaaaaaaagaaaattattattattaccaggcgatgggattggaccagaggtaattagagaaacaaaaaaagtaattgactggttcaataaagaaaaatctcttgattttgaagttgaggaggagttaattggaggtgcatctattgatgttcataagacccccataactgatgaagttttttataaatctttagaatgcgacgcaataatattagg

SEQ ID NO: 208185 - DNA, 160 bp, Unknown
  Bacterial polypeptide expressing nucleotide sequence isolated from the Sargasso Sea
atgattaaagtaaaaaaaagaaaaatacttttacttcctggtgatggtattggtccggaagtaatagctgaggtaaaaaaaatcattaactggtttaatgataaaaaatcaaaagattttgaaattgatcaggagctagttggtggtgttcttatgataa

SEQ ID NO: 208186 - DNA, 232 bp, Unknown
  Bacterial polypeptide expressing nucleotide sequence isolated from the Sargasso Sea
atgggccttgctggccaccaccttgcgccattgcctggcctggagcgcacggccctggtggctcgccagcctgctaggcgcggtgggcgggccgttgtcttattacgccggcagtcaattggcaggcgtgagttttgcgtacggcaccgccccaacactgatcggcctggcgctgttatgggccatgctctttccgctgttacacggggttgcgcagaggctggaacactga

SEQ ID NO: 208187 - DNA, 256 bp, Unknown
  Bacterial polypeptide expressing nucleotide sequence isolated from the Sargasso Sea
atacgaaccaatacatggaacagcgccagatattgccggtcagggaaaagctaatccaattgcgacaattttaagtgttgctttattgttaagatattctttaggtcttccagaagaggctaaggaaattgaagctgcagtcgataccgtattagcacagggctataggactgcagatataggcaaagaagaggaacaaattgttaccactgaagaattggcaaataaaataattgaattagcaactaactattaa

SEQ ID NO: 208188 - DNA, 208 bp, Unknown
  Bacterial polypeptide expressing nucleotide sequence isolated from the Sargasso Sea
atgaataaaataaataatagacaattattattgcttcccggggatggaattgggccagaagtagttggtgaagtaaaaaaaattatagaatggttaaataaaaataaatctttagattttaggatagaagaaggattagtaggtggagcctcatatgaaaaaaataaaaatccaattacagatgaagttttttataaagctttagaaa

SEQ ID NO: 208189 - DNA, 406 bp, Unknown
  Bacterial polypeptide expressing nucleotide sequence isolated from the Sargasso Sea
atgaacttattacttcttccaggggatggcataggaccagaaatttctagagtagtagccgatgttatcgactgcttaaatagcaagttagatctaggaattgatttaaaagaaaaagatgcagggttcaaggctcttgaaagtcatggaacaactttccctgctgacgtagctaatgaagcggagacttctgatggaataattttaggcccctccgatagcgcagcgtatccattacctgagcaaggaggaataaatctttcggcggctttccgccgaaaatttgatttatttgctaacattcgtcctgcgaaatcctggacaggaataaaatctaatgcgtcttcaatggatatgatagtagtgcgtgaaaataccgaaggcttttatgctgataggaatatgt

SEQ ID NO: 208190 - DNA, 166 bp, Unknown
  Bacterial polypeptide expressing nucleotide sequence isolated from the Sargasso Sea
aatgattaaagttaaaaaaagaaaaatattacttttgcctggcgatggcattggacctgaagttattgcagaagtaaaaaaaataattagttggttgaataaaaatagatcattagactttgaaattgatgaagatttagtaggaggtgcagcttatgataagcat

SEQ ID NO: 208191 - DNA, 304 bp, Unknown
  Bacterial polypeptide expressing nucleotide sequence isolated from the Sargasso Sea
aatgagtaataaaaaaattcttattttgcctggcgatggtattggcaatgaggttatggctgaagttctcaaaattattgattggatggagaaaaccaaatctatgtcttttgatatttctgaaaaattagttggtggagctgcatatgacaaagaaggtaactctattagtgatgaaacaatgcagattgctttggactcagatgctgttttatttggtgcagtaggtgggcctaaatgggaaaatgtcgaaagagaaaaaagaccagaagctgcgttattaagattaaggaaagatttagac

SEQ ID NO: 208192 - DNA, 736 bp, Unknown
  Bacterial polypeptide expressing nucleotide sequence isolated from the Sargasso Sea
atttaaattaaagatagatgaatttgatttttcatcatgcgattattatgaaaagtatggaaaaatgctacctgatgattggacacaacaaattggtagtcatgatgcaatattttttggtgcagtaggtatgccagataaatacccagaccatattactttatggggttccctactccagttcagaagagaatttgatcaatttataaatttaaggccagtaaaattatttgaaggagtaaatgcacccttagcaaataaaaaacctggcgacatagatatgatgatagtgcgtgaaaatacagagggcgaatattcttcggtcggcggaaaaatgtatcaaaatactgaaagagaaattgtaatacaagaaactataatgtctaaacatggaatagatagagttcaaaaatttgcatttgaattagcaagaacaagagatagaaaaaaattaactaatgccacaaaatcaaatggtatttctataactatgccatactgggaccaaagattttatgagaataaaaaagattttcctgagataaaaacagatcagtttcatatcgatattttagctgcaagatttgttttaacaccagagtggttcgatgtagtcgtagcatcaaatttatttggagatattttatccgatttaggtccagcatgtacgggaacaattgggatagccccatcaggaaatattaatccaacaaacaaacatccttctttattcgag

SEQ ID NO: 208193 - DNA, 694 bp, Unknown
  Bacterial polypeptide expressing nucleotide sequence isolated from the Sargasso Sea
aattgtaatcgaagagttccctggacttgagggagaagtagaatgggatccaagaccaatatcccgcaaaggaagcgagagagtcatcaacttcgcctttgatttagctcgacatcgccatagaaaaatgggagtaactcaatcagtaacttgcgttgacaagtccaacgtaacacgtggttgtagattattcagaggaattttcaatgagatttcagaacaaaatccggatattgaaacccatgcagcatacattgatgccttcacaatgtggctaatgagagatccagaggatttggatgtcgtagtccttccaaacatgtttggcgatatcgctaccgacctagcaagtgtcttgcagggagggcttggtatggctgctagtgcaaacctaggtcctaagcacatgatgtttgagccagtacacggctctgccccaaaatacactggaaagaatgtagtaaatccaatcgctactctccaatcggttcagatgatgtttgaggctctagcgtacagaaagaaggacgatgacttggataagtgtgccgacatcctccaacaagctattcagcaacatttcgaagaaggcggagtcgtcacctacgaccttggtggagatgctagtacttccgaagtaggtcaagccattgcagacagatgtacagcaatgctagaacaagaatttcagtag

SEQ ID NO: 208194 - DNA, 220 bp, Unknown
  Bacterial polypeptide expressing nucleotide sequence isolated from the Sargasso Sea
atgattaaagtaaaaaaaagaaaaatattattgttacctggagatggaattggaccagaggtaattggagaagtaagaaagataatcaactggtttaatgataaaaaatctctagattttaaaattgatgaagatcttgccggaggttgttcttatgataagcacggagtacctataactgatgaagtattctataaagcattagaaagtgcagtagtaa

SEQ ID NO: 208195 - DNA, 841 bp, Unknown
  Bacterial polypeptide expressing nucleotide sequence isolated from the Sargasso Sea
gccgcctactcgccggctgatcagggcggaatcaatccctcggcgacattccgacgcgagctcgatctttatgccaacatccggcccacccgtactcggcaaggcgtacctgccctgaccgagatggatcttgtcgtcgtgcgcgaaaacaccgaaggcttctacgccgaccgcaccatgtttgccggtaacggcgagttcatgccgacgccggatctcgcgctggcggtacgcaagatcacgcgccacggatcggaacgggtcgttcgcgccgcctgcgatatcgccatgacgcggcagaaacgactgaccatcgtgcacacggggaacgtgctgaaacagtcggacggccttttccgcgcggcggcgcaaaacgtactggtggattaccccgagatcgacgccgaagaggtattggtcgatgctatggcatcgatgttggtccgcgaacccggcgcctatgacgtgatggtatcgaccaatatgttcggcgatatcctgtcgaacgaagcggcggaactgtccggcgggctggggctcgcgccatcgatcaatgcgggcgacgagcacgcgatcgcgcaggcgtcgcacggcgcagcgccggatatcgctggtacggatacggcgaacccggttgcgctgatcgtcagcgcggccatgctgttggactggaagggccgccggttgggcgaaaatgtcctgatcgaggcggcagccgccgccggacgggccgtcgacgatcttctcgccgtaccggaaacgcgcaccccggatctggatggcgccctcggcacccgtgcctttggcgacgcgctcgccgccaggatcggagacgcctgat

SEQ ID NO: 208196 - DNA, 370 bp, Unknown
  Bacterial polypeptide expressing nucleotide sequence isolated from the Sargasso Sea
atgagcaagaaaatattagtgttacctggagacggaattggacaggaggtaactgcttctgcgatgcaaatctttgactttattatcaaaaaattttccttgaatttttctatggatacgcttgatgttggtggaactgcttacgagaaatctggttcaccaattccagaaaatgttttaaaagctgccaaaaaagcagatgctgttctatttggagctgtaggagctccgcagtgggatggtcttagttgggaagacagacctgaaaatgcactgttgacattaagaaaggaattaaacttgtttgcaaatttaagacctgcctttttatttaatgaactatcaaatgcttcccccattaaaggaaaaa

SEQ ID NO: 208197 - DNA, 759 bp, Unknown
  Bacterial polypeptide expressing nucleotide sequence isolated from the Sargasso Sea
tatgaaggaatacaaaatcgcctcaattgctggagatggtattggaaaagaggttgttccagaggctttaaaaatacttaaagaagtagcaaatcaacatcaatttaaattaaagatagatgaatttgatttttcatcatgcgattattatgaaaagcatggaaaaatgctacctgatgattggaaacaacaaattggtaatcatgatgcgttattttttggtgcagtaggtatgccagataaatatccagatcatattactttatggggttccctactacagtttagaagagaatttgatcaatttattaatttaaggccagtaaaattatttgaaggagtaaatgcaccattagcaaataaaaaacctggtgacatagatatgatgatagtgcgtgaaaacactgagggcgaatattcttcggtaggtggaaaaatgtatcaaaatactgaaagagaaattgttatacaagaaactataatgtctaaacatggaatagatagagttcaaaaatttgcatttgaattagcaaaaacaagagatagaaaaaaattaactaatgccacaaaatcaaatggtatttctataaccatgccatactgggaccaaagattttatgaaaataaaaaagattttcctgaaataaaaacagatcaatttcatatcgatattttagctgcaagatttgttttaacaccagagtggtttgatgttgtcgtagcatcaaatttatttggagatattctatccgatttggg

SEQ ID NO: 208198 - DNA, 667 bp, Unknown
  Bacterial polypeptide expressing nucleotide sequence isolated from the Sargasso Sea
aatgagtaataaaaaaattttaattttacctggtgatggaattggcaacgaagttatggctgaggtattaaaaataattgattggatggaaaaaactaaatctttatcttttgatatctctgaaagattagttgggggtacagcatacgataaagaaggtaactctataagtgatgaaacaatgcaagtagctatggattgtgatgcagtattatttggcgcggtaggaggcgctaaatgggataatgtagaaagagataaaagacctgaagcagccttattaagattaagaaaagacttagatctctttgccaatctaagaccagctgttgttttagatgctctttcagattcatcatctttaaaatctgatcttgttaaaggattagatattttgataataagagagttaacaagcggtgtatattttggacaaccaagaggtatatcaaaaattagtgagactgaaagtaaggcagttgatactcaactgtataccacatcagaagttaatagagtttcacgagtagcatttgatttagcaaaattgcgtaataataaagttacatcagtagaaaaatcaaatgtaatggaaacaggtttattttggaaacaaaccgtaacagatttacataaaaaggaatattctgatgttaatctagaacac

SEQ ID NO: 208199 - DNA, 346 bp, Unknown
  Bacterial polypeptide expressing nucleotide sequence isolated from the Sargasso Sea
atgccaaacaataaaaaaatattggtacttccaggtgacggtataggaaaagaagtgatggcagaagtgcttaatattataaattggatggaaaaaaataaatctatttcttttgatatttctgagagattagtgggaggtgcagcttacgatcaagaaggtgattccataagcgatgaaactatggaagaggcaattaaatctgatgctgttttatttggtgcagtcggtggatctaaatgggataatgtagacagatcaaaaagacctgaagctgccttacttaaattaagaaaagaattagatctttttgcaaatttaagacccagctgttgtattgaagctt

SEQ ID NO: 208200 - DNA, 361 bp, Unknown
  Bacterial polypeptide expressing nucleotide sequence isolated from the Sargasso Sea
tatgtttggggatattttgtcagatttagcttctgaactttcaggttcacttgggctttctggttctctaaatgtaggagatacaatacctatggcacaagcccagcatggagcagcaatcgatattatgaataaaggtattgcaaatccaatttctttaattttttctgtggcaatgttattgaaatggcttggaaaacagaagtgtcaaatggaatatattaaggcaaatgaattagtttttaaagtcattgaaaatattttagaagaaaataaatatttaactcctgatttaggaggaacatcatcttcgcaaactttgacaaatcacataatagataaaattgaaaattatgaatga

SEQ ID NO: 208201 - DNA, 217 bp, Unknown
  Bacterial polypeptide expressing nucleotide sequence isolated from the Sargasso Sea
catggcccagcaccgcgtcgtcctgcttcctggagatggcattggcccggaaatcacgactgtggcgcgtcagttgctcgatgcggtgagccagcggcatggttttgaactgtgttttgacgaacaattgatcggtggcagtgccattgatgcctgcggtgagcccctgcccgccagcacgctcgacgcctgcaaggctgctgatgcggttctgctg

SEQ ID NO: 208202 - DNA, 771 bp, Unknown
  Bacterial polypeptide expressing nucleotide sequence isolated from the Sargasso Sea
gatgaaagaatacaaaatcgcctcaatagctggagatggtattggcaaagaggttgttccagaagctttaaaaatacttaaagaagtagcaaatcaacatcaatttaaattaaagattgatgaatttgatttttcatcatgcgattattatgaaaagtatggaaaaatgctacctgacgattggaaacaacaaattggtagtcatgatgcaatattttttggtgcagtaggtatgccagataaatacccagaccatattactttatggggttccctactccagttcagaagagaatttgatcaatttatcaatttaaggccagtaaaattatttgaaggagtaaatgcacctttagcaaataaaaaacctggcgacatagatatgatgatagtgcgtgaaaatacagagggcgaatattcctcggtcggcggaaaaatgtatcaaaatactgaaagagaaattgtaatacaagaaactataatgtctaaacatggaatagatagagttcaaaaatttgcatttgaattagcaagaacaagaaatagaaaaaaattaactaatgccacaaaatcaaatggtatttctataactatgccatactgggaccaaagattttatgagaataaaaaagattttcctgagataaaaacagatcagtttcatatcgatattttagctgcaagatttgttttaacgccagagtggttcgatgtagtcgtagcatcaaatttatttggcgatattttatctgatttaggtccagcatgcac

SEQ ID NO: 208203 - DNA, 466 bp, Unknown
  Bacterial polypeptide expressing nucleotide sequence isolated from the Sargasso Sea
atgaagaaatataagattgttttattgtcaggagacggaattggaccagagatttcagaagtttcaaaaaaagttttaaaaaagctttcaaaaaatcataatttcgatattgagattattgaaaaattatttggagggatagcttatgaaaaatatggtactcctgctccagatgagaccctagatcaatgtaaaaaaagtgacgcagtacttttagcatgtgttggagatattaaatatgattctcttgcaagagaatttaggccagaaagtgggttactaaagttaagatctgccctaaaccttttcgcaaatatcaggcctgtcaaaataagaaaatctctattagatgcaagtacattaaaaaaagaaatcgttgagcatgtagatcttattgttgtaagagaattaataggaggaatttattttggaaaaccaagaggacacataacaaatacaaaaatcc

SEQ ID NO: 208204 - DNA, 427 bp, Unknown
  Bacterial polypeptide expressing nucleotide sequence isolated from the Sargasso Sea
tttatgcaatggctaacaagaacccctgagcattacgatgtggtcgtatgctcgaatatgtttggcgatatagcaacagacttaggagcagtcttacaaggcggaatgggaatggccgcttctggaaatattggaaccgatcatgcattttttgaacctgttcacggctctgctccaaaacacgcggggctaaacaaagtcaatccaatagcgagtataacctcaattcaattaatggttgaatggcttggtcgccgtaatcaaattgatgatttcaaaaccattgggaaaatgattgaccaatcggttgctgaacaccttaagcaggggaaattactgacttatgacttaggtggaaacgcaggatgcagccatgttggagaatcaattgctagtatcttggcgactaaattatctgaagtttgat

SEQ ID NO: 208205 - DNA, 532 bp, Unknown
  Bacterial polypeptide expressing nucleotide sequence isolated from the Sargasso Sea
tatggcagaagtgcttaatataattgattggttatctaaaactcgatctatgtcatttgatatatctgagagattagttggaggaacagcatatgataaagagggcgactctataagtgattcaactatgcaagaagcattagactcggatgcagtattgtttggtgcagtcggaggtccacagtgggataatgttgaaagagaaaaacgtcctgaagcagcgcttttaagattaaggaaagaattagatttatttgctaatttacgaccagctgttgttttagatgctcttgcagaatcttcttctttgaaattagatttagtaaaaggattagatattttaatagtaagagaattaacaagcggtgtatattttggtcagccaagaggaatttctaaaattagtgatacagaaagcaaagcaattgatactcaagcttataccacatcagagatagaaagagtttcaagagttgcatttgaattagcaaaattacgaaaaaacaaagtttcatcagctgagaaatctaat

SEQ ID NO: 208206 - DNA, 1552 bp, Unknown
  Bacterial polypeptide expressing nucleotide sequence isolated from the Sargasso Sea
aatgtttaaaggaaactttgtacaaaacttacctaaaatttatggaacatatacaggcgggttcatagtattcattattttaatggctattgctgaacaagcaggtatgactgcaaaaacaataggtattttatttgtagcttttacagtttgtatatatgcattcattggatatttatctagaactgtacaagtagatgcgtattacgtcgccggaagacaggtgccaacggtatttaatggaatggctactgctgctgactggatgtcaggagcatcattcgttgcaatggcaggtggtatttattttggtggctatacttatatggctttcttggttggatggactggtggttacgtattagtatcatcattgctagcaccatatttaagaaagtttggttgttacactgtgccagatttcattggaactagatacggcggaaaccttgcaaggttctgtgctgtggtagttttatctttggcttcttttacatacgtgacagctcaaattaacgcaacaggaactattgcttctagagcacttggtataccatttgaattaggggtttgggttggtttagtaagtattttattatgttcaatgttaggtggaatgagagcggttacttggacgcaagttgctcagtacatcgtattgatcatagcttatttaattccaattttctggatcagtaacaaaggtggcttcggagtattcccacatttaatgttgggtgaagaagttgcaagacttagtgaacttgaagctcaatttggtttagtgaaaaattcagctgcagatattaaagctgctggagttccaggtggtttaaaatctatcgctgtagcacactcagaagtgccagatggtggaatggctgcttggaaatttatttcattagctttatgtatgatggtgggaactgcttctttacctcatattctaatgagatacttcacaacgcctagcgtaaaagctgctagaaaatcagttgcatggtcactgttctttattgcaatactttatacttcagcacctatgttagctactttatccaagttatcgttgatggatccaagtttagcaactggtataattggaaaaccaatcgctgatgtaatgtcaatagagtgggttaaccaatgggtaaatgttaaacaggcctttatagcagactttaatggagatggaattcttcaattaaatgaatggttcatgagaggtgacgtagtagttctatcaactcctgaagttgctggactaccttatgttatttctggactagttgctgctggaggaatggctgctgcgatgtcaactgcagatggtctaattcttgcaatcgctaatgctttatcacatgatgtttactacaaaatcattgatccaaaagcagatgtaagaaaaagacttttagttgcaagagcacttttagtagtaatcggtgctgctggagcatatgttgcatcaatgaggcttactagtatcttaggtgcaagtgcttgggctttcgattttgctatgtctggattgttcttcccactaata

SEQ ID NO: 208207 - DNA, 946 bp, Unknown
  Bacterial polypeptide expressing nucleotide sequence isolated from the Sargasso Sea
ttggacacaatcagtgataaatttgacattaaatttaatgtcaattcacttgtagctggagatgccgcactcgaaaaaactggaaaagcattacctgatgatgtctttgaatcgatcaaatcatctgatgcatgtttaaaagctcctgttggagaaagtgctaaggatgtcattgttgcattaagacaaaaattagatttgtatgcaaatattcgtcctgcaaaatcatacccaaatactcctgcactaagagatgatgttgatttagtaattgttagagaaaatacagaggatctatacacaggtgaagaatttcaagtagatgatactgctgttgcattgagaataattagtgaaaaagcttccaagagaatcgcaaaacatgcttttgagacagcaatggatagaagtcaacaaaaacgggttacatgtgttcataaatcaaatgtcatgaagataacagatggtcttttttctcgtgtatgtgaagatgtatcaaaagattatcctgacgtcacctttgatcagatgtacgttgacgcctgtgctatgaacttgattcgtgctcctcatgaatttgatgtaattgtcactacaaacttgtttggtgatatattatctgatgagtcttctcaagttgtgggtggattaggtatggctcctgctgcaaatttgggcgataattttggtttatttgagccagtccatggcgctgcatttgatattgctggaaaacagattgcaaatccttcttcattcatactatctacaaaaatgatgcttgattggttaggttcgaaacataatgattctgaatgtatctctgctggaaagaaacttgaagatgtagtattggatttgataaaatctggcattacaactaaggatattggtggagaaaaatccacacaggaatttactaaagaaattactaatagattataga

SEQ ID NO: 208208 - DNA, 814 bp, Unknown
  Bacterial polypeptide expressing nucleotide sequence isolated from the Sargasso Sea
tgtttgaaggcacctgttggagaaagcgctaaagatgttattgttgcattaagacaaaaattagatttgtatgccaatattcgtcctgcaaaatcatatccaaatacacctgcacttagagatgatattgatttagtaattgttagagaaaatactgaagatctatacaccggtcaagaatttcaagtagatgatactgctgttgcattaagaataattagtgaaaaagcttctaagcgaattgctaaacatgcatttgaaactgcaatggatagaaatcaacagaaacgagttacttgtgtccataaatccaatgtcatgaagatgactgatggtctttttgctcgtgcatgtgaagatgtgtcaaaagactatcctgacgttacttttgaccagatgtatgttgatgcctgttctatgaacttgattcgggctcctcacgaatttgacgtaattgtgactacgaatttgtttggtgatatattatctgatgaatcctctcaagttgtaggtggattaggcatggctcctgcagcaaatttgggagataattttggtctatttgaaccggttcatggcgctgcatttgatattgctggaaaacagattgcaaatccttcttccttcattttatctacaaaaatgatgcttgattggttgggctcaaaacataatgattctgaatgcatttctgctggaaaaaaacttgagactgttgtattggatttgataaaatctggcattacgactaaagatatcggtggagaaaaatccacacaggaatttacaaaagaaattactagtcgactataat

SEQ ID NO: 208209 - DNA, 691 bp, Unknown
  Bacterial polypeptide expressing nucleotide sequence isolated from the Sargasso Sea
tttttaattactttacggaattcaatttatggtgttgcttatattattaccttttctataaccaatattacttttgtactatcaattcaaaatacaaatgttgctaatactctagtaatgattgcgcttgctccaatgctttcagctatttttggtgcaatatttttaaaagaaaaaccagatcgaaatactttggttgctatagcaattacgtttttaagtgttctttatatattttacgactcagtgaaattaggaaatatttttggagatattttaggttttattactgcgtgtggtcttgctgcaggggcaacaataatcagagctggaaaaagccttaacctagttccttcagctgtggttggtaagctggttgtagcattagttgctttattctttattgatacgtttgagctaaaagacaatgatatttatatcattccagcgatgtgtatcctttgtgtggccattccttttgtattggtaacactagctccaagatacataactggagctgaggtaaatctattctttctaatggaaacagttttggggcctatttgggtgtggatggttgttaaagaacaaccatcaatggatacaattcagggaggagtgataatcattttaactatcgctattcactcattcctagccataaaaaaaacacaaaccaaaactacttagc

SEQ ID NO: 208210 - DNA, 143 bp, Unknown
  Bacterial polypeptide expressing nucleotide sequence isolated from the Sargasso Sea
aatgattaaaataaaaaaaagaaaatttttactgttaccaggagatggtattggaccagaagttattggtgaggtaaaaaaaattattcaatggtttaataaaaataaatcgttggattttgaaatagaagaaggtttagcgg

SEQ ID NO: 208211 - DNA, 427 bp, Unknown
  Bacterial polypeptide expressing nucleotide sequence isolated from the Sargasso Sea
atgagtaaagaattcaacattaccctacttccaggtgacggaactggtcctgaggtcgtcaatgaagctgtaaaagtccttgaaaacacttctgaacaatacaaaataaaatttaattttactaacaatgatcttggtggagatagatatttaaatacgggagaacttgtaactgaaaaagatattaaacaattcaaaaattctgacgcagttttacttggagctattggtcatccagatgtaaagccaggaattttagagcaaggaattcttcttaaattacgcaaagaatttgatcagtatattaatttaagacctgtagttctttatccgggagtagaaactcccctagctaacaaatctccagaagatattgactttgtagttgtaagagaaaatacagaaggattatatgcaggtgcaggag

SEQ ID NO: 208212 - DNA, 127 bp, Unknown
  Bacterial polypeptide expressing nucleotide sequence isolated from the Sargasso Sea
aatgaaaaattataaaattgccgtattagccggagatggtattggccctgaagtgatggttcaggcgctaaaagtactggctgtggtgtctgataaatttggtttcagcattcaaagcaccgaagct

SEQ ID NO: 208213 - DNA, 373 bp, Unknown
  Bacterial polypeptide expressing nucleotide sequence isolated from the Sargasso Sea
atgtcccacaaaattgcggtaatcggcggtgatgggataggacccgaagttacggcggtagcgctggacgtaatggcagcagcaggagcagatttggcaaccacggagtttcgcctaggaggctttcgctacctggaagatggagttgttctgccagacgacacgttagaagagctgcgcgcctacgatgcaatcctgctgggcgccgttggcactcctgaagttcctcccggtgtcatcgagagaggcctactcctaaaggcgcgatttgaacttgatctatacgtcaatttgaggccgttcgttctgaaagatggccatgaatttgtagtaattcgcgagaataccgaaggtacttacgcaggcgaaggtg

SEQ ID NO: 208214 - DNA, 1189 bp, Unknown
  Bacterial polypeptide expressing nucleotide sequence isolated from the Sargasso Sea
aatggcgccgtaccgactggcactcctaccgggagatgggactggacgagaggtaatggcagaggtcaagcggatcctctcgaccttccaggattcaggagcaatttcattggaaaccaccgagattccttgtggcggtcaacactatctggatactggtgaggagtggccggctggctctttcgaattctgcagggacgaatctgatgccattgtggtcggtgcagttggctggccgggagctactctcccaaatggcgatattgccggaggacaggcacttctaggtctgagatcagcattggatctgtatgctaatgttagaccggtcaaactctacaagggcgtcaagcacaaggtgcatggaagtttcatcgatgtttgggataacgaactcgtagacatcgtaatggtgagggaaaataccgagggcctgtaccatgctctactgaggaggtctggaatggcagccagaggagaggaaagggacgaaccacttgttatcgacggattcccgggtctagaaggagaagtaggctgggacgttagaccgatatcccggaagggcagcgagagagttatccgtttctcattcgaactagcaaagcgacgtaaatccagacttggtagcgttcagaaggtaacatgcgtggacaagagcaacgtcactaggggatgcagactcttcagggatgttttcagggaggtctcatctgaataccagggaatcgtcaccaacgaggcgttcattgatgcattcactatgtggctagtaaggagccctgaggatctagacgtggtggttcttccgaacatgtttggggatatagccacagatctagcctcagtattgcagggggggatgggtatggcggccagcgccaacataggggacgaacacatgttattcgagccggttcacgggtcaagcccgaaatacgccggacagaacaaagtgaaccctatcgcggcaatttcttctgtgcaattgatgttcgactctcttggtttgaagaatgaagatcaggaagcgacattatgcgcagaagttattgagagagcgatttcagaacatatgtcttcgggaggtcctgtgacttacgacttgggaggcaaggcctcaaccacggaggtcggcgaggccatagcgtccagatgtgcggcgattctctcagaactaggcagctga

SEQ ID NO: 208215 - DNA, 856 bp, Unknown
  Bacterial polypeptide expressing nucleotide sequence isolated from the Sargasso Sea
atcagctggagttccagacattcctgatcacctaactttatggggattaagattaaaaatttgtcaaggacttgatcagtatgcaaatctaagacctgtaaagttgcttcctggtatctcatctccattaaaaaatgttgaagaaaaagatattgattggagttttattagagaaaattctgagggggaatattcaggaattggaggtagaagtcataaaggctattcaaacgatactgcaatggatgtaactcttttcacaaagcaaggagttgagagaatacagaggtttgcatttgagatagcacgttccagacccagaaaattattaactttggtaacaaagtctaatgcacaaaggcacggtatggttatgtgggacgaaatctttaaagaaatctcagaagattatagagacgttaacaccgataaaatgcttgttgatgcaatgactacccgaatggttttagatcctaaaagtatcgatactgttgtcgcatcaaatttacatgctgatattttaactgatttagctgcgtccctgtcaggttccatgggaattgcacctacggcaaatttagaccctgataaacgtcatccatcaatgtttgagccaattcacgggtctgcttttaatattatgggtaaaggtattgctaatcctattggatcatattggtcagctgttatgatgttagagaatttaggagaacttcaagctgctcaaaagttaatgtttgcgatagaaaaacttactgcagacaaaaaagttttacctaaggatctaggtggaaaaagcaccactaaacaaataacaaaagcaatgatagacattctttctggaaaaaataattaa

SEQ ID NO: 208216 - DNA, 181 bp, Unknown
  Bacterial polypeptide expressing nucleotide sequence isolated from the Sargasso Sea
aatgtctaataagaccaggaaaattttgcttttacctggtgacggaataggccccgaggtggttgcagaagtaagaagaatacttgaatggatgaataaaacaaagtctttagattttgttttaagccaagatttaattggtggcgcatctattgacgcaaataaagttcaattactgatg

SEQ ID NO: 208217 - DNA, 512 bp, Unknown
  Bacterial polypeptide expressing nucleotide sequence isolated from the Sargasso Sea
catgagaagttcgaaccattttcgaattgccgttcttcccggtgatggaatcggcaaggaagtgatgtcagcctgcgtagaggttctggatacgattcagcgaagagtgggagggtttaagctggatctggaatacatctatgccggtgccgaatatttcctggaacagggggtagatatcaccgaggaagctatggacaaggtgaaccaagccgatgcgatcctgctgggtgccatggggcttcaggatgtcagattgcccaatgggaccgaaatcgcaccacatttgaaaatccgtaccgagttaggactgtttgccggggtgagaccggttaaagcctatcccaatactcctcaacgtcttgcagatgcgcgttcccaggagatcgattttgtagtgctcagagaatccaccgaaggcttgtttgcagaacgtgaaaaaggggtcattctcgaagatcgggaggcaagggacacaatggtcatcacccgtcaaacctgtgaaaaccttt

SEQ ID NO: 208218 - DNA, 722 bp, Unknown
  Bacterial polypeptide expressing nucleotide sequence isolated from the Sargasso Sea
aatggaattttttaggtacattcgttctctctttttactttccctaccattaattggaggacatatagcccaaattttaattggtgtcggtgataccttgattgttgggcgctactcgactgaagcacttgctgcactcgttttgggtaccacaatctttttcattatttttatctttggggccgggttttcatttgctgcgatggcgttagtctcaactgctaattcggaggccaaaaccacaaaaataagaagaattactagaatggccttatggttaagccttgctttcggtttggtcgttttgccaatttttatttttgcagagcggattcttttatttttaggccaggaattcaatctcgcagttttagcttctcagtatcttgttttttctggcttcgcgatgtttcctgctcttagcgcttctgttttgaggtgttacttagcaggaatggaatatgtaaaagtaacattttatatctctattattgctgttgcattgaaccttttgatcaatttcttactcgtgtttggagtgtttggattgcccgaactaggtattgttggcgctggtgttgcaaccgttttcgtcaacttattcatgtttataagttttcttatttatgcgaagataaaactaccccagcataacttatttgtccgtttttggagactggaccgtggcgtaattggcgtagttttaaaaatgggctctgcaa

SEQ ID NO: 208219 - DNA, 792 bp, Unknown
  Bacterial polypeptide expressing nucleotide sequence isolated from the Sargasso Sea
tatgaaaaaaaataaatattctatagcagttattcctggagatgggataggcaaagaagttatccctgaaggtttaagatgtcttgagacagtaggaccaaaatttggaattaattttgaatttactgaatacacattttcttcagtagaatattatgaagaacatggccaaatgttaccagatgattgggaggaacggttaaagtctcatgatgctattttctttggagcagtagggtggccagaaaaattacccgatcatatttctctctggggttccttaataaaatttagaagaacttttgatcaatatgttaatttaaggcctgtgaaattgatgcctggtgtcccctctccacttgctggcagaaaaccaggagatatagattttatgatagtaagggaaaacactgagggtgagtatagttctcttggtggaagaatgtttgatggaactgaaagagaatttgttgttcaggaaaccgtcatgactaggactggggtagatagaatattagattatgcttttaaattagcacaaaaaagaaaagagaaacatctaacctcagcaacaaagtcaaatggaatttctatctcaatgccttattgggatgagcgtgttgatgaaatgaaaattaactttcctgatgtgagggttgatcaatatcacattgatattttagccgcacattttgtattaaatccagacaagtttgatgtagtggtagctttcaatttatttggtgatattttatctgatttaggaccagcttgtacaggtaccattggtat

SEQ ID NO: 208220 - DNA, 1096 bp, Unknown
  Bacterial polypeptide expressing nucleotide sequence isolated from the Sargasso Sea
atgaagacctaccgcatcgcaaccatccccggcgacggcatcggcaaggaagtcgtgccggcaggccaacgcgttctcgaagcgatcgccgcgcgaagcgatgccttccggttcgagttcgagaacttcggctggggcggcgacttctaccgcgaacatggtgtgatgatgccggccgacgggctcgacgctatccgcaacaaggacgccattctgttcggctcggcgggcgacccgcatattcccgatcacgtgacgctgtggggactgcgcctgaaaatctgccagggcttcgatcagtacgcgaacgtgcgtcccacccgcatccttgctggtatcgacgcgccgttaaagcgctgcgggccgaaggatctcgactgggtgatcgttcgcgagaactcggagggcgagtactccggcgtaggtggacgcgcgcatcagggccatccgatcgaagtggcaacggatgtgtcgatgatgacccgcgcgggtgtcgagcgcattcttcgattcgcgttccgcctcgcccagtcgcggccgcgcaagctgctgacggtgattaccaagagcaatgcgcaacgtcacgcgatggtgatgtgggacgagatcgcgctcgaagtctcaaaggaatttcccgacgtcaaatgggacaaggaactcgtcgacgccgccaccgcgcgcatggttaaccgtcccgcaacgctcgatacgatcgtcgcgaccaatcttcacgcggacattcttagcgatctggccgcggcgctggccggcagcctcggcattgcgccgaccgcgaatctggaccccgagcggcgctatccgtcgatgttcgaaccgattcacggctcagctttcgacatcatgggcaagggactcgccaatccggtcggcacgttctggtcggtggtgatgatgctcgagcatctgggcgaagtggccgccgcgcagcaattgatgagcgcgatcgaacgcattaccgatgatccggcgttgcacaccggcgaccttggcggcacggcgacgaccgtgcaggtgaccgatgccgtctgcgcgattctcgcagcggaaccggcggcgcagttcaaggcagcctgaa

SEQ ID NO: 208221 - DNA, 175 bp, Unknown
  Bacterial polypeptide expressing nucleotide sequence isolated from the Sargasso Sea
tatgagtaagaagaaaacaatactctttctcccaggagatggaattggtccagaagtgtctaattctgcaaaaagtattcttgagtctataaatgaaatttataatttagacttcgttatagaagaagctttagtgggaggttcggcttatgatctgactggagttctttacccc

SEQ ID NO: 208222 - DNA, 1189 bp, Unknown
  Bacterial polypeptide expressing nucleotide sequence isolated from the Sargasso Sea
atggcgccgtacagattggcacttctaccgggagatgggactggtcgagaggttatggaagaggtcaagcgaatactctcaaccttccacgattcaggagtaatttcattggaaaccaccgagattccttgtggtggccaacactatctggatactggtgaggagtggccgactggctctttcgaatactgcagggatgaatctgatgccattgtggtcggtgcagttggttggccgggagccactctcccaaatggcgatattgccggaggacaggcacttctaggactgaggtcagcattagatctgtatgctaacgttagaccggtcaaactgtacaagggcgtcaagcacaaggtgcatggaagcttcatcgatgtttgggacgacgaactcgtagacatcgtaatggtgagagaaaataccgagggcctgtaccatgctctgctaaggaggtctgggatggcagccagaggggaggaaagggacgaaccacttgttatcgacggattcccgggtctagaaggagaagtaggctgggacgttaggccgatatcgcggaagggtagcgagagagttattcgtttctcatttgaactagccaagagacgtgaatccagacttggtagcgttcagaaggtaacatgcgtagacaagagcaacgtcactaggggatgcagactattcagggatgttttcagggaggtctcatctgaataccagagcattgtaaccaacgaggcgttcattgatgcattcactatgtggctagtcaggagcccagaggatctcgatgtagtcgttcttccgaacatgtttggagatatagccacagatctagcgtcagtattgcagggggggatgggtatggcggccagcgccaacataggagacgaacacatgttattcgagccagttcacgggtccagcccgaaatatgcaggacagaataaagtgaatcccatcgcggcaatatcttctgtacaattgatgttcgactctcttggtttgaagaatgacgatcaggaagcgacattgtgcgcagaagtcattgagagagcgatttcagaacacatgtcttcaggaggtcccgtgacttacgacttgggaggcaaggcctcaactacggaggtcggcgaggccatcgcgtccagatgtgtggggattctcacagagctaggtagctgaa

SEQ ID NO: 208223 - DNA, 205 bp, Unknown
  Bacterial polypeptide expressing nucleotide sequence isolated from the Sargasso Sea
aatgattaaggtaaaaaaaagaaaaattcttttattacctggcgatggtattggtccagaagtaataggtgaagtcaaaaaaattattaattggtttaatgataaaaaatcacttgattttgaaatggatgaggatcttgctggaggttgctcttacgacaaacatggtacaccaattactgatgaagtgttttataaagcttta

SEQ ID NO: 208224 - DNA, 85 bp, Unknown
  Bacterial polypeptide expressing nucleotide sequence isolated from the Sargasso Sea
aatgattaaagttaagaaaagaaaaattttattgttaccaggcgatggtattggacctgaagttatcgaagaggtaaaaaaataa

SEQ ID NO: 208225 - DNA, 760 bp, Unknown
  Bacterial polypeptide expressing nucleotide sequence isolated from the Sargasso Sea
atgtatttaaaaaaaattaatcttaaaaataagtatgctcttgtaacgggggctggtaaaggcttaggacgtgcttgttcaattgcattagctgaagcaggtgcaacaattattggtttgagcagaacatcatctgatcttgataaattagaaaaagacataaaaaaagtaaaaagcaaattaatcaaaattaattgtgatgtaatgaactatagcgaattacaggaaaaattaaaaaagataaaaattattgatattcttgtaaataatgcaggtacaaatatcccagaaccatttgagaagataaaacaacaaagtatgaattatttggtagatcttaatttaaaagctgcctttaatgttgcacagttagtggtaaaaaaaatgattaaaaacaaaaaaagaggtggatcaattataaatatgtcatctcagcttggtcatgtaggcatgtctggtagaaatatttacaatatgactaaatttggaattgaaggtttaacaaagggcatgggtgttgagttagcaacaaaaaatatcagagtaaatacagttgctccaacatttgttgaaacacctatggtaaaaaaattttttaaaaataaaaagttcaaaaatttagctttaggcaatattcctatgggcaaagcagctaaagagagtgatgtagctacagctgtatgtttcttagcatcagatgctgctgcaatgataactggatcatctattctgatagatggaggttggacagcaaaataat

SEQ ID NO: 208226 - DNA, 542 bp, Unknown
  Bacterial polypeptide expressing nucleotide sequence isolated from the Sargasso Sea
tgcaggggcattggtagaggatgcatcgttgcccctatttgaacagggaggtttgattgcgaataccttatcggatgtagaagctgctcatactcataggcattggttgcgggagcagccaaatgattatgattttgcgacgaggagaaggctcatggctgctagtttaatctctggggccatgtatacgaagctaagtagattcagaatgttaatgcgaagagatgtcatgtcggcattacatcagtttgacgtgattgttactcctgctcaagctgggggggctccattaatagcaaatgagaccaatcttacttcgaaggaagcagtcattagtcaattttttgggcttaggtcccataggagcccatttaatttgtctggtgtacctgcgatggcgataccttgtggtttcactggagatggaatgcctgtaagtattcaaattgctggacaaccgtttgctgaaaatttgttatttcaatttggcttggaatttcaaaatcgaacagattggcatttgcagaggcctgatctgtaga

SEQ ID NO: 208227 - DNA, 415 bp, Unknown
  Bacterial polypeptide expressing nucleotide sequence isolated from the Sargasso Sea
aatgagtaataaaaaaattttaattttacctggcgatggaattggaaacgaagttatggctgaggtattaaaaataattgattggatggaaaaaactaaatctttatcttttgatatttctgaaagattagttgggggtacagcatacgataaagaaggtaactctataagtgatgaaacaatgcaattagctatggattgtgatgcagtattatttggtgcggtaggaggtgcaaaatgggataatgtagaaagagataaaagacctgaagcagccttattaagattaagaaaagacctagatctctttgccaatttaagaccagctgttgttttagatgctctttcagattcatcatccttaaaatctgatcttgttaaaggattagatattttgataataagagaattaaca

SEQ ID NO: 208228 - DNA, 739 bp, Unknown
  Bacterial polypeptide expressing nucleotide sequence isolated from the Sargasso Sea
ttgaatattactgagttaattgtttgtatttccattggaatgtgccttggaagcttcgcttcagttctgatctacagaattcctagaaatataaatttgctactacctagatcccattgtccctattgcaataatacgctcaaagctatgcatctagtaccaatttttagctatgtcctcttaagaggaaaatgtgctttttgcagttcaaaaattagtagactatatccagtaaatgaattttttattacagcaatggttgtaataattacatatcatgctggaccatattcaattcatgggtggttagcaattacattaattttgtgcctatacgctcaagcagtaattgactttaaaacattgtctttatcaacctatcttagcgtaataattggtttattaggatttgcctttaattatttacacttcttcacatcaattattgatagtttggctggattgattttaggttattgtagcttgtggttaataaattatatttataaaaaaataaaaggtactgatggaatcggttcgggtgattatttattacttggagcagtaggaggtgttttcggttcaagttctttaggaattatcttattatcaagttcaatcatttctataggattacatttctttaccagaacaattcacggtgagaggatacctcttggtacaggtattgctttatcaagcattattttcttagttctaataattttgaacaaataaa

SEQ ID NO: 208229 - DNA, 1311 bp, Unknown
  Bacterial polypeptide expressing nucleotide sequence isolated from the Sargasso Sea
cttgtttttaaagatagccggcacaaatgaatttttcaggtacattcgttctctttttttactttctttgccattaattggagggcatattgctcaaattcttataggtgtcggcgataccttaattgttgggcgctactcgactgaagcacttgcagcactcgttttgggtacaacaatctttttcattatctttatccttggagctgggttttcatttgctgcgatggcattagtctcaactgcaaatacagagggtgacaacacaaaaataagaagaattactaggatggccctatggttaagccttgcctttggtttaattgtttctccaatttttgttttttcagagcggcttcttttatttttgggtcaggaatttaatctcgcagctctagcttctgattatcttatcttttctggcattgctatttttcctgctctaagcgcttctgttctgaggtgttatttggctggaatggaatatataaaagtaacattttacatatctattatcgctgttttattgaaccttttggtcaattacctgcttgtatttggaatgttcggattgcctgaactcggcattgttggcgctggtattgcaacagtttttgtcaacttatttatgtttataagttttgttatttatgcgaaaataaaactgccgcagcacaacctatttgtccgcttttggagaccggatcgaggcgtaatcggtcttgttttaaaaatgggctctgcaattgggataactagcttagccgaagctggtttgttttcagctagttcaataatgatgggttgggttggccaacttgagctggcggcgcatggaattgctttgcaactagcaagcataaccttcatgcttcatttgggcttgtcagatgctgccaccattagagtctgttctgctttgggtaaaaaagataaaatcgaaattattattgagtgctgggctgcaattgttatatcgctcgggctatcgtttttagctattttgatttttctaggatttcctaaatttcttatttcggcttttctaaattccgaagaacttaatgctaatttaatagttgaattaggcatttctcttttagctttggctgcgttgtttcaattagttgatggcggacaggccctggcgatacacttgcttcgcgggctccacgatactacgatacctatgtatctagctgtgataagttattggataattggcctgcctagtggttatattttaacttttcattataattttgatgcgcaaggaatttggctaggcttagtgataggtttagcatttgc

SEQ ID NO: 208230 - DNA, 287 bp, Unknown
  Bacterial polypeptide expressing nucleotide sequence isolated from the Sargasso Sea
tatgaacttaaaaatagctttattgcctggtgatggtataggacctgaggttatcaaagaagctgttaaaatctgtaatgctatctcaaaaaaattcaatcattcaataacttggcaagaaggtcttgttggtgctgcagcaattgataagactggagatccatatccagatacaacccacgaaatctgtataaattcagatgccgtgctgtttggtgctgttggtgatcctaaatttgataataatccatctctttctgtaagacctgaagaggggttgttaagaa

SEQ ID NO: 208231 - DNA, 760 bp, Unknown
  Bacterial polypeptide expressing nucleotide sequence isolated from the Sargasso Sea
aatgtatttaaaaagaattaatcttaaaaataagtatgctcttgtaacgggggctggtaaaggcctaggacgtgcttgttcaattgcattagctgaagcaggtgcaacaattattggtttgagcagaacatcatctgatcttgataagttagaaaaagacataaaaaaagtaaaaagtaaattaatcaaaattaattgtgatgtaatgaactacaatgaattacaggaaaaattaaaaaaaataaaaataatagatattttagtaaataatgcagggactaatattccagaaccatttgagaagataaaacaacaaagtatgaattatttagtagatcttaatttaaaagctgcctttaacgttgcacagttggtggtaaaaaaaatgattaaaaacaaaaaaagaggtgggtcaattataaatatgtcatcccaacttggtcatgtaggcatgtctggtagaaatatttacaatatgactaaatttggaattgaaggtttaacaaagggcatgggtgttgagttagcaacaaaaaatatcagagtaaatacagttgctccaacatttgttgaaacacctatggtgaaaaagttttttaaaaataaaaagttcaaaaatctggctttaggtaatattcctatgggcaaggcagctaaagagagtgatgtagctacagctgtatgtttcttagcatcagatgctgctgcaatgataactggatcatccattctgatagatggaggttggacagcaaaataa

SEQ ID NO: 208232 - DNA, 484 bp, Unknown
  Bacterial polypeptide expressing nucleotide sequence isolated from the Sargasso Sea
aatggtcgcaataattacatatcatgctggaccgtattcaattcatggatggttagcaattacattaattttgtgcttatacgttcaagcagtaattgactttaaaatattgtctttatcaacctatctcagtggaattattggtttattaggatttgcgcttaattatttaaacttcttcacatcaattattgatagtttgcttggattgaccttaggctattgtagcttgtggttaataaattttatttataaaaaattaaaaggttttgatggaatcggttcgggtgattatttattacttggagcagtggggggtgttttcggttcaagctctttaggaattatcttattatcaagttcaatcatttctataggattacatttctttaccaaaataattcacggtgaaaggatacctcttggtacaggtatttctttatcaagcattattttcttagttctaataattttgaacaaatga

SEQ ID NO: 208233 - DNA, 1084 bp, Unknown
  Bacterial polypeptide expressing nucleotide sequence isolated from the Sargasso Sea
atgaagacctaccgtatcgcaacgattcccggcgacgggatcggcaaggaagtggtgcctgcggccaagcaggtgctggaagcgctggcccgcggcagcgaccgctttgcgttcgagttcgaggatttcgactggggtgccgactactaccgccagcacggcgcgatgatgccggccgatggcctcgacgccttgcgcggcaaggacgcgatcctgttcggctcggcgggcgaccccgacgtgccggatcacgtgacgctgtgggggctgcgcctgaagatctgccagggcttcgaccagtacgcgaacgtgcgcccgacgcgcatcctgcccggtatcgacgcaccgctgaagcgctgcgggcccgacgacctgaactgggtgatcgtccgcgagaactccgaaggcgaatacgcgggcgttggcggccgcgtgcaccagggtcacccgatcgaggccgcgacggacgtgtcgatcctcacgcgcgccggcgtcgaacgcatcatgcgcttcgcgttccggctcgcgcagtcgcgcccgcgcaagctgctgaccgtgatcacgaagagcaacgcgcagcggcacgcgatggtgatgtgggatgagatcgcgaagcagattgcgcgggaattccccgacgtcacgtgggacaaggagctcgtcgatgcggcgaccgcgcgcatggtcaaccggccggcgtcgctcgacacgatcgtcgcgaccaacctgcacgcggacatcctcagcgatctcgccgccgcgctcgcgggcagcctcggcatcgcgccgaccggcaacatcgatcccgagcgccgctatccgtcgatgttcgagccgatccacggctccgcgttcgacatcatgggcaaggggctcgcgaatccggtcggcacgttctggtcggtcgtgatgctgctcgaacatctcggcgaaacggcagccgccgcgcgcgtgatgcaggcgatcgaggccgtgacggccgacccgtcactgcatacgcgcgacctcggcggcagcgcgacgaccgcgcaggtgacggcggctgtgtgcgagcgcgtcgcgaacgcggtggtcgcagcctgat

SEQ ID NO: 208234 - DNA, 184 bp, Unknown
  Bacterial polypeptide expressing nucleotide sequence isolated from the Sargasso Sea
aatgattaaagtaaaaaagagaagaattcttttattacctggagacggaattgggccagaggttatcgcagaagttagaaaaattatagagtggttaaataaaaatcgatctcttgattttgagatagatgaggacttggttggaggtgcagcatatgataaacatggaacaacaaattactga

SEQ ID NO: 208235 - DNA, 634 bp, Unknown
  Bacterial polypeptide expressing nucleotide sequence isolated from the Sargasso Sea
atgaagaaatataagattgttttattgtcaggagacggaattggaccagagatttcagaagtttcaaaaaaagttttaaaaaagctttcaaaaaatcataatttcgatattgagattattgaaaaattatttggagggatagcttatgaaaaatatgggactcctgctccagatgagacactagatcaatgcaaaaaaagtgatgctgtacttttagcatgtgttggagatattaaatatgactctcttgaaagagaattaaggccagaaagtgggttactaaagttaagatctgccctaaatcttttcgcaaatatcagacctgtcaaaataagaaaatctctattagattcaagtacattaaaaaaagaaatcgttgagcatgtagatcttattgttgtaagagaattaatagggggaatttattttggaaaaccaagaggacatataacaaatacaaaaatcccaaaagctttcaatacgatggtttatgattcggccgaaatagaaagaatagctgaaatagcaataaaaattgctaaccaaagaaataaaaaaatatgttctgttgataaatcaaatgttcttgagggtagtcaattgtggagagatacagtttcaaatatcacttcaa

SEQ ID NO: 208236 - DNA, 286 bp, Unknown
  Bacterial polypeptide expressing nucleotide sequence isolated from the Sargasso Sea
atggatcataaaattttagcacttggtggcgatggaataggtccagaagttttagattttggacttcatttaatttacaaaattcaagatatttttggaataaacataaaaattgagcacgatcttataggtggtgcttgctgggataaatttcaggtattttgtaaaaatgaaactgttgaaaaagcaaaaaacgcagatgctattctcgttggcgccgtaggtggcccaaaatgggataatattaagataaaaggaaccccagaagagcaagatggcctaatga

SEQ ID NO: 208237 - DNA, 325 bp, Unknown
  Bacterial polypeptide expressing nucleotide sequence isolated from the Sargasso Sea
aatgattaaagtaaaaaaaagaaaaatacttttacttcctggtgatggtattggtccagaggtaatagctgaggtaaaaaaaattattaactggtttaatgataaaaaatctttagattttgaaattgatcaggagctagttggtggttgttcttatgataaacacggtaccccaatcactgatgaggttttttacaaagcactagaaagtgaagtaattatgcttggagcagttggtggtcctacatgggataaccttagaattttccaaaaaaccagaaagagcattattaaaactcagaaaagaattaaagctttttgctaa

SEQ ID NO: 208238 - DNA, 723 bp, Unknown
  Bacterial polypeptide expressing nucleotide sequence isolated from the Sargasso Sea
agactccactgctaaacaaaagtcctgaagatattaatttcactgtcgtaagagaaaacacagaaggtctttatgccggagctggaggatacatacactacggaacagaaagtgaagtagcaacacaagaatcaattaatacatggaaagcaataaatcgatgtattgtttatgcatttgagtatgcaaaacaaaatgatagaaaaaagataacactttgtgcaaaaacaaacgtattaacttatgcacatgatttgtgggaaagaattttttatgatgttgcagaaaattatccagaaattgaaacagattatggacacgtcgatgcagtttgtatgtggatggtcaagaatccagagtggtttgatgtaatagttactgacaatatgtttggagatattattacagatttaggagcaatgattcaaggaggaatgggtattgctgctggtggaaatataaatccacaaggtgtctcaatgtttgaacctattggaggctctgcacctaaatatactggaaagaatattatcaaccctttagcttcgattgctgcagcctctatgatgcttaaccagctaggagaagaaaaatatgcagatgatattgaaaatgcaataatctcaacagctcaaaagttggattctctttcagctgggaaaatgggaatgagtacttctgaagttggagatacagtcctcaattcaatattaaataactgat

SEQ ID NO: 208239 - DNA, 870 bp, Unknown
  Bacterial polypeptide expressing nucleotide sequence isolated from the Sargasso Sea
tatgcgtaaaaataaatactcaatagctgttatagaaggagatggtattggtaaagaagttatgccagaaggcattagatgcctagaggctgtaagttctaaatacggcattaatcttgagtttaaaaactacgatttttcatcagtagactactatgaaaagcacggcgttatgttgccagaggattggaaggaaaaattgtcttcacacgatgctatattttttggagcagttggatggccagaaaaggttccagaccacatatcactttggggttctcttttaaaatttagaagagaatttgatcaatatataaacttaaggcccgtaaaattgatgcctggcgtgccttcacctctaagtgggaaaaagccaggtgacattgattttttaattgtaagagagaatacagagggagaatacagttccattggtggcaaaatgtttgaaggaactgagagagagtttgtcgtccaagaaactgtaatgactaaagtaggaatagagagagttttggattttgcatttaaactcgcacaaaaaagaaaaccaaaacatataacgtcagcgacaaaatctaatggtatctcaataacaatgccttattgggatgaactttttgaaaaaatgtcaaaatcctacccagacataaaaactgatcagtaccatattgatattctttgtgctcattttgttttaaatccagataagtttgatgttattgtagcttctaatttgtttggtgatattttatctgatttgggtccagcatgcactggcacaattggaatagctccatcaggtaatatcaatccagagaacaatcatccgtctttatttgaaccagttcatggctccgcgccggatat

SEQ ID NO: 208240 - DNA, 291 bp, Unknown
  Bacterial polypeptide expressing nucleotide sequence isolated from the Sargasso Sea
aatgattaaagtaaaaaaaagaaaaatacttttacttcctggtgatggtattggtccggaggtaataaccgaggtaaaaaaaatcattaactggtttaatgataaaaaatctttagattttgaaattgatcaggagctagttggtggttgttcttatgataaacatggcaccccaatcactgatgaggttttttataaagcactagaaagtgaagtaattatgcttggagcagttggtggtcctacatgggataacctagaattttccaaaaaaccagaaagagcattatt

SEQ ID NO: 208241 - DNA, 570 bp, Unknown
  Bacterial polypeptide expressing nucleotide sequence isolated from the Sargasso Sea
aatgagtaataaaaaaattcttgttttaccaggcgacggtattggtaatgaagttatggcagaagtacttaatataattgattggctatctaaaacccgatctatgtcatttgatatatctgagagattagttggaggaacggcatatgataaagagggtgactctataagcgattcaactatgcaagaagcattagactcggatgcagtattgtttggtgcagtcggaggtccccagtgggataaagttgaaagagaaaaacgtcctgaagcagcgcttttaagattaaggaaagaattagatttatttgctaatttacgaccagctgttgttttagatgctcttgcagaatcttcttctttgaaattagatttagtaaaaggattagatattttaatagtaagagaattaacaagtggtgtatattttggtcagccaaggggaatttctaaaattagtgatacagaaagcaaagcaattgatactcaagcttatactacatcggagatagaaagagtttcaagagttgcatttgaattagcaaaattaagaaaaaacaaagtttcatc

SEQ ID NO: 208242 - DNA, 415 bp, Unknown
  Bacterial polypeptide expressing nucleotide sequence isolated from the Sargasso Sea
gccgttaccgctcttttggtccgtgaaccggaggaattcgatgtgattgtgaccacgaacatgtttggagatatcctttccgacctcactgcagaactagcgggcagtctcggaatgggggccgcattgaacgccggaagtctgaaggccatggcccaggcagcccatggctctgccccctccctgagtgggaaaaacctggccaatccctgtggtttgatcctctcttcggcgatgctgcttcaatggctgggcaaccgggatcaaaaccctgagttgattcaggctgcggatgccatcgaaagtacggtgtatcgaaccctagaattccgcggacgttcccaggaccttggaggcagcctcagtacccgtgaattgactgatgcgatgctcatggaactgcaaaattcctgac

SEQ ID NO: 208243 - DNA, 889 bp, Unknown
  Bacterial polypeptide expressing nucleotide sequence isolated from the Sargasso Sea
tctggaatacatccatgccggtgctgaatatttcctggaacagggggtagatatcaccgaggaagctatgggcaaggtgaagcaagccgatgcgatcctgctgggcgccatggggcttcaggatgtcagattgcccaatgggaccgaaatcgcaccacatttgaaaattcgtaccgaattaggactgtttgcgggattgagaccggtaaaagcctatcccaatactcctcaaagtcttgcagatgcgcgttcccaggagattgattttgtggtgctccgagaatctaccgagggcttgtttgcagaacgtgaaaaaggggtcattcttgaagatcgggaggcaagggatactttggtcatcacccgtcaaacttgtgaaaacctttttgatttcgccttcaagctttcacagaggcgaaaacagaaaggaggaaaaggcagagttacttgtgttgataaatcgaatgtcctacggagtatggtctttttccggaaaatctttgatgaacgggctttgttgtttccagatattaagagtgactacaactatgtcgacgcccaggctcttgatctgatccgaaagccatgggaatttgatgtattggtgatggaaaacatgtttgctgatatcctttccgatttgggtggaggattggtgggaggaatggggatggctccctgtgcggaaattggattaaagcatgggctttttcagccggctcacggaagtgcgcctgatatcatgggaaaagatttggccaatcctacagcgatgtttctctcggcagccatgatgctagagtggttgggacaaaaatatcagaatgagtccttgatgaatgcagcaagattacttgaaagcaagatcgatgaaggattccgtttaaaa

SEQ ID NO: 208244 - DNA, 843 bp, Unknown
  Bacterial polypeptide expressing nucleotide sequence isolated from the Sargasso Sea
aatgagtaaagaatttaacataaccctatttccaggtgacggaactggtcctgaggtcgtcaatgaagctgtaaaagtccttgaaaatacttctgaacagtacaaaataaaatttaattttactaacaataatcttggtggagatagatatttaaatactggagaacttgtaactgaaaaagatattgaacaattcaaaaattctgacgcagttttacttggtgcaattggccatccagatgtaaaacctggaattttagagcaaggtattcttcttaaattacgtaaagaatttgatcaatatattaatttaagacctgtagttctttatccgggagtagaaactcccttagctaacaaatctccagaagatatcaactttgtagttgtaagagaaaatacagaaggattatatgcaggcgccggaggctacattcattacggtacagaaaatgaaattgcaacacaagaatccatcaattcgtattatgcaatacatagatgtataaaatatgcttttgaatatacaaaaaataacaaccgtaaaaaaattacgttatgtgcaaaaactaatgtacttacatatgctcatgatttatgggagagaattttttatgatgttgcgaaagattatcctgaaatagaaactgactatggtcatgtagatgctgtctgtatgtggatggtgaagaatcctgagtggtttgatgtaatagttactgacaatatgtttggtgacataattactgatttaggtgcaatgattcaaggtggtatgggtattgcagctggaggaaacattaatcctgagggtgtatctatgtttgagccaataggcggctc

SEQ ID NO: 208245 - DNA, 238 bp, Unknown
  Bacterial polypeptide expressing nucleotide sequence isolated from the Sargasso Sea
agatattgcaggccaaggcattgctaaccctatcgcacaaattttatcggccgccatgatgctgcgtttcagcatgaacttgaatgatgctgccgacgcaattgaaaaggcagtagtggcaacgctagaagcaggtgtacttacaggcgagttacttccttctgacaaacgcagccaagcggcaagcacgtcgcaagtaggcgatgaaatcgttaaacaattaatggcgcaggagtaa

SEQ ID NO: 208246 - DNA, 700 bp, Unknown
  Bacterial polypeptide expressing nucleotide sequence isolated from the Sargasso Sea
atgagtaataaaaaagttcttattttacctggtgacggtattggtaatgaggttatggctgaagttctcaaaattattgattggatggagaaaacaaaatcaatgtcttttgatatttcagagagattagttggaggagctgcatatgataaagaaggaaactctattagtgatgaaacaatgcaaattgctttgaactcagatgcagtgttatttggtgctgttggagggtctaaatgggataatgttgaaagagaaaaaagaccagaagctgcattattaagattaaggaaagatttagatctttttgcaaatttaagaccagctgttgtattagatgctttagcagaatcttctactttaaaattagatttagtgaagggattagatatattaattgtccgagaattaacaagtggagtatattttggtcagccaagaggtatttctaaaattagtgatacagaaagtaaagccattgatactcaagtttataccacatctgagatagagagagtttcaagagttgcttttgatttagcaaaattgagaagaaataaagtttcatcagctgaaaaatctaatgtaatggaaactggattattttggagaaatattgttactgatttacataaaaaagaatatgcttcagtaaatcttgaacatatcttagctgataattgtgcaatgcaacttgtta

SEQ ID NO: 208247 - DNA, 303 bp, Unknown
  Bacterial polypeptide expressing nucleotide sequence isolated from the Sargasso Sea
aatgattaaagtaaaagatagaaaattattactattgccaggcgatggaataggacctgaagtaataaaagaagtaaagaaaattattgaatggtttaacaaacataaatctttagatttcaaaattgaagagggtttagtaggtggtgcttcttatgataaacacaaaaacccaataactgacgaagttttttataaagctcttgaaagtgaagcagttattttgggtgcagtaggcggtccaaagtatgataatttggaattctctaaaagaccagaaagagcactttttaaaattaagaa

SEQ ID NO: 208248 - DNA, 331 bp, Unknown
  Bacterial polypeptide expressing nucleotide sequence isolated from the Sargasso Sea
catgactcagcaacgtattacagtcattcgcggtgacggcattggcccggacattatcgatgcaaccacaaaaattttagataaggttggctgtgactttgcctatgactatgccgatgctggcctagtcgcactggaagaacatggcgagcttctacctcaagaaactttagacctaatcgcaaaaaacaaagttgcgcttaaaggtcctttaacgacccccgttggtgaaggttttacttcaatcaacgttagtcttcgcaagcagttcaaactgtacgcaaaccttcgtcctgtgatgtcattcaaaggcacaaaagcacgttacgaa

SEQ ID NO: 208249 - DNA, 385 bp, Unknown
  Bacterial polypeptide expressing nucleotide sequence isolated from the Sargasso Sea
aatgaaagacattgatttacttcttttaagcggtgatggcgtgggtccagaaatcatggaaagtgcgatttctttgcttgaaaaaatccaatcaagtttcaagataaacttcaatttgatcgaaggtcttatcggtggagcttcaattgatgctcatggactaccggtatcagatgaaactttgaatcaagcatctcaagcagactcaatcttatttggcgcagtgggaggacctaaatgggattcacttcctcctaatgaaaaacctgaaaaagggttgttagaactaagatcttcattaggcctgtttgcaaatctaaggcctgcaattttatttgatagttccttggaagcatcatccttgaagcccgatatcataaaagat

SEQ ID NO: 208250 - DNA, 253 bp, Unknown
  Bacterial polypeptide expressing nucleotide sequence isolated from the Sargasso Sea
ccagcgatttgcttcaaacaattagttgactcttcaactcttaaaccagaaatcgtatcaggtttagacataatgattgtaagagaattaactggcggcctttattttggtgaacccaggggcatcgaaccaatggaaaatattcaaaggaaaggtgttaatactcacacttatacaacttcagaaattcatagaattgcccgtgtggcttttgacttggcaaaaaaaagaagaaacaaagttacttcttgtg

SEQ ID NO: 208251 - DNA, 694 bp, Unknown
  Bacterial polypeptide expressing nucleotide sequence isolated from the Sargasso Sea
gatattaatttcactgtcgtaagggaaaacacagaaggcctttatgcaggggcaggaggatacatacactatggaacagaaagtgaagtagctacacaagagtcaattaacacatggaaagcaataaatcgatgtattgtttatgcatttgagtatgcaaaacaaaatggtagaaaaaagataacactctgtgcaaaaacaaacgtgttaacttatgcgcatgatttatgggaaagaatattttatgatgttgcagaaaattatccagacattgaaacagattatggacacgtcgatgccgtttgtatgtggatggtcaagaatccagagtggtttgatgtaatagttactgacaatatgtttggagatattattacagatttaggagcaatgattcaaggaggaatgggtattgctgctggtggaaatataaatccagaaggtgtctcaatgtttgaacctattggtggctctgcacctaaatatactggaaaaaatattatcaatcctttggcttcaattgctgcagcttctatgatgcttaaccagcttggagaagaaaaatatgcagatgatattgaaaatgcaataatctcaacagctcaaaagttggattctctttcagctggtaaaatgggaatgagtacttctgaagttggagatacagtccttaattcaatattaaataactaat

SEQ ID NO: 208252 - DNA, 233 bp, Unknown
  Bacterial polypeptide expressing nucleotide sequence isolated from the Sargasso Sea
tatagcaggcactgacagtgccaatccgctcgcaaccattctgtcggcggccatgttgctacgctactcactcaatgcgcccgaggcggcggcagctattgaaggcgccgtagccgctgtactgacgcagggttatcgcacggctgatttgattgttgatggtaaccacgccgccgctattggtacgcgggcgatgggtgatgccgttgtcgcagcgctgcagggccattaag

SEQ ID NO: 208253 - DNA, 388 bp, Unknown
  Bacterial polypeptide expressing nucleotide sequence isolated from the Sargasso Sea
tcatttgacgttattgtgacaacaaatatgtttggagatatattgtcagatttagcaaccgagctctcaggctctttaggattagctggatccttgaatgcaggagacaactatgctatggcgcaggcacaacatggttctgccacagatattgcagggcaaaatattgccaatccaatttcattaattttgtcttcagctatgttgttaaattggcttggcaaaaaaagaaaggttgaaaatttagttttagcatcaagtttaattgacaaatcagttacaaaattattagaaaatcagactcgtttgactaaggaccttggtggaacttcttcaactgcagaggtaactaaaaacttaatcaatattttaaaacatttaatttaag

SEQ ID NO: 208254 - DNA, 859 bp, Unknown
  Bacterial polypeptide expressing nucleotide sequence isolated from the Sargasso Sea
cgagacggcactgtacttcccgattccgtcctcgaggaatggagagatctttatgtgctttatctcggcgcagttggcactcctgatgtccctcctgggcttattgaacgcggcctgcttctcaaaatgcgattcgaattagatctctatattaatctgcgaccgttcgttgtcactggtggtgagggtgatagtggccatgactttatggttatccgagaaaacactgaaggaacttatgctggtgaaggtggctttctccggaaaggcactcctcaagagattgcaactcaaggttccgtcaatacccgtcacggcgtcgaaaggtgcattcgatatgctttcgaactagccagtaccagagagcagaaacatttgacgcttgttcacaaaacaaacgttctgacttttgcaggagacctctgggaacgcacattccatatggttggggaggaatacccgaatattgaaacagcttataaccatgttgatgcagcatgtatttactttgttgagaaccctcagcgttatgacgtgattgttacagataacctatttggggatattctcactgacttaggaggggctatctccggaggaattggacttgcaagctccgctaatcttaatcctgaaaagacttctccttcgatgtttgagccagttcacggctccgcacccgatatcgtaggtacaggtaaagctaacccaaccgccgcgatccttagtggggcgttaatgctcgactttttaaatgaaaatgaggcagcacaaaggatagagaaagcatgtgctgacccgaaaacacaaagtgggacaaccactgaaatcggcgatgcaatcgctgctcaggtttaga

SEQ ID NO: 208255 - DNA, 655 bp, Unknown
  Bacterial polypeptide expressing nucleotide sequence isolated from the Sargasso Sea
atgagtaataaaaaaattcttattttgccaggtgatggtattggaaatgaagtcatgtctgaagtccttaaaattatagattggatggaaaaaactaaatcaatgtcttttgatatttctgaaagactagttggcggcactgcgtatgacaaagaaggtgactctataagtgatgaaacgatgcaagttgctatggactctgatgcagtgttattcggggctgtcggaggatctaaatgggacaatgttgagagagaaaaaagacctgaagcagctcttttgagattaagaaaagatttagatctatttgctaatcttagaccagctgttgtcttggatgctcttgcagaagcttcttctttaaaattagatttggttaagggattagatattttaattgtaagagaattaactagtggagtatattttggtcaaccaagaggaatttcaaagataagtgatacagagagcaaagcaattgacactcaagtttatactacctctgagatagatagagtttctcgggttgcatttgatttagcgaaagttaggagaaataaggtctcttctgcagaaaaatctaatgttatggaaacaggattgttttggagaaaaacagttactgagcttcataaaaaagaatacgaatcagtag

SEQ ID NO: 208256 - DNA, 718 bp, Unknown
  Bacterial polypeptide expressing nucleotide sequence isolated from the Sargasso Sea
gaacttcgatctggtcatcgtccgggaaaacaccgaaggattttatgccgaccgcaacatgcatctgggaattggagagttcatgcctcatccagatacggccctcgcggtaggagtctttacccgcaatgcctgcgaaaggatcgcccgaaccgcattcgagttggcgatgatccgcaagaagaaagtcagtctcatccacaaagcgaacgtgcttcgaaccacctacgggcttttcctggaatgctgcgaaaaggtttccaggaattttccggaagtcgtcatcaacgatttccatatcgatgccgttgccgcgcttttggtccgtgagccggaggaattcgatgtgattgtgaccacaaacatgtttggagatatcctttccgacctcactgcagaactggcgggcagtctcggaatgggggccgcattgaatgcgggaaatctgaaggccatggcccaggcagcccatggctctgcaccctctctgcggggaaaaaacctggccaatccctgtggtttgatcctctcctcggcgatgctgcttcaatggctgggcaaccgggatcaaaaccctgagttgattcaggctgcggatgctatcgaaagaacggtttatcgaaccctggaattccgcggacgttcccaggatcttggaggcagtcttggaacgcgtgaattgaccgatgcgatgctcatggaactgcaaaattcctga

SEQ ID NO: 208257 - DNA, 262 bp, Unknown
  Bacterial polypeptide expressing nucleotide sequence isolated from the Sargasso Sea
gatgagagctatgtatgagccaattcatggatctgccccagatatagctggcaaaggaattgcaaatcctatagcaacgatattaagttttgctatggctttaaaatattctcttaatttacataaagaagcaaatgccttacaaaaagctgttcaagacgttttaaacgaaggtttaagaacaagagatattatttctaaaggtaaaaaagaaatatccacatcacgaatgggtgatgcgataatttcaaaattgcaataa

SEQ ID NO: 208258 - DNA, 645 bp, Unknown
  Bacterial polypeptide expressing nucleotide sequence isolated from the Sargasso Sea
tatgaagagtgaaaatattttaattttacctggtgacggcgttggtccagaaataatgaaagaagctatcaaaatcattgatactctaaatacaagtaagatatgtaagatagaatacgaatcagcagatattggtggtgtagcaatagacaatcacaacacaccattacctaatgatacgctaaaaaaagctaaagcttcatcatcaattcttttgggtgcagttggaacaaaaaaacatgaatctaactcaaatgaaatgaagccagagacaggcctattaaaaattcgaaaaaatttagacttatttataaatatcaggccagtgtttttatttgatgcacttctagaaagttcatctttgaaaaaggaatatgtctcaggattagatatagtaattattcgtgagcttgtaagcgatatatattttggtgaacctagaggattcagcgatgataatacatcggcatttaatacaatgaggtatacaaaagaagaaatagagagaatcgctacatttgcttttgagctaagtcaaaaacgttcctcaaatcttacttcagtagataaagctaatgttctagaaacatcacaattatggagaaaagttgtttctgatattggtgaaaatataaaagtgttaaa

SEQ ID NO: 208259 - DNA, 886 bp, Unknown
  Bacterial polypeptide expressing nucleotide sequence isolated from the Sargasso Sea
aagaattattatgaaaaaacatcattacaaaattgcagttattgccggtgatggaattggcaaagaagtcatgcctgaagccattcgagttttagaaaaaatagcaaagcgttacaacatatcttttgacttcgatcataaagattggagttgtgaacgctatcatcaatttggctcaatgatgccagaaaatggtcttgatgaaattcagaatcacgactctattttgttgggagctgttggatttcctggggttccagatcatatttctttgtggggactgctgatccccatacgtcgaaaatttcaacaatatgttaatttgcgtcccgtttatcttttagaaggtatgaagtgtccactggctgggcgtgagccaggagatattgatttttggatcgtcagggaaaataacgaaggtgaatattcagaagttggtggaagaatgttcgagggaactgatgaagaatttgctgttcaacaaagcatttttacacggcgtggtatcgaccgaattatgcggtatgcattcgagttggcaaaaactcgcaatcgcaaacatgtaacctcagcaacaaaatccaatggtatcattcactcaatgcctttttgggatgaaaggtttgatgaaatttcaaaagactatcctgatattcagacggacaaataccatatagatattttaacggctcattttgttcgaaatcctgattggtttgatgtagttgtaggatcgaacttatttggtgatattttatcagacttaggtcctgcgattactggaacgattggaatagcacccagtgctaacatcaatcctgagcgagagtttccatcgtgctttgagccagttcatggttctgctcccagatatagctggaaaagg

SEQ ID NO: 208260 - DNA, 599 bp, Unknown
  Bacterial polypeptide expressing nucleotide sequence isolated from the Sargasso Sea
atttgacatttgttcttataataaagatgagataaaaagattggccaaaaaagggtttgaaatggctatgaatagatctaaaaaactttgctgtgtggacaaggccaatgtcctagaaacatctagactttggagagaaacggttcaggaaatggaaaaagattttccaaaagtaaaagtttcctacgagtttgtagatgcagttgctatgcgattggttcaatggccaaatagttacgatgttttaatcacagaaaatttatttggtgatattttaactgatgaagcatccgtaatttccggctccatgggcttaatgccctcagcttcaataggtgacaaaacttctttatttgaacctattcatggttcttaccctgaagtagctggtaagtatatagctaaccctttagcgaccatactttcggctgcaatgatgtttgaagatgcttttggattattagaggaaggccgcgcaattcgagatgctgttaatgattctttaaagtctaaaattgtcactaaagatttggctattgacaaagaaaatttttataaaaccaatgaggttggagagtggatttgtgaaaaaatataga

SEQ ID NO: 208261 - DNA, 858 bp, Unknown
  Bacterial polypeptide expressing nucleotide sequence isolated from the Sargasso Sea
tctccgggggggaataccatagctgctgccgagcatacaattgcaatgatgttggcattatcaagaaatataccaattgcaaatagtagtacttttttgggtaaatgggaaagaaaaaaatttgttggtaatgagttgtttaagaaaaagctaggtgttgtaggtttaggaaaaataggaactcatgtcgcaaaagttgccaatgctcttggaatggatgtttatggatatgatccatttgtttcctcagaaagagcacaacaattacaggtcagattgtccgaattaaaaacattgtttgaggaatctgattatttaactttacatttgccgaggacttcagaaacagaaaacctagtaaatatgaaggtgcttaaaagtatgaaaaaaaatgcaaaattaataaactgtgcgcgtgggggaataattgatgaagaagctttagctgaggcacttaataattcattgataggaggagccgctattgatgtgtttgctaaagagccattagactccaattcaccactacttaaagtcgataaaaatttaatccttacacctcatttaggagcatcaactagggaagctcaagagaatgttgctgtagatgttgctgaacaaataagagatgttcttttgggactttctgcacgaacagcagtaaatattccgggtttaagtcctgatattatggatagccttaaacctcatttgcaattagctgaaacaatgggccttttaataagccaactttctggaggacaaattcaaaagttagaggtaaggcttcaaggtgaatttgtgcaacacccttcacagcctttaatcatagccagtttaaaaggtctattaagtaag

SEQ ID NO: 208262 - DNA, 931 bp, Unknown
  Bacterial polypeptide expressing nucleotide sequence isolated from the Sargasso Sea
gaatcactgggaaagcattttcagggatccttcgaatggatagaacttccggtgggttggcaggcccttgagcaaaataagccgcctcttccccgggaaaccctggatgaactggaaaaatgtgatgcctgggtgatgggccctcatgactcggcctcctatccggaagcatttcagcagtccctgaatccgagcggagcgatccgcaagcattttgatctttatgccaacatccgtcctgccagaacggtcaaggggcttggggattccaggaagaacttcgatttggtcatcgtccgggaaaacaccgaaggattttatgctgaccgcaacatgcatctgggaattggagagttcatgcctcatccggacaccgccctcgcggtgggagtctttacccggaatgcctgcgaaaggatcgcccgaaccgccttcgagttggcgatgatccgtaagaaaaaagtcagtctcatccacaaagcgaacgtgcttcgaaccacctacgggcttttcctggaatgctgcgaaaaggtttccagggattttccggaagtcgtcgtcaacgatttccatatcgatgccgttgccgcgcttttggtccgtgaaccgcaggaattcgatgtgattgtgaccacgaacatgtttggagatatcctttccgacctcacagcagaactggcaggcagtctcggaatgggggccgcattgaacgccggaagcctgaaggccatggcccaggcagcccatggctctgctccctccctgcggggaaaaaacctggccaatccctgtggtttgatcctctcctcggcgatgctgcttcaatggctgggcaaccgggatcaaaaccctgggttgattcaggcttcggatgccatcgaaagtacggtgtatcgaactctcgaattccgcggacgttcccaggacctgg

SEQ ID NO: 208263 - DNA, 430 bp, Unknown
  Bacterial polypeptide expressing nucleotide sequence isolated from the Sargasso Sea
tatgaacttaaaaatagctttattgcctggtgatggtataggacctgaggttatcaaagaagctgttaaaatctgtaatgctatatcaaaaaaattcaatcattcaataacttggcaagaaggtcttgttggtgctgcagcaattgataagactggagatccatacccagatacaacccacgaaatctgtgtaaattcagatgccgtgctgtttggtgctgttggtgatcctaaatttgataataatccatctctttctgtaagacctgaagaggggttattaagaatgaggaaaaaattaggattatatgctaatcttagacctacattcactttcgaatatcttcttgaaatgtcacctattaagaaaagtatagttaaaagaactgacctaatttttgtaagagaattaattgggggtatttatttg

SEQ ID NO: 208264 - DNA, 455 bp, Unknown
  Bacterial polypeptide expressing nucleotide sequence isolated from the Sargasso Sea
aaaaatcaaaaaaaaagatattataagtaaattaaaaattataaattacttttatagaaaaaaattaaagaaaaaaccaaaaattgctattttaggattaaatcctcattctcatactacattaaaattttcagaagaaaaaaaaataattttaccagcaattaaaaagttaaacaaacttagtataagcgtagtcgggccactatctccagatacaagttttatgttttttaaaaaaaataaaattgacgtaatttttggaatgtatcatgatcaagtccttactccatttaaagctttatataaatttgatgcaataaatattactttgggactaccttttattagagtctctcctgatcatggtacagcaaaaaatattgctggaaaaaatattgctaaccctaaaagtctaattgaatcaattaaattttttaacagtataaatatttaaa

SEQ ID NO: 208265 - DNA, 506 bp, Unknown
  Bacterial polypeptide expressing nucleotide sequence isolated from the Sargasso Sea
tatgagtaagaaaaaaatacttattttacctggtgatggaattggaaatgaagtcatggctgaagtttttaaaataatagactggatggaaaaaactaaatctatgtcctttgatatttcagaaagactagttggtggaacagcatatgataaagaaggtaactcaataagtgatgaaacgatgaatgttgctatggattcagatgcagtattatttggtgctgttggaggatctaaatgggataatgtagaaagagaaaaaagacctgaagcagctcttttaagattaagaaaagagttagatttatttgcaaatcttagaccagctgttgttttagacgcacttgtagaagcttcatctttgaaactagaattagttaaaggattagatattctaatagtaagagaattaactagtggagtatattttggtcaaccaaggggaatttcaaagattagtgatacagagagtaaagcaattgatactcaactttatacaacatcag

SEQ ID NO: 208266 - DNA, 839 bp, Unknown
  Bacterial polypeptide expressing nucleotide sequence isolated from the Sargasso Sea
tgatattctttcccaagtcgctcaagttgatcagagaatagggatctccaactctgaattggcatctattatccatgattatgatgctctaatgatacgttctgggactcaagtaacaggagatattattaattcttctaagaaactaagaataattggaagagctggagtaggtgtagataatgtagatgttaaggcggccactcaaaagggagtactagtggttaattccccaggagggaataccatagctgctgccgagcatacaattgcaatgatgttagcattatctagaaatattccaattgctaatagtagtacttttctgggtaaatgggaaagaaaaaagtttgttggtaatgagctttttaagaaaaagttaggcgttgtaggcttaggaaaaataggaactcatgttgcaaaagttgctaacgctcttggaatggatgtttatggatatgatccatttgtttcctcagaaagggcacaacaattacaggttaaattgtccgaattaaaaacattgtttgctgaatctgattacgtaactttgcatttgccaaggacttcagaaacagaaaacttggtcgacattaaggttctaaaaagtatgaaaaacaatgcaaaattaataaattgtgcgcgaggggggataattgatgaagaagctttagctgaggctcttaataattcattgataggaggagctgctattgatgtattttctgaagagccattaggctctaattcaccattactgaaagtcgataaaaatttaattcttactcctcatttaggagcgtcaaccagggaggctcaggagaatgttgcagttgatg

SEQ ID NO: 208267 - DNA, 829 bp, Unknown
  Bacterial polypeptide expressing nucleotide sequence isolated from the Sargasso Sea
gatgcgatttttctaggtgcaattggattgcctgaaatcagaatgaatgatggaactgaaatagctcctcatttaaggtttagagaaaaatttgatttgtatgcaggtgtaagacctgttaaagcctatcctaactcaccgcaaaaattaaaagatgaaaattctgataagataaatttagttattttaagagagtgtactgaaggcctgttttataccgcatcagttcataacagaaaccctgttgccaataataatgaagtgcatgatgtgatgaaaataacaagaaaaacttctacaaaattacacaaatttgcattcaatttagctagaaaaagaaaactcaaaggtactcttgggaaagtcacatgtgttgataaagcaaacgtattcaaatcccaagcattgtttaggaaagtttttgaggaagttaaaaataattttcctgaagttaattctgagacctgctatgtagacgcaatggcattaaaccttatcagatgtccttgggaatacgatgttttggttatggaaaatatatttggtgatattctatctgacatgggtggtggcttggttgggggtatgggaatggcctcttgtgcagaaattggagataatcatggtttgtttcaaccagcccacggtagtgccccagacataatgggaaaaaatatggctaatcctattgctaccatattgagtgcatgtatgatgctagagtaccttgcagagaaaaaaaataatcaaagtgcaaataaggcagctcaattaattgaaaaagctatagaatatggttttgaaaaaaatttgttacgaccccaatgaa

SEQ ID NO: 208268 - DNA, 706 bp, Unknown
  Bacterial polypeptide expressing nucleotide sequence isolated from the Sargasso Sea
tcccgaagatattaacttcgttgttgttagagaaaatactgaaggactatatgcaggtgctggaggctatattcattacggaacagaaaatgaaattgcaacacaagaatcgattaattcatattatgcaattcatagatgtataaaatatgcttttgaatatacaaaaaataacaatcgtaaaaaaattacattatgtgcaaaaactaatgtactcacatatgctcatgatttatgggagagaattttttataatgttgcaaaagattatcctgatatagagactgattacggtcatgttgacgctatctgcatgtggatggtaaaaaatcctgagtggtttgatgtaatagttacagacaatatgtttggtgacattatcactgatttaggtgcaatgattcaaggcggtatgggcattgcagctgggggtaatattaatcctgaaggtgtatcaatgtttgagccaataggtggttcagctccaaaatatacaaatgaaaatgttattaatccattggcatgcattggtgctgcagcaatgatggtcaagcaacttggtgaaccacattacgctgaaaatattgaaaaagcgataattaaaactgctataaagcttgattccctatcagcagggaaaatgggtatgtcaactaatgaggttggagattccgtagtcaactatatgcaaaaaattaatgactaa

SEQ ID NO: 208269 - DNA, 262 bp, Unknown
  Bacterial polypeptide expressing nucleotide sequence isolated from the Sargasso Sea
aatgccttcaaatcaaagaaaaatattactattaccaggtgacggtattggaccagaagttgttcgtgaaactaaaaaagtaattgactggtttaataaaaaaaaatctttggatttcaaacttgatcaaggattaataggtggagctgctattgatgaacatggtgtaccaataacagatgaagtattttataaagcactagaaagtgatgcggtaatatttggagcttgtggcggtccaaaatatgacaaattagaattt

SEQ ID NO: 208270 - DNA, 297 bp, Unknown
  Bacterial polypeptide expressing nucleotide sequence isolated from the Sargasso Sea
gccagcttaaacgggttccaactttgggtttgtacgaaccagctggtggcacagcgccagacatcgcaggcaaaggcattgccaatccaatagcacagattttaagtgccgccttaatgttgcgttacagcttcgccgaagaagccgcagctcgtgctattgagcaagccgttgccagtaccttagagcaaggcatagtcacgcgggatattaattcagcatcgaattacggcacagcagatgtaggcgcagctgtcattgctgccttaaacgctattgatacaaagagagcttaat

SEQ ID NO: 208271 - DNA, 601 bp, Unknown
  Bacterial polypeptide expressing nucleotide sequence isolated from the Sargasso Sea
tgtgaaaacctttttgatttcgctttcaagctttcacggaggcgaaaacagaaaagaggaaaaggcagggttacctgtgttgataaatcgaatgttctacgcagtatggtctttttccggagaatctttgatgaacgggctttgttgtttcccgatattcagagtgaacacaactatgttgacgcccaggctctggatctgatccgaaggccatgggaatttgatgttttggtgatggaaaacatgtttgcggacatcctttccgatttaggtggaggattggtgggaggaatggggatggctccctgtgcggaaattggaataaatcatgggctgtttcagccagcccacggaagtgcacctgatatcatggaaaaagatttggccaatcctactgccatgtttctctcggcagccatgatgctggagtggttgggacaaaaatatcagaatgagtccttgttgaatgcagcaagattacttgaaaacaagattgaagaaggattccgtttaaaaagaacccagccaaaggaattcggaggccctcatggatgttttgaacacacacgaaatttattggagatcattgaaaatctttagc

SEQ ID NO: 208272 - DNA, 184 bp, Unknown
  Bacterial polypeptide expressing nucleotide sequence isolated from the Sargasso Sea
atggatttgtttgctaatcttaggcctgccatggtttttcctgctctcgttgatgcttcttctctaaaatccagcattatctctggcttagatattttaatattaagagagttaactggaggtatttattttgcagagcctcgtgggatagagaaatcgatacccttacaaaaaaaggtatgat

SEQ ID NO: 208273 - DNA, 272 bp, Unknown
  Bacterial polypeptide expressing nucleotide sequence isolated from the Sargasso Sea
aattggtgaaagcatggggctttttgaacctattcatgggtcattccctcaggcaaccaataaaaacatagcaaaccccgttgctgcaattctttctgtttcaatgatgttaaattatttaaaccttgggaagggagctaaaatgattgaaaaagctgtagaaaattcattaataaataaagtttctacagccgacataaacgatatttcaccatcaaaaacatctgaagttggtgattatatatcaaattttataagagaaaataattaaa

SEQ ID NO: 208274 - DNA, 254 bp, Unknown
  Bacterial polypeptide expressing nucleotide sequence isolated from the Sargasso Sea
aatgattaaagtaaaaaaaagaaaaatattattattacctggtgatggtatcggtccagaagtaattgctgaagtaaaaaaaattataaactggtttaatgataaaaaatcattagattttgaaatagatcaagagcttgtaggtggttgttcttatgataaacatggcactccaattactgatgaagtattttataaagctttagagagtgaggtaattatgttaggagcagtaggtggccctacatgggacg

SEQ ID NO: 208275 - DNA, 346 bp, Unknown
  Bacterial polypeptide expressing nucleotide sequence isolated from the Sargasso Sea
atgactaaagctaaaaaaagaaaaattttattattaccaggcgatggtattggaccagaagttattggagaggtaaaaaaagttatagaatggtttaataagaataaatctttggactttgtttttgaagaagagttaatcggtggagcctcaattgatgcaaataaaattccaataaccgatgaagttttttataaatctttagaatcagatgctgtaatcttgggagcttgcggcggtccaaaatgggataatttagaattttctaaaaaaccagagagagctcttttaaaacttagaaaagaactaaaattatttgccaatcttagaccagccaatttgtttt

SEQ ID NO: 208276 - DNA, 832 bp, Unknown
  Bacterial polypeptide expressing nucleotide sequence isolated from the Sargasso Sea
ttgaaattatgtagtgaagtagatggtattattttgggaccagtggatcataataattatccaccaaaaagtgaaggtggatttaatccatctggtgaattaagaactaaattaaaattatattctaatattcgaccagctaaagcatttaaaggtactaaatgtatattagacaaaatagatctagtaattgttagagaaaatacagaagggttttatgctgatagaaatatgtttagtggaaatggtgaattagaaatagaagaaggaactggaatttcaattagaaaaattacaaagaaagcgtcagaaaatatcgcaaaaagaggttttgaaattgcaaaattaatgaataaaaataaaaaagttaatgttcatgcaattcacaaggcaaatgttttaaggttaacagatggtatttttttaaatgcttgtagaaatatttcaaaaaaatatccagaaattaattatcatgaaatgttagttgatgcagcaactgcgcatatggtaagaaatccagaacaatttgatgttctgataacaactaatatgtttggagatattttatcagatctagcctcagaactttcaggatcattaggtctttcgggttctttgaacgtaggtgatacaatacctatggcgcaagctcagcatggtgcagcaactgacattgtgaataaaggtattgcaaaccctatatctttgattttttctacagctatgctgttagattggttaggaaagcaaaaaggacaagagatttatattaaggctaaccaattaatttatagagttgtagaaaatattttagaagaaaataaatatttaa

SEQ ID NO: 208277 - DNA, 276 bp, Unknown
  Bacterial polypeptide expressing nucleotide sequence isolated from the Sargasso Sea
ataaagatggagaaatgagagcaatgtacgaaccaattcatggatcagcaccagatattgctggaaaaggacttgcaaatcccatagctactattttaagttttgctatggctttaaaatattctttagatcttgataatgaagcagatgcattagaaaaagcagttcaagatgtattaaatgatggtttaagaactaaagatattttgtctaagggaaaaaaagaggtttcaacatctgaaatgggctctgctataatttcaaaattgcaataat

SEQ ID NO: 208278 - DNA, 601 bp, Unknown
  Bacterial polypeptide expressing nucleotide sequence isolated from the Sargasso Sea
tatgagcaataaaaaaattcttattttgcctggcgatggaattggaaacgaagttatggctgaagtttttaaaattattgactggatggaaaaaactaaatcgatgtcatttgatatatctgaaagactagttggtggaactgcatatgacaaggaaggcgactctataagcgatgaaacaatgcaagttgcattgagctcagatgcagtattatttggtgcagttggtggagcaaagtgggataatgtagaaagagaaaaaagaccagaagctgcgttattaagattaagaaaagatttagatctatttgctaacttaagaccagcggtggttttagatgctcttgcggaagcttcatccttaaaagtagatttagttaaaggtttagatatacttatagtaagagagcttacaagcggagtttactttggtcaaccaagaggaatttctaaaattagtgatacggaaagtaaagcaattgatactcaagtttatactacatcagaaattgaaagagtttcaagggttgcatttgatttagcaaaattaagaagcaacaaagtatcgtcagctgagaaatcaaatgttatggagactgga

SEQ ID NO: 208279 - DNA, 433 bp, Unknown
  Bacterial polypeptide expressing nucleotide sequence isolated from the Sargasso Sea
aatgaattttaaaatcgcccttttatctggagatggaattggacctgaagttactgatgaatctttaaagatattagatgcagtttctaaaaagtatggccataaatttgaatatgattatcaggatgtagggggcatttcaatcgataagcacaacacagcaataacagaagaggcattaagtagatgtttagaaagccaagcagtgttatttggttctgttggtggacctaaatgggacgacccaaatagtgatgtgaggcctgaagatgggatattaaaattacgtaaagaattagatttgtttgcaaatataaggcctgcaaaagtttatccagcattatcaaattcaagtcccctaaaaaaagaaatcttagaaaatgttgattttataattataagaagaattaacttcgggattatattttggtga

SEQ ID NO: 208280 - DNA, 236 bp, Unknown
  Bacterial polypeptide expressing nucleotide sequence isolated from the Sargasso Sea
tatgccatcaaatagtagaaaaattttgcttttgcctggagatggaataggacccgaggttgttagtgaaacaaaaaaggttatagattggtttaataaaaaaaaatctttagattttaaaattgatcaaggactcataggaggggctgctattgatgaacatggagttcctattaccgatgaagttttttaccaggcattagaaagtgatgctgttatatttggtgcatgtggtg

SEQ ID NO: 208281 - DNA, 346 bp, Unknown
  Bacterial polypeptide expressing nucleotide sequence isolated from the Sargasso Sea
ttatcgtgatcaagcatcaatgttaacaggatcactaggactcttaccttcagcttctttaggagcaaaaaataaagatggtgagatgagagcaatgtacgagcctattcatggatctgctcccgatatagcaggaaaaggtgttgcaaatccgattgctacaattttaagttttgctatggccttaagatattctttggatcttgataaagaggcagaggccttagaaaaagcggttcagagcgtgttaaatgagggccttagaacaaaagacatattatctaaaggaatgaaagaagtatccacatcagaaatgggcgatgcgataatttcaaaattgcaataa

SEQ ID NO: 208282 - DNA, 439 bp, Unknown
  Bacterial polypeptide expressing nucleotide sequence isolated from the Sargasso Sea
tatcttgaaattgagactgattatggtcatgtagatgctgtttgtatgtggatggtgaaaaatcccgagtggtttgatgtaattgttactgataatatgtttggtgacattattactgatttaggtgcaatgattcaaggcggtatgggtattgcagctggaggtaatattaatcctcaaggtatatctatgtttgagccaataggtggctcagcaccaaaatatacaaataaaaatgttatcaatccattggcatgtattggagcggcggcaatgatggtcaaacaacttggtggggaaaattatgcagaggatattgaaaaagcgataattgaaaccgctataaaacttgattccttatcagctggaaaaatgggtatgtctactagtgaagttggtgactccgtagtcaattatatgcaacaaattaatgactaat

SEQ ID NO: 208283 - DNA, 419 bp, Unknown
  Bacterial polypeptide expressing nucleotide sequence isolated from the Sargasso Sea
aatgaaaatattagttttgccaggcgatggtgttggccctgaaataactttggaagcaagaaaagtaataaataaaatatcaaatatcttcaatttaaatattgagattgaagaggcattatttggtggcattgcggtagacaaatttgacagtccctatcctgaggaaacaaaaattaaagtaaaagaatcagatgctgttcttcttggtgccgttggaggaattaagtatgatattttaccaaaagaaaaaaaaccggaatctggattactcagtttgagaaaagaatcaaatctttttattaatattagaccaataatctcttttcctgaattagcaaattcttcatcagtaaaaagcgaatatattaataatctagatattataataataagagagctaataagcggattatatt

SEQ ID NO: 208284 - DNA, 382 bp, Unknown
  Bacterial polypeptide expressing nucleotide sequence isolated from the Sargasso Sea
aatgagcaataaaaaaattctcatactaccaggtgatggcattggtaacgaggttatgtcagaagttctcaaaattattgattggatggaaaaaactaaatctatgtcttttgatattacagagagactggttggtggcacagcatatgataaagaaggcgattctattagtgatgaaacaatgcaaattgccttggattcagatgctgtattatttggagctgttggaggctctaagtgggataacgttgagagagataaaaggcctgaagcagctttattaagattaagaaaagatttagatttatttgccaatctcagaccagcagtagttttagatgcactcgcaggagcatcatctttaaaatttagatttagttaa

SEQ ID NO: 208285 - DNA, 895 bp, Unknown
  Bacterial polypeptide expressing nucleotide sequence isolated from the Sargasso Sea
tgttaatgaaacaattaaagttttagaacacacaaaatcaaaatttaatattgaatttgattttgttgaaaatgatttaggtggagataggtatttaaaatctggggatttagtaactgactcagatatagaacaacttagtaaaagtgactcaattcttttaggtgcaataggacatccagatgtaaaacctggaattctagaacaaggtattcttttgaaattaagaaaagaatttgatcagtacataaatcttagacctgttgttttatatgagggcgttgaaactccccttgcaaataaaactccagatgatataaattttgttgtcgttcgagaaaatacagaaggattgtatgcgggtgcaggaggctatattcattatggaacagataaagaagtcgcgactcaggaatcaataaatacacgaagcgcaatacaaagatgtatcgaatatgcatttgattatacaagtaaaaataatagaaaaaaaataacactatgcgctaaaacaaatgttttaacatatgcacatgatttatgggaaagagttttttatgaagttgcagaaaaatatccagatatagaaactgactatgggcatgtagacgcagtttgtatgtggatggtaaaaaatccagagtggtttgatgtgatcgtaacagataatatgtttggagatattattacagacttgggtgcaatgatccagggtggaatgggtattgctgcaggtggtaacattaatccgaacggagtttcaatgtttgagccaattggaggatcagctccaaaatacactggtaaaaatgtgatcaatccacttgcatgtattgctgctgcatcaatgatgcttgatgtgctaggtgagaaagaatatgctagtgatatagaa

SEQ ID NO: 208286 - DNA, 223 bp, Unknown
  Bacterial polypeptide expressing nucleotide sequence isolated from the Sargasso Sea
atgacaacaaatcaaaaaaaaatacttcttttaccaggtgacggtataggcccagaagttgttggagaaacaggaaaagttattgattggtttaataaaaaaaaatctttagattttaaaattgaccaagatcttattggtggagctgcaattgataaacacggtgttcctatcactgacgaagtattttataaagctttagaaagtgatgcagtaattgttg

SEQ ID NO: 208287 - DNA, 421 bp, Unknown
  Bacterial polypeptide expressing nucleotide sequence isolated from the Sargasso Sea
aatgactaaagctaaaaaaagaaaaattctattattaccaggcgatggtattggaccagaagttattggagaggtaaaaaaagttatagaatggtttaacaagaataaatctttggactttgtttttgaagaagagttaatcggtggagcttcaattgatgcaaataaaattccaataactgacgaagttttttataaatctttagaatcagatgctgtaatcttgggagcttgtggcggtccaaaatgggataatttagaattttctaaaaaaccagagagagctcttttaaaacttagaaaagaactaaaattatttgccaatcttagacctgcaatttgttttaagcagttagttgactcgtcaactttaaaaaccagaaatagtgtctggtttagacattatgattgtaagagagtt

SEQ ID NO: 208288 - DNA, 442 bp, Unknown
  Bacterial polypeptide expressing nucleotide sequence isolated from the Sargasso Sea
ctcagttgattatcctgaaatagaaacaaattctcttctaattgatgctgcatgtatggatttcattagaaaacctaaagattttgacgttgtagtggctagtaatttatttggtgatattttaactgatatcggagcaatgattacaggtggtttgggtttggcttccagtggaaacatatcattgaataaaaacaatccatcaatgtttgagccaacacatggaagtgctccagacattgcagggaaaaatcttgcaaatccaattgcacaaatattaactggagccatgatgttatctcatcttggagaagataaagctgctaatgatataagagaggctgttgtgaaaactctaaaagatggaaatcatctaacatcagatcttggtggaacttcaaaaacagatcagtgcacaaatgaaatcataagaaacatatga

SEQ ID NO: 208289 - DNA, 425 bp, Unknown
  Bacterial polypeptide expressing nucleotide sequence isolated from the Sargasso Sea
aatgagcaataaaaaaattcttattttaccaggagatgggattggtaatgaggttatgcgtgaagtacttaatattatagactggttgacaaaaaaaagatcaatgtcttttgatatatctgaacgtcttgtaggaggaactgcttacgataaagaaggagattctataagtgaaactacgatgcaagaagctctagattcagatgcagttttattcggagcagttggtggacctaaatgggataatgttgaaagagaaaaacgaccagaggctgctttattaaaattaagaaaagaattggatttatttgcaaatcttcgtcccgccgtagtgtttaatgctttagcagaatcatcacctttaaaattaaatttagttaaggatttagatattttaatattgcgagaattaacaagtggcgttt

SEQ ID NO: 208290 - DNA, 112 bp, Unknown
  Bacterial polypeptide expressing nucleotide sequence isolated from the Sargasso Sea
cttacaggaggaatttactttggagaacccagaggaattaaacctattgaaaatggagagcgtagaggagttaatacccacgtttatacgaccaaaaagatcaaaagaattg

SEQ ID NO: 208291 - DNA, 124 bp, Unknown
  Bacterial polypeptide expressing nucleotide sequence isolated from the Sargasso Sea
atgggtaaatcctctctattaatacttcctggtgatgggatcggacctgaagttatggttgaagtccgaaaaatcatagattggtttggcagtaatcgtggccttgacttcgacgtcatagaag

SEQ ID NO: 208292 - DNA, 796 bp, Unknown
  Bacterial polypeptide expressing nucleotide sequence isolated from the Sargasso Sea
catgacgcagacaatcaccgtcatccgcggcgatggcatcggcccggaaatcatggacgccaccctgttcgtgctcgacaagctcggcgcggggctgtcctacgagttcgccgatgccggcctggccgcgctggaaaagcacggtgagctgatcccggccagcacgctggaatcgatcaagaagaacaaggtcgcgctgaagagcccgctgaccaccccggtcggcggtggcttcagctcgatcaacgtggccctgcgccgccagttcgacctgtacgcgaacgtgcgcccggcgatctcgttcccgaacaccaagtcgcgctacgagaacgtcgacctgatcaccgtgcgcgagaacaccgaaggcgcctacctgtccgaaggccaggaagtctcggctgacggcgagaccgcgttctccggcacccgcatcacccgcaagggttccgagcgcatcgtgcgctacgccttcgagctggcccgcagcaccggccgcaagaaggtcaccgccgtgcacaaggccaacatcatcaagtcgacctcgggcctgttcctgaacgtcgcccgcgaagtggccgcgaagtacccggaaatcgagttccaggaaatgatcgtggacaacgcctgcatgcagctggtgatgcgtcccgagcagttcgacgtgatcgtcaccaccaatctgttcggcgacatcatctccgacctgtgcgccggcctggtcggcggcctgggcctggccccgggcgccaacatcggcgagaccgcggccattttcgaggccgtgcacggtaccgcg

SEQ ID NO: 208293 - DNA, 367 bp, Unknown
  Bacterial polypeptide expressing nucleotide sequence isolated from the Sargasso Sea
tatgagcaaaatatttaagttactgattcttccaggagacggtattggtcccgaggtaatggctgaagtaacaaaattaattttagcagtcgaacagtcaagtggtgtcaaatttgaaattacttatgatgatataggtggtgcagcctatgatcgttacggcaagccattagcagacactactttggaaatagcaaaacaatctcatgctgtattgctaggtgctgttggtggtgaaaaatgggacgatttagatttttcgcttaaaccagaacaaggattattacgtatcagaaaagaacttgaactgtttgcaacttacgaccagctatgtgctttgagtctatggttgaagcatcatcactga

SEQ ID NO: 208294 - DNA, 292 bp, Unknown
  Bacterial polypeptide expressing nucleotide sequence isolated from the Sargasso Sea
actattggaattgctccatcaggtaatattatccagaaaaataaatacccgtcattgtttgagccagtacatggttctgcacctgatatagctggaaaaggagttgctaatccggttggacaaatttggtctggtgcaatgatgttagattatttgggggaaaaagaagctgcaaattcaattgtaacagctattgaaaaatctttaaaaaatgaaaaaaatagaactaaagatttgggtggtgaaagcaatactattgaatgttctaaatccattttatcaaatctttaag

SEQ ID NO: 208295 - DNA, 184 bp, Unknown
  Bacterial polypeptide expressing nucleotide sequence isolated from the Sargasso Sea
atggattatttgaatcagctcctatatgagcctgttcatggttctgcgccagatatttacggtcaaggaattgcaaatcctttagcatctattttatccttctcaatggcgttaaagtatagttttggaagaaataaagattcaaaattacttgaggattctatatcacaaagttttagatgaa

SEQ ID NO: 208296 - DNA, 367 bp, Unknown
  Bacterial polypeptide expressing nucleotide sequence isolated from the Sargasso Sea
tgtaattgttgctagtaacttgtttggagatattttatctgacattgcggcgacacttactggatcaataggcatgcttccttctgcatcgcttgatagctctttcaagggcatgtatgagccttgtcatggtagtgcacctgatattgccaatcaagatctcgcaaatccattagcaatgattggctcattatcgatggctttaagatattcattggaagaagaaactgttgcaaataaaattgatacagcaattaaaaagttcatacaaaaaggttttcgaacaagagatattgccacggatgtaaattatttaaaaacatccgaggttgctgaaaaaattatagagattcttgaaaatgaatag

SEQ ID NO: 208297 - DNA, 452 bp, Unknown
  Bacterial polypeptide expressing nucleotide sequence isolated from the Sargasso Sea
aatgacctcaaataaaaaaatcatggtattaccgggagatggtgttgggcccgaagtagttgatgagacaaaaaaaatattagactggtttgcaaagcaccaaggactgaattttgatattcaagagagtttagttggtggtgcggcttatgaaaagtatggcgttccattaactgatgaaacactttcagacgctatggaagctgatgctatattatttggttctgttggtgttccgcaatatgatgaaatagattttgaaaaaagaccagaaagaggtctattaaaactcagaaaagaaatggatctatttgcaaatctaagacctgcaattgttttccctgctttagcaaattcttcaaccttaaaatccgaaattgtttctggattagatatattaattttaagggaacttactggaggaatatattttgctgagccaaggggtatag

SEQ ID NO: 208298 - DNA, 452 bp, Unknown
  Bacterial polypeptide expressing nucleotide sequence isolated from the Sargasso Sea
ctatcccgaagtggagatagaggagatcatcgtcgatgccatggcggcgctgctggttcgccggcctgagagtttcgatgtgttggtgaccacaaatctgtttggcgacatactctctgacgaggcagctgagttgtccggtggtctgggcctcggcgggtccatcaacgcgagcaatgattatgctgtcgcgcaggcggcgcacggctccgcaccagatatcgcaggtcagaacaaagccaaccccacggcactgatgatttcagctcagatgttgttaaagtggcatgcaaaccagtctggtaacaatcaattggctagcgcggcggcgcatctggaatccgcattggacgaagttttggcggatccggcgaaccacacggtggacatgggaggcagcgttggaacggataaatttggcgaggtcttggcacatgttgtcgaccagtaaa

SEQ ID NO: 208299 - DNA, 259 bp, Unknown
  Bacterial polypeptide expressing nucleotide sequence isolated from the Sargasso Sea
atgagtaataaaaagatattagtcttgcctggagacgggattggcaatgaagtcatgcacgaagttttaaatataatagattggttatctaaaactcggtctatgtcatttgatatttctcagagacttgttggtggcacagcatacgataaagaaggagattctataagtgatgaaactatgcaagaggctttagactcagatgcagtcctattcggtgcggttggtggtccgaaatgggataatgtgaaagagaaaa

SEQ ID NO: 208300 - DNA, 589 bp, Unknown
  Bacterial polypeptide expressing nucleotide sequence isolated from the Sargasso Sea
aatgagtaataaaaaaattcttattttacctggagatggtattggtaatgaggttatggctgaagttctcaaaattattgattggatggagaaaacaaaatccatgtcttttgatatttcggaaagattagttggcggagctgcatacgataaagaaggaaactctattagtgatgaaactatgcagattgctttggacgcagatgctgttttatttggtgcagttggtgggtctaaatgggataatgttgaaagagaaaaaagaccagaagctgctttattaagattaaggaaagatttagatctttttgcaaatttaagaccagctgttgtattagatgctttagcagaatcttcttccttaaaatcagacttagtgaagggattagatatcttaattgtaagagaattaacaagtggagtatattttggtagacctagaggcatttctaaaattagtgatactgaaagtaaagctattgatactcaagtttatactacatctgagatagagagagtttcaagagttgcttttgatctagcaaaattgagaagaaataaagtttcatcagctgaaaaatctaatgta

SEQ ID NO: 208301 - DNA, 1063 bp, Unknown
  Bacterial polypeptide expressing nucleotide sequence isolated from the Sargasso Sea
atgaatgaatataaaatagctgtaattcctggagatggaatagggaaagaggtagtcagggaggcctgcaaggtcttggatagtgtatcaactttaaataactttagcctcagttacgagttttttaattgggggtcagattattattttaaaaacaatacaatgatgccaatagacggcttggaaattttaagtcaatttgatgcaatttttttaggagcagtaggggatccaaaaattcaagatcacataacgttaaatggattacttttacctataagaagaaaatttgatcaatttgtttgcttaagaccctctagtttatttgaaggtgtaaattcaccattaaatggaattaatcctggcgagatagaccttgttgttgttagagaaaacacagaaggagagtatgcgaacgttggaggcttccaatatgaagattttgatgatgaaattgcaattcaatcagcagtttttacaagaaaaggcacagaaagggttataagatatgcctttaatttagcaatggagagaaagaaaaaattaacatcaattactaaatctaatgctcaaggatattctatggtcttgtgggataaggtttttaaagaggtttcaaaggactacccagaagttaaaactaactccttattgatagatgctgcttgtatggattttattaggaagccttcagaattcgatgttgttgttgcaagtaatttatttggagatattcttacagatatagcagcaatgattactggcgggcttggcttagcatcaagtggaaatatatcagaaaacaaagacaatccatctatgtttgaacctacacatggaagtgcgcctgatatagaaggtaaaaatattgctaatcctttagcacagattttaacaggagcaatgatgttatcttatttaggtgaaaacactacagcagattcaattcggggtgcagtaaaaggcgttttaaagacaggaaacagtattacatctgatcttggagggaatgctactacaactgaatgcactgaagaagtaataaaaaaattaaatgaataaa

SEQ ID NO: 208302 - DNA, 544 bp, Unknown
  Bacterial polypeptide expressing nucleotide sequence isolated from the Sargasso Sea
tatgattgaggttgataaagttatttctattatttcatcaatgtttgacgttcaatttgatattgagaaagatgatataggtggctcagcatatgatcgatatggagttcctttggcagatgagactctagagaaagctaaatcttctcatgcagttctacttggagcagttggtggagaaaaatgggataacttagatttttctttaaagcccgagcaaggattactaaaaattagaaaagagttagatctatttgcaaatcttagaccggcattgtgctttgagtctatggtggaagcttcttcattgaagcctcatctagtttcaggcctagacataatgatagtcagagagctaacaggtggtgtttattttggaaaaccgaggggcatcgaaactaagagcgatggaagtcgggttggtataaatactcaagtatatgcaacgcacgaaataagaagagttgctagaattgcttttgagttagcacaaaaaagagataatcgagttgtttcttgtgaaaaatcaaatgttatggaatca

SEQ ID NO: 208303 - DNA, 616 bp, Unknown
  Bacterial polypeptide expressing nucleotide sequence isolated from the Sargasso Sea
tatgaagagtgagaatatattaattttacctggcgacggtgttggtccagaaataatgaaagaagctatcaaaattatagatactcttaattcaagtaaaatatgtaatatagaatacgaatcagcagatattggtggtgtagcactagacaatcataacacgccattacccgatgatacgcttcacaaagctaaagcttcatcatcaatacttttgggtgcagttggaacaaaaaaacatgaatctaacttaaatgaaatgaagccagagacaggcctattaaaaattcgcaaaaacctagacttatttataaatatcaggccagtatttttatttgatgcacttttagaaagttcatccttgaaaaaagagtatgtcacaggattagacattataattattcgtgagcttgtaagtgatatatattttggtgaaccacgaggatttaatgatgataatacatcggcatttaatacaatgaggtatacaaaaaaagaaatagagagaattgcaacatttgcttttgaattgagtcaaaaacgttcgtcaaatcttacttcagtagataaagctaatgttctagagacatcacaattatggagaaaagttgtttca

SEQ ID NO: 208304 - DNA, 668 bp, Unknown
  Bacterial polypeptide expressing nucleotide sequence isolated from the Sargasso Sea
tatgttcactggttctggggagtttatgccaacgcccgatctagcgttagctgttagaaaaataagtcgggatggatctcgccggatcggacaagttgcagcaaaaattgcgtcggaacgcccaagacagaaaatcactataataacgaagtcgaatgtcttgaaactttccgatggattattcagagatgaatgtatagaggccgcaaaaaaatattctggcctagaagttgatgagatacatgttgatgcggctgcttctttgtttgttagaacgcctgataattttgatgtagttgtgacgtccaatatgttcggagatatattgtccaacttagcaaacgagctatcgggtgggctcggattgggtggatctctgaatgctggacataataaagccgtagcacaagcaagtcatggttccgctcccgacatcgcggataaaaatatagcaaatccatcggcgctcctgctgtccactggaatgttgtttgactggttggccgaacgcaatgacagtaatgcgttgaaagaggctgcaaggttaatcaggtccagtatggaacaagttttttcccaatcggataatctaacagttgacctcaatggtagtttgggaactaaagaatttggtatgcaattgaaaaaaaagattgaggaactctgaa

SEQ ID NO: 208305 - DNA, 622 bp, Unknown
  Bacterial polypeptide expressing nucleotide sequence isolated from the Sargasso Sea
aatgaaaagatataaagttgttctactttctggagatggtataggcccagaaatatcagaaatttcaataaccattttaaaaaaactttctaagaagtatggttttaatcttgatattaaggaagaatattttggtggtatagcttatgagaaacataatgatccagcgccaaaagagacattagatcaatgtaaagctagtgatgcagtacttttggcttgtgtaggtgatgtgaaatatgatactttaccaagagaattaaggccagaaagtggtttacttaaattaagagaagcattaaatttattcgctaatataagacccgtaaagataagaaaatccttactggattcaagttctttaaaaaaagaagttattgaaaatgtagatttaattgtagtaagagagctaataggtggaatctattttggacagcctagaggagaaatcacgaacactaaaattaaaaaagctttcaatacaatggtttatgattcaaatgaaatagaaagaattacagaagttgcaattaagatagcaaatcaaagaaataaaaaaatatgttctgtagataaatcaaacgttttagaagtaagccaattatggagagatacagtttca

SEQ ID NO: 208306 - DNA, 1015 bp, Unknown
  Bacterial polypeptide expressing nucleotide sequence isolated from the Sargasso Sea
atgtataatatttcgttaattactggtgatgggattggtcctgaattatctgaatctgtaaaaacaattttggattcaattcatgataaattaaatgtaaaatttaatgtaacttctcttgtagctggtgacagtgcacttgaaaaaacaggcaaagcattacctgatgatgtttttgaatcaattaaatcatctgatgcatgtttgaaagctcctgttggcgaaagtgctaaagatgttattgttgcattaagacaaaaattagatctctatgcaaacattcgtcctgcaaaatcgtatccaaacactcctgcattaagagatgatattgatttagtaattgttagagaaaacactgaagatctttacactggtcaagaattccaagttgaggatactgctgtggcattaagaattatcagtgaaaaggcttctaaacgaattgcaaaatatgcctttgaaactgcaatggatagaaatcaacaaaaacgtgtcacatgtgtacataaatccaatgtcatgaagatgactgacggcttatttgcccgtgcatgtgaggatgtttcaaaagattaccctgacgtcacatttgatcagatgtatgttgatgcgtgctcaatgaacttaattcgttctcctcatgaatttgatgtaattgtgactacgaatttgtttggtgatattttatctgatgaatcctcgcaagttgtaggtggattaggtatggcacctgcagccaatttgggagataattttggcttgtttgagccagttcatggtgcggcatttgatattgctggaaaacaaattgcaaatccatcttcattcatcttatctacaaaaatgatgcttgattggttaggttcaaaaaataatgattcagattgtatttttgctggaaaaaaacttgaagatattgtcttggatttaataaaatctggcattaccactaaagatattggtggagaaaaatccacgcaggaatttaccaaagaaattactaacagactataac

SEQ ID NO: 208307 - DNA, 1066 bp, Unknown
  Bacterial polypeptide expressing nucleotide sequence isolated from the Sargasso Sea
atgaaaaaatataacatttcagtaattggcggtgatggaactggacccgaagttgttgatgaagctttaaaagttcttgaacaaacaaaatctaaatttgatattgattttaattttataatcaatgatttaggtggcgatagatatttgaaaagtggtgatcttgtgactgaatctgatattgatgaactcggtaacagtgattcaatattgcttggtgcaattggtcaccctaatgttaagcctggaattcttgagcaaggtatcttgttaaagttgagaaaagaatttgaccaatatattaatttgagacctgtcgtattataccctggtgttgaaactccacttgctaataaaacacctaaagatattaattttgtggttgttagagaaaacactgaggggctttacgctggagcaggtggttatattcactacgggactgataaagaggttgccactcaagaatctataaacacaagaagtgcaatagaaagatgtattgaatacgcatttgaatatacagtcaaaaataaccgaaaaaagataacactatgtgcaaaaaccaatgtacttacttatgctcacgacttatgggaaagagttttctatgaagtagctgaaaaatacccagatattgaaacagattatgggcacgtcgatgcagtgtgtatgtggatggttaaaaatcctgaatggtttgatgtcattgttacagacaacatgtttggagatattatcactgacttaggtgcaatgattcagggaggaatgggtattgcagcaggtgggaatatcaatccccaaggggtatcaatgtgtgaaccaattggaggttctgcaccaaaatatacaggtaaaaatgtaattaacccccttgcttgtattgcggcagcatcgatgatgcttgatgtacttggtgaggagaaatatgcaaataaaattgaaaacgcagtcataaaaacagcgcagcaactagattctctttcagccggaaagatgggcatgggcacatctgaggttggagatatggttaaagattttattttgaatgatgaggaatgaa

SEQ ID NO: 208308 - DNA, 541 bp, Unknown
  Bacterial polypeptide expressing nucleotide sequence isolated from the Sargasso Sea
tatggaagcaagagtttgcgtattagctggagatggagttggtaaagaagttacaacagaatctatgaaggttcttgaagctatttgtagaaagtttgatcataattttgaattcattcatgcattagttggtggagctgctatagataaatataacaatccaataccttctgagtctatgaatttggctttaggttcagatgctattttatttggagcagttggtggtcctaaatgggataatccaagtgcagatgtaagacctgaggacgctatattggcattaagaaaaagattgggtttatatgcaaatatgaggccagttaaagtttatccagaattaatacattctagtccccttagacctgaatatttagatggtgttgattttgtaatagtaagagaattaacaggtggattatattttggtagacctaaaagaagaagtgcaagtactagaggaagacgtgctgttgatactttagcctattctgaaaaagaaatagctagagtagtaagagttgcttttgaacttgctaaa

SEQ ID NO: 208309 - DNA, 103 bp, Unknown
  Bacterial polypeptide expressing nucleotide sequence isolated from the Sargasso Sea
tttgattctaaataactttagaaaatctctttatgaacccgttcacggatcagcgcctgatattgccggtaaaggagtagcaaatcctattgcgtcaatctta

SEQ ID NO: 208310 - DNA, 1066 bp, Unknown
  Bacterial polypeptide expressing nucleotide sequence isolated from the Sargasso Sea
atgaaaaaatataagatatcaattattggtggagatggtactggaccagaagttgttgatgaaacaattaaagttttggagcatacaaaatcaaaatttaatgttgaatttgattttgttgaaaatgatttaggtggagataggtatttaaaatctggagatctagtaacagacttagacatcgaacaacttggtaatagtgactcaatacttttaggagctataggacatccagacgttaaacctggaattcttgaacaaggaattcttttgaaattacgtaaagaatttgaccagtacataaatcttagaccagttgttttatacgaaggtgttgaaacgccactagcaaataaaacaccagatgatatcaattttgttgttgtgcgtgaaaatacagaaggtttatacgctggtgccggtggctacattcactatggaacagataaagaagtagcaactcaagaatctataaacacacgtagcgctatacaaagatgtattgagtatgcttttgaatttacaagtaaaaataatagaaaaaaaataacactctgtgctaaaacaaatgttttgacatatgctcatgatttatgggaaagagtgttctatgaggttgcagaaaaatatccagatatagaaacggactatggccacgttgatgcagtttgtatgtggatggtaaaaaatccagagtggtttgacgtgatagtaacagataatatgtttggagatattatcacagacttgggtgcaatgatacaaggaggaatgggtatcgctgcaggcggtaacattaatccaaatggagtttcaatgttcgagccaattggaggatcggctccaaaatacacaggtaaaaatgtgataaatccccttgcctgcattgctgctgcttcaatgatgcttgatgtattaggtgaaaaagaatatgccaatgaaatagaaaaatcaattataaaaactgctcagaatcttgactctctatctgctggaaaaatgggtatgagtacctcagaggtcggagacatggtaaaagaatttatcttgactaatggagaatgaa

SEQ ID NO: 208311 - DNA, 292 bp, Unknown
  Bacterial polypeptide expressing nucleotide sequence isolated from the Sargasso Sea
atgttttctgaaaaaaatattctagttctgcaaggtgacggagtagggcctgagtgcattgctgaggcattaaagatactcgagtggttcgattcaaaattaaacataaaatttaatttaattgaagaactagttggcggctcatgcattgatgtacatggaattccaataacaaatgaaacattgaaattagcaaaagaatctagcgctattctctttggttcggtaggagggccaaaatgggacaaggtagaaaggtctaaaagaccagagaatggtttgcttaagtaag

SEQ ID NO: 208312 - DNA, 245 bp, Unknown
  Bacterial polypeptide expressing nucleotide sequence isolated from the Sargasso Sea
tgttcatggttctgccccagatatagcagggaaaaatcttgcaaatccaattgcaacaattttaagtttttctatggcgctaaggtattctttaaatttggaaaaagaagctaaagaacttgatttagcagtgcaaagcgttttgaacatgggattaagaacaaaagatatatattctaagggaaataaggaagtttcaactagtgaaatgggagatgcaattattgcgcaattgcaaaaataaa

SEQ ID NO: 208313 - DNA, 337 bp, Unknown
  Bacterial polypeptide expressing nucleotide sequence isolated from the Sargasso Sea
atattggagcaggcttaattggttcattggtatggcgccaggtctttgtcttggggataatattgcaatggctcaagcaacgcatggttctgcgcctgacattgcaggaaaaaatgttgcgaacccttatgccatgattatgtcaacatcaatgctattatcatggatgggctcgaaatacagtgaggataaattaattatggcttcaaatattattgaggagtcagcattagaagtaatcaaagaaagaaaatacttaacagcagatattggaggaaaatcttctactattgatatgacaaatgcaataatagaaaaagtaaaaactaggcagtaa

SEQ ID NO: 208314 - DNA, 370 bp, Unknown
  Bacterial polypeptide expressing nucleotide sequence isolated from the Sargasso Sea
aatgattaaagtaaaaaaaagaaaaatacttttactgcctggtgatggtattggtccagaggtaatagctgaggtaaaaaaaattattaactggtttaatgataaaaaatctttagattttgaaattgatcaggagctagttggtggttgttcttatgataaacacggtaccccaatcactgatgaggttttttacaaagcactagaaagtgaagtaattatgcttggagcagttggtggtcctacatgggataacctagaattttccaaaaaaccagaaagagcattattgaaacttagaaaagaattaaagctttttgctaacttaaggcctgcaatttgttttaaacaattagtcgatgcttcaacc

SEQ ID NO: 208315 - DNA, 196 bp, Unknown
  Bacterial polypeptide expressing nucleotide sequence isolated from the Sargasso Sea
atgtctacaaataaaagaaaaattttattgctaccaggagatggtattggaccagaagttgttggtgagacaaagaaagttatcgactggtttaataagaaaaaatctttagattttaaaattgacgaaggtcttataggaggcgctgctattgataaacatggcgttcctattactgacgaaagtgttttataaa

SEQ ID NO: 208316 - DNA, 250 bp, Unknown
  Bacterial polypeptide expressing nucleotide sequence isolated from the Sargasso Sea
taaagactgcgctatttttgaagcagtacacggcagtgctccggatatcgcaggtaaaaacctggctaacccaagctcagtgattttagcttctatccagatgctggaatatttgggcatgaaagataaagcagaaaaaattctggccgctttaactgatgtgattgcatcaggtgaccgcactacccgcgatttaggtggtagccacggtactacagactttactgcagccatgctggaacgcttataa

SEQ ID NO: 208317 - DNA, 1060 bp, Unknown
  Bacterial polypeptide expressing nucleotide sequence isolated from the Sargasso Sea
atgaataactacaacatatctcttttaccaggtgatggaacaggtccagaagtaataaatgaaactgtaaaaatattagaaaaaactgaaacaaaatatgatgtaaagtttaattttactaataatgatcttggtggtgatagatttataaaatcaaatgaattagtgacatcaaaagatttagatgatcttggtagtagtgatgcaatacttcttggagctattggacacccagatgtaaagccaggaatattagagcaaggtatattattgaatctgagaaaagagtttgaccaatatatcaatcttagaccagtagtcttatatccaggtgttgagactccacttgctaacaaaggtcctgaagatattaatttcactgtcgtaagagaaaacacagaaggtctttatgccggagctggaggatacatacactatggaacagaaagtgaagtagcaacacaagaatcaattaatacatggaaagcaataaatcgatgtattgtttatgcatttgagtatgcaaaacaaaatgatagaaaaaagataacactttgtgcaaaaacaaacgtattaacttatgcacatgatttgtgggaaagaattttttatgatgttgcagaaaattatccagaaattgaaacagattatggacacgtcgatgcagtttgtatgtggatggtcaagaatccagagtggtttgatgtaatagttactgacaatatgtttggagatattattacagatttaggagcaatgattcaaggaggaatgggtattgctgctggtggaaatataaatccagaaggtgtctcaatgtttgaacctattggaggctctgcacctaaatatactggaaagaatattatcaaccctttagcttcgattgctgcagcttctatgatgcttaaccagcttggggaagaaaaatatggagatgatattgaaaatgcaataatctcaacagctcaaaagttggactctctttcagctgggaaaatgggaatgagtacttctgaagttggagatacagtccttaattcaatattaaataactgat

SEQ ID NO: 208318 - DNA, 424 bp, Unknown
  Bacterial polypeptide expressing nucleotide sequence isolated from the Sargasso Sea
gatgcatgcgctatgcaatttggtgcaaagccctagcaggttcgatgtaatagtagcggagaatacttttggagacatcctgacagacgaagccgccatcctaacagcatcaatggggttactaccttcagcaagcctatcaggcgtacctcaaattggtaaaaagactcccgggctatacgaaccaatccacggaaccgctccagacatagcaggaaaaggaatcgctaaccctactggttcaatcttaagtaccgctctcatgcttcggtattctcttggacttaatgaagaagctataactattgaaaaagcagttgaacaagttttgagtgagggattcagaaccgcagaattaaatggtccaaatataaaattactttccacaacagaatttgcggatgagattgtaaaaaaagtctaa

SEQ ID NO: 208319 - DNA, 451 bp, Unknown
  Bacterial polypeptide expressing nucleotide sequence isolated from the Sargasso Sea
tatggaatctagttattccaatgtagaagtaagttacgaatttgttgatgcggttgcaatgagattaatccaatggcctagcgaatatgatgtgctagttacaagtaatttatttggtgatattttaacagatgaggcatcggtaatttctggttcaatgggattaatgccatcagcatcaatcggatcaaataatgctctatatgagccaattcatggttcatatcctgaagctgctgggaaaaatattgcaaatcctcttgggtccattctttctctagctatgatgtttgaacattcatttagtttagaggaagaatcaaaaattatcaagaaagctgtagataattcattgaaagaaaagataactacaaaagatatttcaggaaataataaaccccatactacaactgatgtaggtaattttatctgtgactatattaattcttaa

SEQ ID NO: 208320 - DNA, 1069 bp, Unknown
  Bacterial polypeptide expressing nucleotide sequence isolated from the Sargasso Sea
atgagtaaaacttttaatatctcacttctcccaggagatggtacaggtcctgaagtagttaatgaagcagttaaagtactgaataaaacctcatcttattacgatactcaattcaatttctcccagaatgatcttggaggagatagatatttaaaaactggagatttagttacagataatgatattaaacaatttcaagattctgatgcggtacttctcggcgcaattggccacccagatgtaaaacctggaatattagagcaaggtattcttctcaaacttaggaaagagtttgaccaatatattaacctcagaccagtcgttttatatcccggtgtagaaaccccacttgccaataaagagcctgaagatattaattttattgttgtcagagaaaatactgaaggattatatgccggagctggaggttatattcattatggaactgaaaatgaaatagcaactcaagaatcaatcaattcatatcatgcaattcatcgatgcataaaatacgcgtttgaatatacaaagaataacaatagaaaaaaaattacactctgtgcaaaaacaaatgtactaacttatgcacatgatttatgggaaaggatcttttatgatgttgcaaaagattatcctgaaattgaaaccgattatggacacgttgatgcaatttgtatgtggatggttaaaaatccagaatggtttgacgttattgttacagataacatgttcggagacattatcactgatttaggcgcaatgattcagggtggaatgggaatcgctgcaggcgggaatatcaatccttcaggaacatcaatgtttgaacctataggaggatctgcaccaaagtatacaggtaaaaatattattaatcctcttgcatgtataggagctggtgcaatgatggtcaaagaattaggtgaagaaaaatatgcatccgatattgaaaaagcaatcattaatacggcaattaaattagattctctttcagctgggaaaatgggaatgtctactgaagaagttggtgattcagtagttgaagaattatctaatttaaatgagtgaa

SEQ ID NO: 208321 - DNA, 364 bp, Unknown
  Bacterial polypeptide expressing nucleotide sequence isolated from the Sargasso Sea
atgagtaataaaaagatattagtcttgcctggagacgggattggcaatgaagtcatgcacgaagttttaaatataatagattggttatctaaaactcggtctatgtcatttgatatttctcagagacttgttggtggcacagcatacgataaagaaggagattctataagtgatgaaactatgcaagaggctttagactcagatgcagtcctattcggtgcggttggtggtccgaaatgggataatgttgaaagagaaaaacgtccagaggcggcactactaagattaagaaaagaacttgatttatttgcaaatttaagaccagcagttgttttgatgctcttgctgattcatctcctttaaa

SEQ ID NO: 208322 - DNA, 832 bp, Unknown
  Bacterial polypeptide expressing nucleotide sequence isolated from the Sargasso Sea
ttgaaaacctatcgcatcggaatcatgcctgcggacgggattggcccagagatcagtgaatccacaaaacgggtcgtggatgaatccctgggaaagcattttcaggtatccttcgattggatagaacttccggtgggttggcaggcccttgagcaaaataagccgcctcttcctcaggaaaccctggatgaactggaaaaatgcgatgcctgggtgatgggccctcatgactcggcctcctatccggaagcgtttcagcactccctgaatccgagcggagcgatccgcaagcattttgatctttacgccaacatccgtcctgccagaacggtcaaggggctgggggattccaggaaggacttcgatctggtcatcgtccgggaaaacaccgaaggattttatgccgaccgtaacatgcatctggggattggagagttcatgcctcatccggacaccgccctcgcggtgggagtttttacccggaatgcctgcgaaaggatcgcccgaaccgccttcgagttggcgatgatccggaaaaagaaagtcagtctcatccacaaagcgaacgtacttcgaaccacctacgggcttttcctggaatgctgcgaaaaggtttccagggattttccggaagtcgccgtcaacgatttccatatcgacgctgttgccgcgcttttagtccgtgaaccggaggaattcgatgtgattgttaccacgaacatgtttggagatatcctttccgacctcactgcagaactggcgggcagtctcggaatgggagccgcgttgaacgcgggaaggctgaaggccatggcccaggcagcccatggct

SEQ ID NO: 208323 - DNA, 938 bp, Unknown
  Bacterial polypeptide expressing nucleotide sequence isolated from the Sargasso Sea
tgattggggcagtaattattacaaaaataataaattaatgatgcctaaagatggtttggaaaaattaaaaaaacatgatgcaatattttttggagcagttggagatgaaaaaattgctgatgatattactctatggggccttagacttaatatatgtcagggcttagatcaatttgctaatgtaagaccttcaaaatatatagaaggaattaactctcctttaaagaaagaaatagcaaaaaaaattgattggataatagtaagagaaaatagtgaaggggaatatgcaggttcaggaggaatagttcacaaaggtttacccattgagattggtagtgaagtagctgtcttcacaagagaaggttgcagaagaattcatgactacgcctttaaattagctttaaaaagaccaaagaagcatttaacattaattacaaaatctaacgcacagaaacatggaatgaaactatgggatagagttttttatgaagtaaagaaaaattatcctcaagttaaaactaataagttattagtagatgctgcaactgcagttatggtcaataatccagaaaaaatagatgtaatggttgctacaaatttacatgcagatattctctccgatttagcttctgcattaactggaagtttaggtataggggctactgcaaacattactactgataaaaatttaccatctatgtttgaacctatacatggatctgcctttgatattgttggaaaaaatattgcaaatcctattggtgcaatatttagtggtatgatgatgcttaatcatcttggagaaaaaaaatctgctaataggatagataaagcactaaaactttatgccaataattctggtccatttacacctgatcttggtggtattgcttctactagaaaagttattgataaaattattaacttaattaaataat

SEQ ID NO: 208324 - DNA, 409 bp, Unknown
  Bacterial polypeptide expressing nucleotide sequence isolated from the Sargasso Sea
catggttcagcaccgtgttgttctgctgtctggtgatggcatcggcccagagatcacggctgttgccagaaggcttctcgaggtcgtgagcgagcggcatggcttcagcctcacgtttgacgagcagctgatcggcggagctgccatcgatgtcacgggagaaccactgccctccacaacgctggaagcctgtcaagccgctgatgccgtgttgctggcagcgattggcagccctcgatttgacagcctgccgcgcgacaagcgtcctgagaccggtctgctggcgctgcgctcaggtttgaagctgttcgccaatctgcgacccgtcaagatcgttccgtccctgattgaggccagcacgcttcgcccggaggtgattgaggggggtggatctgatggtggtgcgtga

SEQ ID NO: 208325 - DNA, 927 bp, Unknown
  Bacterial polypeptide expressing nucleotide sequence isolated from the Sargasso Sea
aatgattaaagtcaaaaagagaaaaatattacttttacctggagatggtatagggcctgaagtaattgccgaggtaaggaaaattatagaatggtttaacaaaaataaatcgttagattttgaaattgatgaagatttagtaggaggatcatcctatgacaaaaatggaacacctattactgatgaagttttttataaagctttagaatgtgaagcagtaatactcggagcagttggtggaccaaaatgggataatttagatttttctaaaaaacctgaaagggctttgcttaaattaagaaaagaattaaaactttttgcaaatttaagacctgctatttgttttaaacaactagttaatgcctcaagtttaaaacctgaaatagtatctggtctagatattatgattgttagagagctaactgggggaatttattttggtgaaccgcgaggaataaaactagtagataatggtgagagaaaagggattaatacccatgtttacactagtaatgaaatacaaagagttgcaaaagttgcatttgatcttgcaaaaaaaagaaataacaaagttacatcttgtgaaaaatcaaatgtaatggaagctggacaattatggaaagaagaagttcagactttgcacgaaaaagaatataaagaagtaaaattggaacatatgctagccgataactgtgctatgcaattattgagaaacccaaaacaatttgatgttatagttactgacaatttatttggtgatattttatcagatgaagccgcgatgcttaccggatctcttggattgttgccctcagcatctttaggggcaaaagacaaaaatggaaatattagatcaatgtatgaaccagtacatggatcagcacctgatatagcagggaaagggcttgcaaatcccaatagctacaa

SEQ ID NO: 208326 - DNA, 759 bp, Unknown
  Bacterial polypeptide expressing nucleotide sequence isolated from the Sargasso Sea
tcaggcctgtcaaaataagaaaatctctgctagatgcaagtacattaaaaaaagaaatcgttgagcatgtagatcttattgttgtaagagaattaataggaggaatttattttgggaaaccaagaggacacataacaaatacaaaaatcccaaaagctttcaatacgatgatctatgattcaactgaaatagaaagaataaccgaaatagcaataaaaattgctaaccaaagaaataaaaaaatatgttctgttgataaatcaaacgttcttgaggttagtcaattgtggagagatacagttttaaatatcacctcaaaagataaaaatatatccctaagcaatatgtatgttgataatgcagcaatgcaattagttagagatcctagtcaatttgatgtgattttaactagtaatttatttggagatattttaagcgatttagccgcaatgttaactggttctattggtatgcttccatctgcttctttaaacaataatggcccaggcgtttttgaacctgttcatggttcggctcctgatatagctggtaaaaacatagctaatcctattgcaatgcttttatctgcttccatgatgttaaaaattggattaaatgaagaagaagctgcagaaaatttagaaactgccattgataaagttttatcaaaaggatttagaacagcagatttagctgatgggtctactgaagttttatcttgcagtgaaatcggagataaaataatggatgaaatttaaa

SEQ ID NO: 208327 - DNA, 715 bp, Unknown
  Bacterial polypeptide expressing nucleotide sequence isolated from the Sargasso Sea
atgaataaaaaaaacaatattcttgttttacctggtgatggcataggacctgaagtatgtaatgaggcaataaaagttattaatcatctaaatgaaatatataaattagatattttaattgaggagtttgcagttggtggaagtgcatatgaagaattcggaaatcctcttccagaagatactttgaaggcagctaaagaggctgatgcgattttattaggtgctgtaggcggacccaaatgggacaatattgattatgaactaaggcctgaaagggctttgctccgactaagagcagaattagacttatttgccaacttaagacctgcaatcttatcaaaatatttaagtgattcttcttctctcaagtcagataaagttcaagatctaaatctattaattgtaagagaactaactggtggaatttactttggtgagccaagaggcaggtctaagtctggtgattctgcttttaatactatgatttatagtaaaactgagattgccagaataggaaggattgcttttgaagctgctcaaaaaagaaataaaaacctttgctcagttgataaagcaaatgttttagaagtaagtgttttatggagagaagtaatttctcaactttcagaagaatatcctgatgtcgagttatctcatatgcttgtagataacgccgctatgcaattggtgagagaccccaaaacaaatttgatgt

SEQ ID NO: 208328 - DNA, 483 bp, Unknown
  Bacterial polypeptide expressing nucleotide sequence isolated from the Sargasso Sea
gttggtggtcctacatgggataaccttagaattttccaaaaaaccagaaagagcattattaaaactcagaaaagaattaaagctttttgctaacttaaggcctgcaatttgttttaaacaattagtcgatgcttcaaccctaaagccagaaatagtttcaggactagatataatgatagtaagagagttaacgggtggtatatattttggtgaacctagaggaattaagccaattgaaaatggagaaagaaaaggaattaatacacacacttatacgactagtgaaattactagagtagctaggatcgcttttgatttagctagaaaaagatcaaacaaggttacttcgtgtgaaaaatcaaatgtgatggaagcaggacaattgtggaaagaagaagtccaagaacttcatgaaaaagaatacaaagatgtagaattaagtcatatgttagcagaccaattgtgctatgcagcttttaagaa

SEQ ID NO: 208329 - DNA, 742 bp, Unknown
  Bacterial polypeptide expressing nucleotide sequence isolated from the Sargasso Sea
atgcatttaaaaattgcccttctagcaggagacggtattgggcctgaagtaatcgaacaagcggtaaaagtgtcagatgcgatcgcagaaaaatttaaccacaagattgaatggatacatgctcttacaggggcatctgcaattgatgccgttggagatccctatccggaggaaacccatgaaatatgtctttccgcagatgcagtcctttttggagctattggtcatcctcgctttgataatgatccctctgctaaagtaaggccagagcaaggacttttgaaaatgcgtaaaaaattaggtttgtttgccaacgtaagaccaacgtttacctttccttctcttttggataaatcaccattaaaaaaagaacgtattgaaggtactgacttaatttttctcagagagttaacaggaggaatctattttggagaacgtggaagaaaagatgctggaaatacagcttttgatacatgtacttatacccgtgaagaaatcaaacgattagctcttaaaggttttgaactgtctatgaaacgttctagaaaactgtgttgtgtagataaggctaatgttttggaaagctcacgcttgtggagagagactgtacaagaattagaaaaagagtaccctcaggtagaggtttcatatgaatttgtcgatgcagttgcaatgcgtttggtacaatggccgaattcttatgatgtattaattactgaaaacctctttggcgatatcctaa

SEQ ID NO: 208330 - DNA, 787 bp, Unknown
  Bacterial polypeptide expressing nucleotide sequence isolated from the Sargasso Sea
aatgaaagaagttcgtaaggttattgactggtatggtgcaaacttgggtctagcttttgatgtctctgaagatcttgttggtggggttgcatatgacgcccatggtacgcctttacacgactctactttagcaaaagctcaggaagttgatgcggttttgttgggagcagttggtgggcctgactatgataatttagattttagcgtaaagcctgaacgcggattactgagactgcgcaaagaaatggatttgtttgcaaacttgcggccagctcaatgctttaatgctctcgcggatttttcttcattgaaaacagaagttgtgtctggccttgatatcatgattgttcgcgaactcacttcaggaatttattttggtgaaccgcgtggcattattgaagaaggtaacgagcgcgttggcattaacacgcaaagatacacagaaagtgaaattgaccgtgttgcgcgatcggcattcgaacttgcaaggcgacgaggcaataaagtctgctcaatggaaaaagcaaatgtgatggaatcaggtgttctctggcgtgaagttgtccaaaaagtccatgatgaggattatcaggatgtagagctttcccatatgtacgctgatgcgggagctatgcagttatgccgttggcccaaacagtttgatgttattgtgaccgacaacttatttggtgatctattgtctgacgcggcagcaatgttgacaggctcgctcggaatgttgccctcagcatctctgggagctccgatggctaaatggtcggcctaa

SEQ ID NO: 208331 - DNA, 562 bp, Unknown
  Bacterial polypeptide expressing nucleotide sequence isolated from the Sargasso Sea
attagcgagaaaagacaaaataaagttacatcatgtgaaaaatcaaatgtaatggaagcaggattgctttggagagaggaagtacaagaactacatgataaagaatttaaagatgttgaacttaatcatatgctagcagataattgtgcgatgcaacttttaagaaatccaaaacaatttgatgttattgtaaccgataatctgtttggagacatgttgtcagatcaagcttcaatgctaactggttccttaggtttattgccttcagcatctttaggagcaaaaaacaaagaaggtcaaatgagagctatgtatgagcctattcatggatcggccccagatatagcaggaaaaggagtagcaaatccaattgcaacgattttaagcttcgctatggctctaagatattctctagatttagataaagaagccagtaccttggaaaaagctgttcaagatgttttagatgaaggcttaagaactaaagatattatttcgaaaggtaaaaaagaagtatctacatctcaaatgggagatgctataatttcaaaattgcaataat

SEQ ID NO: 208332 - DNA, 817 bp, Unknown
  Bacterial polypeptide expressing nucleotide sequence isolated from the Sargasso Sea
ggagggatagcatatgaaaaatatggtactcctgctccagatgagacactagatcaatgtaaaaaaagtgatgcagtacttttagcatgtgttggagatattaaatatgattctcttgcaagagaattaaggccagaaagtgggttactaaagttaagatctgccctaaaccttttcgcaaatatcaggcctgtcaaaataagaaaatctctattagatgcaagtacattaaaaaaagaaatcgttgagcatgtagatcttattgttgtaagagaattaataggaggaatttattttggaaaaccaagaggaaatataacaaatacaaaaatcccaaaagctttcaatacgatggtttatgattcgactgaaatagaaagaataaccgaaatagcaataaaaattgctaaccaaagaaataaaaaaatatgttctgttgataagtcaaacgttcttgaggttagtcaattgtggagagatacagttttaaatatcacctcaaaagataaaaatatatctctaagcaatatgtacgttgataatgcagcaatgcaattagttagagatcctggtcaatttgatgtgattttaactagtaatttatttggagatattttaagcgatttagccgcaatgttaactggttctattggtatgcttccatctgcttctttaaacaataatggcccaggcgtttttgaacctgttcatggttcggctcctgatatagctggtaaaaacatagctaatcctattgcaatgcttttatctgcttccatgatgttaaaaattggattaaatgaagaagaagctgcaa

SEQ ID NO: 208333 - DNA, 802 bp, Unknown
  Bacterial polypeptide expressing nucleotide sequence isolated from the Sargasso Sea
ttaaaattatttgcaaatttaagaccagctatttgctttaaacaacttgttcaagcatcttcactcaaaccagaaataatatctggtcttgatataatgatagttagagagctcaccggaggcatatactttggtgaacctagaggaatagaacctataaaaaataatgaacgcaaaggagtaaatacccatgtttacacttcaagtgaaattcagagagttgcaaaagttgcttttgagcttgcaaaaaaacgtaaaaataaagttacatcttgtgacaaatcaaatgtaatggaagctggtgttttatggagggaagaagttcaagcactcaaagaaaaagattataaaaaaatagaacttgaacatatgttagctgataattgtgcaatgcaacttttaagaaatccaaaacagtttgatgtaattgtaactgacaatttatttggtgatatgctctcagatgaagccgctatgttgactggttctcttggactattaccctcagcttctttaggagaaaaagacaagaatggcaaaacaagatcaatgtatgaacctattcatgggtcagcaccagatattgcaggaaaaaatattgcaaatccaattgcaacagtattaagtttttctatggctttaaggttttcacttgatttagacaaggaagcaaatttattagatgctgcggtgcaaaaagtattagatgatggcctaagaactaaagatataatgtctgaaggtaaaaaagaggtcaccacaagtgatatgggtgatgcaattatttcaaaattaaaataaa

SEQ ID NO: 208334 - DNA, 625 bp, Unknown
  Bacterial polypeptide expressing nucleotide sequence isolated from the Sargasso Sea
aacaaatacaaaaatcccaaaagctttcaatacgatggtttatgattcgaccgaaatagaaagaataactgaaatagcaataaaaattgctaaccaaagaaataaaaaaatatgttctgttgataaatcaaacgttcttgaggttagtcaattgtggagagatacagttttaaatatcacctcaaaagataaaaatatatctctaagcaatatgtacgttgataatgcagcaatgcaattagttagagatcctggtcaatttgatgtgattttaactagtaatttatttggagatattttaagcgatttagccgcaatgttaactggttctattggtatgcttccatctgcttctttaaacaataatggcccaggcgtttttgaacctgttcatggttcggctcctgatatagctggtaaaaacatagctaatcctattgcaatgcttttatctgcttccatgatgttaaaaattggattaaatgaagaagaagctgcagaaaatttagaaactgccattgataaagttttatcaaaaggatttagaacagcagatttagctgatgggtctactgaagttttatcttgcagtgaaatcggagataaaataatggatgaaatttaa

SEQ ID NO: 208335 - DNA, 451 bp, Unknown
  Bacterial polypeptide expressing nucleotide sequence isolated from the Sargasso Sea
aatggaattaaatatagcggttttacctggagatggcataggacctgaagtaacaaatgaagcaattaaagttttagacattatctctaaaaagtataatcataaagtcaatctttcagaaggattagttggtgcagttgcaattgacaaaacaggtaatccttatcctgatgaaacacatcaaatctgtgaaaaatctgatgcagtcctttttggagcaataggagatccaagatatgacaatgaccctactgcaaaagttagaccagagcaaggtttacttcaaatgcgtaaaaaacttggactatatgcaaatttacgacctactattgtttttgaatcactcattgacaattcgccattaagaaaagatagaatagtggatacagacctaatttttgtcagagaattaaccggaggtatctattttggcgaaagaggaagaaaggat

SEQ ID NO: 208336 - DNA, 907 bp, Unknown
  Bacterial polypeptide expressing nucleotide sequence isolated from the Sargasso Sea
aaggatgaaagaatacaaaatcgcctcaattgctggagatggtatgaaaaagaggttgttccagaggctttaaaaatacttaaagaagtagcaaatcaacatcaatttaaattaaagatagatgaatttgatttttcatcgtgcgattattatgaaaagcatggaaaaatgctacctgatgattggaaacaacaaattggtaatcatgatgcgatattttttggtgcagtaggtatgccagataaatacccagatcatattactttatggggttccctactacagtttagaagagaatttgatcaatttatcaatttaaggccagtaaaattatttgaaggagtaaatgcacctttagcaaataaaaaacctggtgacatagatatgatgatagtgcgtgaaaacactgagggcgaatattcttcggtaggtggaaaaatgtatcaaaatactgaaagagaaattgttatacaagaaactgtaatgtcaaaacatggaatagatagagttcaaaaatttgcatttgaattagcaagaacaagaaatagaaaaaaattaactaatgccacaaaatcaaatggtatttctataactatgccatactgggaccaaagattttatgagaataaaaaagattttcctgagataaaaacagatcagtttcatatcgatattttagctgcaagatttgttttaacgccagagtggttcgatgtagtcgtagcatcaaatttatttggcgatattttatctgatttaggtccagcatgcacaggaaccattggtatagctccatcaggaaatattaacccaacaaataaatatccttctttattcgagcctgttcatggatcagcacctgatattgctggaaaaggtatcgcaaatccaataggtcaaatttggt

SEQ ID NO: 208337 - DNA, 749 bp, Unknown
  Bacterial polypeptide expressing nucleotide sequence isolated from the Sargasso Sea
gaagtgggataatcttgatttttctaaaaaaccagaaagagcacttttaaaattaagaaaagaattaaagttattcgcaaatcttagacctgcaatatgttttaaacaacttgttgatgcatcaagtttaaaacccgagcttgtttctgatttagacttacttttcgtaagagaattaactggaggaatttatttcggtgaaccgagaggaataaagcctatagataatggagagagaaaaggaataaatacacatatttacacctcaagtgaaattcagagagtagctagagttgcatttgatctagcaagaaaaagaaacaataaagttacttcttgtgaaaaatcaaatgtaatggaagctggccaattatggaaagaagaagttcaatcaattcatgaaaaagaatatagcgatgttgaattgaatcatatgcttgctgacaattgtgcaatgcaattagtaagaaatccaaaacaatttgatgtgattgttactgataatctttttggtgacatgttatctgatgaagcagcaatgctgactggttctctaggacttttaccttcagcttctttaggcgcaaaagataaaaatggtaatatgcgatcactatatgagccagttcatggatctgcaccagacatagctggacaaggtatagcgaacccaattgctacaattttaagctttgctatggctttgagatattccttagaccttgataaagaagcagatagtttggaaa

SEQ ID NO: 208338 - DNA, 915 bp, Unknown
  Bacterial polypeptide expressing nucleotide sequence isolated from the Sargasso Sea
aatgaaagagtattcaatagcttctattgctggtgacggcatcggaaaagaagttgtacctgaagcgcaaaaaatattaaaagaaatttctcaacaacatcaattcaaattaaagatagaaaattatgattttgcatcatgtgattattatgaaaagcatgggaaaatgatgccagatgactggaaagataaattaattaaacacgatgcaattttttttggtgctgttggtatgccagataaatatccagatcacataacactttggggttcattattaaaatttagaagagagtttgatcaatttattaacttaagacctgtaaagctttttgaaggtgttaatgcaccgttagctaaaaaaaaacccggtgatattgacatgataattgttagagaaaatactgaaggagaatactcatcagtcggtggaagaatgtatcagggaactgatagagaagttgttattcaagaaacagtaatgtcaaaatatggaatagatagagttcaacaatttgcttttgaattagctaagaaaaggaaaagaaaaaaactaacaagtgcaacaaaatcaaatggaatatcaattacaatgccttattgggatgaaagatttaatgaaaataaaaaaaattatcctgatgttgaaactgatcaataccatatcgatatattagctgctagatttgttttaagtcctgaacgctttgatgtgatagtcgcatcgaacctttttggggatattctatctgatctaggaccagcttgcactggaactattggaattgcaccttctggaaatataaatccaacaaataaatatccatcattatttgaacctgtgcatggatctgcgccagatatagcgggccaagggatagctaatccagtaggacaaattggtcagctgcgatg

SEQ ID NO: 208339 - DNA, 760 bp, Unknown
  Bacterial polypeptide expressing nucleotide sequence isolated from the Sargasso Sea
tgaaagagcattattaaaacttagaaaagaactaaagctatttgcaaatcttagaccagcaatatgctttaaacaattagttagtgcttcaactttaaaaccagagattgtttcaggtttagatataatgattgttagagaacttacaggtggaatatattttggtgaaccaaggggaattaagccaattgaaaatggtgaaagaaagggcgttaatactcatacttatactagtagtgaaataattagagtagctaaagttgcttttgatttagcaaaaaaaagatcaaataaagttacgtcgtgcgaaaaatctaatgtaatggaggcagggcaactttggaaagaagaagttcaagctttacatgaaaaagaatataaggatgtagaattagatcatatgcttgctgataattgtgcaatgcaattgttaagaaatcccaaacagtttgatgtgattgtaacagataatttatttggagacatgttgtctgatcaagcgtcaatgttaactggatctttaggacttttaccttcggcctcacttggagcaaaaaataaagatggtgaaatgagagctatgtatgaacctattcatggttcagctcctgacattgcgggcaagggaattgcgaatcctatcgcctctatattaagctttgcaatggctcttaaatattctttagatttaaacaaagagtctgaagtgcttgaaaaagcggtgcaagatgtactaaatgaaggtctgagaacaaaggat

SEQ ID NO: 208340 - DNA, 767 bp, Unknown
  Bacterial polypeptide expressing nucleotide sequence isolated from the Sargasso Sea
catgacttcaaatagaaaattaatgataatgccaggtgatggtattggtccagaagtaatgaaagaaacattacgactgattgattggttggccaaaaataaaactttaaattttgatactattgaaagagatgtgggtggaaaatcatatgatctccacggaactccacttactgatgaagctttaagtgattctcttgaatgtgatgctattttatttggtgctgttggtgggccaaaatacgatgatttatcttttgaacttaaacctgaaagaggacttcttacattaagaaaagaattagatttatttgcaaatttaagacctgcaatagtttttcctcctctagttgactcatcaacgctaaaaccagatgttgtaagaggtctagatataatgatacttcgtgaattaacaggtggtgtatattttgctgaaccaagaggaatagacgttctacctgatggcaataaaaaaggatatgatacaaatctctacacaactcctgaaattcaaagaatcggaagagttgctttcgatctagcgaagaaacgcaatagcaaggttacgtctgttgaaaaatcaaatgttatgttatcaggagttttatggaaagaagttatgactgagctgcatataaatgaaggtcaaggtattgatcttcaacatatgtttgctgataattgtgcaatgcaattagtaagagcccccaaacaattcgatgttatagtttgcgataatttatttggtgatatgctttcagata

SEQ ID NO: 208341 - DNA, 751 bp, Unknown
  Bacterial polypeptide expressing nucleotide sequence isolated from the Sargasso Sea
atgaagaaatataagattgttttattgtcaggagacggaattggaccagagatttcagaagtttcaaaactagttttaaaaaagctttcaaaaaatcataatttcgatattgagattattgaaaaattatttggagggatagcatatgaaaaatatggtactcctgctccagatgagacactagaccaatgcaaaaaaagtgatgcagtacttttagcatgtgttggagatattaaatatgattctcttgcaagagaattaaggccagaaagtgggttactaaagttaagatctgccctaaaccttttcgcaaatattaggcctgtcaaaataagaaaatctctcttggaagcaagtacattaaaaaaagaaatcgttgagaatgtagatcttattgttgtaagagaattaataggaggaatatattttggaaaaccaagaggacatataacaaatacaaaaatcccaaaagctttcaatacgatggtttatgattcgaccgaaatagaaagaataactgaaatagcaataaaaattgctaaccaaagaaataaaaaaatatgttctgttgataaatcaaacgttcttgaggttagccaattgtggagagatacagttttaaatatcacctcaaaagataaaaatatatctctaagcaatatgtacgttgataatgcagcaatgcaattagttagagatcctggacaatttgatgtgattttaactagtaatttatttggagatattttaa

SEQ ID NO: 208342 - DNA, 718 bp, Unknown
  Bacterial polypeptide expressing nucleotide sequence isolated from the Sargasso Sea
aatgattaaggtaaaaaaaagaaaaattcttttattgcctggtgacggtattggaccagaagtaattcatgaggtgaaaaaaattattaactggttcaacgacaaaaaatctttagattttgaaatagatgaagatcttgctggtggttgttcttatgacaaacatggcactccaattactgacgaagtattttataaagctttggagagtgaagttgttatgttaggtgcggtgggaggaccaaaatgggatgaagtagaattttctaaaaaaccagaaagagcattgctaaaacttagaaaagaattaaaactatttgctaatttacgaccagcaatatgctttgaacaactggtaagcgcatcaacattaaaaccagaggtagtttcaggattagatataatgattgttagagagcttacaggtggaatatattttggtgaaccaagaggaattaaaccgattgaaaatggagaaagaaaaggaataaatacccatacatatacgactaatgaaatcgctagggtagcacgtattgcattcgacctagcaagaaaaagatccaataaagtaacctcatgcgaaaaatcaaacgttatggaagccggacagttatggaaggaagaagtacaagaacttcatgataaagaatttaaagatgtagaattaagccatatgcttgctgataattgtgcaatgcaactattaagaaatcct

SEQ ID NO: 208343 - DNA, 847 bp, Unknown
  Bacterial polypeptide expressing nucleotide sequence isolated from the Sargasso Sea
aatgaataaaaaaattcttattttgccaggtgacggcatcggccctgaagtaacaagttccgcaatggagatattaagatttattaaagatctatactctcttgatcttgatattgaaattcaggatgttggtggagcagcttatgataagactggttatcctcttcctgaaaagactttggagatagctagaaaatctgatgctattctctttggagctgtaggtggtccagaatgggaggatttagattgggataaaagaccagagcaagcattgttaggattgagaaaagagcttggattatttgctaaccttagacccgccttcctttttaatgagcttgcttctgcctcaccaataaaagaggaaattatcaatgatttagacatcttaatagtaagagagttaacaggcggtatttattttggtgagccaagaggaattgatacttcttcaaatcctgcacatgcttttaatactatgatttatgacgaaaaagagatcgaaagaattggtcgagtagcatttgaatcagctcaaaaaagaaatagaaaactatgttcagtagaaaaagcaaatgttcttgaggtttcaaagttttggagagaaataattacaaacttatcaaaggactatcctgatgttgaattgacacatcagcttgctgacaatactgcaatgcaattagtacttgatcccaaccagtttgatgtaattgtttctagcaatctatttggcgatattttatctgatattgctgcaacgctaactggctctattggtatgctaccttccgcatcactcaacagctcttctcagggaatgtatgaaccatgtcacggcagc

SEQ ID NO: 208344 - DNA, 718 bp, Unknown
  Bacterial polypeptide expressing nucleotide sequence isolated from the Sargasso Sea
atgattaaaattaaaaaaagaaaattcttgttattgccaggagatggtattggtccagaagttttaggagaagtaaaaaaaattatacattggttcaataaaaataaatctttagattttgaaattgatgaagatttagctggaggtatttcttacgataaacacgggactcccatcacagatgaagtattttataaagcacttgaatcagaggcggttattttaggtgcagtaggtggaccaaagtgggataatgtagaattttcaaagaaaccagaaagagcattattaaaattaagaaaggaattaaaacttttcgcaaatttaagacctgcaatttgtttcaagcaattagtagaatcttcaacgcttaagcccgaaatagtatctggattagatataatgatagtaagagaacttacagggggaatatactttggagaaccaagaggcattaagccaattgataacggggaaagaaaaggaattaatacacatacttatacttctagcgaaatacaaagagttgcaagagtagcatttgatttagctaagaaaagacaaaataaggttacttcttgcgaaaaatctaatgtgatggaagcaggtctattatggagagaagaggtacaggatttgcatgacaaagaatttaatgatgtagagcttcatcatatgttagcagataattgtgcaatgcaacttttgagaaacccaa

SEQ ID NO: 208345 - DNA, 643 bp, Unknown
  Bacterial polypeptide expressing nucleotide sequence isolated from the Sargasso Sea
gttggtggcagaatgtatcaaaatactgacagagaaatagcgatacaagaaactattatgtctgctcacggcatagatagagttcaagagtttgcttttgaattagcaaaaaaaagaaagagaaaaaaactaactaatgcaacaaaatctaatggtatttcaataacgatgccattttgggatgagcgtttcaataaaattaaaaataaatatcctgaaattgaaactgatcaatttcatattgatatattagcagcaaggtttgttcttaatccagaatggtttgatgtggttgtggcatccaatttatttggagatattttatctgatttaggtccagcatgtaccggaaccataggaattgccccatcagggaatataaatcctgaaaataaatatccatcattatttgaaccagtgcacggctcagcgcctgatatagctggaaaaggggttgcaaatcctgttggtcaaatttggtcaggagcaatgatgcttgactatttaggcgaaaaagaagcttcgaattcgatagtctccgctattgaaaagtctttaagtgttcaaaaaaatagaactaaagacttggggggtgaaagtaatacaattgagtgttcaaattctattttatctaatctttaaa

SEQ ID NO: 208346 - DNA, 445 bp, Unknown
  Bacterial polypeptide expressing nucleotide sequence isolated from the Sargasso Sea
aaaaagattttttcctgagattaaaacagatcaatttcatatcgatattttagctgcaagatttgttttaacaccagagtggtttgatgttgtcgtagcatcaaatttatttggagatattttatccgatttaggtccagcatgtacgggaacaattggtatagctccatcaggaaatattaacccaacaaataaacatccttctttattcgagcctgttcatggatcagcacctgatattgctggaaaaggtattgcaaatccaataggtcaaatttggtctggcgctatgatgttagattatttaggcgaaaaagaagctgccacacgaatagtaagttcaatcgaaaaaactttgctagaaaaacaaaatagaactaaagatctagatggtgatagcaatacaaaagaatgtgctaataaaatcttagataatattaattaa

SEQ ID NO: 208347 - DNA, 808 bp, Unknown
  Bacterial polypeptide expressing nucleotide sequence isolated from the Sargasso Sea
aatgattaaagtaaaaaaaagaaaaatacttttgcttccaggtgatggtattggcccagaggtcatagatgaggtcaaaaaaattattaattggtttaatgataaaaagtctttagattttgaaatagatcaagaacttgtgggtgggtgttcatatgataaacatggtacccctatcactgatgaggttttttataaagctttagaaagtgaagtgatcatgctaggagcagttggtggcccaacatgggataatattgaattttcaaaaaaacccgaaagagcattattaaaacttagaaaagagttgaaactttttgcaaatttaagaccagcaatttgttttaaacaattagttgatgcttcaactcttaagccagaagtagtttcaggacttgatataatgatagttagagagttaacaggaggtatatattttggcgaaccgagaggaattaagccaattgaaaatggtgaaagaaaaggaattaacactcacacttatactacaggtgaaattataagagtagctaggattgcttttgatttagcaagaaaaagatcaaacaaggttacatcttgtgaaaaatcaaatgtaatggaagcaggacaattgtggaaagaagaagttcaagagcttcatgataaagaatataaagatgtagaattaagccatatgttagctgataattgtgcgatgcagcttttaagaaatccaaaacaatttgacgtgattgtaactgataatttatttggagatatgctttcagatcaagcctccatgctaactggatctttgggtctttta

SEQ ID NO: 208348 - DNA, 604 bp, Unknown
  Bacterial polypeptide expressing nucleotide sequence isolated from the Sargasso Sea
atgagtaaagagatcttaattcttccaggtgacggcgtcggtcaggaggttatggcctcagcttctgatgttttagattttgtaataaatgagtataaccttgattttttggtcgcatcaatgagtgttggaggaacagcctataatgaatgtggatcaccaataccaaaagaggtgcttgattcagcaaagaaagctgatgcaatattattcggagcagtcggtgggactgaatgggataacttagactgggaagatcgtcctgaaaacgcattgctgaccttaagaaaagaactaaatctttttgcaaacttaagacctgccttcttatttaatgaattatcagaagcatctccattaaaaaaagaagttattaatgatcttgatatcttgattgtaagggaattaactggaggaatttattttggtgagccaagaggtattgtttctaacgaagaaccaaattatgcatttaatacaatgatatataacgaagaagagattaggcgaattgctaaagttgcatttgaatctgctcaaaaaagaaataaaaaattatgctctgttgaaaaagcaaatgttctcggaaagtttctaaatttgg

SEQ ID NO: 208349 - DNA, 625 bp, Unknown
  Bacterial polypeptide expressing nucleotide sequence isolated from the Sargasso Sea
gatgtcaaaaaatcaaaaaaaaattttacttttacctggtgacggtattggaccagaagtagttagagaaacaaaaaaagtcattgattggtttaataataaaaaatctttagattttaaaattgatcaagatttaattggcggagcagcaatcgacaaacacggagttcctattactgacgaagttttctataatgctttagaaagtgatgcagtaattgttggagcatgtggtggaccacaatatgataaattagagttttcaaaaaaaccagaaagggctcttttaaaattaagaaaagaattgaaattatttgcaaatttaagaccggctatttgttttaaacaacttgttgactcttcgtccttgaaaccagaaatagtctcaggtctcgatatcttaatagttagggaattaacaggtggaatttattttggagaaccgagaggtataaagcctatagaaaatggagaaagaagaggtgtaaatactcatgtttatacaactaaagaaattaaaagaattgcaagagtagcttttgaattagctcaaaaaagaaataacaaggtaacatcttgcgaaaaatccaatgtgatggaagcaggtgttttatggagagaggaa

SEQ ID NO: 208350 - DNA, 364 bp, Unknown
  Bacterial polypeptide expressing nucleotide sequence isolated from the Sargasso Sea
gtttgatgtcgtggttgggagcaatctatttggcgatattctttctgatctgggcccggcggtggtcggagggattggcattgctcccagcgcgaatctaaatcctgacggcgacatgccatcaatgttcgaaccggtacacggctcggcgccagatatcgcaggaagtggtatcgcgaacccaatcggtcagatctggtcgggcgcgatgatgcttcaacatctcggctacccaaaggctgcggccgcggttgaagctgccatcgagacagtgttggccgagggtatggccgtaacccgtgatctcggtggaacggcgacgacggaggaagccggtagggcaattgcggatgccattgagtaa

SEQ ID NO: 208351 - DNA, 460 bp, Unknown
  Bacterial polypeptide expressing nucleotide sequence isolated from the Sargasso Sea
atggataacttagactggaaagatcgtcctgaaaacgcattgctaaccttaagaaaagaactaaatctttttgcaaacttaagacctgccttcttatttaatgaattatcagaagcatctcctttaaaaaaagaagttattaatgatcttgatatcttgattgtaagggaattaactggaggaatttattttggtgagccaagaggcattgtttctaacgaagaaccaaattatgcatttaatacaatgatttataacgaagaagagatcaggcgaattgctaaagttgcatttgaatctgctcaaaaaagaaataaaaaattatgctctgttgaaaaagctaatgttcttgaagtttctaaattttggagatctatcgtatccgaaatgtctacggactatccagatgttgagctctcacatcagcttgctgataataccgcaatgcaattggtctaaa

SEQ ID NO: 208352 - DNA, 382 bp, Unknown
  Bacterial polypeptide expressing nucleotide sequence isolated from the Sargasso Sea
gtttgatgtaattgtttctagtaacctatttggtgatattttatctgatattgccgcaacactaactggctctataggtatgctgccttccgcatcactcaacagttcttctcaaggaatgtatgaaccgtgtcacggcagcgcacctgatatagctggcaagaacttagcaaatcccttagcaatgatcctctctctagcaatggcttttaagtactctcttgaaaattctgaagcagcaagcataatcgaaaaatctgtaaaagaatttatctcaagaggttttagaacaaaagatttaaccgatgattcatccttcttagagactgatgaagttgcttccgagcttatttcaataatcaaggaaaaatctaatgtctaa

SEQ ID NO: 208353 - DNA, 291 bp, Unknown
  Bacterial polypeptide expressing nucleotide sequence isolated from the Sargasso Sea
caattggtatagcgccatcaggcaatataaatcccgaacgtgatttcccctccatgttcgaaccagttcacggttcagctccagatatcgctggaaaaaacattgcaaatccaattggacagatttggtctggagctatgatgcttgagcacctcggagaggaagacgcctcaaagaatattatcactgcaatcgaaaacgttttatcagaaaaacggtctttgacaccagatatggggggcaatgcctcaactgaagaacttggtaaagctatagaagaaagtatttgat

SEQ ID NO: 208354 - DNA, 778 bp, Unknown
  Bacterial polypeptide expressing nucleotide sequence isolated from the Sargasso Sea
cctgcaatttgctttgaacaattagtcgaagcatcaacacttaaaccagaaatagtatcgggattagatatcatgattgtaagagaactaactggaggaatttactttggagagccaagagggattaaaccgattgataatggagaaagaaaaggaattaatactcacacctatacatcaagcgaaatacaaagagttgcaagagtagcttttgatttagcaaaaaaaagagaaaataaagtaacatcttgtgaaaaatcaaatgtaatggaagcagggttgctttggagagaagaagttcaagatttgcatgataaagaatttaaagatgtaaaacttgatcacatgttagctgataattgtgcaatgcagcttttgagaaatcctaaacaatttgatgtaattgtaacagataatttatttggtgatatgctatctgatcaagcatctatgttaacaggatctttaggacttttgccatcagcttctcttggtgccaaaaataaagaggggcagatgagagctatgtatgaaccaattcacggatctgcacctgatatagcaggcaaaggtattgcaaatcctatagcaactattttaagtttcgctatggcgttaaggtattctcttgatttagataaagaggcaaatgcacttgagaaagcggtccaggatgtattgaatgatggtttaagaacaaaagatataatttctaaaggaaaaaaagaagtatccacatctcaaatgggtgatgcgataatttcaaaattgcaataat

SEQ ID NO: 208355 - DNA, 607 bp, Unknown
  Bacterial polypeptide expressing nucleotide sequence isolated from the Sargasso Sea
atgaataaaaaaaataatattcttgttttgcctggtgacggaataggacctgaagtatgtgatgaagcaataaaagttcttaaacatctaaatgatatttataaattagatatcgtaattgaggaatctgcagttggtggaagtgcgtacgaagaatttggaaatcctcttccagaggatactttgcaggctgctaaagaggctgatgctattttattaggtgctgtaggtggaccacaatgggatgatattgattatgagctgagacctgaaagagctttgcttggacttcgagcagaattagacttatttgccaacttaagaccagcaattttatcaaaatatttaagtgattcttcttctctcaagccagaaaaagttcaagatctcaatctattaattgtaagagaactaacgggtggaatttactttggtgaaccaagaggcagatctaaatcgggtgattctgctttcaatactatgatttatagtaaaaatgagattgagagaataggaaggattgcttttgaagcggctcaaaaaagaaataaaaatatttgttcagttgataaagcaaatgttttagaagtaaaagtgttttatggag

SEQ ID NO: 208356 - DNA, 952 bp, Unknown
  Bacterial polypeptide expressing nucleotide sequence isolated from the Sargasso Sea
gataaacatgggacacctattacagatgaagtattttataaagctttagaaagcgctgtggtaatgttaggagctgtaggtggcccaaaatgggagaaggtagaattttctaagaaacccgagagggcattattgaaacttagaaaagaattaaaactttttgcaaatttacgtcctgcaatatgctttaaacaattagttgatgcctcaactctcaaaccagaaatcgtttcaggtttagatattatgatagtgagagaactaacaggaggaatttattttggggaacctcggggtataaaacctattgagaatggtgaaagaagaggaattaatactcatacatacacaagcaatgaaataataagagtcgcaagaattgctttcgatttagctaaaaaaaggtcaaacaaagttacatcttgtgaaaaatcaaatgtaatggaagcggggcaactttggaaagaagaagttcaaatattacatgataaagaatataaagatgtagaattaagtcatatgttggcagataattgtgcgatgcaattattaaaaaatccaaaacaatttgatgtaattgtgacagataatttatttggtgatatgctatctgaccaagcctctatgcttacagggtctttaggtcttttaccctcagcatctcttggtgcaaaaaacaaagatggagaaatgagagctatgtatgaaccaattcatggatcagccccagatatagctggtaaaggtattgctaatccaattgctactatattaagttttgctatggctttgagatattctttagatcttgattcagaagcagaagctgtagaaaaggctgtacaagatgtacttaatgatgggttgagaacaaaagatattctctctaatggaatgaaagaaatttcaacttctgaaatgggagatgcgataatttcaaaattgcaataat

SEQ ID NO: 208357 - DNA, 658 bp, Unknown
  Bacterial polypeptide expressing nucleotide sequence isolated from the Sargasso Sea
cgaatattcttcggtaggtggaaaaatgtatcaaaatactgaaagagaaattgttatacaagaaactattatgtctaaacatggaatagatagagttcaaaaatttgcatttgaattagcaaaaacaagagatagaaaaaaattaactaatgccacaaaatcaaatggtatttctataacaatgccatactgggaccaaagattttatgaaaataaaaaagatttccctgagattaaaacagatcaatttcatatcgatattttagctgcaagatttgttttaacaccagagtggtttgatgttgtcgtagcgtcaaatttatttggagatattttatccgatttgggtccagcatgtacgggaaccattggtatagctccatcaggaaatattaacccaacaaataaacatccttctttattcgagcctgttcatggatcagcacctgatattgctggaaaaggtattgcaaatccaataggtcaaatttggtctggtgctatgatgttagattatttaggcgaaaaagaagctgccacacgaatagtgagttcaatcgaaaaaactttgctagaaaaacaaaatagaactaaagatctagatggtgatagtaatacaaaagaatgtgctaataaaatcttagataatattaattaa

SEQ ID NO: 208358 - DNA, 664 bp, Unknown
  Bacterial polypeptide expressing nucleotide sequence isolated from the Sargasso Sea
actgaaggagaatattcatcagttggtggtaagatgtaccaaaatacagatagagaaatagcaatacaagaaactatcatgtccgctcatggtgtagacagagttcaaaagtttgcttttgaattagcaaaaaaaagaaaaagaaaaaaactaactaatgcaacaaaatctaatggtatttcaataacaatgcctttttgggacgagcgtttcaacaaaatgaaaaaaaaatactctgaaatagaaaccgatcaatttcatattgatatattagcagcaagatttgttcttaatccagaatggtttgatgtggttgtagcatcaaatttatttggagatattttatctgatttaggtccagcatgcactggaactattggaatagctccatcaggaaatattaatcctgaaaataaatttccttcattatttgagccagttcatggctctgcacctgatatagctggcaaaggaattgcaaatcctgtcggacaaatttggtcaggtgcaatgatgcttgattacttaggagaaaaggaggcttcaagttcgattgtctctgcaattgaaaaatcattaaatgttcaaaaaaatagaactaaagacttgggtggtgagagtaatacagttgaatgttcaaatactattttatctaatctttaaa

SEQ ID NO: 208359 - DNA, 394 bp, Unknown
  Bacterial polypeptide expressing nucleotide sequence isolated from the Sargasso Sea
gatgcagctggtgcgggacccgcgccagttcgatgtgctgctcacgggcaatctgttcggcgacatcctcagtgacgaggcggcgatgctcaccggctccatcggcatgctgccgtctgcgtcgctgggcagtgatggtcccggactgttcgagcccgtgcatggctccgcccccgacatcgccggtcaggacaaggcgaaccccatggcgatggtgctgtccgccgccatgatgctgcgcatcggcctgaagcagtcggctgcggcggcggatctcgagcgggccgtcgacacggtgctggcatcgggtctgcgcacgggtgatctgatggcggagggctgcacgccggtgggctgcagcgccatgggcagggcgctgattgaagcgctctga

SEQ ID NO: 208360 - DNA, 769 bp, Unknown
  Bacterial polypeptide expressing nucleotide sequence isolated from the Sargasso Sea
atgaagatcgcagtcttgccgggcgacggcatcggtcccgaaatcgtcaaggaggccgtgaaggtcctgaacgtgctcggcgaaaagttcgagctcgaagaagcgccggttggcggcgcgggctacgaagccaagggccacccgcttcccgattcgacgctggcgctggcgaaggaagccgacgcgatcctgttcggcgccgtcggcgactggaagtatgactcgctcgaacgcgcgctgcgccccgagcaggccattctcggtctgcgcaagcatctgcatctgttcgcgaacttccgtccggcaatctgctatccgcaactgacgggcgcttcgtcgttgaaagaagaaatcgtttcgggtctcgacatcctgatcgtgcgcgaactgaatggcgacatttacttcggcgcgccgcgtggcgtgcgttcgtcgccggacgggctgttcgaaggcgcgaaagaaggcttcgacacgatgcgttattcggaacccgaagtacgccgcatcgcgcacgtggcgtttcaggcggcgcaaaagcgtcagaaacggctgacgagcgtggacaaggccaatgtgctcgaaacgtcgcagttctggcgtgacgtgatgatcgatgtttcgaaggaatacgcggacgtcgagttgtcgcacatgtacgtcgacaatgccgcgatgcaattggtcaaggcgccgaaggcgtttgacgtggtcgtgaccggcaacatgttcggcgacattctctccgacgaagccgccatgctgacgg

SEQ ID NO: 208361 - DNA, 361 bp, Unknown
  Bacterial polypeptide expressing nucleotide sequence isolated from the Sargasso Sea
catgtttggggacatactttcagattgcgcatccatgcttacaggatctcttggcatgttgccttcagcttcgattggcataaattcgaagggccaaaaaaaagcaatgtatgagccagttcacggctcagcacccgatatttcaggacaaggcgtatctaatcctttggcaatgattttaagtgtcgggatgatgtttgaatactcattggataaaaaagtcattgcagaaaagattaatgatgcagttagatcagttttagaaaaaggatttcgaacaaaagatatatacagtcaaaataagattcttttatcaaccaccgagatgggagataaagtcttggaggaaatgaaagaatga

SEQ ID NO: 208362 - DNA, 484 bp, Unknown
  Bacterial polypeptide expressing nucleotide sequence isolated from the Sargasso Sea
gaggtacaagctttacatgaaaaggagtataaagatgtagagttaaaccatatgcttgcagacaattgtgctatgcagttattaagaaatccaaaacaatttgatgtaattgtaacagataatttatttggagatatgttgtctgatcaggcctcaatgttaacaggatcattaggtcttttaccttcagcatctttaggagctaaaaataaggacggagagatgagagcgatgtatgaacccattcatggttctgcaccagatatagcgggaaagggggttgctaaccccattgccacaatacttagttttgcgatggctttaagatattcattagaacttgataaagaggcagaagagctagaaaaagcagttcaaaacgtattaaatgagggtctaagaactaaagatattttatctaagggtatgaaggaagtttcaacatcacaaatgggtgatgcgataatttcaaaattgcaataat

SEQ ID NO: 208363 - DNA, 911 bp, Unknown
  Bacterial polypeptide expressing nucleotide sequence isolated from the Sargasso Sea
aatgagtatagatagaaaaattttgttacttcctggtgatggcattgggcctgaagttattttagaagcagaaagagtgcttgagtgcttaaattctaagtacagtttaggtataagtattgaaaaagcacttctaggaggtgtggcatatgaagagtctggagatcctttgcctcaagaaacactcgaaaaagctgattggagtgatgcaattttattaggagcagttggaggtcctaggtgggatgatttgccttcagagaaaaaaccagaaaaaggattattgagaattagggccgaatatgatttctttgctaatttaaggcctgcaatcttatctaaatacttagtttcagcctccactatcaaaaaagagttggtatctgacttagatcttttaattgttagagagctaacaggaggtatatattttggggaaccaagaggatttatcgaaaaaaataaagccataaatacaatggtttatgacgaagaggagataattagaatcggtaaagttggatttgaagcagccttaaagagaaataagaaattatgctctgtggataaatcaaatgttttagaagtcagtatgctttggagggaagtaattactgaattagcaaaggattatgaagaagtacagttatcacatatgctcgtagataatgctgcaatgcagctagtcagggaacctaagcaatttgatgtaatagttactggaaatttatttggagatattttgtctgatatttctgctatgttaactggatctataggaatgcttccatcggcatcattaaatgaatcaggaaaagggctttatgaaccagttcatggttcagctcctgatattgcaggtaaagatttagctaatccaatagccgccatattatcggtggcaatgatga

SEQ ID NO: 208364 - DNA, 706 bp, Unknown
  Bacterial polypeptide expressing nucleotide sequence isolated from the Sargasso Sea
atgagtaagaagaaaacaatactctttctcccaggagatggaataggtccagaagtgtctaattctgcaaaaagcattcttgagttgataaatgatatttataatttagattacgttatagaagaagctttagtggggggttcggcttatgatcagactggagttcctttacccgaagataccttaaatgcagcacgtaattctgatgcaatcttattaggagctgtgggtggccctaagtgggatgacatagattatcaatataggcctgaaagggctttattaggtctgagatcagagttagatttatttgcaaattttagacctgccatcctttcaaaatacttaactgcttcttcaagccttaagcctgagaaagttgagaaccttgatttattaataatcagagagttaacaggagggatttattttggagagccaagaggaagaagagaagataaccaagatgcatttaatacgatgatttacagtcatgatgaaattgagagaattggaagggttgcttttgaggctgctcaaaaaagaaataagaacctttgttcagttgataaagcaaatgtattggaggtaagtgttttatggagagaagtgattactgatctctctaaagaatatccggatgtaaatctttcacacatgttggttgataacgctgctatgcaattagtaagacaacccaagcagt

SEQ ID NO: 208365 - DNA, 915 bp, Unknown
  Bacterial polypeptide expressing nucleotide sequence isolated from the Sargasso Sea
agttattgactggttcgaacaacggcgtaatttaaaatttaattttgagattgatcttattggaggttgtgcctatgacaagcatggaactcccctttctgatctgaccatggagaaagctaaaagtgttgatgcagtacttttaggtgccgttggtggcccggcctacgagaatctagattttgataaacagcctgaacgtgggcttctgcgtttgagaaaggaaatggacctttttgcgaatttaaggccggctcaatgtttcgacgcattaacaaacttttcatcgttgaagaaaaatattgtctctggtttggatattatgattgtcagggaattaacctcaggtatttattttggagaaccacgaggcattgagggtagcggtgaaaatcgagtgggaatcaatacaaatcggtacaccactaatgaaattcgtcgagttgcgaggtcagcttttgatttagctgctaaaagaaataataggttgtgctcaatggagaaggctaatgttatggaaagtggtgttctatggcgtgaggaggtaacccacgttcacaaaagtgagtatccccaagtggagctgtcgcatatgtatgctgatgctggtgcaatgcaattggtaagatggccaaaacaatttgacgtcattgtaacggataacttatttggtgatattctatctgattgcgctgctatgctgactgggagtttgggaatgctcccttctgctagcttaggtgcccccatggagtcaggtttgccgagagcactttatgaaccagttcatggatcggctccagatattgcaggatatggacaagcgaacccttgtgcttctatacttagctttgcaatggccttgagatattcatttaataaaataaacgaggctacatatttagagaccgcggt

SEQ ID NO: 208366 - DNA, 604 bp, Unknown
  Bacterial polypeptide expressing nucleotide sequence isolated from the Sargasso Sea
atacccgtcagaaattcatagaattgcaagattagctttcgatttagctaagaaaagaagaaataaagttacgtcttgtgagaaatcaaatgttatggaagcaggtttattatggagagaagaagttcaaactataaaagataaagaatttaaaaaagttgaattagatcatatgcttgcagataactgtgccatgcagcttttaagatatccaaaacaatttgatgtaatattagctgataacttatttggagatatgctatcagatgaagccgcaatgcttactggatcaataggtcttttaccctctgcatctctaggcgctaaagataaaaatggaagaactagatcgctcttcgaaccagttcacggttcggctccagatatcgagggaaaaaatattgctaatcctatagctgctatcttaagtttgtcaatggcattgagatattctctagacctaggaaaagaagcagatcaacttgataatgcagtccaaagcgtacttgatgaggggtttcgaactaaagatataatctcaaaaaatatgaaagaggtttctacaactgatatgggtgatgcaattattgcaaaattgaaataa

SEQ ID NO: 208367 - DNA, 721 bp, Unknown
  Bacterial polypeptide expressing nucleotide sequence isolated from the Sargasso Sea
tatgattaaagtgaaaaaaagaaaaattttattactaccaggtgatggcattgggcccgaagtaatttcagaagttaagaaaataatagaatggtttaatgtaaaaaaatctttagattttcaagtagatcaagatttggttggaggggcttcttatgaaaaacataagatcccaattactgacgaagtattttacaaagcattagagtctgaggctgtaattttaggtgcagttggtggaccaaaatgggataatttagaattttcaaaaagacctgaaagagcacttttaaaattaagaaaagaattaaaattatttgctaatttaagaccagcaatttgttttaaacaattagtagatgcatctagcttaaaaccagaaatagtttcaggtctggatatcatgatagttagagagcttacaggtggaatatattttggagaacccagaggtattaaacctatagaaaatggtgaaagaaaaggtgtaaacacacatgtatatactagcggggaaataattcgtgtggctaaagttgcttttgatcttgcccaaaaaagaaaaaaaaaagtaacatcgtgcgaaaaatcaaatgttatggaagctggaattctttggagagaagaggttcaaaaagttaaagatgaagaataccaaaacattgaattaaatcatatgctagcagataattgtgcaatgcaattattaaaaaatccgaaa

SEQ ID NO: 208368 - DNA, 877 bp, Unknown
  Bacterial polypeptide expressing nucleotide sequence isolated from the Sargasso Sea
aatttagatttttctattaatactcttgatgttggtggtaccgcttatgaaaaaacaggttcaccaattcctcatgaagtgttacaagcagccaaagaagctgatgcagttttgtttggagcggttggagcacctcaatgggatactctaagttgggatgacagaccagaaaatgcattgttaacactaagaaaagaattaaatttatttgcaaatttaagacctgccttcctttttaaagaattatctgaagcatcaccaataaaagaaaaaattattgaaggattagatattttgatagtaagagaactcactggaggtatatattttggtgagccaagaggtgttgttgaagatgaaacgccaaattatgcttttaacaccatgatttataatgaagacgagataagaagaatcgcaaaaatagcttttgaatctgctcaaaaaagaagtggaaaattatgttctgtagaaaaagcaaatgttttagaagtatctaagttttggagatcaattgttacagaaatgtcagcagagtatccagatgttgagctttctcatcaacttgcagacaatacagctatgcagttagttctcaatccaaatcaatttgatgttattgtggcaagtaacctgtttggagatattctatctgacattgctgcaactcttactgggtctatcggaatgcttccatcagcatctttagatagttcttttaaaggtatgtatgagccatgtcacggaagtgcgccagatatcgctaaccaagatattgctaatccacttgcaatgatcggctctctatcaatggcattaaaatattcactagacgaagaagctgtatcacataaaattgatgctgctattaaaaccc

SEQ ID NO: 208369 - DNA, 451 bp, Unknown
  Bacterial polypeptide expressing nucleotide sequence isolated from the Sargasso Sea
catggcccagcaccgcgtcgttcttcttcccggtgacggcatcggtccggaaatcaccgccgtggcccgccagcttctggagacggtgagcgagcggcacgggttccagctcagcttcgaggagcagcccatcggtggcagcgccatcgacgccaccggtgagccgctgcccgcctcaacgctggaggcgtgcaggcaggcggatgccgtgctgctggcggcgatcggcagcccccgcttcgacagcctgccccgggagaagcgaccggagaccggtctgctcggtctgcgggccggcatgcagctgttcgccaacctgcggccggtgaagatcgtgcccgcgctgatcggggccagcagcctgcggcccgaggtgatcgagggcgtggatctgatggtggtgcgtgaactcaccggcggcatctacttcggtcagcccaaggggcggatc

SEQ ID NO: 208370 - DNA, 526 bp, Unknown
  Bacterial polypeptide expressing nucleotide sequence isolated from the Sargasso Sea
tgaaaaatctaatgttatggaggcaggccaactttggaaagaagaagttaaagctcttcacgaaaaagaatataaagatatagaattgaaacatatgttagcagataattgtgctatgcaattagtgagatatcctaagcaatttgacgttattgttaccgataatctttttggagatatgttatcagatgaggcagctatgttgactggttctctaggacttttaccttcggcatcattaggcgctaaagataaaaatggaaacatgagatccttatatgaaccagttcatggatctgcaccagatatagcaggaaatgggattgccaatccaattgcaacaattttaagttttgcaatggcgttaaaatattctttagatttagataaagagtcaaaaactttagaaaaagcagttcaaagtgttttagacgaaggattaagaactaaagatatattgtcaaaaggcacaaaagaagtttctacatctgaaatgggtgatgcgataatttcaaaattgcaataa

SEQ ID NO: 208371 - DNA, 804 bp, Unknown
  Bacterial polypeptide expressing nucleotide sequence isolated from the Sargasso Sea
aatgagtaataaaaaaatactagttttgccaggggatggaattggcaatgaagttatggcagaggttctcaaaattattgattggctatcaaaaacgcaatccatgtcctttgatatatctgagcgtttagttggtggtacagcctacgacaaagaaggtgactctattagtgatgaaacaatgcaagaagcattggatgcagatgctgttttgtttggtgcagttggaggccctaaatgggataatgttgaaagagaaaaacgtcctgaggcagctttattaagattaaggaaagaattagatttatttgctaatctaagacctgcagtagtatttgatgcattagctgaggcatcacctttaaaacttaacttagttaaaggacttgatattcttattttaagagaattaacaagcggtgtttattttggacaaccacgaggggtatcaaagataaatgataacgaagaaaaagcaattgacacccaaagttatactacttctgaaataacaagaataacacgtgtagcttttgatttagcaaaattacgagacaacaaagtcacttcagttgaaaaatcaaatgtaatggagacaggaatgttttggaaaaatacagtttcaaatattcatcaaaaagattttcaagatgttgagctctttcatatgttagctgataattgtgcaatgcaattagttagaaacccaaaacaatttgatgttattttaacagataacttatttggagatcttctaagtgatatagctgcaatgttaccaggctctttgggaatgttaccctc

SEQ ID NO: 208372 - DNA, 528 bp, Unknown
  Bacterial polypeptide expressing nucleotide sequence isolated from the Sargasso Sea
gtgaaaaatctaatgttatggaagcaggagttttatggagagaagaagttcaatctctgaaagataaagattttaaaaatgtagaattacaacatatgttagcagataactgtgctatgcaattacttagagatccaaaacaatttgatgttatcctagctgataatttatttggagatatgctttctgatgaagcagcaatgcttacaggttctttaggcctgctaccatcagcatctttaggctcgaaggataaaaacggtagaattagatctttatatgaaccagttcatggatctgctccggatataactggaaaaaatattgcaaatcctattgcaactattttaagcttatctatggccttaagatattctcttaatttggataaagaggcagatttattagatctagctgtacaaagagttttagatgatgggttacgcacaaaggacattgtctctaaaggaaaaaaggaagtatcaacatctcagatgggggatgcaataattgctaaattgaagtaaa

SEQ ID NO: 208373 - DNA, 724 bp, Unknown
  Bacterial polypeptide expressing nucleotide sequence isolated from the Sargasso Sea
aatgaaagacattgatttacttcttttaagcggagacggcgtgggtccagaaatcatggaaagtgcgatttctttgcttgaaaaaatccaatcaagtttcaagataaacttcaatttgatcgaaggtcttatcggtggagcttcaattgatgctcatggacttccggtatcagatgaaactttgaatcaagcttctcaagcagactcaatcttatttggcgcagtgggaggtcctaaatgggattcacttcctcctaatgaaaaacctgaaaaagggttgttagaactaagatcttcattaggcctgtttgcaaatctaaggcctgcaattttatttgatagttccttggaagcatcatccttaaagcccgatatcataaaagatcttgatatgcttatcgtaagagagctcacaggcggtatatattttggtgagcctagagaaaaaaaatcatcttctgcttttaatacaatgatttatgaaaggcatgaagttgaaagaatcgccagagttgcttttgattctgcatccttaagaaacaaaaaagtttgttcagttgataaatcaaacgtccttgaagtgtcagaattttggagagaagttgtaatagatgtatcaaaagattatccagatatagaattaagtcatatgcttgtcgacaacgctgctatgcagcttgttaaaaatcctaaacaatttgatgtcattctttcaagtaactta

SEQ ID NO: 208374 - DNA, 568 bp, Unknown
  Bacterial polypeptide expressing nucleotide sequence isolated from the Sargasso Sea
gcaaaaataggctttgagacggcaatgaagcggagaaaaaaattgacttcagtggacaaagcaaatgtccttgaatctacagagttttggcgtgaaattgttactgatatgggaactgatttcccagaagtggaactcaatcatatgtatgttgacaatgcggcaatgcaaataataagagatccaaagcagtttgatacaatggttacaaccaatatgtttggtgatataatcagcgatgctgcagcaatgatgaccggatcattgggtatgctgccttctgccagcataggaggtggaatcggtatgtatgagcccgtgcatggttctgccccagatataactggacaagataaagccaatccgctggctatgatcctctctgcaggcatgatgatgcgctattcatttaatttgtcagaggcagatgaaatgataaaaaaggcagtggtggatacactggaaaaataccgcacaattgatattatggcagaaggaaaaatacagattggctgcagggaaatgggagaaaaagttcttcaaacacttgaagaaaataattcttgat

SEQ ID NO: 208375 - DNA, 590 bp, Unknown
  Bacterial polypeptide expressing nucleotide sequence isolated from the Sargasso Sea
aattagagtcgcaaaggtcgcgtttgaacttgcgcaaaaaagaagtaaaaaagtaacttcttgtgaaaaatcaaatgtaatggaagccggtattctttggagagaagaagtgcaaaaagttaaagatgaagaatatcaaaatatagaattaaatcatatgcttgctgataactgtgctatgcaattattaagagatcctaaacagtttgatgtgattgtgaccgacaacttatttggagatatattatcagatgaggctgcaatgttaactggatcactaggtttgcttccatcagcatctttaggttctaaagataaaaatggtaaaatgcggtctatgtatgaacctgttcacgggtcggctccggacattgcgggcacaggaaaagctaatcctattgctacaatacttagtttttctatggctcttagatattctttggatttagataaagaagcagataatttagatcaagcagttcaaaaagttcttgatgatggtttaagaactaaagatattttatccaaaggtaaaaaagaagtatccacctcacaaatgggtgatgcaataatttcaaaacttaaataat

SEQ ID NO: 208376 - DNA, 616 bp, Unknown
  Bacterial polypeptide expressing nucleotide sequence isolated from the Sargasso Sea
ggttgttattcaagaaacagtaatgtcaaaatatggaatagatagagttcaacaatttgcatttgaattagctaaaaaaagaaaaagaaaaaaactaacaagcgctacgaagtctaatgggatatcaataacaatgccttattgggatgagagatttaacgagaataagaaaaattactctgatgtagaaactgatcagtaccatattgatatattagcagctagatttgttttaagtcctgaacgctttgatgtgatagttgcatcaaacctttttggggatattctatctgatctaggaccagcttgtactggaactattggaattgcaccgtctggaaatataaatccaactaataagtatccatcattatttgaacccgttcatggatcggcaccagatattgcgggacaagggatagctaatccagtgggtcaaatttggtcagctgcaatgatgttagattacttaggtgaaaaagaagcttctgatagaatagtaaaatcaattgaattaactcttaaagataaagacagtcgaacaaaagatcttcaaggctctagtaatacagaacagtgctcaaaaaaaattttagataatcttagttcagtctaa

SEQ ID NO: 208377 - DNA, 848 bp, Unknown
  Bacterial polypeptide expressing nucleotide sequence isolated from the Sargasso Sea
gtttggcgccatcggccatccagatatccggtggccagatggcacagaaatcgcgccacaccttcggatgcgcaaggaatacggtctgattgcaggcctccggccggttaaggccttccctggtctgccaattcccttgaaggacccccgcgcccaggaaattgatatcgtgatcatccgggagtccaccgaaggtctgttcgcgtcgcttgggaagggcaccgttgaggatgaccgtatcgccaaggagacgctggtcataacccgcgatgtctgcgagcccctattcgacgaagccttccgcctggctcgccaacggaaaccgaagggcggccctggccgggtcacctgcgtcgacaaatccaacgttttcacggctatggctttctttcgcaagatcttcgatgaacgtgcagcactgaatgcggacataacggcggactacagctacgtggacgccgccgccttggacctggtacgcaagccctgggagttcgacgtcatggtcatggagaacatgttcggcgatatcctctccgacctgggcgcaggcatcgttggcggcatgggttttgcgccgtgcgctgaactaggccccaaccacggcctgttccagccagctcacggaacggcgcccgacattgccggtcaggacaaggccaatcccacggccatgttgttctcggcgaagatgatgttggactggctcggcgaacgccacgatgttcaggcctgccgagacgcggccgacgatctggctaacaccatcgaagacctttttgcggccggcgacgttgtgccaatggaactgggtggtaccgacggcaccacgtcctacgccaacaagg

SEQ ID NO: 208378 - DNA, 622 bp, Unknown
  Bacterial polypeptide expressing nucleotide sequence isolated from the Sargasso Sea
aatcaatactcacacttatactagtagcgagataattagagttgctaaagtagcttttgaacttgcacaaaagagaaataaaaaagttacttcctgtgaaaaatcaaatgttatggaagcaggaattctttggcgagaagaagtgcaaaaagttaaggatgaagaataccaaaacatagaattaaatcatatgcttgcagacaattgtgctatgcaattattgagagatccaaagcaatttgatgtaattgtaacagataatttatttggagatatattatctgacgaagccgcaatgttaacgggatcattgggcttgctaccatctgcctctttgggagctaaagataaaaatggtaaaatgaggtctatgtatgaacctgttcatgggtcagcaccagatattgctggtacaggaaaagctaatccaatagcaaccatccttagtttttctatggctcttagatattctttagaattagataaagaggctgataatttagatcaagcagttcaaaaagttcttgatgaatgcctaaggacaaaagatattttatctaaaggtaaaaaagaagtatctacctcgcaaatgggtgatgcaataatttcaaaacttaaatag

SEQ ID NO: 208379 - DNA, 478 bp, Unknown
  Bacterial polypeptide expressing nucleotide sequence isolated from the Sargasso Sea
gctgaagaagtggcaaaagactatccagatgtagagctagaccacatctatatagacaacgccactatgcaaataatgaagaacccagcgcagttcgatgtgatgctgtgttcaaacctttttggcgatatcgtttctgatgaatgcgctatgatgacgggctctatgggcttgttgccatcggcaagcatgaacgaggaaggctttggcctttatgagccagcaggcggttcggctccagatattgcaggccaaggcattgctaaccctatcgcacaaattttatcggccgccatgatgctgcgtttcagcatgaacttgaatgatgctgccgacgcaattgaaaaggcagtagtggcaacgctagaagcaggtgtacttacaggcgagttacttccttctgacaaacgcagccaagcggcaagcacgtcgcaagtaggcgatgaaatcgttaaacaattaatggcgcaggagtaaa

SEQ ID NO: 208380 - DNA, 777 bp, Unknown
  Bacterial polypeptide expressing nucleotide sequence isolated from the Sargasso Sea
agctttatgccaacctgaggcccgcagtcatttacggagatctggtcgatgcgtccacactcaaaagggacgtagtagaagatgcagatttaatggtaatccgtgaattgaccggaggaatctattttggagaaccccgtggtgtggaagaacgcaatggagagcgggtcggattcaatacgctggtctattctgaatccgaaatacgcagagttgggaagatggcctgtgaaatcgccatgaagcgaaataagaaactgacttctgtggataaagccaatgttctcgaatcaactgaactttggcgtggagtgatgacggatgtggtcaaggatttccctgaaatcgatctgaatcatatgtatgcggacaacgcagcaatgcaactgatccgggatccaaaacaattcgacacgatggtcaccacgaacatgttcggggacatcctcagtgatgctgcagcaatgatgacgggttcaatcggaatgcttccatcagccagtttgggcggcaacattggactttatgaaccagtccatggatctgcacctgatattgcaggacaaaatctagccaatcccctagcaatgatcctgtcaaccggaatgatgcttcgatattccttcgaccttggtcaagcagatgacctgattcagaaagcggttgtccaaaccatcgaaacgttccggaccgttgatatcatgtctccaggaaaaactcagatcggatgtcggcaaatggggggcaaggtactggagaccatcaaaacactctaaa

SEQ ID NO: 208381 - DNA, 801 bp, Unknown
  Bacterial polypeptide expressing nucleotide sequence isolated from the Sargasso Sea
tttggattttgaggtagaggaagacctggcaggtggagcttcttatgataaacacggaactccaataacagacgaagttttttataaagctctagagtctaaagcagtaatgttaggtgctgtaggcggtccaaaatgggacaatcttgaattttcaaaaaaacctgaaagagcattattaaaattaagaaaagaattaaagttgtttgctaacttaagacctgcaatatgctttaaacaactggttgatgcctcaacacttaagcctgaaatagtttcagatttagatattatgattgtgagagaacttacaggaggtatatattttggtgagcctagagggataaaaccaatagataaaggagaaagaaaaggaattaatactcatgtatatacaagtagtgaaattactagagttgccagagtagcttttgacttagcaaaaaaaagaaaaaaaaaagtaacatcttgcgaaaaatcaaatgttatggaagcaggacagctctggaaagaagaagttcaggctttacatgaaaaagaatataaggatatagagttaaaacacatgcttgcagataattgtgcaatgcaactattaagaaatccaaaacaatttgatgttatagttactgataatttgtttggtgatatgctttcagatgaagcttctatgttaacaggttctttgggtcttttgccatcagcttcacttggcgcaaaaaataaggatggcgatatgagagcaatgtatgaaccaattcatggatcagccccagatatagctggtaaaaggaattgcaa

SEQ ID NO: 208382 - DNA, 573 bp, Unknown
  Bacterial polypeptide expressing nucleotide sequence isolated from the Sargasso Sea
aatgattaaagtaaaaaaaagaaaatttttgcttttgcctggagatggtattggtccagaagttattaatgaggtcaaaaaaataattaactggtttaataataaaaagtctttagattttgaaatggatgaagatctagcaggaggtatatcttatgacaaacatggaacaccaattactgatgaagttttctacaaagctttagagtgtgaagccgtaatattgggtgctgttggtggtccaaaatgggataatgttgaattttcgaagaaaccggaaagagcactattaaaattgagaaaagaattaaaattgtttgctaatttaagaccggcaatttgtttcaaacaattagttgatgcatccacactcaaaccagaaatagtttcaggattagatattatgatagtaagggaacttacaggtggaatttattttggtgaacctagaggtattaaaccaattgataatggagagagaaaaggaattaatactcacacgtatacttctagtgaaattaaaagagttgccaaaatagcttttgatcttgcaaaaaaaagacacaataaagt

SEQ ID NO: 208383 - DNA, 511 bp, Unknown
  Bacterial polypeptide expressing nucleotide sequence isolated from the Sargasso Sea
agcaatgtgcttaaatccagcgtgttatggaatgaggttatagaggaggtcggcagcgattatcctgatgttaacgtagttcacatcctcgtggatgccgctgcaacctatttgtgcctaaaccctactcaatttgatgtcatggtcatggagaatatgtttggagacatactatctgatcagggcggaggtatccttggctccctcggactcatgccttcagcctgcgtggggccaaataaagcgtactacgaaccttcgcatggctcagcaccagatatagcaggtaaaggcatagcaaacccttactcgatgattggatcagtggcaatgatgcttgagatgagttttaacatggacgaggaaagcaaaaaggtttggcaagcaatgcagagtgtgttttcgcaggggttctcaacaccagacctctccaaaccagagtctaatcttgagctaattagtacagcgaggtttggcgatcttgttttagccgaactgaaaaagtcataat

SEQ ID NO: 208384 - DNA, 541 bp, Unknown
  Bacterial polypeptide expressing nucleotide sequence isolated from the Sargasso Sea
atggcaacaaatcaaaaaaaaatatttcttttacctggtgatggtattggtccagaagtagttggagaaaccaaaaaagttattgattggtttaataaaaaaaaatctctagattttaaaattgaccaagatcttattggtggagctgcaatagataaacatggcgttcctataactgatgaagtattttataaagctttagagagcgatgcagtaatagttggagcatgcggtggaccacagtacgataaattagagttttcaaaaaaacctgaaagagctcttttaaaattaagaaaagaattaaagttatttgcaaatttaagaccagccatttgttttaaacaattagtagattcttcaacattaaaaccagaaatagtttcaggtctcgatattttaattgtaagagaattaacaggaggcatatattttggtgagccgagaggtgtgaaaccaatagaaaatggtgaacgaagaggagttaatacacacgtttatacaacaaaggaaataaaaagaattgccaaagtagctttta

SEQ ID NO: 208385 - DNA, 574 bp, Unknown
  Bacterial polypeptide expressing nucleotide sequence isolated from the Sargasso Sea
aagaattgcttttgatgtagccagaaaaagaaattgcaaagtttgctcagtagataaagccaatgttttggaggcaacgggattttggcgggaggtagtaacaaatttgcacaccaaatattccgatatagaactttcacatatgtatgtcgacaattgcgctatgcagttagttcgaaatcccaaacaatttgacgttattcttactaccaatatgtttggcgatattttgagtgatgaggcttcaatgttgaccggttccataggtatgttgccttcggcaagtttgggtgaaaaatatgcgatgtatgaaccgattcatggaagtgcgcctgatatcgctagtaaagaattggcaaaccctctggccacgattttatccgtgggtatgctattcaaatattcgttagatcaagaaaaaccgaatgtgtggattgaagaagctgttgaatctgtcttgggtcaaggagtaaggactgctgatatcatgtcggacggcatgaaacaagttggaacaagggagatgggcgatttggttgctgcggaattggagaaaaaagttgaccaacaataa

SEQ ID NO: 208386 - DNA, 620 bp, Unknown
  Bacterial polypeptide expressing nucleotide sequence isolated from the Sargasso Sea
aatgattaaaattaaaaaaagaaaaattttattattaccaggggatggtatcggacctgaggtaattgctgaagtcaaaaaaataattgagtggttcaactcaaataaatccttggattttgaaattgaccaagatttggttggaggtgctgcttatgataaacatggaactccaataactgatgaagctttttacaaggcacaagaaagcgctgcagtaatactcggtgctgttggtggaccaaaatgggataatattgatttttcaaaaaaaccagagagagctctattaaaattaagaaaagaattaaaattatttgcaaatttgagacctgcaatttgtttcaaacaacttgttgatgcctcaagtttaaagcctgaatttgtttctaatttagatattctttttgtaagggaattaacgggtgggatttactttggtgaacctagagggataaaaccaattgataatggcgaaagaaaaggaattaatactcatgtttatactactagtgaaatcaagagagtagcccgtgttgcatttgatctagccagaaaaaggaataataaagttacttcctgtgaaaagtcgaatgtcatggaggcaggtcaattatgga

SEQ ID NO: 208387 - DNA, 859 bp, Unknown
  Bacterial polypeptide expressing nucleotide sequence isolated from the Sargasso Sea
ggatgaacaaaacaaaatctttagattttgtttaaaccaggagttaataggaggtgcatccattgatgttaataaagttccaattactgatgaggttttctacaagtctttagagtcagatgcagttatattaggtgcttgtggaggacctaaatgggataatttagaattttcaaaaaaacctgagagagctcttttaaaactaagaaaggaattaaagttatttgcaaacttaagaccagctatttgcttcaaacaattggttgactcttcaactcttaaaccagaaattgtatctggcctagatataatgatagttagagaattaactggaggtatttattttggtgagccacgaggaattgaaccaattgaaaataatcaaaggaagggagttaatactcacacttatacaacttctgaaattcatagaatagctcgtgtagcttttgagttagcaaagaaaaggagaaacaaagttacttcctgtgaaaagtcaaatgtaatggaggcaggtgtattgtggagagaagaggttcaagcaacaaaagataaagagtttaaaaaagtagaactaaatcatatgttagctgataactgtgcaatgcagcttttaagatacccaaaacaattcgatgtgatattagctgataatctttttggagatatgttatccgacgaggcggcaatgttaactggttctctaggacttttgccatcagcctctttagggtcaaaagataaaaacggcagggttagatcactttatgaacctgttcacggatctgcaccagatattgaaggacaaaatattgccaatccaatagctactattttaagtctatcaatggcattgagg

SEQ ID NO: 208388 - DNA, 543 bp, Unknown
  Bacterial polypeptide expressing nucleotide sequence isolated from the Sargasso Sea
catgaacaagaagaagatcgttgtcaccccgggagatggaatcggccccgaagtcacggaacaggccctgatcatcctgaaagaagttgccacccgatttcaactggaactggaggtagaggaaatgcctgtgggaggaacggcctatgatcagacagggactccgattccggacgaaaccctgaaagcttgcctggatgccgatgccgtcctccttggtgctgtaggtggcccaaagtgggaacccctggacttttctgttagaccggaacgcggacttttaaaattacgatctgaactccagctttatgccaacctaaggcccgcagtgatttacggggatctggtcgatgcctccacactcaaaagggacgtggtagaaggtgcagatttgatggtgatccgtgaattgaccggagggatctatttcggagaaccgagaggagtggaggaacgcaatggagagcgggtcggaattcatacgctggtctattctgaatccgaaatccgcagagtcggggagatggcatgtgaaatcgccat

SEQ ID NO: 208389 - DNA, 756 bp, Unknown
  Bacterial polypeptide expressing nucleotide sequence isolated from the Sargasso Sea
tagtagatgcttctagcctaaaaccagaaatagtttctggattagacataatgatcgttagagagctaactggaggaatatattttggagaacctagaggaataaaaccaatagaaaatggagaaagaaaaggtattaatactcatacttatacaagcagcgaaatcatcagagttgcaaaggtagcttttgaacttgctctaaaaagaaaaaaaaaagtaacctcatgtgaaaaatcaaatgttatggaagcgggtattctttggagagaagaagttcaaaaagttaaggatgaagaatattctaatatagaattaaatcatatgctggcagataattgtgctatgcaattattaagaaatccaaaacagtttgatgtaattgtaacggataatctatttggagacatattgtcggatgaagcagctatgttaactggatctctaggtttattaccttctgcatctttaggtgcaaaagataaaaatggaaaaatgagatctatgtatgaacccgtacatggttcagctccagatatcgccggaacaggcaaagctaaccctatagctagcattcttagtttttcaatggcattaagatattccctagatttaaataaggaagcagataacttagataacgctgttcaaaaagttctagatgacggattaagaactgcagatattttgtccaaaggtaaaaaagaagtatccacatcacagatgggtgatgcaataatttcaaaacttaaatagt

SEQ ID NO: 208390 - DNA, 800 bp, Unknown
  Bacterial polypeptide expressing nucleotide sequence isolated from the Sargasso Sea
tatgcagtttgcagtggattctgatgcggtattgtttggtgctgttggagggtctaaatgggatgatgttgaaagagaaaaacgaccggaagcggctcttttaagattaagaaaagatctagatttatttgcaaatttaagaccagccgtagttttagatgctcttgctgaagcttcttccttaaaattagatttagtaaaaggattagatattttaatagtaagagaattgacaagtggagtatattttggtcaaccaagaggaatttcaaaaattaatgaaacagaaagtaaagcaattgatacacagctatatacaacatcagaggtaaatagagtatcaagagttgcatttgacttagcaaagttaagaaaaaataaagttacatctgctgagaaatctaacgttatggaaactggattattttggagaaatacagttactgatttacataaaaaggaatattcttcagtagatttagaacatatgttggcagataattgtgccatgcaacttgttcgctatccaaagcagttcgatgtaatacttactgacaatctgtttggtgatttattaagtgatactgctgctatgttaacgggctcacttggaatgcttccatcagcagctcttggatcaataaaagaaaatggaactagagcagcaatgtatgaaccagttcatgggagtgccccagatatagcaggtcaatctaaagccaaccctcttgctatgattatgagttttgcaatgatgttaaaatatagttttgatatgaaggaagatagtaaactaattg

SEQ ID NO: 208391 - DNA, 464 bp, Unknown
  Bacterial polypeptide expressing nucleotide sequence isolated from the Sargasso Sea
taaagaatataaaaaaatagaattaaatcatatgttggcagataattgtgctatgcagcttttgagaaatccaaagcaatttgacgtaatattagctgataatttatttggagatatgttgtcagatgaggcagcaatgttaacagggtctctaggcttattgccttcggcttctcttggattaagagataaaaatggtaaaattagatctctttacgaacctgtacatggttccgcccccgatattgctggaaaaaatgttgctaatcctattgccacaatattaagcttatctatggctttaagatattcattagatcttgataaagaagcggatttattagacgtcgctgttcaaaaggtcttagatgatggtctgagaacaaaagacattatgtctgatggcaaaaaagaagtcactacaactgatatgggtgatgcaattatctcaaaattgaaataaa

SEQ ID NO: 208392 - DNA, 682 bp, Unknown
  Bacterial polypeptide expressing nucleotide sequence isolated from the Sargasso Sea
gatgatagttcgagaaaatacagagggagagtattcttcagttggtggaaagatgtatcaaaatactgaaagagaaattgttatacaagaaactataatgtctaaacatgggatagacagagtgcaaaagtttgcatttgaattagcaaaaaaacgtaaaagaaaaaaattaaccaatgctacaaaatctaatggtatatcaataactatgccttactgggatgaaagatttaatgaaaataagaaaagctatcctgaaattgaaactgatcaatttcatattgatatattaactgctagatttgttttaactcctgaatggtttgatgttgtcgtggcatcaaatttatttggagatattctatccgatctgggtccagcatgtactggaactataggcattgcaccgtctggaaatattaaccctacaaacaaatatccatcattatttgaaccggtacatggttcagccccagatatagcaggaaaaggtattgctaatccaataggtcaaatttggtctggcgctatgatgttagattatttaggcgaaaaagaagctgcatcaagaatagtaaaatcaatcgaaaagactttattagaaaaaaataatagaacaaaagatttagatggtgatagcaataccacagaatgtgctagtaaagttctaagcaacttgtag

SEQ ID NO: 208393 - DNA, 631 bp, Unknown
  Bacterial polypeptide expressing nucleotide sequence isolated from the Sargasso Sea
aagaaaaggaattaatacgcacagttacacatcaagcgagatccaaagagttgccagagtagcttttgatttagcaaaaaaaagacaaaataaagttacttcttgtgaaaaatcaaatgttatggaagcaggattgctttggaaagaagaagttcaagatttgcatgataaagaatttagtgaagttgagcttaatcatatgcttgcagataattgtgcgatgcaacttttaaggaatccaaaacaatttgatgtgattgttactgacaatttgtttggtgatatgctttctgatcaggcatctatgttgactggttctctaggacttcttccatccgcatctttaggtgcaaaaaataaagaaggacaaatgagagccatgtacgaacccattcatggatctgctccagatatagcaggaaaagggatggcaaatcctatagcaacgattttgagttttgctatggctttaagatactctcttgatttagataaggaagctaatgtcttagaaaaagctgttcaagatgttttagatgatggtttaagaacaaaagatattatttctaaaggaaaaaaagaaatatctacatcgcaaatgggtgatgcgataatttcaaaattgcaataa

SEQ ID NO: 208394 - DNA, 451 bp, Unknown
  Bacterial polypeptide expressing nucleotide sequence isolated from the Sargasso Sea
cgatgtggcgttgacccatttttttgcggacaatgccgcataccagctatcctgcaatccaggcgactttgacgtgattctggccgataacctctttggcgacatcctctctgatcagtcagcggcagtctcgggttcactcgggatgttgccttcggcatgtctgtcagagttgccacagagcggccgatcggaacgaccagcaatttacgaacctgtgcacggcagtgcgccggatatcgccggtgccggtatcgccaatccgataggcaccattctgtccgtggccatgctgcttgagtacagtgcgggcgaatcggtgggcgcccggaagatcagcacggccgttgaggcggtgttgcaggcagggttcacaacccctgatcttggcggtaaacacactactcagcagatgaccgatgaggtgatccggcaggtgcggcgcatctaa

SEQ ID NO: 208395 - DNA, 727 bp, Unknown
  Bacterial polypeptide expressing nucleotide sequence isolated from the Sargasso Sea
tcagcctcaagctgagaaagtcgagaatcttgatttattgataatcagagagttaaccggaggtatttatttcggagagccaagaggaagaaaggaagataagaaagaagcatttaataccatgatatatagtcatgaagaaatagagagaattggaagggttgcttttgaggctgctcaaaaaagaaataagaaactttgttcagtagataaagcaaacgtattggaggtaagtgttttatggagagaagtgataactgatctttctaaagattatccagatgtaagtctttcacatatgttggtagataacgctgctatgcaattagtaagagagcctaaacagttcgatgtggtagtcacaggtaatttgtttggagatatactttcagatatagcagccatgatgactggatcaataggtatgcttccttcggcttctattaattcagaaaataaaggcatgtttgagcctgtacatggttcagcacctgatattgctgggcaaggattagctaatccgatagccacaattctgtcagtagcgatgatgcttagatatagttttagcttagaagagcctgctagtaaaattgaagaagcaatagagaaggttcttaaagaaggttatagaactaatgacctcgaaggtcctgaagatatgaaattaaacacagatcaaatgagtcaaaagatattagagaatttgagaggtttcaatgaataa

SEQ ID NO: 208396 - DNA, 349 bp, Unknown
  Bacterial polypeptide expressing nucleotide sequence isolated from the Sargasso Sea
atgataaaaattaagaaaagaaaatttcttttactacctggtgacggtattggaccagaagttgtaggggaagttaaaaaaattataaactggtttaattcaaaaaaatctttagattttgaaattgaagaaggtctagcaggtggagtgtcatatgataaacatggaactcctataactgatgaagttttctataaagcattagagtgtgaagcagtaattttaggcgctgtagggggacctaaatgggataatctcgagttttcaaaaaaaccagaaagagctcttttaaaattaagaaaagaactaaaactatttgcaaatttaagacccgccaatttgctttaaa

SEQ ID NO: 208397 - DNA, 734 bp, Unknown
  Bacterial polypeptide expressing nucleotide sequence isolated from the Sargasso Sea
tttgttattaccaggggatggtatcggacctgaggtaattgcggaagtcaaaaaaataattgaatggttcaactcaaataaatccttggactttgaaattgaccaagatttggttggaggtgaagcttatgataaacatggaactccaataactgatgaagctttttacaaggcacaagaaagcgctgcagtaatattgggtgctgttggtggaccaaaatgggataatattgatttttcaaaaaaaccagagagagctctattaaaattaagaaaagaattaaaattatttgcaaatttaagacctgcaatttgttttaaacaactcgttgatgcctcaagtttaaagcctgaatttgtctctaatttagatattctttttgttagggaattaacgggtggtatttactttggtgaacctagagggataaaaccaattgataatggcgaaagaaaaggaattaatactcatatctatactactagtgaaatcgagagagtagcccgtgttgcatttgatctagccagaaaaaggaataataaagttacttcctgtgaaaagtcgaatgtcatggaggcaggtcaattatggaaagaagaagtgcaagcaattcatgaaaaagaatatagtgatgtagaattaaaacatatgctagcagataactgtgcaatgcagttagtaagaaatcctaaacaatttgatgtgatagtaacagataatcttttttgtgaca

SEQ ID NO: 208398 - DNA, 310 bp, Unknown
  Bacterial polypeptide expressing nucleotide sequence isolated from the Sargasso Sea
atgattaaagttaaaaaaagaaaaattcttcttttaccaggagatggaataggtccagaggttatcactgaagtcaaaaaaattattcagtggtttaataaaaataaatcccttgattttgaaattgatgaagatcttgttggtggagcagcatatgataaatacaagacacccataacagatgaagtattttataaagctttagagagtgaagcggtaatacttggtgctgtaggaggacctaaatgggacaagctagaattttcaaaaaaacctgaaagagcacttcttaaacttagaaaagagtaaa

SEQ ID NO: 208399 - DNA, 612 bp, Unknown
  Bacterial polypeptide expressing nucleotide sequence isolated from the Sargasso Sea
tccagcaggcgatcttcacccgccggggcaccgaccgcatcttgcgctatgccttcgacttcgctcggcggagcgggcgcaggcatgtgaccagcgcgacgaagtccaatggactctatcattcgatgccgttctgggacgagcgctttgccgcgatcggcgccgaataccccgatgttgccgccgatcagtatcatgtcgatattctcgccgcacgctttgtgatgtcgcccgaacggttcaatgtggtggttgggtcgaacctttttggtgatatcctttccgatctggggccgggaatcactggcaccatcgctgtggctccttctgctaacctcaaccccgaacggcggttcccttcgatgttcgagccggtccacgggtctgccccggacatcgccgggcagggcatcgccaatccgatcggccagatttggtcgggtgcaatgatgctggaacatctcggcgaaaccgagcccgccgcgctggtgatgcgcgcactcgaaacggcgctcattgcgcccgatattgcgaggacccccgatcttggcggaaacgggacaaccgcgggatttgcgcaagctgttcgcaacaccttgctggggctctagc

SEQ ID NO: 208400 - DNA, 772 bp, Unknown
  Bacterial polypeptide expressing nucleotide sequence isolated from the Sargasso Sea
taaaaatagaaaaattttattgttgccgggtgatggcattggaccagaagttgttagagaagtacaaaaaataatagaatggtttaacgagaataaatctttagattttagttttgaagaagaactaatcggtggggcatctatagatgttaataaaattccgataactgatgaagttttctataaatctctagaatccgaagccgtaattttgggagcttgtggaggtccaaaatgggacaatttagaattttctaaaaaacctgaaagagctcttttaaaacttagaaaagaattaaaattatttgcaaatcttagaccagctatttgctttaaacaattagttgattcttcaactttaaaacccgaaatagtatctgggttagatattatgattgtaagagagttaaccgggggtatatattttggtgaaccaagaggaattgaaccaattgaaaataatgaacgaaaaggcgtaaatactcattcttatacaacaagtgaaatacaaagaattgctaaagtagcttttgacttagcaaaaaaaagaaaaaataaagtaacctcttgtgaaaaatctaatgttatggaagcaggagttttatggagagaagaggtacaagccttaaaagataaagaatataaaaaaatagaattaaatcatatgttggctgacaattgtgctatgcagcttttaagaaatccaaagcaatttgacgttatacttgctgacaaaatatttggtgacatgttatcagatgaagcagcaatg

SEQ ID NO: 208401 - DNA, 412 bp, Unknown
  Bacterial polypeptide expressing nucleotide sequence isolated from the Sargasso Sea
tatgcagttgttgagaaatccaaagcaatttgatgtatttgtaacagataatttgtttggagatatgctatctgaccaagcctcaatgttgactggatcattaggtcttttaccttctgcatctttaggtgcaaaaaataaagatggagagatgagggctatgtatgagcctattcatggttcggctccagatatagctggtaaaagtattgctaatccaatagccacaattttaagttttgctatggctttgagatattcattagatttagataaagaggcagaagctctggaaaaagctgtacaggacgtattaaatgatggtttaagaactaaagacattttatcaaaaggttcaaaagaggttactacatcacaaatgggtgatgcgatcatttcaaaattgcaataa

SEQ ID NO: 208402 - DNA, 778 bp, Unknown
  Bacterial polypeptide expressing nucleotide sequence isolated from the Sargasso Sea
agatgctttagcagaatcttctactttaaaattagatttagtgaagggattagatatattaattgtccgagaattaacaagtggagtatattttggtcagccaagaggtatttctaaaattagtgatacggaaagtaaagccattgatactcaagtttatactacttccgagatagagagagtttcaagagttgcttttgatttagcaaaattgagaagaaataaagtttcatcagctgaaaaatccaatgtaatggaaactggattattttggagaaatattgttactgatttacataaaaaagaatatgcttctgtaaatctcgaacatatcttagctgataactgtgcaatgcaacttgttcgatatccgaaacaatttgatgttattctaacagacaacctttttggtgatttacttagtgatactgcagcaatgttaacaggctcacttggtatgctcccatcagcatcacttggaccattaagggaaaatggatctagagcggccatgtacgaaccagttcatggaagcgcaccagatattgctggccaatcaaaagcaaaccctctggcaatggttatgagttttgccatgatgcttaaatatagttttgatatgcaagaagatagtaagctagttgaaaaagctgttcaaaatgttttattaaaaggtcttagaactgcagatattaaggatggagcaaaaaaaatagtttctactaaagaaatgggtgattctgtaatagaggaattaaaaatattatcaggaaattaa

SEQ ID NO: 208403 - DNA, 505 bp, Unknown
  Bacterial polypeptide expressing nucleotide sequence isolated from the Sargasso Sea
acaaaatcaaatggtatttctataactatgccatactgggatcaaagattttatgaaaataaaaaagattttcctgagataaaaacagatcaatttcatatcgatattttagctgcaagatttgttttaacaccagagtggtttgatgttgtcgtagcatcaaatttatttggagatattttatctgacttgggtccagcatgtacgggaacaattgggatagctccatcaggaaatattaatccaacaaataaacatccttctttattcgagcctgttcacggatcagcacctgatattgctggaaaaggtattgcaaatccaataggtcaaatttggtctggcgctatgatgttagattatttaggcgaaaaagaagctgccaaacgaatagtaagttcaatcgaaaaaactttgctagaaaaacaaaatagaactaaagatctagatggtgatagcaatacaaaagaatgtgctaataaaatcttagataatattaattaac

SEQ ID NO: 208404 - DNA, 460 bp, Unknown
  Bacterial polypeptide expressing nucleotide sequence isolated from the Sargasso Sea
atgattaaaataaaaaaaagaaaatttttactattacccggtgatggtattggtccagaagtagttggagaagttaaaaaaataatactttggtttaataaaaataagtcgttagattttgaaatagatgaggacttagctggaggtgtttcttatgataagcatggaactccaattactgatgaggtgttctataaagctcttgaatctgaagcagtaatattaggagctgttggtggacctaaatgggacaatgtagaattttcaaaaaaaccagaaagagcattgttaaaattaagaaaagagttaaaactttttgcaaatttaagacctgcaatttgttttgaacaattggttgaggcatcaacacttaaacccgaaatagtttctggcttagatattatgatagtaagagagcttacaggaggtatttattttggagaacccaagaggcattaaa

SEQ ID NO: 208405 - DNA, 481 bp, Unknown
  Bacterial polypeptide expressing nucleotide sequence isolated from the Sargasso Sea
agttcaagaattgcatgataaagaatttaaagatgtacaattaaatcatatgcttgcagataactgtgcaatgcaactactaagaaatccaaaacaatttgatgttatagttactgataatttatttggagatatgctatctgatcaagcatctatgttaactggctcattagggttgttgccgtctgcatctttgggagcaaaaaacaaagatggaaaaataagagcaatgtatgaaccgatacatggttcggcacctgatatagctggaaaaggagtagctaacccaattgccacgatactaagttttgcaatggctttaaaatattctctcaatctagataaagaggcagatgtattagaaaaagcggttcaaactgttttagatgaaaaacttagaaccaaagatattttgtctccagggatgaaggaagtttcaacttctgaaatgggtgatgcgataatttcaaaattgcaataa

SEQ ID NO: 208406 - DNA, 463 bp, Unknown
  Bacterial polypeptide expressing nucleotide sequence isolated from the Sargasso Sea
aaagaatacaaagatgtagagttaagccatatgttagcagataactgcgcaatgcaacttttaagaaacccaaagcaatttgatgtaattgtaaccgataatttatttggggatatgctgtctgatcaagcttcgatgttaactggatctttaggtcttttgccgtcagcgtctttgggtgcaaaaaataaagatggtgaaatgagagcaatgtatgagccaatacatggttcggctcctgatatagctggacaaggtattgcaaatccaattgcttctattttaagttttgctatggctttaaggtactctttagatcttgataaagaagcagatgttttagaaaaggcagttcaagatgttctaaatgatggattaagaacaaaagacataatgtcagaaggcatgaaagaaacgtctacttcagcaatgggtgatgcgataatttcaaaattgcaataaa

SEQ ID NO: 208407 - DNA, 568 bp, Unknown
  Bacterial polypeptide expressing nucleotide sequence isolated from the Sargasso Sea
cctgctgcaatatacggagatcttgtaaatgcttcaacacttaaagctgaagttgttgatggtgccgaccttatggtggtgcgtgaattaaccggagggatttatttcggaaatcctcgtggagttgaagaacgcgacggtgagcgggtgggcttcaacacacttgtttattcagaatatgaaatccgacgtattgctaaaattggctttgaaactgcaatgaagcggagaaagaaactgacttcagtggacaaggcaaatgtgctggaatctactgagttctggcgggaaattgtaattgatgtgggcactaattttccagaagtggaactcagtcatatgtatgttgacaatgcggccatgcagatcatacgagatccaaagcagtttgatacaatggttacaactaatatgttcggtgacataattagcgatgctgcagcaatgatgacaggttcattggggatgctgccctctgccagcataggaggtgaaatcgggatgtatgagcctgtgcatggttctgccccggacataacaggtcaggataaggccaatccactggcaa

SEQ ID NO: 208408 - DNA, 426 bp, Unknown
  Bacterial polypeptide expressing nucleotide sequence isolated from the Sargasso Sea
catggacgccctaatcacaattctgccaggtgacggaattggtcctgaggtcgcaaagtcgggtaaagaaattcttcaattaatagcaaacaaatacaatcataattttaaattcgaagaaaaactgattggtggctcagctattgatcaatgctcttcagcgctaccccaagaaaccatcgacgcttgtaaggattcaaatgcagtagtacttggagcagttggtggaccaaaatgggataacccgaacgcaaaagtaagaccagaacaaggtctcttaggaatcagggagtcgctgggcgtatttgcaaatataaggcccgttattatttatccatcactcgcaaaagcatcacctctaaaagaagaaaaactgattgatgtagatcttattgttattagagaactgaccggaggtatttattt

SEQ ID NO: 208409 - DNA, 396 bp, Unknown
  Bacterial polypeptide expressing nucleotide sequence isolated from the Sargasso Sea
aatgattaaagttaaaaaaagaaaaatattacttttgcctggtgatggtatcggacctgaagttattgcagaagtaaaaaaagtaattaattggttaaataaaaatagatcactagactttgaagttgatgaggatttagtaggaggtgtagcctatgataaacatggtactccaattactgatgaagtattttataaagcgttagaaagtgaagctgttattcttggtgctgtaggtggaccgaaatgggataatttagatttttctaaaaaacctgaaagagcacttcttaaattaagaaaagaattaaagttatttgcaaatttaagaccagcaatttgttttaaacaacttgttgatgcatcaagtcttaaacccgaaatagtatctggtct

SEQ ID NO: 208410 - DNA, 587 bp, Unknown
  Bacterial polypeptide expressing nucleotide sequence isolated from the Sargasso Sea
aagagttgctcgtgttgcatttgatttagcaagaaaaagaaataataaagttacatcttgtgaaaaatcaaatgtaatggaagcaggtcaattatggaaagaagaggtaaaagctcttcatgaaaaagagtatcaagatgtagaattacaacacatgttggcagataattgcgccatgcaattagtgaggaatcctaaacaatttgatgtaattgttactgataatctattcggggatatgttatctgatgaagcagcaatgttaactggctctttagggcttttgccatccgcatctttaggagcaaaagataaaattggaaatatgagatcattatatgagccagttcatggctctgctcctgatatagcaggaaaaggtattgctaatccaatagcaataattttaagttttgcaatggcattaaaatattctctggatttagataaagaggcaaaaatgttagaaaaatcagttcaaagtgttcttgatgaaggattaagaacaaaagatatattatcaaaaggcacgaaggaagtttcaacatctgaaattggtgatgcgataatttcaaaattgcaataat

SEQ ID NO: 208411 - DNA, 911 bp, Unknown
  Bacterial polypeptide expressing nucleotide sequence isolated from the Sargasso Sea
tttggattttgaaactgaagaagggttggttggaggagcttcgtatgaaaagcacaaaaagccaattaccgatgaagttttttataaagctttggaatccgaagcagtaattttgggtgcagtaggtggtcctaagtgggataatttagaattttcaaaaagaccagagagagcactattaaaattaagaaaagaattaaaattgtttgctaatcttagaccggctatttgttttaaacaattagtagaagcctcaagtttaaaacccgaaattgtatctggtttggatataatgattgttagagaacttaccgggggtatatattttggagaacctagaggtatcaagcctatagaaaatggagaaagaaaaggaatcaatacacatacttatactagcagtgaaattattagagttgccaaagtagcttttgaacttgctcaaaaaagaaataaaaaagttacttcctgcgaaaaatcaaatgttatggagtcaggtattctttggagggaggaagttcaaaaaataagagatgaagaatattcaaatatagaactaaatcatatgcttgcagacaattgtgcaatgcaattattaagaaatcctaaacagtttgatgtgattgtaacagataatttgtttggtgatatattatctgacgaggcagctatgttaacaggatcattaggtttattaccttcggcctctctgggcgcaaaagataaaaatggtaaaatgagatctatgtatgaacctgtacacggttcagctcctgatattgcgggaacgggaaaagctaatcctatagccacaattcttagcttctctatggctcttagatattctttagatttagacaaagaagctgataatttagatctatcagttcaaaaggtcttgatgacggttt

SEQ ID NO: 208412 - DNA, 724 bp, Unknown
  Bacterial polypeptide expressing nucleotide sequence isolated from the Sargasso Sea
atgaaaaaatttaaaattattacattgccaggagatggaataggtccagaaataacatcttctgccgttgagatattgaatgccatttctgatttgaatgatatagagtttgaaattgtagaaaaatatgtaggtggtatatctattgataaatatggtattccattaactaaagaaactttatccgaatgtttagatgctgattcagtttttcttggtgctgtgggagggcccaagtgggataatgttgaacatagcaataaacctgagcaggcacttcttaaattaagaaaaagtctaaatctattttcaaatttaagaccagcaacaatatttaaaccattgattgactcatctagtttaaaatcaaatattattgaaaatacagatatattgattgtgcgtgaattaactggtggtatatactttggtgaaccaagaggttttgataaagacagggctttgaacacactagtttacaatcggtttgaagtggaaagaattgctagggtttcttttgaattagcgcaaaataggactggaaggcttgtatctgttcacaagtctaatgttctagagagttctcagttttggcaagacattgtacatgaggtgcataaagattataaagacgtagaactatcagatatgtatgtggataatgctgctatgcaaattatccagaacccaaaacaatttgatgtaattgttacccaaaacctat

SEQ ID NO: 208413 - DNA, 323 bp, Unknown
  Bacterial polypeptide expressing nucleotide sequence isolated from the Sargasso Sea
aacaggttcattagggctcttgccttcagcctcattgggtgcgaaaaacaaagatggggaattaagggctatgtatgagcctattcatggatctgcacctgatatagcaggtaaaggtatagccaatcccatagctacgattttaagttttgcgatggctttaaggtactcattagatcttgataaagaggcagaagccttggaaaaagccgtccaagaggtcctaaatgagggtttaagaactaaagatattttatccaaaggaatgaaagaaatatcaacatcgaagatgggtgatgcgataatttcaaaattgcaataat

SEQ ID NO: 208414 - DNA, 652 bp, Unknown
  Bacterial polypeptide expressing nucleotide sequence isolated from the Sargasso Sea
tattttggaaatccaagaggacatataacaaatacaaaacttccaaaagctttcaatactatggtttatgattcagccgaaatagagagaataactgaaatagcaataaaaattgctaaccaaagaaataaaaaaatatgttctgttgataaatcaaacgttcttgaggttagtcaattgtggagagatacagttttaaatatcacctcaaaagataaaaatatctctttaagcaatatgtacgttgataatgcagcaatgcaattagttagagatcctggtcaatttgatgtgattttaactagtaatttatttggtgatattttaagcgatttagccgcaatgttaactggctctattggtatgcttccatctgcttctctaaacattaacgggccaggagtttttgaacctgtacatggctcggctcctgatatagctggcaaaaacatggcaaatcctattgcgatgcttttatccgcttctatgatgttaaaaattggattaaatgaagaaaaagcctcagaaaatttagaaactgccattgataaagttttatcaaaaggatttagaacagccgatttagctgatgggtcttctgaagttttatcttgtagtggtatcggagataaaataatagaagaaatttaaa

SEQ ID NO: 208415 - DNA, 814 bp, Unknown
  Bacterial polypeptide expressing nucleotide sequence isolated from the Sargasso Sea
acccttcgcagtcatttcgacttgttcagtaacttacgcccggctcgcatttatccgggccttgaaagcctgtctccccttcgtgaagacattgctaaatctggcgtagacgttttagttgtgcgtgagctaaccagcggtatttactttggtcagcctaagggccgagaaggtgaaggcgaagaagagttcgcttatgacaccatgcgctatagcaaacgtgaaattcgccgtattgcgattgcagcgtttgaagcagcacagaagcgtcgcggcaaagtgacgtcggtggacaaagccaacgtactggtaaccagccgtttatggcgtgaaattgctgaagaagtagcaaaagactatccagatgtagagctagaccacatctatatagacaacgccactatgcagattatgaagaacccagcgcagttcgatgtaatgctgtgttcaaacctttttggcgatatcgtttctgatgaatgcgccatgatgacaggctctatgggcttgttgccatcggcaagcatgaacgaagatggttttggactttatgagccagcaggcggttcagccccggatattgctggtcagggcattgctaaccctatcgcacaaattttatcagccgccatgatgctgcgtttcagcatgaatttgaatgatgctgccgatgcaattgaaaaggcagtagtggcaacattagaagcaggtgtacttacaggcgagttattacctgcagataaacgcagccaagcggcaagcacgtcacaagtgggtgatgaaatcgttaaacaattaatggcgcaggagtaaa

SEQ ID NO: 208416 - DNA, 681 bp, Unknown
  Bacterial polypeptide expressing nucleotide sequence isolated from the Sargasso Sea
ggatttattttggagagccgagaggcattaagccaatagataatggtgaaagaaaaggaattaatacacatacctacacaacaagtgagatacaaagggttgcaagagtagcttttgatctagcaaaaaaaagacaaaataaagtcacttcatgtgaaaaatcaaatgtcatggaagcgggattactttggaaggaagaggttcaagatcttcacgataaagaatttaaagatgttgaacttaatcatatgcttgcagataattgttcaatgcaacttttaaggaatccaaagcaatttgatgtaattgttacagataatttatttggcgatatgctttcagaccaagcatctatgttgactggttctttaggtcttcttccttctgcatctttaggtgcaaaaaataaagaaggacagatgagagctatgtatgagccaattcatggatctgccccagatatagctggcaaaggaattgcaaatcctatagcaacgatattaagttttgctatggctttaaaatattctcttaatttagataaagaagcaaatgccttagaaaaagctgttcaagacgttttagacgaaggtttaagaacaagagatattatttctaaaggtaaaaaagaaatatccacatcacaaatgggtgatgcgataatttcaaaattgcaataat

SEQ ID NO: 208417 - DNA, 715 bp, Unknown
  Bacterial polypeptide expressing nucleotide sequence isolated from the Sargasso Sea
atggctgaagttgaaaaaataataaaatggttcaattcaaataaatctttagattttgaaatagataaagatctagtcggaggagccgcttacgataaacatggttccccaataactgatgaagctttttataaagctcaagaaagtgaggccgtaatactaggcgctgtgggcggtccaaaatgggataaccttgattttgcaaaaaaacctgagagagcattactaaaacttagaaaagaattaaaattatttgccaatttaagacctgcaatatgttttaaacaattagttgatgcatcaagtttgaaaccagaactagtatcagatttagatatactttttgtaagagaattaacagggggaatatattttggagaaccaagaggaattaaacctattgataatggagaaagaaaaggaataaatactcatgtatacaccacaagtgaaattactagagttgcaagagtagcttttgatcttgctaaaaaaagaaataataaggttacgtcttgtgagaaatctaatgttatggaggcgggtcaactttggaaagaagaagtgcaagcagttcacgataaggattacaaagatgtagaattgaatcatatgcttgcagataactgtgctatgcagttagtaagaaatcctaagcaatttgatgtaattgttacagataacctttttggagatatgttatctgatgaggctg

SEQ ID NO: 208418 - DNA, 938 bp, Unknown
  Bacterial polypeptide expressing nucleotide sequence isolated from the Sargasso Sea
aaggtaaaaaaaagaaaaatacttttacttcctggtgatggtattggtccagaggtaataactgaagtaaaaaaaattattaactggtttaatgataaaaaatctttagattttgaaatagatcaggagctagttggtggttgctcttatgacaaacatggcactcctattactgatgaggttttttataaagctttagaaagtgaagttataatgttaggagcagtcggaggtcctacatgggataacctggaattttcaaaaaaacccgagagagcattattaaaactaagaaaagagttaaaactttttgcaaatttaaggccagcaatttgttttaaacaattagttgatgcttcaacacttaagccagaagtagtttcaggattagatataatgatagttagagagttaacaggaggtatatattttggagaacctagaggaattaagccaattgaaaacggtgaaagaaaaggtattaacactcactcatatactacaagtgagattactagagttgcaagaatcgcttttgatttagccagaaaaagatcaaataaggttacttcttgtgaaaaatcaaatgtgatggaagcaggacaattgtggaaagaagaagttcaagaacttcatgaaaaagaatacaaagatgtagaattaagtcatatgttagcagataattgtgctatgcagcttttaagaaatccaaaacaattcgatgtaattgtaacagataatttgtttggagatatgttgtcagaccaagcttcaatgttaacagggtctttaggtcttttaccttcagcatctttaggagcgaaaaataaagatggtgagatgagagctatgtacgagcctatacatggatcagctccagacatagctggtacaggcatagcaaatccaatagcttctattttgagttttgctatggc

SEQ ID NO: 208419 - DNA, 475 bp, Unknown
  Bacterial polypeptide expressing nucleotide sequence isolated from the Sargasso Sea
atctcttcatgacaaagaatttaaggatgttgaattaagccatatgttagctgataactgtgctatgcaattattaaggaatccaaaacaatttgatgtaatagtaactgataatttatttggtgatatactttcagatcaagcttcaatgttaacagggtctttaggtttgttgccctcagcctctttaggtgcaaaaaacaaagatggagaaatgagagctatgtatgaaccaattcacggctcagccccagatattgctggaaaaggactagcaaatccaatagcgactatattaagttttgcgatggccttaagatattcattaaatctagataatgaagctgattctattgaaaatgcagttcaaagcgttcttgacgatggattaagaacaaaagatatattatctaaaggcaaaaaagaggtatctacaagccaaatgggggatgcgattatttcaaaattgaaataa

SEQ ID NO: 208420 - DNA, 317 bp, Unknown
  Bacterial polypeptide expressing nucleotide sequence isolated from the Sargasso Sea
attaggactactaccttcagcttctttaggggccaaggataaagaagaaaacatgagatcaatgtatgagcccgttcacggctcagcgcctgatatagctggaaaagggctagctaacccaattgctacaattttaagcttttctatggctcttaaatattcattaaatttagataaagaggcaaaagagttagaaaatgctgtacaaaaggtattagatgaggggcttagaacaaaggacattatgtctaaaggaaacaaagaagtatcaacaaaagcaatgggtgatgcggttattgcttatttgcaaaagtagt

SEQ ID NO: 208421 - DNA, 853 bp, Unknown
  Bacterial polypeptide expressing nucleotide sequence isolated from the Sargasso Sea
aatggggatgaagtagaattttctaaaaaaccagaaagagcattattaaaattaagaaaagaactaaaactatttgccaatttacgaccagcaatatgctttgaacaattggtaggtgcttcaactttaaaaccagaagtagtgtcgggtttagacataatgattgttagagagcttacaggtggaatatattttggggaaccaagaggaattaaaccaattgagaatggagagagaaaaggaataaatactcatacatatacgactaatgaaattgtaagggtggcacgtatcgcatttgaccttgcaaaaaaaagatcaaataaagtaacttcttgtgaaaaatcaaatgttatggaagccggacagttatggaaggaagaagtacaagaacttcatgataaagagtttaaagatgtagaattaagtcatatgcttgctgacaattgtgcaatgcaattgttaagaaatcctaaacaatttgatgtaattgtaactgataatttatttggtgatatgctttcagatcaagcttcgatgctaacaggttctttaggccttttaccctcagcatctttaggtgcaaaaaataaagatggagaaatgagagcaatgtacgaacctattcatggttcagcgcctgatattgctggtaaatcgatagcaaatcccattgcttctattttaagttttgctatggctctgagatattctttagaccttgataatgaggctgatgcattagaaaaagcagtacagcaggtgttaaatgatggtttaagaactaaagatattctatcagatggaatgaaagaggtatcaactacagcaatgggtgatgcgataatttcaa

SEQ ID NO: 208422 - DNA, 829 bp, Unknown
  Bacterial polypeptide expressing nucleotide sequence isolated from the Sargasso Sea
aatgaatgaagtgcttaaggttgccagctgtatcgaagaaatgtcttctgtaaattttgaaatagaccaagatgaaattgggggagctgcatacgataaatacggtacccccctttctgatgaaactttaaagaaagctaagagcagtcatgcagtcttattaggtgctgttggaggaagcaaatgggacaatttagatttttctcttaagccagaacaaggattacttagaattagaaaagaactagatctatttgctaacttgcgtccagctttatgttttgaatctatggttgaagcatcttcattaaaaccagaattagtttcaggtttagatattatgattgttagagaattaacaggaggtgtttattttggagagcctagaggaattaaagaactttctgatggaacacgtcaaggtactaatactcaaacgtataatactaatgagattcgacgtgttgctcgaattgctttcgaattagctcaaaagagaaataaaaaagttacctcatgtgagaaatcaaacgttatggagtcaggaattttatggcgtgaagaagttgaatatgttcataagaatgaatttaaagacatagaactttctcatatgtatgcagataactgtgctatgcaattagttagaaacccaaaacaatttgatgtcatagttacagataacttatttggcgatattttatcagatgaggcggcaatgctaaccgggtctttaggcatgcttccgtctgcttcactcggggaaattgatgagaacaattttagaaaatctttgtatgaacctgtacatggttcggcacctgacatc

SEQ ID NO: 208423 - DNA, 235 bp, Unknown
  Bacterial polypeptide expressing nucleotide sequence isolated from the Sargasso Sea
gaaccagttcatggctcagcaccggatattgccggcaaaggcattgcaaaccctataggtcaaatatggtctggagcgatgatgctcgatcatttaggggaaaaagaagcagcaaaatccatactaaattcaattgaaaaaactctatctattaaagaaaaccgaacaaaagatcttcaaggcacgagtaatacggctcagtgtgctaaagctgttttaaataacattaattaaa

SEQ ID NO: 208424 - DNA, 589 bp, Unknown
  Bacterial polypeptide expressing nucleotide sequence isolated from the Sargasso Sea
caaagagttgcaagagttgcgtttgatttagctagaaaaagacaaaataaagttacttcttgtgaaaaatcaaatgttatggaggctggcttgctatggaaagaagaagtagaacaattacacgataaagaatacaaagatgtacaattaaatcacatgctagcagataattgctccatgcaattacttagaaatccaaaacaattcgatgtgattgttactgataatttatttggagatatgttatctgatcaagcatcaatgctaactggctcattaggtttgttgccttcggcatctttaggagcaaaaaataaagagggtaaaataagagcaatgtatgaacctatacatggttcagctcctgatatagctggaaaaggaatagctaatccaattgctacaatattaagttttgcaatggctttaagatattctcttgatttagataaagaagcagatgctttagataaagcggttcaaaccgttttagatgaaggacttagaactaaagatattttatccaaaggaatgaaagaagtatcaacatctgaaatgggtgatgcggtaatttcaaaattgcaataac

SEQ ID NO: 208425 - DNA, 718 bp, Unknown
  Bacterial polypeptide expressing nucleotide sequence isolated from the Sargasso Sea
aatgagtaaaagtaaaaaaagaaaaatattattattgcctggagacggaattggtccagaagttataggcgaagtaaaaaagataattaattggtttaatgaaaaaaaatctttagattttgaaatagatgaggacttagcaggtggctgttcttatgataagcatggtacgccaattactgatgaggttttttataaagcagtagaaagtgcttttgttatgttaggtgcagttggaggccctaaatgggacaacgtcgaattttctaaaaaaccagagcgagctcttttaaaattacgaaaagaattaaaattatttgctaatttaagacctgcaatatgttttaaacagttagttgatgcatcaactttaaaacctgaaattgtttcaggcttagatattatgattgtcagagagctaactggaggaatttattttggcgaaccaagagggattaagctaattgaaaatggtgaaagaaaaggcgtcaatactcatacatatacaagtaatgaaataattagagttgccagaattgcttttgatctagcaaaaaaaagatctaataaagttacctcatgcgaaaaatcaaatgttatggaagcaggacaactttggaaagaagaggtacaaacgctacacgataatgaatataaagatgtagaattgagccatatgcttgcagataattgttcaatgcaattacttaggaatcca

SEQ ID NO: 208426 - DNA, 320 bp, Unknown
  Bacterial polypeptide expressing nucleotide sequence isolated from the Sargasso Sea
aggatctttaggtttattgccctcagcatctttaggtgcaaaaaataaagatggtgaaatgagagccatgtatgagcctattcatggttcagccccagatattgctggcaaaggaatagcaaatcctattgcctctatattgagttttgctatggctttaaaatattctttagagctagataaagaagcagaagccttagaaaaagcagttcaagaggtactaaatgatggcttaagaacaaaagatattctatcaaatggaatgaaagaagtttcaacttctcaaatgggcgatgcaataatttcaaaattgcaataat

SEQ ID NO: 208427 - DNA, 691 bp, Unknown
  Bacterial polypeptide expressing nucleotide sequence isolated from the Sargasso Sea
aatgagccagtattcaattgccgtattagccggagacggtatcggcccagaagttatgcaggaagccaataaggttttagatgctgttgaaaagaagtttaaagtcaccctgaaccgcactgcatatcctgtgggtggctatgccattgatactgagggcgaagcgctaccatcaaaaacgctattgggctgtgagcagtcagacgcaattttatttggcagtatcggtggccctaagtgggacaccttgccgttagaacaacgtccagaacgtgccgcactacttacccttcgcagccattttgacctgttcagcaacttgcgcccagctcgcatttatccgggccttgaaagcctgtctccccttcgcgaagacattgctaaatcaggcgtagacgttttagttgtgcgcgagctaaccagcggtatttactttggtcagcctaagggccgagaaggtgaaggcgaagaagagttcgcgtatgacaccatgcgctatagcaaacgtgaaattcgccgtattgcgattgcagcgtttgaagcagcacagaagcgtcgcggcaaagtgacgtcggtagacaaagccaacgtactggtaaccagccgtttatggcgtgaaattgctgaagaagtagcgaaagactatccagatgtagaacttgaccatatctacatcgacaatgccactatg

SEQ ID NO: 208428 - DNA, 619 bp, Unknown
  Bacterial polypeptide expressing nucleotide sequence isolated from the Sargasso Sea
gcttttaatactatgatttatgatgaaaaagagatcgaaagaattggtcgagtagcatttgaatcagctcaaaaaagaaataaaaaactatgttcagtggaaaaagcaaatgttcttgaagtttcaaagttttggagagaaataattacaaacctatcaaaggagtatcctgatattgaattgacacatcagcttgctgacaatactgcaatgcaattagtgcttgatcccaatcagtttgatgtaattgtttctagtaatctatttggcgatattttatctgatattgctgcaacactaactggctctattggtatgctgccttccgcatcactgaacagctcttctcagggaatgtatgaaccttgtcacggcagcgcacctgatatagctggcaagaatttagcaaatcctttagcaatgatcctctctctagcaatggcttttaggtactctcttgaaaatcatgaagctgcaaacataatcgaagaatctgtaaaagaatttatctcgagaggctttagaacaaaagatttaacagaagatacatctttcttagagactggtgaggttgcatctgaactaattccaataatcaaggaaaaatctgatgtctaag

SEQ ID NO: 208429 - DNA, 622 bp, Unknown
  Bacterial polypeptide expressing nucleotide sequence isolated from the Sargasso Sea
catggcttttaatactttgatttatgacgaaaaagagatcaaaagaattggtcgagtatcttttgaatcagctcaaaaaaggaataaaaaactatgttcagtagaaaaagcaaatgttcttgaggtttcaaagttttggagagaaataattacaaacctatcaaaggagtatcctgatgttgaattgacacatcagcttgctgacaatactgcaatgcaattagtacttgatcccaatcagttcgatgtaattgtttctagtaatctatttggtgatattttatctgatattgctgcaacgctaactggctctattggtatgcttccttccgcatcactcaacagctcttctcagggaatgtatgaaccatgtcatggcagcgcacctgatatagctggtaaaaatttagcaaaccctttagcaatgatcctctccctagcaatggcttttaggtactctcttgaaaattctgaagcagcaagcataatcgaaaaatctgtaaaagaatttatctcaagaggttttagaacaaaagatttaaccgatgattcatcctttttagagactgatgaagtctcttccaagcttatttcaataatcaaggaaaaatctaatgtctaa

SEQ ID NO: 208430 - DNA, 784 bp, Unknown
  Bacterial polypeptide expressing nucleotide sequence isolated from the Sargasso Sea
atatgacaatcttgaattttcaaaaaaacctgagagagcattacttaaattgagaaaggaattaaaattatttgcaaatctaagaccagcaatttgttttaaagagctagttgatgcctcaagtttgaaaccagagatagtttcaggcttggatatactgatagtaagagagttaacaggaggaatttattttggagaaccaagaggcgttaaaccgattgaaaatggagaacgaagaggagtaaatacacatgtttatacaacaaaagaaattaaaagaattgcaaaagtagcttttgatttggctgcaaaaagaaaaaacaaagtcacttcatgtgaaaaatcaaatgttatggaagcaggagttctttggagagaagaagtacagctattaaaagataaagattataaaaaaatagagttaaatcatatgttagcagacaattgtgcgatgcaattactcagaaatccaaaacaattcgatgtaatacttgctgataatttatttggagatatgctctcagatgaagccgcaatgttaacaggatctcttggtttgctaccctcagcatctattggtgataaagataaaaatggaagaatgagatctttgtatgagcccgttcatggctctgcaccagatatagctggaaaaaatatttctaatccaattgctactatattaagcttttctatggctttaaaatactctttgggattagaaaaagagtctaccttgttggataaagctgttgaaaaaaccctagaggacggtcttagaact

SEQ ID NO: 208431 - DNA, 658 bp, Unknown
  Bacterial polypeptide expressing nucleotide sequence isolated from the Sargasso Sea
aggaattaaaccaatagaaaatggtgagagaaaaggaataaatacttatacctatacaactagtgaaataactagagttgcaagagtcgcttttgatttagctaaaaaaagatctaataaagttacatcgtgcgaaaaatcaaatgtaatggaagctggccaattatggaaagaagaggttcaagagcttcatgataaagaatataaagacgtagaattatctcatatgcttgcagataactgtgcaatgcagcttttaagaaatccaaaacagtttgatgtaattgtaactgataatttatttggagacatgctttcagatcaagcttcaatgttaactggatccctagggcttcttccatcagcctctttaggggcaaaaaataaagatggagagatgagatctatgtatgagcctattcacggttcagcaccagatattgcaggaaaaggaattgctaatcctattgcttcaatattgagctttgcaatggcacttagatattccttagatttggataatgaagcagatattcttgaaaaagctgttcaaaaagttttgaatgatggtttaagaaccaaagatattctatccgaaggtaagaaagaagtgtctacttcagcaatgggtgatgcgataatttcaaaattgcaataa

SEQ ID NO: 208432 - DNA, 317 bp, Unknown
  Bacterial polypeptide expressing nucleotide sequence isolated from the Sargasso Sea
ttctctaggacttttgccatccgcgtctcttggagccaaagataaaaacggtaatatgagatctttatatgagccagttcatggatcagcacctgatatagcaggtcaagggattgctaatccaatagcaacaatactgagttttgcaatggctttaagatattctttagacctagataaagaggcagatagtttagaaaaagctgttcaaggtgtgcttgatgagggtcttagaactaaggatataatatcaaaaggaatgaaagaagtatcaacatcagtgatgggagatgcgataatttcaaaattgcaataat

SEQ ID NO: 208433 - DNA, 865 bp, Unknown
  Bacterial polypeptide expressing nucleotide sequence isolated from the Sargasso Sea
atgcccgaagccattcgagttttagaaaaaatagcaaagcgttacaacatatcttttgacttcgatcataaagattggagttgtgaacgctatcatcaatttggctcaatgatgccagaaaatggtctagatgaaattcagaatcatgactctattttgttgggagctgtgggatttcctggggtaccagatcatatttctttgtggggactgctgatccccatacgtcgaaaatttcaacaatatgttaatttgcgtccagtttatcttttagaaggtatgaagtgtccactggctgggcgtgagcctggagatattgatttttggatcgtcagggaaaataacgaaggtgaatattctgaagttggtggaagaatgttccagggaactgatgaagaatttgctgttcaacaaagcatttttacacgacgtggtgtagaccgtattattcggtatgcattcgagttggcaaaaactcgcaatcgcaaacatgtaacctcagcaacaaaatccaatggtatcattcactcaatgcctttttgggatgaaaggttcgatgaaatttcaaaagactatcctgatattgagacggacaaataccatatagatattttaacggctcattttgttcgaaatcctgattggtttgatgtcgttgtaggatctaacttatttggtgatattttatcagacttaggtcctgcgattactggaacgattggaatggcacccagtgctaacattaatcctgagcgagtgtttccatcgtgttttgagccagttcatggttctgctccagatatagcaggaaaaggaatttccaatccaataggtcagatttggtctgcctcaaatgatgcttgag

SEQ ID NO: 208434 - DNA, 686 bp, Unknown
  Bacterial polypeptide expressing nucleotide sequence isolated from the Sargasso Sea
tgggatatattttggtgagcctagatttattaaaaaagtaaacaagaaaagaattggtggtaacacattagtttatgatgaagatgagattagaagaattgctaggatggcttttatatatgcaaaaaaaaggaaaaacaaagttacgtcgttagataaagcgaatgttttagaagtaatgcaattatggagagatgtggtcaacgaagttcatgattcagaatttagagatgttgaattagaacatctctatattgataacgctgctatgcaagtaatcaagaggccttctacttttgatgtcatcctcgctggcaacttgtttggagacatcattagtgacgaaattgctgaattgactggttcgctggggatgctaccttccgcttcaataggaaataaagcaggaatttatgagccagtacatggaagtgccccagatattgcgggaaaagatattgcgaatcctatagctgcaataatgtcccttgcaatgttatttaaatattcgctaaatttagacaacatctctgaattaatcgatactgctatttctaatactttgaactctggaattagaactaaagatatccataatgacaaagatgaagaagttgtcagttgctcacaaatgggagacataattcttacgaacatagatgaaattaagtcgaaatttatctaaa

SEQ ID NO: 208435 - DNA, 691 bp, Unknown
  Bacterial polypeptide expressing nucleotide sequence isolated from the Sargasso Sea
aatgaataagactttaaatatatctttacttccaggtgatggaattggtcaagaaatttcaactgaagcctcaaaagttttggagtggtttaatgaaaaaactgacctaaaaattaatataaaagaagagttggttggaggagtttcaattgataaatataatgccccattaactgatgaaactctagataacataagtcactccgacgcaattcttttgggtgcggttggaggacccaaatgggaaggtcttgattttgagaaaaggcctgaacgtggtttactaaaaattcgaaaagaattggacttatttgcgaatttcagaccagcaattgtttttgatgctttggctagttcatcaactttaaaaacagaaataattcaaggtctagacattttaattattagggagttaacaagtggaatttacttcggtgagccaagaggtgtaagtcaaatagatgaagaaaataaaagaggttttaacaccttggcgtatacaactaaagaaattaaaagaattgcaaaagttggttttgaaactgcacaagcaagatcaaaaaaactttgctcagtagacaaagctaatgtgcttgaatcaacagagttatggagagatgtggttacagaagtatctaaagattaccctgatgttgaactatctcacatgtacgttgataatgcttcaatg

SEQ ID NO: 208436 - DNA, 810 bp, Unknown
  Bacterial polypeptide expressing nucleotide sequence isolated from the Sargasso Sea
tttattagcgcttagaaaatctcttgagttattcgccaacttaagacccgcttttctgtttaatgagcttgcgtctgcatctcctttaaaaaataacattattgaaaatttagatattcttatagtcagagagttaaccggaggtatttattttggtgagcctcgtgggattgttgaaaatgaatctcctaaatatggatttaatacgatgatatataacgaaaatgaaataagaagaattgctaaggtggcttttgaagcagctatgaacagaaataaaaaactatgctcagttgaaaaggctaacgttttagaggtctcaaaattttggagaagtattgtgactgaaatgagttcagaatatccagaggtcgaactatctcatcagcttgccgataatactgctatgcaactagtccttaatcccaatcaatatgatgtaattgtttcaagcaatctttttggagatatactctcagatattgccgcaactttgagtggctctatcggaatgcttccctcagcatctttaaatagttcttctcaagggatgtatgaaccttgtcacggaagtgcgccagacatagcaggtcaaggtattgcaaatccaattgctatgatagcttctctggcaatggcctttgaatattctcttgatagagttgatcttgcaaggagaattgaatcagcaattaaaacatttatcagcaaagggtttagaacaaaagatattgttacttcagaagaatttgtaaaaactcatgaagttgcccccataattatcagcattttaaaggatggacatgaata

SEQ ID NO: 208437 - DNA, 694 bp, Unknown
  Bacterial polypeptide expressing nucleotide sequence isolated from the Sargasso Sea
tatgagcagttatcggatcgcagtattgccgggtgacggcattggcccggaagtgatggccgaggccgtcaaggtgctggaaaaggtgcaggccaaattcggcttcaccctcgactacgagcgccatgacgtgggcggtatcgccatcgacaaccacggcaccccgctgccccagagcaccattgcaggctgcgaggcggccgatgccgtgctgtttggctcggtgggtggccccaagtgggagcacctgccccccaacgatcagccggaacgcggcgccctgctgcctctgcgcgcccacttcaagctgttctgcaacctgcgtccggcccgcatctacaccggcctggagcagttctcgccgctgcgggccgacatctcggatcgcggcttcgacatcgcctgcgtgcgggagctgaccggcggcatctacttcggccagcccaaggggcgtgaaggagaaggccccaccgagaaggcattcgacaccgaggtgtaccatcgcttcgagatcgagcgcatcgccaagatagcgttcgagtcggctcgtgttcgccgtggcaaagtcacctccatcgacaaggccaacgtgctcgcctcctccattctgtggcgcgaggtggtgacgcaagtcgccaagtcctatccggacgtcgcgctgaatcacatgtacatcgacaacgccaccatgcag

SEQ ID NO: 208438 - DNA, 736 bp, Unknown
  Bacterial polypeptide expressing nucleotide sequence isolated from the Sargasso Sea
gctcgaagtcgttgacgatcagttttcgctggagctcagtttcagcgaaagacgactgggcggcattgcgattgacgaggagggcgcggcctatcccgatgccactcgtgccctggcgcgagatgcagacgcgattttgctcggcgctgtcggtggtcctcagtgggacgcgctgccagcggcagaccgcccagagcgagggctattggcgattcgcgctgacttggatttattctgtaaccatcggcctgcgttgttgttccccgatttggctgaggcctccagtttgcgggcagaactggtggcgggtctggatgtacttattgtcagagagttgaccggcgggatttactttggcgagccacgtggcatcaccaccgacgccgatggcgtccgcgaaggccacaataccgaccgctacaatgaaacggaaattcgtcgcatcggccgcttggcctttgaggcggcgcaaaagcgcagtggtcgtctgtgttcggtcgataaggccaatgtgttggaagtgaccatgctgtggcgcgagacgatggaggcacttagcacagactacccggacgtggtgctatcgcatatgtatgtcgataacgcagccatgcagctggtccgtgagccgaagcagtttgatgttcttgtgactggaaatctctttggcgacattctttccgatattgctgccatgttgaccggatcgatcggtatgttgccatcggcatccctg

SEQ ID NO: 208439 - DNA, 641 bp, Unknown
  Bacterial polypeptide expressing nucleotide sequence isolated from the Sargasso Sea
aggaggcaaaatgtttccagatactgaaagagaaattgtaatgcaggaaactattatgtcccgagtaggtgtagatagagttcttaaatttgcgtttgaattagcaaataaaacagaaaaaaaacatttaacatctgctactaagtccaatggtatttcaataactatgccctattgggatgaaagggtagaagaaatggcaaaacaatattcagaagttatatgggataaatatcatattgatatactttgtgcacactttgtacttaaccctgataaatttaatgttgtagtagcttcaaatttgtttggtgatattttatcagatttaggacctgcatgtactggaacaataggtattgctccgtctggcaacatcaaccctgagaaaaaatttccttcattatttgagccagtgcatggatctgcgccagatattgctggaaaaggaattgctaaccctgttggtcaaatttgggcaggtgcaatgatgcttgaacaccttggatttaaggaagcttcggaacatattgttagagtaatagaagaagtgttagaaaaagaagaatataggactattgatttaggaggaaaagcaaacactattagttgtggttctgcgatagcagatgcaatttaaa

SEQ ID NO: 208440 - DNA, 655 bp, Unknown
  Bacterial polypeptide expressing nucleotide sequence isolated from the Sargasso Sea
atgattaaagttaaaaaaagaaaagtattattacttccgggcgatggaattggacctgaggttactacagaagttaaaaaagttatcaattggtttaatgataaaaaatctttagattttgagattgatgaagatttagttggaggaagttcttttgataagcatggaacacctcttacagatgaagttttctataaagcattagaaagtgccgtgataatgttgggcgcggttggaggaccaaagtgggatggtgtagaattttcaaaaaaacctgaaagagctcttttaaaattaagaaaggaattaaaactttttgcaaatttaagacctgcaatatgctttgaacaattagtgaatgcatcaactttgaaacctgaaattgtttctggtttagatattttaatagtaagagaattaactggtggagtttatttcggtgagccaagaggaattaaaccaatagaaaatggagaaagaaaaggagtgaatactcatacttatactagtagtgaaattatcagagtagctagaattgcttttgacttagcaaaaaaaagatcaaatagagttatatcttgtgaaaaatctaatgtaatggaagcaggtcaacttggaaagaagaagtgcaatcattacatgataaagaatataa

SEQ ID NO: 208441 - DNA, 337 bp, Unknown
  Bacterial polypeptide expressing nucleotide sequence isolated from the Sargasso Sea
tctttttggtgatattttatctgatcttggtcctgcttgcactggaacaataggaatagctccatcaggaaatattaatcctgaaaataattttccttctttatttgaacctgttcatggttctgctccagatatagctggtaaaaatatcgcaaacccaattggacaaatttgggctggcgctatgatgctagatcactttggattcaatgaagcacatgataaaattttaaattcaataaaagatattttgttaaaaaaagaatttagaacgaaagatctcggcggaactgcaagcacccaagaatgtggagatgctatagcagataatatttaa

SEQ ID NO: 208442 - DNA, 349 bp, Unknown
  Bacterial polypeptide expressing nucleotide sequence isolated from the Sargasso Sea
atgaataagaaaaaaacaatactctttctcgctggagacggaataggtccagaagtttcgagttctgcaaaaagtattcttgagtccatcgatgaaatttataatttagatttagttatagaagaagctctagtaggaggttcagcttatgatcagactgggcttcctttaccagaagaaaccttaaatgcagcacgtaaatctgatgcaatcctgttgggagcagttggtggccctaaatgggatgatttagattatcaatataggcctgaaagagctctactaggattgagatatgagttagatttatttgcaaattttagaccccgcactcctctcaaagcattaa

SEQ ID NO: 208443 - DNA, 619 bp, Unknown
  Bacterial polypeptide expressing nucleotide sequence isolated from the Sargasso Sea
acccatacttatactacaaaagaaattgaaagagttgcgcgagttgcttttgatttagctaaaaaaagaggcaataaagttacatcttgtgaaaaatctaatgtgatggaagcaggtcagctttggaaagaagaagttcaaattttacatgacaaagaatataaagatgtagagctaactcatatgttagcagataattgtgctatgcaattattaagaaatccaaagcaatttgatgtaatcgtaactgataatttatttggagatatcctatcagacgaagctgcaatgttgacaggctctttaggtctattaccatctgcatcattaggagctaaagacaaagatggaaatatgagatcgatgtatgaacctgtgcatggttcagctcctgatataactggtaaaggaattgcaaatcctattgcaactatactaagtttctcaatggcattaaaatactcattaaatttagataaagaatctaaagccttagataacgctgttcaaaaggtattggatgatggattaaggacaaaagatattatttctaagggaaaaaaagaagtttctacttcagagatgggagatgcgattattgcgtgtttgcaaaaataaa

SEQ ID NO: 208444 - DNA, 502 bp, Unknown
  Bacterial polypeptide expressing nucleotide sequence isolated from the Sargasso Sea
aaatgtccttgaggtttcaaaattttggcgcaatgtggtggctgaagttcattcatcagattttgaagtttgcgagctttcaaatatgttggccgataatgcagcaatgcaactcattcttaacccaaatcaatttgatgtagttttagcttcaaatctttttggcgatattctttcagatatagcagcaactctaactggttcaattggtatgcttccttctgcatcactaaatgattcattaaaaggtatgtatgaaccttgtcacggaagtgctcctgatattgcaggcaaaggaattgcaaatcccatagccatgatattatctttggcaatggcccttagatattctttaaattttgatgagctagcctctcaaattgaagttgcggtaaagaaatacatcactgcaggattcagaacaaaagatatttcaattgatggaaaatttttaactactaatgagacaactgaaaaaataatttcttttttaaatgaataa

SEQ ID NO: 208445 - DNA, 535 bp, Unknown
  Bacterial polypeptide expressing nucleotide sequence isolated from the Sargasso Sea
catggataaacaaaaaagaattacactcaccatcttacctggagacggaattggttcagaggtgatggatgcagcgcttttggtattggatgcaatctccaaaaaaaaaggatttaacttcgatctaaagcacgagcatgcaggaggagtttcgatcgataaacacaattctcctttaaccgattctgtcttgcaaacctgttacgatagcgatgctgttctattaggagcgctcgggggccccaagtgggatgatctgccgcaggatcaaaaaccagaaatgggctttttaaagttaagaaagggcttagacctttttgccaacttacgccctgcgataccatttgatgctttattgaattcatcatccttaaagaaagaggtgatcaaggataccaatatcatgatcgtgcgcgagcttgcgggtggcatatactttggagaacctcgcagttatggtgaagaggaagcttataatacattgcgctataaccggcatgagatcgaaaggatatctaaaatggcttttgaactt

SEQ ID NO: 208446 - DNA, 250 bp, Unknown
  Bacterial polypeptide expressing nucleotide sequence isolated from the Sargasso Sea
atgcaaaagaagaaagtgttgttactccccggtgatggtatcggtcaagaggtcacggcgtcagccggtcgtatattagagaaaattgtacagctcgaaggtgttgaaatagagctgctagaagggttgattggcggtgctgcaattgattctacgggcgatcctttgcccaaagaaacgcttgagctagccaaagagtgcgacgccgttttgctgggaggtgttggaggaccgaaatgggatgattgcc

SEQ ID NO: 208447 - DNA, 529 bp, Unknown
  Bacterial polypeptide expressing nucleotide sequence isolated from the Sargasso Sea
ttgcgaaaaatcaaatgtaatggaagcaggactgctatggcgagaagaagttcaagatttacatgataaagaatttaaagatgtagaacttgatcatatgttagctgacaattgtgcaatgcaacttttgagaaatcctaaacaatttgacgtgatagtaacagacaatttgtttggagatatgctgtcggatcaagcatctatgttaacaggctctctaggacttttgccatcagcttctcttggtgctaaaaataaagagggacagatgagagcgatgtatgaaccaattcacgggtctgctcctgatatagcaggcaaaggtattgcaaatcctattgcaactattttaagttttgctatggcattgagatattcccttgatttagataagcaggcaaatgtgcttgagaaagccgttcaggaagtattgaatgatggtttaagaacaaaagatataatttctaaaggaaaaaaagaagtttccacatcccaaatgggcgatgcgataatttcaaaattgcaataa

SEQ ID NO: 208448 - DNA, 808 bp, Unknown
  Bacterial polypeptide expressing nucleotide sequence isolated from the Sargasso Sea
cttggtgctgtaggaggacctaaatgggacaagcttgaattctcaaaaaaacctgaaagagcacttcttaaacttagaaaagaattaaaactttttgctaatttaagacctgccatttgctttaagcaattagtggacgcttcaagtttaaaaccagaaattgtttcaggtttagatattatgatagtaagagaattaacaggcggaatatatttcggggagccgagagggatcaaaccgatagataatggtgaacgaaagggaataaatacccacacttatactacaaaagaaattgaaagagttgcgcgagttgcttttgatttagctaaaaaaagagataataaagttacatcatgtgaaaaatccaatgtgatggaagcaggtcagctttggaaagaagaagttcaaattttacatgacaaagaatataaagacgtagagctaactcacatgttggcagacaattgtgctatgcaattattaagaaatccaaagcaatttgatgtaatcgtaactgataatttatttggagatatcctatcagacgaagctgcaatgttgacaggctctttaggattattaccatctgcatcattaggagctaaagacaaagatggaaatatgagatcgatgtatgaacctgtgcatggttcagctcctgatataactggtaaaggaattgcaaatcctattgcaactatattaagtttttcaatggcattaaaatattcattaaatttagataaagaatctaaagccttagataacgctgttcaaaaggtattggatgatggattaaggacaa

SEQ ID NO: 208449 - DNA, 659 bp, Unknown
  Bacterial polypeptide expressing nucleotide sequence isolated from the Sargasso Sea
acttacagggggaatttattttggtaaccctagggaaataaatgctgaatctgcttttaacacaatgatttattcatcaaatgaagtagaaagaattgctgaggtggcttttgaagcagcgatgaaaagaaataaaaaaatctgttctgtggataaagccaacgttcttgaggtttctgagttttggcgaaaaataatgatcaaagtttcaaaaaaatatccagaagtaatcctcgagcatatgctagttgataatgcggctatgcaattagttcaaaatcctaaacaatttgatgtaatcgtgtcttctaatctatttggagatattctttctgatatcagctctgttttatcaggttcaatcgggatgctcccttcggcctccttaaattctgcttctaaaggactttacgaaccagttcacggtacagctccagacattgctggaaaatcaattgcgaaccctttggcttcaattttgtcaataggaatgatgtttaagtattctttttcacaagaagatatttctatcaaaatagaaaatgcagtgaaaaaagttatttctgatggttatgttacaaaagatattgctgtgaataattctaaagttgtttcaactcaggagatgggagacctaataattgcaaaccttaactaaa

SEQ ID NO: 208450 - DNA, 610 bp, Unknown
  Bacterial polypeptide expressing nucleotide sequence isolated from the Sargasso Sea
aatgattaaagttaaaaaaagaaaaatacttttactaccaggtgatggaattggtccagaagtaataagtgaggttaaaaaaattattaattggtttaatgacttcaagtctttagattttgaaatagaccaagaacttgtaggtggttgttcatatgataaacatggcaccccaattactgatgaggttttttataaagctttagaaagcgaagtaataatgttaggagcagttggtggtcctaaatgggataatttagaattttcaaaaaaacctgaaagagcattattaaaacttagaaaagaattgaaactttttgctaatttaagaccagcaatttgttttaaacaattggttgatgcatcaacacttaaaccagaagtagtttcaggattagatataatgatagttagagagttaacgggaggtatatattttggtgaacctagaggaattaagccaattgaaaacggtgaaagaaaaggaattaatactcacacatataccacaagtgaaattactagggttgctagaattgcttttgatttagatagaaaaagatcaaacaaagttacatcttgtgaaaaatcaaatgtgatgaagcaggac

SEQ ID NO: 208451 - DNA, 733 bp, Unknown
  Bacterial polypeptide expressing nucleotide sequence isolated from the Sargasso Sea
agagcattattaaaactaagaaaagaattgaaattatttgcaaacttaaggccagcaatatgttttaagcaattggttgatgcttcgacactaaaaccagagattgtttcaggtttagatattatgattgtgagagaattaacaggtggtatatattttggtgaaccacgaggaattaaacctattgaaaatggtgaacgaaaaggaattaatactcacacttacacaagcaatgagataattagagtagctagaattgcttttgatttagctaagaaaagatcaaataaagttacctcttgtgaaaaatcaaatgtaatggaagccggacaactttggaaagaagaagttcaagctttacacgataaagaatataaagatattgaattaagtcatatgcttgcggataattgtgcaatgcagttattaagaaacccaaagcaatttgatgttattgtaacagataatttatttggagatatgttgtcggatcaagcctcgatgttaacaggttctctaggtcttttaccttctgcgtctttaggggcaaaaaataaagatggtgaaatgagagctatgtatgaacctatccacggatctgcccctgatattgcaggaaaaggaattgcaaatcctatagcgactatactaagttttgctatggctttaagatattctctagacctcgataaagaggcagaagctttagaaaaagctgtacaagatgttctaa

SEQ ID NO: 208452 - DNA, 667 bp, Unknown
  Bacterial polypeptide expressing nucleotide sequence isolated from the Sargasso Sea
atgaatagagaacttagtattgtggctttacctggtgatgggattggtaatgaaatatttaatgaagcaagaaaagtacttaattggataaataataatagtcactacaaactaaatataacagaggagttaattggcggaagctcaattgatgcatctggagaaccattaacaaataatgttctagaaaaacttagggttacagatgctatacttttaggagcagttggaggaccaaagtgggaagacctcactttcgataaaagaccagaaaggggacttcttaaaatcagaaaagaacttgatttatttgcaaacttcagacctgcaatcgtttttgattctctagcttcatcatcatcattaaagccagaaattataaatgggcttgatttaatgataattagagaacttactggaggtatttactttggagaacctagaggtgtagaaaaattaaacgaaaataactataaaggattcaatacattagtttatacctctgaagaaatcaggagaatagcatctgttgcatttgaaactgcacaatcaagaagtaaaaaattatgttcggtagataaagcaaacgtattagaatcaactgagttatggagaaaagttattattgaggtgagtaaagattatcctgatgttgaactaaatcata

SEQ ID NO: 208453 - DNA, 685 bp, Unknown
  Bacterial polypeptide expressing nucleotide sequence isolated from the Sargasso Sea
gatgatagtgcgtgaaaacactgagggcgaatattcttcggtaggtggaaaaatgtatcaaaatactgaaagagaaattgttatacaagaaactataatgtctaaacatggaatagatagagttcaaaaatttgcatttgaattagcaaaaacaagagacagaaaaaaattaactaatgccacaaaatcaaatggtatttctataaccatgccatactgggatcaaagattttatgaaaacaaaaaagattttcctgagattaaaacagatcaatttcatatcgatattttagctgcaagatttgttttaacaccagagtggtttgatgttgtcgtagcatcaaatttatttggagatattttatccgatttaggtccagcatgtacgggaacaattggtatagctccatcaggaaatattaacccaacaaataaacatccttctttattcgagcctgttcacggatcagcacctgatattgctggaaaaggtattgcaaatccaataggtcaaatttggtctggcgctatgatgttagattatttaggcgaaaaagaagctgccacacgaatagtaagttcaatcgaaaaaactttgctagaaaaacaaaatagaactaaagatttagatggtgatagcaatactaaagaatgtgctaataaaatcttaggtaatattaattaa

SEQ ID NO: 208454 - DNA, 913 bp, Unknown
  Bacterial polypeptide expressing nucleotide sequence isolated from the Sargasso Sea
ggaattcctattactgatgaagttttttataaagctttagagtgtgaagctgtaattttaggtgcagttggaggtcctaaatgggatgatgtagagttttcaaaaaagcctgagagagctttattaaaattaagaaaagaacttaaactttttgcaaatttaagacctgcaatatgctttaaacaattagttgacgcctcaactcttaaacctgaaattgtttcaggattagatattatgattgttagggagcttacaggtggcatttattttggtgagccaagaggaattaaaccaattgataacggagaaagaaaaggaattaatacccatacttatactacaagcgaaattcaaagagttgcaagagttgcttttgatttagctaaaaaaagaaaaaataaagtgacatcatgtgaaaaatcaaatgtaatggaggcagggttactttggaaagaagaggttcaagaaatacatgataaagagtttaaagatgtagaattaaatcacatgcttgcagataactgtgctatgcaattacttagaaatccaaaacaatttgatgtgatagttacagataacttgtttggagatatgttgtctgaccaagcatccatgttaactggttctttaggtttattgccatctgcttctttaggagcaaaaaataaagatggtaaaattagagcgatgtatgaacccatacatggttcagcacctgatatagccggacaaggtatagcaaatccaattgcaacaatattaagttttgcaatggctttaagatattctataaatttggataaagaggcagatgctctagaaaaagctgtacaaaatgttctagatgaaggacttagaactaaagatattttgtccaaaggaacaaaggaagtatcaacatctgaaatgg

SEQ ID NO: 208455 - DNA, 457 bp, Unknown
  Bacterial polypeptide expressing nucleotide sequence isolated from the Sargasso Sea
tatgagtataaatcaaaaaaaaatattattattacctggcgacggaattggtccagaggtagttggtgaaacaaaaaaagtaattgattgtttcaataaaaaaaaatcattagattttaaaattgatcaagatttaatcggaggagcagctatagatcaacatggagttcctataactgacgaagtattttataaagcactagaaagtgatgctgtaattgttggcgcatgtggtggaccgcaatatgacaaattagagttttcaaaaaaacctgaaagagctctccttaaattgagaaaggaattaaaattatttgccaatctaagaccggcaatttgttttaaacaattggtggactcttcaacacttaaacccgagatagtttcaggtcttgatattttaatagtgagagaattaacaggtggaatttactttggggaacccaaggggagtgaa

SEQ ID NO: 208456 - DNA, 535 bp, Unknown
  Bacterial polypeptide expressing nucleotide sequence isolated from the Sargasso Sea
acctcttgtgaaaagtccaatgttatggaggcgggagttttatggagagaagaagtacaaacgcttaaagataaagaatacaaaaaaatagagttaaatcacatgttagcagacaattgtgcgatgcaactactcagaaatccaaaacaattcgatgtaattcttgctgataatttatttggggatatgctttcagatgaggctgcaatgttaaccggatcgcttggattgttaccttccgcgtctttgggtgacaaagacaagaacggtaggacaagatcattgtacgagcctgtgcacgggtctgcaccagatattgctggaaaaaatatttctaatccaattgcaacaatattaagtttttcaatggctttaaaatactctcttggtttagaaaaagagtcagctttgcttgacaaagctgttgaaaaaaccctagagaacggtctaagaacccccgatataatgtcaccaggcaaaaagaaggtatcaacttctgatatgggtgatgcaattatatcaaatttaaattaaa

SEQ ID NO: 208457 - DNA, 673 bp, Unknown
  Bacterial polypeptide expressing nucleotide sequence isolated from the Sargasso Sea
tttgggagaaccaagaggaattaagcccattgaaaatggtgaaagaaaaggaattaatactcatacttatactagcagtgaaataatcagagttgcaagaattgctttcgatttagcaaaaaagaggtctaataaagttacttcatgtgaaaaatcaaatgtgatggaagccggtcaactttggagagaagaagtacaaactcttcatgataaagaatataaagatgtagaattaagtcatatgcttgctgataactgtgctatgcaattgcttagaaatccaaaacaatttgatgtgattgtaacagacaatttgtttggtgacatgttatctgatcaggcatcaatgttaacaggttcattagggcttttaccctcagcctcattaggtgcaaaaaataaagatggagaaatgagagcaatgtatgaacctattcatggatctgctccagatattgcaggcaaaagtgtagcaaatcctattgcaacaattctaagttttgctatggctttgagatattccttagatttagataaagaggcagaggcactagaaaaagctgtacaagaggtgttaaatgatggtttaagaacaaaagacattttttctggtggaacaaaagaagtatcaacatctcaaatgggtgatgcgataatttcaaaattgcaataa

SEQ ID NO: 208458 - DNA, 749 bp, Unknown
  Bacterial polypeptide expressing nucleotide sequence isolated from the Sargasso Sea
aaaaaaagatataattgatggtcttgatattttaattattcgagagcttactagcggtgtatactttggtgaaccaaaaaaaattgatattttagaagatggatctaaggttgcaattgatacacagaaatacaccagccttgaaattgaaagagttgcagaagttgcgtttgaattatctttaaaaagaaacaaaaagttatgctctacagaaaaagctaacgttatggaaactggtgttctttggagagaagttgtttcaaaagtacataagaataagtatcaagatgtagaattaagccacatgtatgcagatgcatgctcaatggagttggttagaaacccaaaacaattcgatgttatattagcagataacctatttggcgatatgctatcagatcaagcatctaccctcacagggtctattggcatgctcccttctgcttctttaggtaataaattagataaagggatacaaaattctttatatgaaccaattcacggcagcgcacctgatatagcaggacaaggaatagcaaatccaatagcacaaatactaagtttagctatgatgttgagttattctttcaatctatctaaagaagaaaaaatgataaacaaagctatttctaattgcctttctaaaggtatgagaacaaaagacattttccaaaaaggatgtaaagaagtttccacttcagaaatgggaaactttatagttgatgagcttaacaatttgatcaaataaa

SEQ ID NO: 208459 - DNA, 301 bp, Unknown
  Bacterial polypeptide expressing nucleotide sequence isolated from the Sargasso Sea
ttctgcttcattaggatcaaaagataaaaatggaaatatgagatctatgtatgaacctgttcatggttcggcgcctgatattgcgggaaaaggtatagccaatcctatagctactattttaagtttttcaatggcccttagatattcattaaatttagataaagaagcaaatgaactagataatgctgttcaaaaaattttagatgatggtttaagaacaaaggatattttttctaagggaaataaagaggtttctactcaagttatgggtgatgctattattgcttgtttgcaaaaataa

SEQ ID NO: 208460 - DNA, 533 bp, Unknown
  Bacterial polypeptide expressing nucleotide sequence isolated from the Sargasso Sea
aatgccatcaaataagagaaaaatattattgttaccgggagacggtataggaccagaggttgtacgtgaaaccaaaaaagtgattgagtggtttaataaaaaaaaatctttagattttaatttagacgaaggcttaatcggaggagcagcaatcgataaacatggtgttccaattactgatgaggtcttttataaagctctagagagtgatgccgtaatatttggggcttgtggtggtcctaaatatgacaaattagagttttcaaaaaaaccagaaagagctttacttaagctaagaaaagaacttaaattgtttgcaaatttaagaccagcgatttgttttaaacaacttgttgatgcctcaagtttaaaacccgaaatagtttccggacttgatattttaattgtaagagaacttactggtggaatatattttggagaacccagaggtgttaaaccaattgagaatggagaacgtagaggagtaaacacacatgtctacactaccaaagaaataaagagaattgcaaaag

SEQ ID NO: 208461 - DNA, 814 bp, Unknown
  Bacterial polypeptide expressing nucleotide sequence isolated from the Sargasso Sea
gttacattatggggatcactacttcagtttagaagagaatttgatcaatttataaatctaagaccagtaaaattatttgaaggtgttaatgccccattagctaataagaaacccggcgatattgacatgatgatagttcgagaaaatacagagggagagtattcttcagttggtggaaagatgtatcaaaatactgaaagagaaattgtaattcaagaaactattatgtcaaaacatgggatagacagagtgcaaaagtttgcatttgaattagcaaaaaaacgtaaaagaaaaaaattaaccaatgctacaaaatctaatggtatatcaataactatgccttactgggatgaaagatttaatgaaaataagaaaagctatcctgaaattgaaactgatcaatttcatattgatatattaactgctagatttgttttaaatcctgaatggtttgatgttgtcgtggcttcaaacttatttggagatattttatcagatctaggtccagcatgtactggaactataggcattgcaccgtctggaaatattaaccctacaaacaaatatccatcattatttgaaccggtacatggttcagccccagatatagcaggaaaaggtattgctaatcccgtgggacaaatatggtctggtgccatgatgttagattacttaggagaaaaagaagctgccagacgaatagtgagttcaatcgaaaaaactttgctagaaaaacaaaatagaactaaagatctagatggtgatagcaatacaaaagaatgtgctaataaaatcttagataatattaattaac

SEQ ID NO: 208462 - DNA, 466 bp, Unknown
  Bacterial polypeptide expressing nucleotide sequence isolated from the Sargasso Sea
gataaagaatataaagatgtagagttaagtcatatgcttgctgataattgctccatgcaattgttgagaaacccaaaacaatttgatgttattgtaacggacaatttgtttggagatatgttatcagatcaagcttcaatgcttacaggatctttaggccttttaccctcagcatctttaggagcaaaaaataaagatggtgaaatgagagcaatgtatgaacctattcatggatcggctcccgacatagccggtaaaggaattgcaaatcctattgctagcatattaagttttgctatggctttaagatattcattagatcttgataaagaagcggaagctttagaaaaagctgtacaagatgttcttaatgatggctttagaacaaaagacattctttctgatggaatgaaagaagtttctacctcacaaatgggtgatgcgataatttcaaaattgcaataat

SEQ ID NO: 208463 - DNA, 616 bp, Unknown
  Bacterial polypeptide expressing nucleotide sequence isolated from the Sargasso Sea
ttacatgattttgcatttaaattggcaagacaaagaaagaaaaaagggaaactaggaaaggtaacttgcgtagataaagctaatgtttttagatcacaagcatttttcagaaaaatatatgacgaaagaaagcataaattcaaagatatagaagctgattattgctatgttgatgcaatggcacttaacttgataagaaacccttggcaatacgatgtaatggtaatggaaaatatttttggtgatatattatctgatttaggaggaggtctgattggaggtatgggcatggcatcctgtgcggaaataggagataatcacgggttatttcaacctgcccatggaagtgcacccgatatacttgggaaggacaaagctaatccactagctactattttaagtgcatctatgatgcttgaatacctgtctgataaaaaaaattgtgaaagcacctcgctaggttccagattaattgaggctgcgattgaaattggttttgaaaaaaacgaattaagaccaatagagtttggaggtgatatgggaacaaaggcagtaactgagagtttaagtggtttattaaaagacaatgaaattcaaaaacaaatattaacttaaa

SEQ ID NO: 208464 - DNA, 648 bp, Unknown
  Bacterial polypeptide expressing nucleotide sequence isolated from the Sargasso Sea
ctatcaaaaataatgagaggagaggtattaatactcatagttacacaagtagcgagattcaaagaatagctagaacagcatttgagttagcaaaaaaaagaaagaacaaagtaacatcttgcgaaaagtcaaatgtaatggaggcaggagttctgtggagagaggaagtccaagcgttaaaagataaagaatttaaaaagatagaactaagccacatgttggctgacaattgtgcaatgcaacttttaagaaatccaaaacaatttgatgtaattttagcagataatttgtttggagatatgctatctgacgaagcagcaatgttgacaggttctttgggtttgttgccctcagcctctttaggtgcaaaagataaaaatggaaagatcagatctctttatgaaccagttcatggatcagcaccagatataactggaaagaatattgcaaatccaatagctacgattttaagtttttcgatggctttaaagtactctctagaccttgataaagaagctaatttattagacttagcagttcaaaaagtattagatgagggtttaagaacaaaagatattatgtcagctggtaaaaaagaagtctccacaactgatatgggtgatgcaattatttcaaaattgaaataaa

SEQ ID NO: 208465 - DNA, 877 bp, Unknown
  Bacterial polypeptide expressing nucleotide sequence isolated from the Sargasso Sea
aaagaaactgcgaaaaaacatcaatttaaaatacaatttgatgattttgaatttgcgtcatgtgattactataaaaagcatggaaaaatgcttcctgatgattggaaagaaaaaattggatcgcatgatgcaatcttttttggggcggttggagacccagacaaagtgccagatcatataagtttatggggatccttattaaagtttagaagagaatttgatcaatatgtaaatttaagacctgtgaaattgtttaatggagtaccgtgtcctttagcaaacaaaaaaccaggtgatatagatatgttaatagtaagagaaaacacagagggagaatattcttcagttggtggtagaatgtacaaagatacagaaagagaaattgccgttcaggaaacaataatgtctagacagggtgttgatagagttcaaaaatatgcatttgaattagctaaatctaaaggaagaaaaaaagtaactaatgcaacaaaatcaaatggtatttcaattacaatgccattttgggatgaaaggtttgatattatgaaaaaaaattatcctgaaatcaaaactgatcaattccatatagacattttaactgctagatttgttttaacgcctgagtggtttgatgttgtggtagcatcaaatttgtttggagatattttatcagatttaggcccagcttgcaccggcaccataggtattgcaccatcgggaaacattaatcctgaaaataagtatccttcgctatttgagccagttcatggttcagcaccggatattgctggaaaaggtattgcaaatccaattggacaaatatggtcaggtgcattaatgcttgatcatttaggagaaaaagaagcagcaaaatcta

SEQ ID NO: 208466 - DNA, 316 bp, Unknown
  Bacterial polypeptide expressing nucleotide sequence isolated from the Sargasso Sea
tttgggtccagcatgtacgggaaccattggtattgctccatcaggaaatattaatccaacaaataaacatccttctttattcgagcctgttcatggatcagcacctgatattgctggaaaaggtattgcaaatccaataggtcaaatttggtctggcgctatgatgttagattatttaggcgaaaaagaagctgccacacgaatagtgagttcaatcgaaaaaactttgctagaaaaacaaaatagaactaaagatctagatggtaatagcaatacaaaagaatgtgctaataaaatcttagataatattaattaa

SEQ ID NO: 208467 - DNA, 852 bp, Unknown
  Bacterial polypeptide expressing nucleotide sequence isolated from the Sargasso Sea
ttcttctcggagctgtcggatttcccggtgttccagatcatgtgtcgctatggggcttgttaataccaattcgtcgtgaattccagcagtacgtcaatctacgacctgttcgcctgttcgaagggatgccatgtcccctaaaaggtcgggatccaggaagtattgatttttggatagttcgagaaaataatgagggcgagtactcagaggttgggggaagaatgtactcggggacagctgaagagttggttgttcagcagagtatctttacaaggagaggaacagacagaattattgatttcgcctttaatcttgctcgaacccgagaccaaaaacatgtaacctctgctaccaaatctaatgggatcattcattctatgccattttgggatgagcgatttgatgtaattgctaaaaattatcctgagtgcaaaaccgataaataccacatcgacatattaacagcccatttcgttcgcaaccctgattggtttgacgtagttgttggttcaaacttatttggcgatattttatctgatttaggacctgctgtcaccggaactattggtatagctccgggtggcaatataaatccagagaggaacttcccatcatgttttgagcctgtccacggctctgctccggatatagcaggccgagggattgctaatccaattggtcaaatttggtctgcagcaatgatgttagaacatcttggagaaaaaacagctgctgatcacatagtgacttcaattgaggcagtgatcaaagatggttcggtgctgacaccagatatgggcgggttagcaaatactagagagctgggcgaggctattaggtcagtcatgtaga

SEQ ID NO: 208468 - DNA, 260 bp, Unknown
  Bacterial polypeptide expressing nucleotide sequence isolated from the Sargasso Sea
catgaacaagaagaagatcgttgttacctcgggagatggaattggccccgaagtcacggaacaggccctgatcatcctgaaagaagtttcctcccgatttcaactggaactggagatcgaggaaatgtctgtgggtggtactgcctatgatcagacagggactccaattcccgacgaaactttgaaagcgtgcctggatgccgatgcggttctccttggagctgtaggaggccctaagtgggaacccttggacttttctg

SEQ ID NO: 208469 - DNA, 808 bp, Unknown
  Bacterial polypeptide expressing nucleotide sequence isolated from the Sargasso Sea
aatgattaaagtaaaaaaaagaaaaattttacttttacctggagatggtattggtccagaagtaattaatgaggtaaaaaaaataattgaatggtttaataaaaatagatcgcttgattttgaagtagaccaagatttagttggcggggctgcgtatgataaatttaaaacacccattactgacgaggtattttttaaagctttagaatgtgaagcagtaattttaggcgctgtaggtggccctaaatgggataacttagatttttctaaaaaaccagaaagagcattactcaaattaagaaaagaactaaaactttttgcaaatctacgacccgctatttgttttaaacagttggttgaggcctctagtctaaaacctgaaatagtttcaggacttgatatcatgatcgtaagggaattgactggaggaatttattttggtgaaccaagaggtataaaacccatcgataatggagaacgaaaaggaattaatactcatacatatacatctaaagaaattgaaagagtttcaagagttgcttttgaattagccaaaaaaagaaataataaagttacctcttgtgagaaatcaaatgttatggaagctgggcagttgtggaaagaggaagtaactgctcttcataaaaaagactataaagacgtaaatttagaacacatgcttgcagataactgtgctatgcaattattaagaaatccaaaacaattcgatgtaatagtaactgataatttgtttggagatatactttctgatgaagcagcaatgcttacaggttcattaggattacta

SEQ ID NO: 208470 - DNA, 466 bp, Unknown
  Bacterial polypeptide expressing nucleotide sequence isolated from the Sargasso Sea
catgtcagataatcgcacactattatttttacctggtgacggaatcggccctgaaataatgacagaggtacgacgggttattgactggatggataaacgacgctcggtatcgtttgaaattactgagggactaattggcggcgctgcgattgatgaaactggggtgccattaccagatgaaactctcgaagctgcgcatgcggctgatgccatacttatgggggcggttggcggaccaaaatgggaggttttaccctttgaaatccagcccgagaggggtttgttaggtattcgaaaagaactaggcttatttgcaaatctgcgtcctgcgattgtttttgatgcattggcagaagcatccactctaaaaacagatgtggttaaaggtctcgatataatgataattagagagcttacaggtggtatttattttggggagcccgcgtggaatagaaaagatcgatgg

SEQ ID NO: 208471 - DNA, 547 bp, Unknown
  Bacterial polypeptide expressing nucleotide sequence isolated from the Sargasso Sea
aaaaccagttgttcacgcaattcataaagcaaacgtaatgaaattaacggatggtatctttctagatgcatgcaggcaagtgtctaaaaaacacaaagatattatttataaagaaatgcttgtagatgcttgtgctgcgcacattataagagatccaagtcaatttgatattattgtaactaccaatatgtttggtgatattttatctgatttagcaactgaattttcaggttccttaggtttggcaggatcgctaaatgccggtgagaattatgcaatggctcaagctcaacacggctctgctccagatattgctggtcaaaatacggcaaacccaatttctctaattttgtctacaagtatgttacttaattggcttggaaaaagaagaaagataaaggatttgattttggcatcgagtttaattgataaatctgttacaaatctattcgaaaataaaaataatttaactaaagatcttggtggaacggcttcaacagaaaaaataaccgaaaatctaattcatattttaaatcatttaatttaa

SEQ ID NO: 208472 - DNA, 582 bp, Unknown
  Bacterial polypeptide expressing nucleotide sequence isolated from the Sargasso Sea
caggcagcgagatcgatcgcatcgccaaggtggcgtttgagctggctacagaacgtcggggccatctctgttcggttgacaaggcgaatgtgctggacgtcagccagctctggcgtgaccgcgtggatgcgatggcgtccggttacggcggtgttgaggtgagtcacatgtatgtggacaacgcggcgatgcagcttgttcgagatccccgtcagttcgatgtgcttctcacgggcaacctgttcggcgacatcctcagcgatgaggccgcgatgctgaccggttcgatcggcatgctcccatcagcgtccctgggcagcgatgggcccggtctgtttgagcctgtgcacggctcggcaccggatatcgcaggacaggacaaggccaaccccatggccatggtgttgtccgccgcgatgatgttgcgcattggcctgaagcagagtgctgcggccgcggctctggaacaggccgtggacagggtgcttgcagaggggttccgaacgggcgacttgctctcggaaggctgtacagctgttggttgcagcgccatgggagagcaactgcttaaggcgctttgac

SEQ ID NO: 208473 - DNA, 581 bp, Unknown
  Bacterial polypeptide expressing nucleotide sequence isolated from the Sargasso Sea
aatgattaaagttaaaaaaagaaaaattttactgttaccaggcgacggaattggacccgaagtaattgctgaagtaaaaaaaattattgattggttaaataaaaaaaaatctttggacttccaaaccgaagaaggtttagttggcggagcttcatatgaaaaatataaaaaaccgattacagatgaagttttttataaagctttagaatctgaagcagtggtattaggtgcagtaggtggacctaaatgggataatttagaattttctaaaaggccagaaagagcattattaaaattaagaaaagaactaaaattatttgctaatcttagaccagccatatgttttaaacaattagttgatgcgtctagcttaaagcctgaaatagtttcaggtttagacataatgattgtcagagaacttacaggaggaatatattttggagaacctaggggaattaagcccatagaaaatggagaaagaaaaggtattaatactcatgtatataccagcagtgaaatagttagagtcgctaaagtagcatttgaacttgcacaaaaaagaaataaaaaagtcacatctt

SEQ ID NO: 208474 - DNA, 844 bp, Unknown
  Bacterial polypeptide expressing nucleotide sequence isolated from the Sargasso Sea
aatggctgccaacaagaaactgcttttcctgccgggtgacggcatcggcccggaagtcatgggccaggtccgtaaggtcatcgactggctcgacaaccgtcgccatgtgtccttcgatctggacgaagacctggtcggtggcgcggccatcgacacccatggcacatccttgaccgatgcgaccttggacaaggccatgaatgtggacgccgttctattgggcgccgtcggtggacccaagtgggacaacgtcgcccgtgatatccgtccggaagctgggctccttacgcttcgcaaggacatggatttgttcgcgaacctacgcccggcgaactgcctgccagccatggcagaagcgtccagcctgaaggaagatctggtgtctgggctggatatcctgatcgtccgcgaaagcactgggggtgcgtacttcggccagccaaagatgattgagaatatcgaaggtggccagcgcgctgttgacacgcaggtttacaccaccgccgagatcgaacgagtctgccgcgttgcctttgacctggccggcaagcggaatggcaagctgcattccgtggagaaggctaacgttatggagacgggcgtcttgtggcgtcaagtcgccaccgagatcggcgaggagttcccggaaattgagctggaacacatgtatgccgacaactgcgccatgcagttggtccgtgcgccgaagcagttcgacgtcatcgtcactgacaacctgttcggcgacatcctgtccgattgcgctgccatgctgactggatcgcttggaatgttaccgtctgcgaccctcagtggtgcggatcagagcggccgccgccgcgcc

SEQ ID NO: 208475 - DNA, 639 bp, Unknown
  Bacterial polypeptide expressing nucleotide sequence isolated from the Sargasso Sea
ttggcgaaaaaaatagaactgaaaataaagccagtgatttatgtgtttatcacgattttgaggttgagagaatcatcaaaattgctgccgatcttgcatcaaaaagaaagaatcaactttgctcagttgataaagccaatgttcttgaaacatcaagattttggcgcaacataacagataatataattgcgaaagactatcctcatatagatctcgagcatattctagttgatgccgcagcaatgtatttgattaataggccatctgattttgatgtaatcgtaacagagaatatgtttggagatatactcaccgatgaggtatctatgctgtctggatcacttggtatgcttccatctgcttcattgagtgataataaagttggcctatatgagcctatacatggttcagctccagatattgcaggcaaaggaattgcaaatccctgtggaatgatctccagtatcgcgatgttattaagatatagcttaaatcttcaagaagaggcaattgacgttgaaaatgccatctacaatgttattgataatggtgcaagaactgcagacatagctactgctgatgacaaaatttcaagtaccgaagaaataacaaaacttatcatcgatgaaataacttaaa

SEQ ID NO: 208476 - DNA, 887 bp, Unknown
  Bacterial polypeptide expressing nucleotide sequence isolated from the Sargasso Sea
aaagttaaaaaaagaaaaatattacttttgcctggcgatggtattggaccagaagttataaatgaggttaggaaagttattacatggcttaattcaaaaaaatctttagattttgaaattgatgaagatttagcaggaggagcctcttacgataaacatggaactccaataacagatgaagttttttataaagctctagagagtaagattgtcatgttaggtgccgtaggtggaccaaagtgggataatcttgaatttcaaaaaaaacctgagagagcattattaaaattaagaaaagaattaaaattatttgcaaatttaagaccagcaatatgttttaagcaacttgtacatgcatcaacccttaaacctgaaattgtttctggtttagatattatgattgttagagaacttactggtggaatatattttggtgaacctagaggaattaaacctatagataacggtgaaagaaaaggtattaacacccacacatatactagcagcgagattattagagtagcaaaagttgcttttgatttagcaaaaaaaagatcaaataaagttacatcatgtgaaaaatcaaatgtgatggaggcaggacagctttggaaagaggaagtgcagactttacacgatgcagaatataaagaggtagaattaaaccacatgcttgctgataattgttcaatgcaattattaagaaatcccaaacaatttgatgtgattgtaactgataatctttttggtgatatactttcagatcaagcatcaatgttaactggttcactaggacttctgccctctgcatctcttggagaaaaaaataaagatggggaaatgagagcgatgtatgaaccaatacacggttctgcaccggatatagc

SEQ ID NO: 208477 - DNA, 890 bp, Unknown
  Bacterial polypeptide expressing nucleotide sequence isolated from the Sargasso Sea
atacaaaatcgcctcaattgctggagatggtattggaaaagaggttgttccagaagctttaaaaatacttaaagaagtagcaaatcaacatcaatttaaattaaagatagatgaatttgatttttcatcatgtgattattatgaaaagcatggaaaaatgctacctgatgattggaaacaacaaattggtaatcatgatgcaatattttttggtgcagtaggtatgccagataaatacccagatcatattactttatggggttccctactacagtttagacgagaatttgatcaatttatcaatttaaggccagtaaaattatttaaaggagtaaatgcacccttagcaaataaaaaacctggtgagatagatatgatgatagtgcgtgaaaacactgagggcgaatattcttcggtaggtggaaaaatgtatcaaaatactgaaagagaaattgttatacaagaaactataatgtcaaaacatggaatagatagagttcaaaaatttgcatttgaattagcaaaaacaagagatcgaaaaaaattaactaatgccacaaaatcaaatggtatttctataaccatgccatactgggaccaaagattttatgaaaataaaaaagatttccctgagattaaaacagatcaatttcatatcgatattttagctgcaagatttgttttaacaccagagtggtttgatgttgttgtagcatcaaatttatttggagatattttatccgatttgggtccagcatgtacgggaacaattggtatagctccatcaggaaatattaacccaacaaataaacatccttctttattcgagcctgttcatggatcagcacctgatattgctggaaaaggtattgcaaatccaataggtcaaa

SEQ ID NO: 208478 - DNA, 683 bp, Unknown
  Bacterial polypeptide expressing nucleotide sequence isolated from the Sargasso Sea
ggtggttcgcgagaataatgagggtgaatattctgagattggtggcagattacatcgtggaactgatcatgaagtcgcgatacaagagtcaattttcaccaagtttggcacagatagaatccttcgatacgcctttgatctttgtaagcaattgggtctggaaaaagttacatctgcgacaaagtcaaacggtattattcacacgatgccatactgggatgagcgattttcagtcatagccgaagaatatccaatgttgaccaccgaccaatatcatatcgatatattgacagctaattttgtattgcaccccgattggtttgatgtcgtggtcggctcaaatttatttggggatatcttgtcagaccttggaccagctgtagcagggtcaattgctattgcgccttcagcgaatattaatccagacggagacttaccatctatgtttgagcctgtgcatggatcagcgcctgacatagcggggaaagggatagcaaaccccattggccaaatctggtcgggttctatgatgctggaacatcatggctataaagaggcagcagatgaaattgtccggactattgaagaagtaatatcggagggtgggccgaagacgccagatcttggtggacaagcaaataccaaggaactcggtcaggctattgcagatagtattcgttagc

SEQ ID NO: 208479 - DNA, 831 bp, Unknown
  Bacterial polypeptide expressing nucleotide sequence isolated from the Sargasso Sea
agattatcaatataggcctgaaagagctctattaggattgaggtctgagttagatttatttgcaaattttagacccgccatcctttcaaagtatttaaccgcatcttctagctttaaagctgagaaagttgagaatcttgatttattgataatcagagagttaaccggaggtatttatttcggagagccaagaggaaggaaagcggataagaaagaagcatttaataccatgatctatagtcatgaagaaatagagagaataggaagggttgcctttgaggctgctcaaaaaagaaataagaaactttgttcagtagataaagcaaacgtattggaggtaagtgttttatggagagaagtgataactgatctttctaaagattatccagacgtaagtctttcacacatgttagtagataacgcatccatgcaattagtaagagagcctaaacagtttgatgtggtagtcacaggtaatttatttggagatatactttcagatatagcagccatgatgactggatcaataggtatgcttccttcggcttctattaattcagaaaataaaggtatgtttgaacctgtacatggttctgcaccagatattgctgggaaaggattagctaatcccttagccgcaattctgtcagtagcaatgatgcttagatatagttttggtctagaagaacctgcgagtaaaattgaagaagcaatagagaaggttcttaaggatggttatagaacttttgatctcgaaggtcttgagaacatgaaattaaatacagatcaaatgagtcaaaagatattggagaatttgagaggttttaatga

SEQ ID NO: 208480 - DNA, 364 bp, Unknown
  Bacterial polypeptide expressing nucleotide sequence isolated from the Sargasso Sea
ttattcggagatatattatctgatgaggctgctatgttaactggatcgttaggtcttctgccgtcagcatccctaggagcgaaagacaaaaatggaaatatgagatcaatgtatgagccagtacatggttctgcaccagatattgaaggaaaaggtattgctaaccctatagcatcaatactaagtttttcgatggctttgagatattctttaaatttagataaagaagcaggagaacttgataaagcagtacaaaatgttttaaatgatggattaaggacgaaggacattttttctaagggaaataaagaagtttctacaaaacaaatgggtgatgctattattgctcatttgcaaaaatagt

SEQ ID NO: 208481 - DNA, 263 bp, Unknown
  Bacterial polypeptide expressing nucleotide sequence isolated from the Sargasso Sea
cgccctgtttgagccggtgcacggcagtgccccggatatcgcgggaaaaaacctggcggacccccgcgcaaccctgctcagcttagctatgacgctggaatggctggcccaccaccacccggcattgggcaatgcggcacaacatctgcatgacacagtgaacgcagacttggcgaaggaaggagacacttcgccacagcacagacaagagaaaggaacgctggaaacaggacaacggctttatgcattgctggcccagtaac

SEQ ID NO: 208482 - DNA, 429 bp, Unknown
  Bacterial polypeptide expressing nucleotide sequence isolated from the Sargasso Sea
cttgtttttgccgggtgacggcattggtgcagaagtaatggctcaggttaagcgagttattgagtggatggaccaaaaacgttctgtaaattttgatattcaggaagaactcatcgggggtgtcgccatagatgcgaaaggcgtgccacttccagaggaaacacttgaggcagcaaaaaattctgacgctatactgatgggtgcggttggtgggccaaagtgggagaagcttccctttgaaattcagccagaaagagggcttctcgggatcagaaaagagctggggctattcgcaaatttgcggcccgccttagtttttgatgcccttgttggagcttcttctctaaaagagaatatagtaaagggtctggatatcatgattgtgagagagctaacgggaggtatttactttggagagccaaggggggt

SEQ ID NO: 208483 - DNA, 514 bp, Unknown
  Bacterial polypeptide expressing nucleotide sequence isolated from the Sargasso Sea
attaacaaatgcaacaaaatcaaacggaatttcaattactatgcctttttgggatgaacgatttaatgaaatgaaaaaaaactatactgatattgaaacagatcaatttcatattgatattttagttgctagatttgttcttaatcctgaatggtttgatgttgtagtggcatcgaatttatttggagatattctttcagatttagggcctgcttgcacaggaacaattggaattgctccctctggaaatattaatccggaaaataaatttccatctttgtttgaaccagttcacggttctgcccctgatattgcaggaaaaggaattgctaaccctgtaggacaaatttggtctggagcaatgatgctagattatttaggagaaaaagaagcatctaattcaatagttgaagcaattgaaaaatctttaagcgataaaagtaacagaactaaagatttaggaggtgatgctgatactactaaatcttctaattcgattttagctaatctttaa

SEQ ID NO: 208484 - DNA, 467 bp, Unknown
  Bacterial polypeptide expressing nucleotide sequence isolated from the Sargasso Sea
aatgaaagaagttcgcaaagtcatcgattggtatggtgcaaaactgggcctagtttttgatgtttctgaagatctagttggcgggatagcatatgacactcatgggacaccgttgcacgactcgacattagcaagagcccaagaagttgatgcggttttgctgggagcggttggtggaccagattatgataatttagattttagcgtaaagcctgaacgcggattgctgaaactgcgcaaggagatggacttatttgctaacttgcggcccgctcagtgttttaatgctcttgcagagttttcttcattaaaaacagaggttgtgtctgggctcgatatcatgattgttcgcgaacttacgtctggaatttattttggtgaaccgcgtggcattattgaagagggtaacgaacgcgttggtataaacactcaaagatacacagaaagtgaaattgatcgtgttgcgc

SEQ ID NO: 208485 - DNA, 434 bp, Unknown
  Bacterial polypeptide expressing nucleotide sequence isolated from the Sargasso Sea
aaaaaaagaaaaaataaagttacctccttgtgaaaaatcgaatgtgatggaggcaggagttttgtggagagaagaagtgcaatttataaaagataaggagtttaaaactgttgagttaaatcatatgttggctgacaattgtgcaatgcagcttttaagatacccaaaacaattcgatgtaatactagctgataatctatttggcgatatgttatcggatgaggcagcaatgttaactggttctttagggcttttaccttctgcctccttagggttgaaggatcaaaaagggaggattaggtcactttatgagccagttcatggttcagcaccggacattgaaggtaaaaacattgccaatccaatagctaccattttaagtttatcaatggctttaagatattctttagatcttgataaagaggctgatgaaa

SEQ ID NO: 208486 - DNA, 880 bp, Unknown
  Bacterial polypeptide expressing nucleotide sequence isolated from the Sargasso Sea
cagttggtggtcctaaatggggacaacgtggagttttctaaaaagccagagagagctcttttaaagttaagaaaagaattaaaattatttgcaaatttaagaccggcaatttgttttgaacaattagttgatgcatcaactttaaaacctgaaattgtctcaggcttagacataatgattgtaagagaattaacaggaggaatttatttcggcgaaccaaggggaattaaaccaattgaaaacggtgaaagaaaaggagttaatacccacacttatacaagcagtgaaataattagggtagcaagaattgcttttgatttagctaaaaaaagatctaataaagttacctcatgtgaaaaatcaaatgtgatggaagcagggcaactttggaaagaagaagtgcaaacactccatgaaaaagaatataaagatgtagaattaagtcatatgcttgctgataactgtgcaatgcaattattaaggaatccaaaacaatttgatgtgattgtaacagataacttattcggtgacatgttatctgatcaagcatctatgttaacgggttctctaggccttttaccttcagcatcattaggagccaaaaataaagatggagagatgcgagcgatgtatgagcctattcatggatctgccccagatatagctggcaaaggtatagcaaatcctattgcaacaatattaagttttgctatggctttaaggtattctttagacttagataaagaagcggaaacattagaaaaagcagtacaggacgtgcttaatgatggattaagaacaaaagacattttatctaatggaatgaaagaagtgtctacatctcaaatgggtgatgcgataatttcaaaattgcaataat

SEQ ID NO: 208487 - DNA, 672 bp, Unknown
  Bacterial polypeptide expressing nucleotide sequence isolated from the Sargasso Sea
ttggagaacctagaggaattaagccaatagataatggagaacgaaaaggaataaatactcatacttatacaagcagcgagatattaagagttgcaagagtagcatttgatttggctaaaaagagatctaataaagttacatcttgcgaaaaatcaaatgtgatggaggcaggacaactttggaaagaggaggttcaagagcttcatgacaaagagtataaagaagtggaattaagtcatatgcttgctgataactgtgcaatgcagcttttaagaaatccaaaacaatttgacgtaattgtaactgacaatttatttggagatatgctttcagatcaagcttcaatgttaactggatctttaggacttctgccatcagcatctttaggagctaaaaataaagatggagaaatgagagcaatgtatgaacctattcatggttcagcacccgatattgcaggaaaaggaattgccaatccaatagcatctatattaagttttgcaatggcattaagatattcattagatttagatgatgaggctgatattctggaaaaagcagtgcaagaagttttgaatgatggcttacgaactaaagatattttatccgaaggtatgaaagatatatcaacatcagcaatgggtgatgcgataatttcaaaattgcaataat

SEQ ID NO: 208488 - DNA, 694 bp, Unknown
  Bacterial polypeptide expressing nucleotide sequence isolated from the Sargasso Sea
atgattaaattaaaaaaaagaaaaatcctattacttcctggagacggaataggaccagaagtcgtaaaagaggtaaaaaaaattataacttggttaaatggtaaaaaatcacttgattttgaaattgatgaagatcttgctggaggctgctcgtatgatacacatggtactcccataacagatgaggttttttataaagcattagagagcgctgttgtaatattaggagctgttggtggaccaaaatgggataatgttgaattttcaaaaaaacctgaaagagcattgttaaagctcagaaaagaattaaaattatttgcaaatttgagacctgcaatttgcttcaaacaattggttgacgcctcaacattaaagccagagatagtttctggattggatataatgattgtaagagaattgacaggtggaatttattttggtgaacctcgagggattaagccaattgaaaatggtgaaagaaaaggaataaatacacatacttatacaagtagtgaaataataagagtagcaaaaattgcctttgacctagcaaagaaaagatctaataaagttacatcttgtgaaaaatcaaatgtcatggaagcaggacaactttggaaagaagaagttcaggctctacatgaaaaagaatataaagatgtagagttaacccacatgctggctgataattgtg

SEQ ID NO: 208489 - DNA, 427 bp, Unknown
  Bacterial polypeptide expressing nucleotide sequence isolated from the Sargasso Sea
ggatgtagaattcaataagtttcatattgatatactatgcgcacattttgtattaaatcctcaaatgtttaatgtagtcgttggttcaaatttatttggagacattctctctgaccttggtcctgcctgtacaggcacaataggtatcgcaccttcaggcaatattaatcctgaaaataattttccttcattgtttgaacctgttcatggttcagcccctgacatagctggaaaaaatattgcaaatccaattggacaaatctgggctggggcaatgatgttaaatcattttggttataaaaatgcacacgattgcattttagaatccattgagactgttctatcaaaaaaagaacatagaactaatgatctaggtggagatgcaaatacccaagaatgcggtgacgctatcgctaaaaatatataa

SEQ ID NO: 208490 - DNA, 925 bp, Unknown
  Bacterial polypeptide expressing nucleotide sequence isolated from the Sargasso Sea
ctgcccggagatggtattggccctgaaattatcgatcaggcgctcaaagtgacggaagctgtttgcaataagtatggtcacgagctcagctatgagaaagcactgaccggtgctgctgctatcgacgctgtaggaaccccatatccggaagacacacatcaactctgcatggactcagatgctgttctcttcggagcaattggtaatccgaagttcgacaatgaccctaatgccaaggttcgtcccgagcaaggtttgcttgccatgcgtaaaaaattagggctatatgggaacattcgacctttgactaccttcaagtcattgatacacaagtcaccacttaggcaagatcttgtcgatggtgctgactttgtttgtattcgggagcttaccggaggtatttacttcggcagaccccaaggccggactgaagatggcaatactgcctacgatacttgtatttatacgagagaggagatcgaaagaattttaaaggttggatttgagtttgcaggtaaacgaaataaaaagctgacggtggttgataaggctaatgtattggcatctagtcgattatggagggaagttgcccagcagatggcacctcagtatcctgatatcaatgttgagtatatgtttgtggacaatgctgcgatgcaaatcatccaatggccaaagaactttgatgtcatcgtgacagaaaatatgtttggtgacatccttacagatgaagcttccgtgatcagcggttcattgggacttttgccatcagcttccataggtattcatacatccgtatttgagccgattcatggttcatacccacaggctgccggtaaaaacatcgccaacccttgtgccacgatcttgagtgcggctatgatgtttgagtatgcgttcaatctatccgaagcgtctcggtgat

SEQ ID NO: 208491 - DNA, 788 bp, Unknown
  Bacterial polypeptide expressing nucleotide sequence isolated from the Sargasso Sea
aaacttaagaccagctatttgctttaaacaattagtagattcatcaacacttaaaccagaaattgtctctggtttagacataatgatagttagagaattgactggtggtatctattttggtgagccacgaggtattgaacccatagaaaacaatcaaaggaagggtattaatactcatacttatacaacatctgaaattcatagaatagctcgcgtagcttttgatttggcaaaaaaaagaagaaacaaagttacctcctgtgaaaaatcaaatgttatggaagcaggagtcttatggagagaggaagttcaggcaattaaagacaaagaatttaaaaaagtggaattaaatcatatgttagccgacaactgtgcaatgcagcttttaagacatccaaaacaatttgatgtaatattagctgacaatttgtttggagatatgttgtccgatgaagcagcaatgttaactggttctcttggacttttaccatctgcttcattaggttcaaaagacaaaaatgggagaataagatcactttacgaaccagttcatggatcagccccagatattgagggtaaaaatatagctaatcctatagccactatcctgagtttatcaatggctttaagatattctctagatcttggaaaagaggcagatcaaattgaaaaagcagttcaaaccgttcttgacgacggattaagaacaaaagatataatgtctaaaaatatgaaagaggtttctacaactgatatgggtgatgcaattattgcaaaattgaaataaa

SEQ ID NO: 208492 - DNA, 512 bp, Unknown
  Bacterial polypeptide expressing nucleotide sequence isolated from the Sargasso Sea
gagcgtggacaaggccaatgtgctcgaaacgtcgcagttctggcgtgacgtgatgatcgatgtttcgaaggaatacgcggacgtcgagttgtcgcacatgtacgtcgacaatgccgcgatgcaattggtcaaggcgccgaaggcgtttgacgtggtcgtgaccggcaacatgttcggcgacattctctccgacgaagccgccatgctgacgggttcgatcggcatgctgccgtcggcctcgctcgacaagaacaacaagggcttgtacgagccgtcgcacggttcggcaccggatatcgccggcaaaggcgtagccaatccgctggccacgatcctgtcggcggcgatgatgctgcgttattcgctgaacaaggcggagcaggcggatcgcatcgaaaacgcggtaaagaaggtgctggagcaaggtttccgcaccggcgacattctcacgccgggttgcaagcaggtcggcaccgtcgccatgggcgatgcggtggtcgcggcgctgtaag

SEQ ID NO: 208493 - DNA, 664 bp, Unknown
  Bacterial polypeptide expressing nucleotide sequence isolated from the Sargasso Sea
caaggggagttaaaccccatagagaatggagaacgtagaggggttaatactcatgtttatactaccaaagaaattaaaagaatcgcaaaagtagcctttgaattagctggaaaaagaaaaaataaagttacttcttgtgaaaaatctaatgtcatggaggcgggagttttatggagagaagaagtacagtctcttaaagaaaaagaatataaaaaaattgaattaaatcatatgttggcagataattgtgctatgcagttacttagaaacccaaagcaattcgacgtaattcttgccgataatttatttggagacatgttgtctgacgaggcagcaatgttaactggttcactaggattacttccctcagcgtctttaggcgataaggataaaaatggaagaacaagatcattatatgagcctgtacacggatcagcaccagatattgctggtaaaaatatttctaacccgattgcaactatattaagtttttctatggctcttaaatactctcttaatttagaaaaagagtctgaaatgttgaacaaagctgttgaaaaagccttggagaatggtcttagaactccagatataatgtcaaaaggaaagaaaaatgtatcaacctcagatatgggtgatgcaattatatcgaatttaaattaaa

SEQ ID NO: 208494 - DNA, 811 bp, Unknown
  Bacterial polypeptide expressing nucleotide sequence isolated from the Sargasso Sea
cattggtccagaaattagtaatgaggctaataaagttttactttatgtctcacaaaaacatgattttgatgttgaggtaactgatcgtcttattggcggaatcgcaattgatgaagaaggctcaccaatatcagattctacaattgaaatcgctaaagagtcagatgcagtcttccttggaggtgttggaggcccaaaatgggatagtttggaacctgcaaataaaccagaaaaggggttgctaaaaataagatctgaactcgacttatttgcaaatttaagaccatcaatggcttttcctggtcttgaagatacctcttccttaaaaaaggaagtcatagaaggattaaatatactaattgtgagggaattaactggtggtatttattttggcactccaagagaaataaaatctgattcagcttttaatactatgatttattcaacctctgaggttgagcgaattgccgaagtagctttcaaaagcgccatgaaaagaggaaaaaaattatgctcagttgataaggcaaatgttttagaagtttcagaattttggagaggcatcgtgaacaaagtttctaaaaagtatccagaggttaaattggaacacatgttagttgacaatgcagcaatgcagttagttcaaaatccaaaacaattcgatgtaattttatcttccaatctttttggtgacatactttccgatattagttctattttatcaggctctatcggcatgcttccttcagcctctctagatttgaattcaaaaggattatttgaaccagttcatggaacagctccagacatt

SEQ ID NO: 208495 - DNA, 299 bp, Unknown
  Bacterial polypeptide expressing nucleotide sequence isolated from the Sargasso Sea
aatgattaaagtaaaaaaaagaaaaattcttttattacctggcgatggcattggcccagaagttattagtgaagtaaaaaaaattattaattggtttaatgataaaaagtcattagattttgaaatagaccaagatcttgcaggagggtgttcgtacgataagcatggaactccaataactgatgaagttttttataaagctttagaaagtgaagttattatgttgggtgcagtaggaggtcctaaatgggatgatttagatttttctaaaaaacctgaaagagcattattgaagctta

SEQ ID NO: 208496 - DNA, 556 bp, Unknown
  Bacterial polypeptide expressing nucleotide sequence isolated from the Sargasso Sea
aatgattaaagtaaaagataggaaacttttacttctgccaggtgacggtattggtcctgaagtagtaagagaggttaaaaaaatcattgagtggtttaataaaaacaaatctttagattttaaaattgaagaggatcttgttggtggcgcttcttatgataagcacaaaaacccaattacagatgaagttttttataaagcgctcgagagtgaagcagtaattttaggcgctgtaggaggaccaaattatgataatttagaattttctaagaggcctgaaagagctcttttaaaacttagaaaagaattaaagctttttgctaatttgcgacccgcaatatgtttcaaacaattggtagatgcatcctcacttaagccagaaataatatctggtttagatataatgattgtgcgtgagctaacaggcggaatttattttggagaaccaagaggtatagaaccgatcgagaataatgaaagaaaaggaatcaatacccacacttatactactagtgagattcaaagagtagcaagagtagctttgattagcaaaaaa

SEQ ID NO: 208497 - DNA, 574 bp, Unknown
  Bacterial polypeptide expressing nucleotide sequence isolated from the Sargasso Sea
ggcttttaagctcgccatgaagcgtaagaaatcactcaccaacgtccataagagcaacgtgctgaaatccagtgtactctggaacgagatcctcgacgaggtccaccgggattattccgaggtctctgtcgaccacgtcctggtggacgcagctgccacgtacctgtgtctcgatcccgcccgctttgacgtcatggtgatggaaaatatgttcggcgatatcctgagcgatcaatgcggcggcattctcggctcgctggggctcatgccctccgcctgtgtcggtcccgaacagtcctactacgaaccctcgcatggttctgcacccgatattgccggcaaggggattgccaacccctactccatgctgggctccgtcgcgatgatgctggagatgagtttcaatctggacgccgaggcgaccaacctgtggaaggccatgcaaagtgtcttcagtgacggctttaccacaccagatcttgccaggcgaggcgatgcagaaaagcagatcagtaccagcgaattcggcgaccgggtcctggccgcgctcgccgcgatgcccaaggccggttag

SEQ ID NO: 208498 - DNA, 676 bp, Unknown
  Bacterial polypeptide expressing nucleotide sequence isolated from the Sargasso Sea
atttctggagaaccaagaggtattaaacctattgataacggagaaagaaaaggagttaatactcatgtatatacttcaagtgaaattgaaagagtagctcgtgttgcctttgatcttgctagaaaaagaagtaaaaaggttacatcttgcgaaaaatcgaatgtcatggagtctggtcaactttggaaagaagaggttaaagttttgcacgaaaaagaatataaagatatagaattaaatcatatgctagcagataattgtgctatgcaattagttagatatcctaagcaatttgatgtaattgttacagataatttgtttggagatatgctatcagacgaggcagcaatgttaactggttctttaggacttttgccatcagcatcattaggagctaaagataaaaatggaaatatgagatcattatatgaaccagttcatggttctgcacctgatatagctggaaaagggattgcaaatccaattgcatcaattttaagttttgcaatggcgttaaaatattctttagacttagacaaagagtcaaattctttagaaaaggcagttcaaagtgttttagatgaaggattaagaactaaggatatattatcaaaaggtgcaaaagaagtttcaacgtctgaaatgggtgatgcgataatttcaaaattgcaataat

SEQ ID NO: 208499 - DNA, 412 bp, Unknown
  Bacterial polypeptide expressing nucleotide sequence isolated from the Sargasso Sea
tatgcaactattaagaaatcctaagcaattcgacattattctttcagacaatttatttggtgacattctttcagatgaagctgctatgttaacaggctctcttggtcttttaccatcggcttctctaggtgaaaaagataaaaatggtaaaacaagatcactatatgaaccagtacatggttcagcacccgatattgcaggaaaaaatatttctaaccctattgcaactatattgagtttttccatggctttaaaatattctttaggttttgaaaaagagtcaaatttgttgaataaagctgttgaaaaaacgttggacgaaggtcttagaacaacggatataatgtcaaaagggaagaaaaaggtatcaacctcagagatgggtgatgcaattatatcaaatttaaattaa

SEQ ID NO: 208500 - DNA, 469 bp, Unknown
  Bacterial polypeptide expressing nucleotide sequence isolated from the Sargasso Sea
atgattaaagtaaaaaaaagaaaaatacttttacttcctggtgatggtattggtccggaggtaatagctgaggtaaaaaaaatcattaactggtttaatgataaaaaatctttagattttgaaattgatcaggagctagttggtggttgttcttatgataaacacggtaccccgatcactgatgaggttttttacaaagcactagaaagtgaagtaattatgcttggagcagttggtggtcctaaatgggataacctagaattttccaaaaaaccagaaagagcattattaaaactcagaaaagaattaaagctttttgctaacttaaggcctgcaatttgttttaaacaattagtcgatgcttcaaccctaaagccagaggtagtttcaggactagatataatgatagtaagagagttaacgggtggtatatattttggcgaacctagaggaattaagcccaattgaa

SEQ ID NO: 208501 - DNA, 715 bp, Unknown
  Bacterial polypeptide expressing nucleotide sequence isolated from the Sargasso Sea
atgattaaagtaaaaaaaagaaaaatacttttacttcctggtgatggtattggtcctgaggtaatagctgaggtaaaaaaaattattaactggtttaatgataaaaaatctttagattttgaaattgatcaggagctagttggtggttgttcatatgataaacacggtaccccaatcactgatgaggttttttacaaagcactagaaagtgaagtaattatgcttggagcagttggtggtcctacatgggataacctagaattttccaaaaaaccagaaagagcattattaaaacttagaaaagaactaaagctttttgctaacttaaggcctgcaatttgttttaaacaattagtagatgcttcaaccctaaagccagaggtagtttcaggactagatataatgatagtaagagagttaacgggtggaatatattttggtgaacctagaggaattaagccaattgaaaatggagaaagaaaaggaattaatacacatacttatacgactagtgaaattataagagtagctagagttgcttttgatttagcaagaaaaagatcaaacaaagttacatcatgtgaaaagtcaaatgtaatggaagctggacaattgtggaaagaagaagttaaagaacttcatgaaaaagaatacaaagatgtagagttaagccatatgttagcagacaattggtgctatgcagcttttaagaaac

SEQ ID NO: 208502 - DNA, 469 bp, Unknown
  Bacterial polypeptide expressing nucleotide sequence isolated from the Sargasso Sea
ttgaactataagatagccgtgctacccggcgatgggattggaccagaagttaccgatcaagcaataagggttctacaaagcataggcacaagatttggacattcctttgaacttgaaacagctttagtaggtggcattgctattgaccagactggaagcgcgttaccaaaccaaaccctggaaattgcaaaaaaatcagattcaattttgtttggagcagtaggtggaccaaaatgggatgatccggcggctaaaactcgaccagaggcgggattactagcattacgcaaatcattgcaattatttgcgaatctacgacctgttacagctcacccagacctaataggggcatctcccattaggcaaaatctaatctcaggtgtggatctaattgttgtgagagagcttaccggcggtttatattttgcaaacccaaaaaaaaaggtgggtcaacaacccagaggaagaa

SEQ ID NO: 208503 - DNA, 859 bp, Unknown
  Bacterial polypeptide expressing nucleotide sequence isolated from the Sargasso Sea
atccttggagcagtaggaggtcctaaatgggatgatgtagagttttcaaaaaaacctgaaagagctttattaaaattaagaaaagaacttaagctttttgcaaatttaagacccgcaatatgttttaaacaattagtagacgcctcaactcttaaacctgaaattgtttcaggattagatattatgattgttagagaactaacaggtggaatttattttggtgaaccaagaggtattaaacctattgataatggtgaacgaaaaggaatcaatactcatacttatactacaagtgaaattcaaagagttgcaagagttgcttttgatttagccaaaaaaagaaaaaataaagttacatcatgtgaaaaatccaatgtaatggaagccggtttactttggaaagaagaagttcaagaattacatgataaagaatttaaagatgtagaattaaatcatatgctagcagataattgtgcaatgcaactacttagaaatccaaagcaatttgatgtgattgtaacagataatttatttggagatatgttgtccgatcaagcatctatgttaactggttctctaggattgttgccatccgcttccctaggagcaaaaaataaagatggcaaaataagagctatgtatgaacctatacatggttcagcacctgacatagctggacaaggtttagctaatccaattgcaacaatattaagttttgcaatggctttaaggtattcgcttgatttagataaggaaggagatgctttagaaaaagctgttcaaaacgttttagatgaaggacttagaactaaagatattttatccaaaggcatgaaacaagtatcaacatctgaaatgg

SEQ ID NO: 208504 - DNA, 485 bp, Unknown
  Bacterial polypeptide expressing nucleotide sequence isolated from the Sargasso Sea
aatgacttcgaacaaaaaaattattatattagcaggtgatggcgttggtccggaagttattgatgaaacaaaaaaaatattagattggtttgcaaaatttcaaggacttaattttaatattcaagagagtttggtcggtggtgctgcatacgaaaaatatggagttccattaactgaagagactttatcagacgcagtggaagctgatgctattttattcggctctgtaggtggaccgcaatatgatgatgttgattttgaaaaaaaaccggaaagaggtctattaaaacttagaaaagaaatggatttgtttgcaaatcttcgacctgcaatggtttttccagcattagcaaattcttcaacattaaaagaggaaattatttctgggttagatattttgattttaagggagcttactggaggaatatattttgctgaacctcgaggtatagaaaatgtaggtaaaggagaaaaaaaaggttttg

SEQ ID NO: 208505 - DNA, 740 bp, Unknown
  Bacterial polypeptide expressing nucleotide sequence isolated from the Sargasso Sea
aatgattaaagttaaaaaaagaaaatttttattattacctggtgatggaattggaccagaggttgttggagaggttaaaaaaattattaaatggtttaataaaaataaatcattagattttgaaatagatgaagatttagctggaggagcttcgtatgataagcatggaacccccataactgatgaagttttttataaggctttggaatgtgaagctgtaattttaggagctgtaggaggtcctaagtgggatgacgtagaattttcaaaaaaacctgagagagcattattaaagttaagaaaggaactaaaactatttgctaatttaagaccggcaatatgttttaaacaattagtagatgcttcaactcttaaacctgaaattgtttcaggactagatattatgattgttagagaacttactggaggaatttattttggtgagccaagaggaattaagccaattgataatggtgaaagaaaagggattaatacgcatacttatacttcaagtgaaataaaaagagtagcaagagttgctttcgatttagcaaaaaaaagaaaaaataaagttacatcatgtgaaaaatctaatgtaatggaggcaggtttactttggaaagaagaagtgcaagaacttcatgaaaatgaatttaaagatgttgaattgaatcatatgctagcagataactgttctatgcaactgcttagaaacccaaaacagtttgatgttatagtta

SEQ ID NO: 208506 - DNA, 742 bp, Unknown
  Bacterial polypeptide expressing nucleotide sequence isolated from the Sargasso Sea
aagaaaatctctactagatgcaagtacattaaaaaaagaaatcgttgagcatgtagatcttattgttgtaagagaattaatagggggaatttattttggaaaaccaagaggacatataacaaatacaaaaatcccaaaagctttcaatacgatggtttatgattcggccgagatagagagaataacagaaatagcaataaaaattgctaaacaaagaaataaaaaaatatgttctgttgataaatcaaacgttcttgaggttagtcaattgtggagagatacagttttaaatatcacctcaaaagataaaaatatatctctaagcaatatgtacgttgataatgcagcaatgcaattagttaaagatcctggtcaatttgatgtaattttaacaagtaatttatttggagatattttaagcgacttagccgcaatgttaactggttctattggtatgcttccttctgcttctctaaacaataatggtccaggagtttttgaaccggttcatggttcggctcctgatatagctggtaaaaatatagctaatcctattgcaatgcttttatctgcttccatgatgttaaaaattggattaaatgaagaagaagctgcagaaaatttagaaactgccattgataaagttttatcaaaaggatttagaacagccgatttagctgatgggtcttccgaagtattatcttgcagtgaaatcggagaaaaaataatggatgaaatttaa

SEQ ID NO: 208507 - DNA, 901 bp, Unknown
  Bacterial polypeptide expressing nucleotide sequence isolated from the Sargasso Sea
ctttggatttcaaatagaccaagaccttataggcggtgctgcgattgataaacatggaacaccaataactgatgaggtattttacaaggctttagaaagtgatgcggtaattgtaggagcatgtggcggacctcagtacgataaattggagttctcaaaaaaacctgagagagctcttttaaaattaagaaaagaattgaaattatttgctaatttgagaccagctatttgctttaaacagcttgtagactcatcaaccttgaaacctgaaatagtttcaggtcttgatattctaattgtaagagagttaacgggtggtatttattttggtgagccaaggggagtaaaaccaatagaaaatggtgagcgaagaggagtaaatacccatgtctatacaacaaaggaaataaaaagaattgccaaagtagcttttgaattagccgccaaaagaaataacaaagttacatcttgtgaaaaatctaatgttatggaggcaggagttttatggcgagaagaggttcaatcgctcaaagataaagagtacaaaaaaatagaactaaaccatatgttagctgataattgtgcaatgcaattactaagaaatccaaaacaatttgatgttattttggcagataatttatttggagacatgttatctgatgaagccgcaatgctcacagggtctctaggtttgttaccatctgcatcattaggtgataaagataaaaacggaagaaccagatctttgtacgaaccagtgcatggttcagctcctgatattgctggcaaaaatatatctaatccaattgcaacaatattaagtttttcaatggcattaaaatattccttaggcttactcaaagagtctgcaatgttagataaggctgttgaaaaaccctag

SEQ ID NO: 208508 - DNA, 841 bp, Unknown
  Bacterial polypeptide expressing nucleotide sequence isolated from the Sargasso Sea
cgccgtgggcgactggaagtacgactcgctcgagcgcgcgctgcgccccgagcaggcgatcctcgggctgcgcaagcacctcgagctgttcgcgaacttccgcccggcaatctgctatccgcagctcgtcgatgcgtcgccgctgaagcccgagctggtcgcgggcctcgacatcctgatcgtgcgcgaactgaacggcgacatctacttcggccagccgcgcggcgtgcgcgctgcaccggacggcctgtttgccggcgagcgcgaaggcttcgacacgatgcgctattcggaaccggaagtgcgccgcatcgcgcacgtcgcgttccaggcggcccgcaagcgcgcgaagaagctgctgtcggtcgacaaggcgaacgtgctcgagacgtcgcagttctggcgcgacatcatgatcgacgtgtcgaaggaatacgcggacgtcgagctgtcgcacatgtacgtcgacaacgcggcgatgcagctcgcgaaggcgccgaagcagttcgacgtgatcgtcacgggcaacatgttcggcgacatcctgtcggatgaagcgtcgatgctgacgggctcgatcggcatgctgccgtcggcgtcgctcgacaagaacaacaagggcctgtacgaaccgtcgcacggttcggcgccggacatcgcgggcaagggcatcgcgaacccgctggcgacgatcctgtcggccgcgatgatgctgcgctactcgctgaatcgcgcggagcaggccgatcgcatcgagcgcgcggtgaaaacggtgctcgaacagggctaccgcacgggcgacatcgcgacgccgggctgccggcaggtgggcacgacggcg

SEQ ID NO: 208509 - DNA, 751 bp, Unknown
  Bacterial polypeptide expressing nucleotide sequence isolated from the Sargasso Sea
aatgagtaataaaaaaattcttattttacctggtgacggtattggtaatgaggttatggctgaagttctcaaaattattgattggatggaaaaaacaaaatcaatgtcttttgatatttcagagagattagttggtggagctgcatacgataaagaaggaaactctattagtgatgaaacaatgcaaattgctttggactcagatgctgttttattcggtgcagttggagggcctaaatgggataatgttgaaagagagaaaagaccagaagctgcgctattaagattaaggaaagatctagatctttttgcaaatttaagacctgctgttgtattagatgctttagcagaatcttcttctttaaaatccgatttagtacatggattagatatattaattgtccgagaattaacaagtggagtgtattttggtcagccaagaggtatttctaaaattagtgatacagaaagtaaagctattgatactcaagcttataccacatctgaaattgagagagtttcaagagttgcttttgatttagcaaaattgagaagaaataaagtttcatcagctgaaaaatctaatgtaatggaaactggattattttggagaaatattgttactgatttacataaaaaagaatatgattcggtgaatctcgaacatatcttagctgataactgtgcaatgcaacttgttcgatatcctaaacaatttgatgttattctaacagacaatcttttttggtga

SEQ ID NO: 208510 - DNA, 418 bp, Unknown
  Bacterial polypeptide expressing nucleotide sequence isolated from the Sargasso Sea
tgttagaaacccaaaacaatttgatgtaattttaactgataatctttttggagatttgttaagtgatgtttctgctatgctaacaggttcactaggaatgttgccctcagcatctttaggctctatatctaaaaccggaacccgagcagctatgtatgaacccgttcatggaagtgctcctgatattgctggaaaaggtctagcaaatccacttgctatgattatgagttttgcaatgatgttaaaatatagttttaacatgattgaagatagtgacttgatagaaaaagctgtgcaaaatgttttgtctggtggattccgcacagcggatataaaacaagatggtaaaacaattctttctacttcacaaatgggacaaaaagttattgaagaattatccaaacttgatggcaaataa

SEQ ID NO: 208511 - DNA, 700 bp, Unknown
  Bacterial polypeptide expressing nucleotide sequence isolated from the Sargasso Sea
catgaagcaaaatatactttctctggccggagatgggattggtcaggaggtcgtgcccgtttctatagaggttctgaaagcggttactagcctggccgggagagacattgaaattgtgcatggtcttgtaggcggtgatgctatagacaaggttggctcgccgcttccggacgaaactctgtccttagctcgagaatcggacgctattctactaggtggtgtgggtggtccaaaatgggatcacttacccacgcaagaacggccagagcgaggacttttggggcttagacaatctctggggctatacgccaatcttcgaccagctctggtctctcctgctttggtggactcgtcctccttgaaacatgaaatcgttaataatctcgatattctcataatcagagagttgaccggcggtatttattttggccagcccaggggaactgatgttcgaaataatgaaagggttgggtttaatactttgatttattcagaaagtgagatcgaacgaatagctcgaactgcgttcgagcttgccgaaaaaagaaacggtaaactttgttccgtagataaggcgaatgtgctcgaagtctcccagttatggagagaggtcgtggaagccctatcttcccaatatcctgcggtacaactcagtcatatgtatgttgataatgctgctatgcaattagttcgtaaccca

SEQ ID NO: 208512 - DNA, 613 bp, Unknown
  Bacterial polypeptide expressing nucleotide sequence isolated from the Sargasso Sea
atgaaagaggttcgtaaagttattgcttggtatggtcaaaatatagggcttgtatttgatgtgtctgaagatttggtagggggcattgcctatgatactcatgggacgcctctacatgataccactttagaaaaagctcaagaagttgacgctgttttactaggtgcagtgggcggacctgcctatgataatttagattttggtttaaaacctgaaagaggtttactgcggcttcgcaaagaaatggatttatttgctaacttgcgaccagcccagtgttttaacgcacttgcagagttttcttcattgaaaaaggaagtcgtatctggacttgatatcatgattgtccgtgaactgacgtccggtatttattttggtgaaccacggggcatcatagaacaaggcaatgaacgcgttggaataaacacccagcgatacacagaacgtgagattgaccgtgttgcgcgatctgcctttgagcttgcaagacggcgtggtaataaagtttgttcaatggaaaaagcaaacgtgatggagtcaggagttttatggcgagaagtggttcaaaaagtgcatgatgaagattatcaggatgtggaactctctcatatgt

SEQ ID NO: 208513 - DNA, 737 bp, Unknown
  Bacterial polypeptide expressing nucleotide sequence isolated from the Sargasso Sea
atcctaggcgcttgcggaggtcctaagtgggataatttagaattttcaaaaagaccagaaagagctcttttaaaattaagaaaagaattaaaattatttgcaaatttaagacctgcaatttgttttaagcaattagttgactcatcatctttaaaacctgaaatagtatctggtttagacatcatgattgtaagagagttaactggaggaatttattttggtgaaccaagaggaattgagccaatagaaaacaatgagcgaagaggcataaatactcactcctatactactggtgaaatacaaagaatagctagagtagcttttgatttggctaaaaaaagaaaaaataaagtaacatcttgcgaaaaatccaatgtgatggaagcaggagttttatggagagaagaagtacaggcgctaaaagataaagaatacaaaaaagtagaacttaatcatatgttagcagataattgtgccatgcaacttttaagaaacccgaaacagtttgacataatactagctgataatttgtttggagatatgctttccgatgaagctgcgatgttgactggttccttaggcttattgccttctgcatcgctaggcttaagagataaaaaaggaaaaattagatctctttacgagcctgtccacggttcggctccagatattgctggaaaaaacgttgcgaatcctatcgcgacgatattaagtttatctatggccctaaggtattc

SEQ ID NO: 208514 - DNA, 880 bp, Unknown
  Bacterial polypeptide expressing nucleotide sequence isolated from the Sargasso Sea
ctgttcggcgccgtgggcgactggaagtacgactcgctcgagcgcgcgctgcgccccgagcaggcgatcctcgggctgcgcaagcacctcgagctgttcgcgaacttccgcccggcaatctgctatccgcagctcgtcgatgcgtcgccgctgaagcccgagctggtcgcgggcctcgacatcctgatcgtgcgcgaactgaacggcgacatctacttcggccagccgcgcggcgtgcgcgctgcaccggacggcctgtttgccggcgagcgcgaaggcttcgacacgatgcgctattcggaaccggaagtgcgccgcatcgcgcacgtcgcgttccaggcggcccgcaagcgcgcgaagaagctgctgtcggtcgacaaggcgaacgtgctcgagacgtcgcagttctggcgcgacatcatgatcgacgtgtcgaaggaatacgcggacgtcgagctgtcgcacatgtacgtcgacaacgcggcgatgcagctcgcgaaggcgccgaagcagttcgacgtgatcgtcacgggcaacatgttcggcgacatcctgtcggatgaagcgtcgatgctgacgggctcgatcggcatgctgccgtcggcgtcgctcgacaagaacaacaagggcctgtacgaaccgtcgcacggttcggcgccggacatcgcgggcaagggcatcgcgaacccgctggcgacgatcctgtcggccgcgatgatgctgcgctactcgctgaatcgcgcggagcaggccgatcgcatcgagcgcgcggtgaaaacggtgctcgaacagggctaccgcacgggcgacatcgcgacgccgggctgccggcaggtgggcacgacggcgatgggcgacgcggtggtcgcggcgctgtaac

SEQ ID NO: 208515 - DNA, 436 bp, Unknown
  Bacterial polypeptide expressing nucleotide sequence isolated from the Sargasso Sea
aacactgaagggctgtgaggcggccgatgccattctgttcggctctgtcggtggccctaaatgggagaaactgccgcccaatgaacagcccgagcgtggtgctctgttgccgctacggggtcacttcaaactgttttgtaacctacgccccgctaaattgcatgatggtttagaacatatgtcaccgctgcgcagtgatatttctgcaagaggtttcgatgttctctgcgtgcgtgagttaacgggtgggatctacttcggcaagcctaaggggcgccaaggtgaaggtgagagcgaagaagccttcgataccatgcgttacacccgccgtgaaattagccgtattgcgcgcattgcctttgaagccgctcgcggacgccgtaaaaaagtcacttcggtcgataaggcaaacgtattggcttatcgaccgaagtga

SEQ ID NO: 208516 - DNA, 879 bp, Unknown
  Bacterial polypeptide expressing nucleotide sequence isolated from the Sargasso Sea
aatgataaaaattaaaaaaagaaaaatattgttattaccaggagatggaataggtcctgaggttataaatgaggtaaaaaaaataattgattggcttaataaaaataaatctttagatcttgagactgaacaaggtttagtaggaggtgcatcttatgataaacatggtactccaattacagatgaggttttttataaagctttagaaagtgaagttgtcctattaggtgcagttggtggaccaaaatggaataatatagatttcacaaaaaagccggaaagagctttactgaaacttagaaaggaactaaagttatttgcaaatttaagacctgcaatttgttttagtcagcttgttgatgcatcatcattaaaacctgaaatcgtttcaggtttagatataatgattgttagagagctcacaggcggaatttattttggtgagccaagaggcataaagcatatagataatggacaaagaaaaggtattaacacccacacttatactagcaacgaaatacaaagagtagctagagttgcctttgatcttgcaaaaaaaagaaataataaagtaacatcttgcgaaaaatcaaatgttatggaagctggtcaactttggaaagaggaagttgaaagcttgcacaaagctgagtataacgatgtaagtttagaacacatgttggctgacaattgtgcaatgcaattattacgaaatccaaaacagtttgatgtaattgtaactgataatttatttggggatattttatcagatgaggcttcgatgcttacaggttctttaagtcttttgccatcagcgtctttaggcgccaaggataaaaatggaaatatgaagagcatgtatgaacctgttcacgggtc

SEQ ID NO: 208517 - DNA, 619 bp, Unknown
  Bacterial polypeptide expressing nucleotide sequence isolated from the Sargasso Sea
atgattaaaattaaaaaaagaaaaattttattattaccaggagatggtatcggaccagaggtaattgctgaagtcaaaaaaataattgaatggtttaactcaaataaatccttggattttgaaattgaccaagatttggttggtggtgctgcttatgacaaacatggaaccccaataactgatgaagcattttataaggcacaagaaagtgctgcagtaatactaggtgctgttggtggaccaaaatgggataatattgatttttcaaaaaaaccagagagagctctattaaaattaagaaaagaattaaaattatttgcaaatttgagacctgcaatttgttttaaacaactcgttgatgcctcaagtttaaagcctgaatttgtttctaatttagatattctttttgttagggaattaacgggtgggatttactttggtgaacctagagggataaaaccaattgataatggtgaaagaaaaggaattaatactcatgtctatactactagtgaaatcgagagagtagcccgtgttgcatttgatctagccagaaaaaggagtaataaagttacttcctgtgaaaagtcgaatgtcatggaggcaggtcaattatgaa

SEQ ID NO: 208518 - DNA, 667 bp, Unknown
  Bacterial polypeptide expressing nucleotide sequence isolated from the Sargasso Sea
caaaaaattaataataattgaagaaaaagcaattgatactcaaagttatactacttctgaaataattagaataggaaaagtggcttttgatttgtcaaaaaaaagattgagtaaagttacttcagttgagaaatctaatgttatggaaacaggaatgttttggaaaaaaacaatttctaatttacatcaaaatgaatttaaagatgttgaacttaatcatatgttagcagataactgcgctatgcaacttgtccgtaacccaaagcaatttgatgttattttaactgacaatttatttggagatttattaagtgatattgctgctatgctaacaggatctttaggaatgctgccatctgcatcactcggtccagttaatgaatctggaatgagaaatgctatgtacgaaccagttcatggtagcgccccagacattgcaggtcaaggtaaagcaaatccattagcaatgatgatgagttttgcaatgatgttaaaatatagcttaggtatgatagatgatagtaaattaattgaagaagctattcaaaatgtacttttaaagggtttgcgcactcccgatattaaacaaaaaaatgaaacagctatttcaactcaagaaatgggcaaggctgttattaatgaattaaatattttatctggaaaataa

SEQ ID NO: 208519 - DNA, 397 bp, Unknown
  Bacterial polypeptide expressing nucleotide sequence isolated from the Sargasso Sea
atggctgcgaatagaaagatattagttctaccgggagatggtatcggacctgaagttatggcgcaggtccagcgagtaattgattggtttgacaacaagggcagtgttagatttgaagttactgaagatctagtaggtggggcgtgttacgatagccatggtgtatctattcgcgaagaaacaatggaagtagctgtttcaactgatgcagtgctttttggagctgttgggggccccagatgggacgatgtgcccagagagcaccgtcccgaagcgggcttgctccgactaaggaaggatcttgatctatttgcaaatttaagaccagcaatagtactggatgctatggttgaggcttctacccttaaatctgaagttgttaagggattagatataa

SEQ ID NO: 208520 - DNA, 628 bp, Unknown
  Bacterial polypeptide expressing nucleotide sequence isolated from the Sargasso Sea
ctacaggggatataatacgcttgaatacacaagtaacgaaattaggagaatagcagaagtagcttttgaaaccgctatgtctagatcaaaaaaattgtgctccgttgataaagcaaatgttctagagtcaactgaattatggaggaaagtaatgatagaaacttcaaaaaaatatccagatgttgaactctcgcacatgtacgtagataatgcctcaatgcagttagtaagaaacccgaagcaatttgatgtaattgttacaactaacatgtttggtgatatactctcagattgtgcatcaatgctgacgggatcccttggtatgttgccatcagcttcgattgggattaatgcaaatggccaaaaaaaagcaatgtatgaaccagttcacggctcagcacccgatatctcaggtcaaggagtatctaatcctttagcaatgattttaagtgtcggaatgatgtttgaatactcattagataaaaaaattattgcagaaaagattaatgatgcagttagatcagttttgaaaaaaggattcagaacaaaagatatattcagtgaaaataaggttcttttatcaactagcgaaatgggcgacaaagtcttggaggaaatgaaagaatga

SEQ ID NO: 208521 - DNA, 580 bp, Unknown
  Bacterial polypeptide expressing nucleotide sequence isolated from the Sargasso Sea
gatatgccaagagccagaaataggaaagttacttctgtagaaaaagctaatgtaatgatgtcaggtgttttgtggagagaggtgataactaatcttcataaaaaagaaggctcagatatattaattaaccatatgtatgctgataattgcgcaatgcaattagttagagatcctaagcaatttgatgttattgttacagacaatttatttggagatattttatctgactgcgcagctatgttaactggttcactcggaatgcttccttctgccagtttaggatctgtagaccaaaatactggaaagagacatgctatgtatgagccagttcatggatcagctccagatatagctggaaaagagttagctaatccattagcagaacttttaagtttatcaatgttatttcgttattcatttgaaatgaaagaagaggcagatttaattgatgaggctgtttcaagagctttagatgctggaccaagaacgcaagatataatggcttcaggaagagtcaaagttggaacgaaaggaatgatggactcagttatcaacaagttagaggaattaacaaaataaa

SEQ ID NO: 208522 - DNA, 728 bp, Unknown
  Bacterial polypeptide expressing nucleotide sequence isolated from the Sargasso Sea
cgttggagatattaaatatgattctcttgcaagagaattaaggccagaaagtgggttactaaagttaagatctgcgctaaaccttttcgcaaatatcaggcctgtcaaaataagaaaatctctattagattcaagtacattaaaaaaagaaatcgttgagcatgtagatcttattgttgtaagagaattaatagggggaatttattttggaaaaccaagaggaaatataacaaatacaaaaatcccaaaagctttcaatacaatggtttatgattcgaccgaaatagagagaattactgaaatagcaataaaaattgctaaccaaagaaataaaaaaatatgttctgttgataaatcaaacgttcttgaggttagtcaattgtggagagatacagttttaaatatcacctcaaaagataaaaatatatctctaagcaatatgtacgttgataatgcagcaatgcaattagttagagatcctggtcaatttgatgtgattttaactagtaatttatttggagatattttaagcgatttagccgcaatgttaactggttctattggtatgcttccatctgcttctctaaacaataatggcccaggcgtttttgaacctgttcatggttcggctcctgatatagctggtaaaaacatagctaatcctattgcaatgcttttatctgcttccatgatgttaaaaattggattaaatgaagaagaagctgcag

SEQ ID NO: 208523 - DNA, 820 bp, Unknown
  Bacterial polypeptide expressing nucleotide sequence isolated from the Sargasso Sea
gtagctatggattgtgatgcagttttatttggtgcggtaggaggcgctaaatgggataacgtagaaagagataaaagacctgaagcagccttattaagattaagaaaagacctagatctctttgctaatctaagaccagcggttgttttagatgctctttcagattcatcatctttaaaatctgatcttgttaaaggattagatattttgataataagagagttaacaagtggtgtatattttggacaaccaagaggtatatcaaaaattagtgagaatgaaagtaaggcagttgatactcaactgtataccacatcagaaattaacagagtttcacgagtggcatttgatttagcaaagttgcgtaataataaagttacatcagtagaaaaatcaaatgtaatggaaacaggtttattttggaaacaaaccgtaacagatttacataaaaaggaatattctgatgttaacctagaacacatgcttgcagataattgtgcaatgcagttagttcgttatccaaaacaatttgatgtcatacttacagataatttatttggtgatcttttaagtgatactgcagctatgctaacaggatctttaggaatgcttccttcagcagctcttggaccagttaaagaaaatggaactagagcagcaatgtatgagcccgttcatggtagtgcaccagatatagctggtcaatctaaagcaaatcctctagcgatgattatgagctttgctatgatgttgaaatatagttttgatatgcaagaagatagtcaaatggttgagaaagctgtacagaatgtatactaaa

SEQ ID NO: 208524 - DNA, 754 bp, Unknown
  Bacterial polypeptide expressing nucleotide sequence isolated from the Sargasso Sea
atgacaaaatcaaaaagtagaaaactattattacttccaggtgatggcattggacctgaggtcgtaaatgaggtgaaaaaaattattgaatggttaaataaaaataaatcgttagattttataatagaagaggagttaattggtggtgcatctatagataagcataaaataccaattactgatgaggttttttataaatctttagaatgcgatgcagttattcttggagcttgcggtggtccaaaatgggataatttagaattctcaaaaaaacctgaaagagctttactcaaacttagaaaggaattaaaactgtttgcaaatttaaggcccgcaatttgttttgaacaattagtagactcttcaactttaaaaccagaaatagtttcaggtttagatataatgatagtaagagagttaacaggtggaatatattttggtgaaccgagaggaattgagccaattaaaaacaatgaaagaaaaggaattaatactcactcttatacaacaacagaaataaaaagaattgctaaagtggcttttgatttagctaaaaaaagaaaaaataaagttacttcatgtgaaaaatcaaacgttatggaagcaggtgttttatggcgtgaagaagtgcaaaagttaaaagaacaggaatataacgatgtagaattggaacatatgctagctgataattgcgcaatgcaacttttaagaaatccaaaacaatttgatgtcattttagctgataatttattgg

SEQ ID NO: 208525 - DNA, 835 bp, Unknown
  Bacterial polypeptide expressing nucleotide sequence isolated from the Sargasso Sea
acctgaaagagcattattaaaattgagaaaagagttaaaattatttgcaaacttaagaccagctatatgtttcaagcaattagttgatgcatcaaccttaaaaccagaaattgtttctggacttgatataatgattgtaagagaacttacgggaggtatctattttggggaaccaagaggtattaaacctatagataatggagagagaaaaggaataaatactcatacatatacaagtaatgaaattataagagttgcaagagtggctttcgacttagcaaagaaaagatcaaataaagtaacttcatgtgaaaaatcaaatgtaatggaagctggtcaactatggagagaagaagttcaatctcttcacgaaaaagattataaagatgttgagttaaatcatatgttggcagataattgtgctatgcaattgttaagaaatccaaaacaatttgatgttatagttacagataatttatttggagatattttatcagatcaagcttcaatgcttacaggatctttaggtttactaccttcagcttctttaggagctaaaaatgcagatggcaaaatgagagcaatgtatgaaccaatccatggttccgcaccagatatagctggcaaaggaattgcgaatcctattgcttctattttgagttttggtatggcattaaaacattcattaaatttagataatgaagcagctgctttggaaaatgctgttcaagaagtactaaatgatggtctaagaactaaagatatagtatcaaaaggcaccaaagaagtatcaacaactaaaatgggagatgcgattatttcaaaattgaaataa

SEQ ID NO: 208526 - DNA, 847 bp, Unknown
  Bacterial polypeptide expressing nucleotide sequence isolated from the Sargasso Sea
gatgccttggggtgcaaaatttgactggcatcgatttgctgctggtatgtcagccttcgagataaacggtgatcctttgccaaaggatatgcttgaaaatattaaaaaaacaaaactagctttaaaagcacctctagaaactccaattggtgagggcttcagatcagcaaatgttcgattaagagaaaaatttaaactatacgcaaacgttcgtcctgcaatatcatttatacatgacaaaagaattacggataaaatagatttagttctaataagagaaaataccgaaggattatatgttggcgttgaacactttatccctattggagatgacccaaaagccgttgcagaggcctcaggaattattactcgaaatggttgccgtcgcatagcgaaattcacatttgattatgcaatcaaaacaggtagaaagaaaattactattgtccataaagctaatattttaaaagctctaactgggttattccttgagacagcaatggaagttggtaaggagtatgggaaggaattagagattgaagaacgaattgtagataatactgctatgcagttagtcataaatcccactcaatttaacattatactaactacaaatatgtttggagatatcttgtcagacgaaatagctggattaataggtggtttaggacttgctcctggcggtaatattggagaagacgttgcaattttcgaagcagttcatggaacagcgccggatattgccggtaaaggaatagcaaacccaacagcattatttctcgcttccgcaatgatgttggaacatattaatgaaaaaaatatggctgataatctacgaaatgcaatt

SEQ ID NO: 208527 - DNA, 625 bp, Unknown
  Bacterial polypeptide expressing nucleotide sequence isolated from the Sargasso Sea
aatgattaaagtaaaaaaaagaaaaatattacttttacctggagatggaattggaccagaagtaattagagaagtaaaaaaaattattcaatggtttaataacaaaaagtcacttgattttgaaatagatgaagatttagtaggaggagcagcttatgacaaacatgacatcccgattactgatgaggttttttataaagcattagagagtgaagcggtaattttaggagccgttggtggacctaagtgggataatcttgatttttcaaaaaaacctgaaagagcactactaaaattaagaaaggaattaaagttatttgcaaatttgagaccagcaatatgctttaagcagcttgtagattcctcaagtttaaaacccgaaattgtttctggattagacattatgattgtaagagaacttacagggggaatttatttcggtgaacctagaggaatcaagcctatagataatggagaaagaaaaggcattaatacacatacatatacaagtaatgaaattattagagttgcgaaagttgcttttgacttagcgaaaaaaagaaataataaagttacgtcctgtgagaaatctaatgttaggaagcaggacaacttggaaggaaga

SEQ ID NO: 208528 - DNA, 589 bp, Unknown
  Bacterial polypeptide expressing nucleotide sequence isolated from the Sargasso Sea
attgactaaagtaggaatagagagagttttggactttgcatttaaactcgcacaaaaaagaaaatcaaaacatttaacgtctgcaacgaaatctaatggtatctcaataacaatgccttattgggatgaactttttgaaaaaatgtcacaatcctacccagacataaaaactgatcagtaccatattgatattctttgtgctcattttgttttaaatccagataagtttgatgttattgtagcttctaatttgtttggtgatattttatcagatttgggtccagcatgcactggcacaattggaatagctccatcaggtaatatcaatccagagaataatcatccgtctttatttgaaccagttcacggctccgcgccagatattgcaggaaaaggaattgccaacccaataggacaaatttgggcaggagctatgatgttaaatcattttgggtttgacgatgcctcaaatgaaattttaaatgctatcaagcattctctatctgagccaaaactcagaacaaaagaccttgctggaagtgctgacactcaaacagtaggaaaagctattgaacaaataattcaatag

SEQ ID NO: 208529 - DNA, 662 bp, Unknown
  Bacterial polypeptide expressing nucleotide sequence isolated from the Sargasso Sea
aagaggcattaagcctatagacaatggtgaaagaaaaggaattaatactcatacttatactagtagtgaaattgtaagagtagcgagagttgcttttgatttagctaaaaaaagatcgaataaagttacttcttgtgaaaaatcaaatgtaatggaggcaggacaactatggaaagaagaggttcaaactttacatgatgaagagtttaaagaagttgaattaaatcacatgcttgctgataattgtgctatgcaattactaagaaatcctaagcagtttgatgttattgtaactgataacttgtttggagacatgttgtcagatcaagcatctatgttgactggttcattaggccttctgccctcagcgtcattaggtgcaaaaaataaggatggtgaaatgcgagctatgtatgaaccaatacatggttcagctccagacatagctggtaagggaattgcaaatccaatagcaacaattttaagttttgctatggcattaagatattcactagacttagataaagaagctgacaatttagaaaaagctgtacaagatgtcctaaatgatggtttaagaacaaaagatattatatcagacggcaaaaaagaagtatctaccactcaaatgggcgatgcgataatttcaaaattgcaataat

SEQ ID NO: 208530 - DNA, 328 bp, Unknown
  Bacterial polypeptide expressing nucleotide sequence isolated from the Sargasso Sea
atgattaaagtaaaaaaaagaaaaatattacttttacctggagatggaattgggcctgaggttattaaggaagtaagaaaaattattcaatggtttaataaaaataaatctttagattttgaaattgatgaagatttagctggcggagctgcttacgataaacatggcactcctattacagatgaagttttttataaagcattagaaagtgaagtagttatgcttggagcggtgggtggacctaaatgggataaccttgagttttcaaaaaaaccagaaagagcactattaaaaataagaaaagaactaaaactattgcaaatctaag

SEQ ID NO: 208531 - DNA, 298 bp, Unknown
  Bacterial polypeptide expressing nucleotide sequence isolated from the Sargasso Sea
aatgattaaagtaaaaaaaagaaaaattttacttttacctggggatggaattggacctgaggtaataaacgaggttaaaaaagttatcaaatggcttaactcaaaaaagtctctagattttgaaattgatgaagatttagcaggaggagcttcttatgacaaacatggaactccaataacggatgaagtgttttacaaagctcttgagagtgaagttgtcatgttaggagcagtaggtggacctaaatgggataatctggaattttcaaaaaaacctgagagagcattattaaattaa

SEQ ID NO: 208532 - DNA, 774 bp, Unknown
  Bacterial polypeptide expressing nucleotide sequence isolated from the Sargasso Sea
aatgattaaagtaaaaaagagaaaaattttattattacctggagatggtattggaccagaggttattgatgaagttaaaaaaattattaattggtttaataaaaaaaaatctatggattttcaaatagaagaaggtcttgtaggaggagcttcgtacgagaaaaataaaaatccaattacagatgaggtgttttataaagcattagaatctgaagcagtaattttaggagccgttggaggaccaaaatgggataatttagagttttcaaaaagaccagagagagcacttttaaagttaagaaaagagctaaagttatttgctaatctaagacccgcaatttgttttaaacaattagtcaatgcttccagtttaaaacctgaaattgtttctggtttagatattatgattgtaagagaacttactggcggaatatattttggggagccaagaggaataaagcccattgagaatggtgaacgaaaaggtatcaatacacatatttatactagtagtgaaattattagagttgctaaggtagcttttgaacttgcccaaaaaagaaataaaaaagtaacttcttgtgaaaagtcaaatgtaatggaagcaggcattctttggagagaggaagttcaaaagttaaaagatgaagaatatccaaatatagaattgacacatatgttagcagataattgtgctatgcaattattaagggatccgaaacagtttgatgtaattgtaacggataatttatttggagatatattatctgatga

SEQ ID NO: 208533 - DNA, 784 bp, Unknown
  Bacterial polypeptide expressing nucleotide sequence isolated from the Sargasso Sea
aatgattaaagttaagaaaagaaaaattttactattaccaggcgatggaattggtccagaagttgtgtcagaggtaaaaaagataattaattggcttaatagtaaaagatctcttgattttgaaatagatgaagatttagttggaggagcggcttatgataagcacgggaccccaataactgatgaggtattttataaagctcttgaaagtgaggcagtaattttaggtgcggtgggtgggcctaaatgggataatttagatttttcaaaaaaacctgagagggctttattaaaattaagaaaagaattaaaattatttgctaatcttagaccagcaatttgttttaagcagcttgttgatgcatcaagtcttaaaccagaaattgtttccggacttgatatcatgatagtaagagagctaacaggtggtatatattttggagagccaagaggaattaaacctattgataacggcgagagaaaaggtattaacactcacacttatacctcaagcgaaattgcaagagtagcaagagttgcttttgatttagcaaaaaaaagaaataataaagttacctcatgtgaaaaatcaaatgttatggaggcaggacaattatggaaagaagaagtaacagaaactcacaaaaatgaatttaaagaagttaaattagaacatatgttggcagataattgtgctatgcaattattaagaaatccaaagcaatttgatgtgattgtaacagacaatttgtttggagatatactttctgatgaagcggcgatg

SEQ ID NO: 208534 - DNA, 892 bp, Unknown
  Bacterial polypeptide expressing nucleotide sequence isolated from the Sargasso Sea
aatgattaaaattaaaaaaagaaaaattttattattaccaggagatggtattggacccgaggtaattgctgaagtcaaaaaaataattgaatggttaaactcaaataaatccttggattttgaaattgaccaagatttggttggtggtgctgcttatgacaaacatggaactccaataactgatgaagcattttataaagcacaagaaagcgctgcagtaatattgggtgctgttggtggaccaaaatgggataatattgatttttcaaaaaaaccagagagagctctattaaaattaagaaaagaattaaaattatttgcaaatttgagacctgcaatttgttttaaacaactcgttgatgcctcaagtttaaagcctgaatttgtttctaatttagatattctttttgttagagaattaacaggtgggatttactttggtgaacctagagggataaaaccaattgataatggtgaaagaaaaggaattaatactcatgtctatactactagtgaaatcgagagagtagcccgtgttgcatttgatcttgccagaaaaaggaataataaagttacttcctgtgaaaagtcgaatgtcatggaggcaggtcaattatggaaagaagaagtgcaagcaatccatgaaaaagaatatagtgatgtagaattaaaacatatgctagcagataactgtgcaatgcagttagttagaaatcctaaacaatttgatgtgatagtaacagataatctttttggtgacatgttatcagatgaagctgcaatgttgactggttctctggggcttttgccatctgcgtctcttggagccaaagataaaaatggtaatatgagatctttatatgagccagttcatggatcagcacccgatata

SEQ ID NO: 208535 - DNA, 670 bp, Unknown
  Bacterial polypeptide expressing nucleotide sequence isolated from the Sargasso Sea
atgagttctaatattttagttttgccaggagacggcattggtgtggaagttgcagatcaagcaattagagtaattgaaaaattaaatgagcaaggccttaatgctagctatgaaaaagatttagttggaggctcttcatatgatgttaatggcgaacctttaactaactcagttttagagaaagcaaaaaattcagatgctatattattgggagcagttggtggatcaaagtgggatgacgtagaaagatcaaaaagaccagaagctggacttttaggtttgaggaaagaattagaactttttgcaaatttgagacctgctttagtttttgatgctcttgtttcagcttcaactttaaaaaatgaagtggtaaacaatttagatattatgattgtaagagaattgactggtggtgtatattttggtcaacctcgaggaatagaaaacacaccaaatggtaagaaagcgattgacacacaaatttatcacgattacgaaatcgataggattgctagagtcgcttttgatttagccagaaaaagaaataataaagtaacatctgtcgagaaagctaatgtcatggaaacaggtgtactctggagagagattgtgaaagaaactcataaagatttttcagacattacactagaaaatatgttagcgagataat

SEQ ID NO: 208536 - DNA, 288 bp, Unknown
  Bacterial polypeptide expressing nucleotide sequence isolated from the Sargasso Sea
taggtgcaaaaaataaagaaggtcagatgagagcaatgtatgaaccaattcatggatctgctccagatattgcaggtaaaggaatagcaaatcctatagctacaattctaagttttgccatggccttaagatattctcttgatttagataaagaggcaaatgcattagaaaaagcagttcaagacgtgctagatgagggcctaaggaccaaagatattatttctgcaggcaaaaaagaagtatccacatcacaaatgggtgatgcgataatttcaaaattgcaataat

SEQ ID NO: 208537 - DNA, 844 bp, Unknown
  Bacterial polypeptide expressing nucleotide sequence isolated from the Sargasso Sea
gatgctgttttatttggtgcagtaggaggttctaagtgggataatgttgaaagagaaaaaagaccagaagctgctttattaagattaaggaaagatttagatctttttgcaaatttaagaccagctgttgtattagatgctttaacagaatcttcttctttaaaatcagaattagttaagggattagatatattaattgtacgagaattaacaagtggagtatattttggtcatccaagggggatttctaaaattagtgaaacggaaagtaaagctattgatactcaagtttatactacatctgagatcgagagagtttcaagagttgcttttgatttagctaaattgagaagaaacaaagtttcatcagctgaaaaatctaatgtaatggaaactggattattttggagaaatatcgttactgatttacataaaaacgaatatgcttcggtgaatcttgaacatatattggctgataattgtgcaatgcagcttgttcgatatcctaaacaatttgatgttattttaacagacaacctttttggagatttacttagtgatactgcagcaatgctaactggttcacttggtatgctcccatcagcatcacttggaccattaaaggaaaatggttctagagcagctatgtacgaaccagttcatggaagtgctccggatattgctggtcaatcaaaagcaaatcctctcgcaatggttatgagttttgccatgatgcttaaatatagttttgatatgcaggaggatagtgaactagttgaaaaagccgttcaaaatgttttattacaaggtgttagaactgcagatattaaagatggtgcaaaaa

SEQ ID NO: 208538 - DNA, 889 bp, Unknown
  Bacterial polypeptide expressing nucleotide sequence isolated from the Sargasso Sea
tggtttagtcgcactggaagaacatggcgagcttctacctcaagagacactagacctaatcgcaaaaaacaaagttgcgcttaaaggcccgttaactacgcctgttggtgaaggttttacctcaatcaatgttagtcttcgcaaacagttcaaactgtacgcaaatcttcgccctgtaatgtcttttaaaggcacaaaagcacgctacgaagacattgatatcatcaccgttcgtgaaaacacgcaaggtatgtactctggcttaggtcaagtggtatcagaagacggtaacgaagctgaagcgatgagtaaaatcacgcgcgacggcgctgaaaaaattgtgacttttgcttacgaactagcccgtcgtgaaggccgtaagaaagtgactgcggttcacaaagctaacattcttaagtcaacttcaggcctgttccttaaagttgcccgcgaagttggcgagcgttacccagatatcgaatcggctgaaatgattgttgataactgctgtatgcaacttgttatgaacccgcaccagttcgacgttatcgtaactactaaccttttcggtgacatcctatctgatctatgtgctggtcttgtaggtggtcttggtatggcccctggagcaaacattggtgaagactgcgctatttttgaagcagtgcatggctcagcccccgatattgcaggcaaaaacctagctaacccaacgtcagtagttctagctgcagcgcaaatgcttgaatacctgaacatgggtgacaaagcagagaagatccgtgcagctcttaaagacgttattgaatcaggcgaccgtacgactcgcgacttaggtggcgaagctggtaccactgaattcacacaggcacttctagaccgcttataa

SEQ ID NO: 208539 - DNA, 770 bp, Unknown
  Bacterial polypeptide expressing nucleotide sequence isolated from the Sargasso Sea
agacttatttgccaacttaagacctgcaatcttatcaaaatatttaagcgattcttcttctctcaagtcagataaagttcaagatctaaatctattaattgtaagagaactaactggtggaatttactttggtgagccaagaggcaggtctaagtctggtgattctgcttttaatactatgatttatagtaaagctgagattgccagaataggaaggattgcttttgaagctgctcaaaaaagaaataaaaacctttgctcagttgataaagcaaatgttttagaagtaagtgttttatggagagaagtaatttctcaactttcagaagaatatcctgatgtcgagttatctcatatgcttgtagataatgccgctatgcaattggtgagagacccaaaacaatttgatgttatcgtaacgggtaatttatttggtgatattttgtcagatattgcggcaatgttgactggctcaataggtatgttgccttcggcttcattaaattcggagaataaaggaatgtatgaacctgttcatgggtcagcacctgatatctcaggcaaagagttagctaacccgatcgcagcaattttatcagtcgctatgatgttgaaatatagttttaacatgaatgaggcatcttcagcgattgagaactctatacaagaggttttgtctgagggctatcgtacttatgatttggaaggaagtaaaaaaaataaattatctacttctgaaatgggtaataagatcattgaaaaaataaaat

SEQ ID NO: 208540 - DNA, 449 bp, Unknown
  Bacterial polypeptide expressing nucleotide sequence isolated from the Sargasso Sea
agaagaatatcctgatgtcgagttatctcatatgcttgttgataatgccgctatgcaattggtgagagatccaaaacaatttgatgttatcgtgacgggtaatttatttggtgatattttgtcagatattgcggcaatgttgactggctcaataggtatgttgccctcggcttcattaaattcggagaataaaggaatgtatgaacctgttcatgggtcagcacctgatatctccggtaaagagttagctaacccgatcgcagcaattttatctgtcgctatgatgttgaaatatagttttaacatgaatgaggcatcttcagcgattgagaactctatacaagaggttttgtctcagggttatcgtacttatgatctggaaggaagtgagaaaaataaattatctacttctgaaatgggtaataagatcattgaaaaaataaaataag

SEQ ID NO: 208541 - DNA, 619 bp, Unknown
  Bacterial polypeptide expressing nucleotide sequence isolated from the Sargasso Sea
aaatactcatacctacactacaactgaaattcaaagaattgccaaaacagcttttgaattggcaaagaaaagaaaaaataaagttacatcgtgtgaaaaatctaatgtcatggaagcaggagttctttggagagaagaagtacaagctttgaaagataaagactttaaagatgttgaattacagcatatgcttgcagataactgtgcaatgcaattattgcgaaacccaaaacagtttgatgttattttagcggacaatctttttggagacatgttatctgacgaggctgcaatgttaactggttccttaggtttattaccatcggcttcattaggctctagagataaaaatggtaaaatgagatcattatatgagccagtgcatggctccgcacctgatattgcaggtaaaaatattgctaatccaatcgcaaccatcttaagtttatcaatggccttcagatattccttagatttagataaagaagctgactccttggatcaggctgtacaactggttttagatgaaggtttaagaacaaaagatattatatcaaaaggaaaaaaagaagttacgacatctcaaatgggagatgcaattatttcgaaattaaaataa

SEQ ID NO: 208542 - DNA, 616 bp, Unknown
  Bacterial polypeptide expressing nucleotide sequence isolated from the Sargasso Sea
tactcattcttatacgaccaatgaaattcacagaattgctaaggttgcttttgatttagcgaaaaaaagaaaaaataaagttacctcttgtgaaaaatctaatgtaatggaagcaggtgttttgtggagagaggaggtacaattggttaaagataaagattacaaatcagtcgagttaaatcatatgttagcagataactgtgcaatgcaacttttaagaaatccaaaacagtttgacgtaatattagcagataatttatttggcgatatgttatcagatgaagcagcaatgttaactggttcattagggctattaccttctgcatctttaggagcaaaagacaaaaatggcaaaattagatctttatatgagcctattcatggatctgccccagatattgctggaaaaaacttagctaatccaattgctacaatactaagtttatctatggctctaaggtattctttaaatcttgataaagaggcagatcttctagatggagctgttcaaaaagtactagatgatggattaagaactaaagatataatttctaaaggcaaaaaagaagtcaccacatcagatatgggtgatgcaattatctcaaaattgaaataa

SEQ ID NO: 208543 - DNA, 572 bp, Unknown
  Bacterial polypeptide expressing nucleotide sequence isolated from the Sargasso Sea
aagaatgccaaaaattgcttttgaatcagcacaaaaaagaaaaggtagattatgttctgtagaaaaagcaaatgttttagaagtttcaaaattttggagatcaattgttacagaaatgtccgaagaatatcctgacgttgagctttcacatcaacttgcagataatgcagcaatgcagttagttctcaatccaaatcaatttgatgtaattgttgctagtaacttgtttggagatattttatctgacattgctgcgacacttactggatcaataggtatgcttccttctgcatcgcttgatagctcattcaagggcatgtatgagccctgtcatggaagtgcgcctgatattgctaatcaagatcttgcgaatccattagcaatgattggctcgttatcaatggctttaaaatattcattagatgaagaaactgttgcaaataaaattgatacagcaatcaaaaagttcattcaacaaggtttccgaacaaaagacattactacggatgaaaattatttaaatacatccgaggttgctgaaaaaattatagagattcttgaaaatgaatagt

SEQ ID NO: 208544 - DNA, 436 bp, Unknown
  Bacterial polypeptide expressing nucleotide sequence isolated from the Sargasso Sea
atgattaaagtaaaaaaaagaaaaatacttttacttcctggtgatggtattggtccagaggtaataactgaggtaaaaaaaatcattaactggtttaatgataaaaaatctttagattttgaaattgatcaggagctagttggtggttgttcttatgataaacatggtaccccaatcactgatgaggttttttataaagcactagaaagtgaagtaattatgcttggagcagttggtggtcctacatgggataacctagaattttccaaaaaaccagaaagagcattattaaaacttaggaaagaattaaagctttttgcaaacttaaggcctgcaatttgttttaaacaattagtcgatgcttcaacccttaagccagaggtagtttcaggactagatataatgatagtaagagagttaacaggtggaatatatt

SEQ ID NO: 208545 - DNA, 830 bp, Unknown
  Bacterial polypeptide expressing nucleotide sequence isolated from the Sargasso Sea
attgggccagaagttatcaggagaggttaaaaaaataattaattggttcaataaaaataaatctttagattttgaaaccgaagaagaaatggtaggtggcgcttcatacgaaaaacatggaacgccgattacagatgaagtattttataaagcattagagagcgaagcagtaatattaggagccgtcggaggtcctaagtgggatgatcttgagttttccaagaaacctgagagagctttattaaaactaagaaaagaattaaaattgtttgcaaatttaagacccgcgatttgttttaagcaattagtagacgcatcaagtttaaaacctgaattagtttcagatttagatataatgtttgtaagagagttaacaggtggaatttattttggagaaccaagagggattaagcctatagataatggagagagaaaaggaataaatactcatgtttatacatctagtgaaattgaaagagttgctcgtgtggcatttgatttagcaaaaaaaagaaataataaagttacatcttgtgaaaaatcaaatgtaatggaagcaggtcaattatggaaagaagaggtaaaagctcttcatgaaaaagagtatcaagatgtagaattacaacacatgttggcagataattgtgccatgcaattagtgagaaatcctaaacaatttgatgtaattgttactgataatctattcggggatatgttatctgatgaagcagcaatgttaactggttctctaggacttttgccatctgcatctttaggagcaaaagataagaatggaaatatgagatcattatatgagccagttcatggtt

SEQ ID NO: 208546 - DNA, 904 bp, Unknown
  Bacterial polypeptide expressing nucleotide sequence isolated from the Sargasso Sea
tatttgggtgcggtaggaggtgctaaatgggataacgtagaaagagataaaagacctgaagcagccttattaagattaagaaaagatcttgatctctttgctaatctaagaccagcggttgttttagatgctctttcagattcatcatctttaaaatctgatcttgttaaaggattagatattttgataataagagaattaacaagcggtgtatattttggacaaccaagaggtatatcaaaaattagtgagactgaaagtaaggcagttgatactcaactgtataccacatcagaagttaatagagtttcacgagtggcatttgatttagcaaagttgcgtaataacaaagttacatcagtagaaaaatcaaatgtaatggaaacaggtttattttggaaacaaaccgtaacagatttacataaaaaggaatattctgatgttaatttagaacacatgcttgcagataattgtgcaatgcagttagttcgttatccaaaacaatttgatgtcatacttacagataacttatttggtgatcttttaagtgatactgctgctatgttaactggatctttgggaatgcttccttcagcagctcttggaccagttaaagaaaatggaactagagcggcaatgtatgagcccgttcatggtagcgcaccagatatagctggtcaatctaaagcaaatcctttagcaatgatcatgagctttgctatgatgttgaaatatagttttgatatgcaagaagatagtcaaatgattgagaaagctgtacagaatgtattactaaaaggtttaagaacagctgatataaaagatggagcagaaaaaattatctcaactcaagaaatgggtaatgctgttattgaagaattaaaaattctatctggaaattaaa

SEQ ID NO: 208547 - DNA, 713 bp, Unknown
  Bacterial polypeptide expressing nucleotide sequence isolated from the Sargasso Sea
aatgattaaagtgaagaaaagaaaaattttattattaccaggtgatggaattggacccgaggttattggtgaagtaaaaaaaataattaattggtttaatgacaaaaagtctcttgattttgaaatagatgaagatcttgctggaggttgttcttttgataaacatgggacccccataactgatgaagtattttacaaggcattagaaagtgcagttataatgctaggagcagttggcgggccaaagtgggataatgttgaattttcaaaaaaacctgaaagagcattattaaaacttagaaaagaactaaagttatttgcgaacttaagacctgcaatatgttttaaacaattagttgatgcctcaactttaaaaccagaaattgtttcaggtctagatattatgattgtaagagagcttacaggtggaatatactttggggaacctagaggaattaagcctatagaaaatggtgaaagaaaaggaattaatactcacacttatactagtagtgaaataattagagtagcaaaaattgcttttgatttagcaaaaaagagatcgaacaaagttacatcatgtgagaaatcaaatgtaatggagtcaggtcaactatggaaagaagaagttcaagctttacacgacaaagaatataaggatatagagttaagacacatgcttgcagataactgtgcaatgcaactattaagaa

SEQ ID NO: 208548 - DNA, 328 bp, Unknown
  Bacterial polypeptide expressing nucleotide sequence isolated from the Sargasso Sea
tatgttaactggttccttaggtcttctaccttcagcatcacttggagcaaaaaataaagatggtgaaatgagagcaatgtatgaacctatacatggttcagcgccagatatagcaggaaaaggtatcgcaaacccgatagcaacaattttaagttttgctatggctttaaaatactctcttgatttagataaagaggcaaacgcccttgaaaaggctgttcaaaatgttttagatcaaggtttaagaacgaaggatattatttctcaaggaaaaaaagaagtatccacatctcaaatgggtgatgcgataatttcaaaattgcaatga

SEQ ID NO: 208549 - DNA, 449 bp, Unknown
  Bacterial polypeptide expressing nucleotide sequence isolated from the Sargasso Sea
tatgtatgcagataattgtgcaatgcaattagtaagagaccctaatcaatttgatgtaatagtaactgataacttgtttggagatattttgtctgattgcgcagctatgttaactggttcacttggcatgctcccatctgcaagtttaggatcagttgataaaaacactggaaagagatatgccatgtatgagccagttcatggatcagctcctgacatagcaggtaaaggattggctaaccctttagctgaattgctaagtttatcaatgttattgagatattcctttgacatgaaagaagaagctgacttaatcgacaaagctgtctcaaaagcgttagacgcagggccaaggacgccagatataatggccaagggaagagaaaaagttggaactacaggaatgatggacttagttatacataaattagaggaattaactaattaaa

SEQ ID NO: 208550 - DNA, 412 bp, Unknown
  Bacterial polypeptide expressing nucleotide sequence isolated from the Sargasso Sea
aatgattaaagtaaaagatagaaaacttttacttcttcctggtgacggcattggtccagaggtagtgaaagaggttagaaaaatcgtagagtggtttaacaagaaaaagtcattggactttaaaattgaagagggattagttggtggagcatcttacgaaaaatataagaaaccaattacagatgaagttttttataaagcacttgagagtgaggcagtaatattaggtgctgttggaggacctaagtatgataacttagaattctctaagagaccagaaagagcgttattaaaattaagaaaagaattaaagttatttgctaatttacgtccagcaatatgttttaaacaattagtagaagcatcctcattaaaaccagaaataatatctggtttggatataatgattgta

SEQ ID NO: 208551 - DNA, 818 bp, Unknown
  Bacterial polypeptide expressing nucleotide sequence isolated from the Sargasso Sea
ttagattttgaaattgaagaagaattagttggtggtgcttcttacgaaaaacatggaatacctataacagatgaagtattttacaaggcattagaaagtgaagctgtaatattaggagctgttggaggccctaaatgggatgatcttgaattctcaaaaaaacctgaacgagcattattaaagttaagaaaagaattaaaattatttgctaatcttagacctgctatctgctttaaacaattagtagatgcatcgagtttaaagccagaattagtatcagacttagatatactttttgtcagagaactgactggaggaatttattttggagagccaagaggaattaagccaattaataatggagaaagaaaaggaattaatacgcatgtatatacctcgagcgaaatcgaaagagttgctcgtgtcgcttttgatcttgctagaaaaagaagtaaaaaagttacatcttgtgaaaaatctaatgttatggaagcaggtcaactatggaaagaagaagttaaatctctgcacgaaaaggaatataaagatatagaattgaaacatatgctagcagataattgtgctatgcaattagtgagatatcctaagcaatttgatgttatcgttactgataatctttttggagacatgttatcagatgaggcagctatgttaactggttctctaggacttttaccttcggcatcattaggagccaaagataaaaatggaaatatgagatcattatatgaaccagttcatgggtccgcaccagatatagcgggaaatgggattgccaacccaatcgcaactatttt

SEQ ID NO: 208552 - DNA, 508 bp, Unknown
  Bacterial polypeptide expressing nucleotide sequence isolated from the Sargasso Sea
cagcgacaaatctaatggtatctcaataacaatgccttattgggatgaactttttgaaaaaatgtcaaaatcctacccagacataaaaactgatcagtaccatattgatattctttgtgctcattttgttttaaatccagataagtttgatgttattgtagcttctaatttgtttggtgatattttatcagatttgggtccagcatgcactggcacaattggaatagctccatcaggtaatatcaatccagagaacaatcatccgtctttatttgaaccagttcatggctccgcgccggatatagcaggaaaagggattgccaacccaataggacaaatttgggcaggagctatgatgttaaatcattttgggtttgacgatgcctcaaatgaaattttaaatgcaattaaacattctctatctaatccaaaactcagaacaaaagaacttgctggaagtgctgacacccaaacagtagggaaagctattgaaaaaattattaaatag

SEQ ID NO: 208553 - DNA, 349 bp, Unknown
  Bacterial polypeptide expressing nucleotide sequence isolated from the Sargasso Sea
tatgctatctgatcaagcatcaatgcttacagggtctttaggtttattaccttccgcatctttaggtgcaaaaaataaagacggtgaaatgagagccatgtatgaacctattcatggttcagctccagatatagctggtaaaggaatctcaaatcctatagctactatattaagttttgctatggctttaagatattccttggatctggataaagaggcggaagatttagaaaaagctgtacaagatgtactaaatgatggttatagaacaaaagatattctatcagaaggaatgaaagaagtttcaacttctcaaatgggcgatgctataatttcaaaattgcaataa

SEQ ID NO: 208554 - DNA, 562 bp, Unknown
  Bacterial polypeptide expressing nucleotide sequence isolated from the Sargasso Sea
gatgttatggtattacctggcgacggaattggcccagaagtcgtcgagcaaggtgtcaaattacttaatgcaatatcaaagaaatctggtcatacatttaactttgaacaagatataatcgggggtgctgcaatcgatagttatggtgtggcactaaaagcagaaaccgcagaaaaaagtagcaaagctgacgctatcttatttggagcggtaggtggacccaaatgggacgatcccactgctaaagtacgaccagaagatggtcttttagcaattagaaaggcccttggggtttacgcaaatataaggcccgttaaatcatactcttttttgagagattccattcctttaaaatcagaacttgtcgatgatatagatttaatcatgattcgtgaacttacaggtggtctttattttggtaaaccaaaaaaacaatggaccaactccaggggaagagttgcagtagatacactgaaatatactgaaaaagaaattactcgtatattacgagttggttttgaattagctagaggtcgaaataaaaaattaacatctgtagata

SEQ ID NO: 208555 - DNA, 667 bp, Unknown
  Bacterial polypeptide expressing nucleotide sequence isolated from the Sargasso Sea
gagccaagaggcattaagccaatagataatggtgaaagaaaagggataaatacacatacttacacaacaagtgagatacaaagggttgctagagtagcctttgatctagcaaaaaaaagacaaaataaagtcacttcatgtgaaaaatcaaatgtcatggaagcaggattactttggaaggaagaggttcaagatctccatgataaagaatttaaagatgttgaacttaatcatatgcttgcggataattgtgcaatgcaacttttaaggaatccaaagcaatttgatgtaattgttacagataatttatttggcgatatgctttcagaccaagcatctatgttgactggttctttaggtcttcttccttccgcatctttgggtgcaaaaaataaagaaggtcagatgagagctatgtatgagccaattcatggatctgccccagatatagctggcaaaggaattgcaaatcctatagcaacgatattaagttttgctatggctttaaaatattctcttaatctagataaagaagcaaatgccttagaaaaagctgttcaagacgttttagacgaaggtttaagaacaagagatattatttctaaaggtaaaaaagaaatatccacatctaaaatgggtgatgcgataatttcaaaattgcaataat

SEQ ID NO: 208556 - DNA, 577 bp, Unknown
  Bacterial polypeptide expressing nucleotide sequence isolated from the Sargasso Sea
aatgattaaggtaaaaaaaagaaaaattcttttattgcctggtgatggtatcggcccagaagtaataggtgaagtcaaaaaaattataaagtggtttaatgataagaagtctcttgattttgaaatagatgaggatcttgctggaggttgctcttatgacaaacatggtagtccaataaccgatgaagtattttacaaagctttagagagcgaagttgtcatgttgggtgctgtaggtggaccgaaatgggataatgtcgatttttcaaaaaaacctgaaagagcattactcaaacttagaaaagaattaaaattgtttgctaatttaaggcctgccatttgttttgagcaattggtaagtgcatccacacttaagccagaaattgtttcaggtctagacatcatgattgtgagagaattaactggtggaatatattttggtgaaccaagaggaattaaaccaattgaaaatggtgagagaaaaggaattaatacacacacttatactacaagtgaaataactagggtagctcgtatagcttttgatttagcgagaaaaaggtcaaataaagtaaca

SEQ ID NO: 208557 - DNA, 821 bp, Unknown
  Bacterial polypeptide expressing nucleotide sequence isolated from the Sargasso Sea
ttggtttaataataaaaagtctcttgattttgaaattgatgaagatcttgctggaggctcttcttttgacaagtacggaacaccaataaccgatgaagttttttataaagcattagaaagtgcagtaataatgttgggtgctgtaggtggccctaagtgggacaatgtagaattttcaaaaaaacctgaaagagctttattaaaacttagaaaagaattaaaactttttgctaatttaagaccagcaatttgttttaaacaattagttgatgcctctacacttaagccagagattgtttcaggtttagatataatgatcgtcagagaattgactggaggaatttattttggagaaccacgtgggattaagccaattgaaaatggtgaacgtaaaggaataaatactcatacttatacgagtagtgagataattagagtagctagaattgcttttgatttagcaaaaaaaagatcgaataaggttacatcatgtgaaaagtcaaatgtaatggaggcaggacaactttggaaagaagaagttcaaacattacgagataaagaatatagagatatagatttaagccatatgcttgcagataattgttctatgcagttgttaagaaacccaaaacaatttgatgttatagtgactgataatttatttggggatatgttatcggaccaagcatcaatgttaacaggatctctaggtcttttgccttcagcatctttaggggcaaaaaataaagaaggtgaaatgagagctatgtatgaacctattcatggctcagctcctgatattgcaggtaaaggaattgcta

SEQ ID NO: 208558 - DNA, 352 bp, Unknown
  Bacterial polypeptide expressing nucleotide sequence isolated from the Sargasso Sea
gacatgttatcagatgaggcagcaatgctaacaggttctttgggtttattaccttctgcttcattaggtgataaagataaaaatggaagaacaagatctttgtatgagcccgtacatggttctgcacctgacattgctggtaaaaatatatcaaatccgattgcaacaatattaagtttttcaatggcattaaaatattctttaggattacagaaagaatctgcaatgctagacaaggctgttgaaaaaacactagaagatggtttaagaacgccagatataatgtcaaaaggcaagaaaaaggtatcaacctcagatatgggtgatgcaattatatcaaatttaaattaaa

SEQ ID NO: 208559 - DNA, 592 bp, Unknown
  Bacterial polypeptide expressing nucleotide sequence isolated from the Sargasso Sea
gcgatatgatgctgacgaaattaatcgaatcgctaaaattgcatttgaggctagccaaaaaagaaaaaataaagtttgttcagttgataaagcaaatgttcttgaagtttctagattttggagagaaacagtaagcgacttacatgataaaaacttttccagccaagaactttcccacatgctcgcagacaatgctgccatgcagttggtcatagatcctaatcaattcgatgtaattttagcttcaaacttatttggggatgttctttcagacattgctgccacattaacaggatcaattgggatgcttccttcagcttcactaaatgagaaaaatgtcggtatgtatgagccatgtcatggaagcgctcctgatattgcaggcaaagatttggctaatcctctggcgatgattttgtctttatcgatggcatttcggtattctcttaatttagatggtcttgctgatgaacttgataaggctgtacgttgtctaatttccaatggagcaaggacaaaagatatagctaatgagagtacttttttaaaaacttctgaagtagctaaagaacttatcgagattctcaaatga

SEQ ID NO: 208560 - DNA, 664 bp, Unknown
  Bacterial polypeptide expressing nucleotide sequence isolated from the Sargasso Sea
ccaagaggcgttaaaccaattgaaaacggagagcgaaggggagtaaatactcatgtttacacaacaaaagaaatcaaaagaattgcaaaagttgcttttgaattagcagctaaaagaaataacaaagtcacatcttgtgaaaaatcaaatgttatggaggccggagtattatggagagaggaagttcaattactaaaagataaagagtacaaaaaaatcgaattaaatcacatgcttgctgacaattgcgcgatgcaattattgagaaatccaaaacagtttgatgtaattttagcagataatttatttggagacatgttgtccgatgaagccgcaatgctaacaggctcactaggactattaccttctgcttccttaggagacaaagataaaaatggtaaaattagatctttatatgaacctgttcacggatcagcacctgatatagcgggcaaaaatatttcaaaccctattgctacaattttgagtttttcgatggctttaaaatattcattaggattagaaaaagagtctactttattagacaaagctgttgaaaaaaccttggaagacggtttaagaactccagatataatgtcaaacggtaagaaaaaggtatcaacctcagatatgggtgatgcaattatatcaaatttaaattaaa

SEQ ID NO: 208561 - DNA, 704 bp, Unknown
  Bacterial polypeptide expressing nucleotide sequence isolated from the Sargasso Sea
tatggaagcaaggatttcggttttaggtggagatgggataggtccggaggttactttagaagctgtaaaagttttagattctatagctaaacgttttgggcatgattttacttatgttgcaggagatgttggtggaatcgcaatagataaaacaggtactgctttaccgcaagatactatgaatatagtaatgggctctgatgcagttttattcggtgccgtaggtggcccaaaatgggatgatccaaaaaataaagttagaccagaagatggtattttaggtttgagaaaatccttgggtctatatgctaacttacgtccatgtatagtatatgatcaacttattgaatcttctccactcaaacctcatctaataaaggatgttgatttcattattgtaagagaacttactggaggtctttattttggtaagccaaaaagaagatgggaaaattcaagaggtagaagagctgttgatacattggcatattctgaaaaagagatagaaagggtattacgtgttgcatttgaactagcaaaatctaggaaaggtgtacttcattcactagataaagctaatgtaatggaatcttctagattatggaggcaaattgcaatggaagttgcaggtgattatcccgatataaaactccaccatatgttagcagactcggccgctatgcaaataataactaaccctagta

SEQ ID NO: 208562 - DNA, 256 bp, Unknown
  Bacterial polypeptide expressing nucleotide sequence isolated from the Sargasso Sea
atgttttctttgcttattcttccaggagatgggattggtccagaggtgatgactgaggttaagcgggtgattacctggtttcaggataggcgcggtttaaaaataaatattgaggaaggtttagttggaggagcctcatacgataaacatggaagtcctctcacagaagagatgttaaaaaaagcattagaggtcgatgccgttctgctgggagcagtcggcggccctgattacgacaacctaagctttgattgaa

SEQ ID NO: 208563 - DNA, 325 bp, Unknown
  Bacterial polypeptide expressing nucleotide sequence isolated from the Sargasso Sea
aatgattaaagttaaaaaaagaaaatttttattattacctggtgatggaattggtccagaagttataggtgaagtaaaaaaaataattaattggtttaacaaaaataaatcattagattttgaaatggatgaagagctggtaggaggagcgtcttacgaaaaacatggaacaccaattactgacgaagtattttataaagcattagaaagtgaggcagttatactaggagcagttggaggccctaaatgggatgatttagaattttcaaaaaaacctgagcgtgcattattaaaattaaaggaaagagttaaaattatttgctaa

SEQ ID NO: 208564 - DNA, 526 bp, Unknown
  Bacterial polypeptide expressing nucleotide sequence isolated from the Sargasso Sea
tgaaaagtcaaatgtaatggaggctggacagctttggagagaagaagttcaaacattacatgacgaagaatataaggaagtggaattaaaccatatgcttgctgataattgtgcaatgcaattattaagaaatcctaaacaatttgacgttattgtaacagataacttatttggtgatatgctatcagatcaagcatctatgttaaccggttcactaggccttctaccttcagcttcactaggagaaaaaaataaggatggtgaaatgcgagctatgtatgaaccaatacatggttcagctccagacatagctggaaagggaatttcaaatccaatagcaacgattttaagttttgcaatggctttaagatattcgctagacttagataaagaggcggacaatttagaaaaagctgtacaagaagtgctaaatgatggattaagaacaaaagatattatatcaaaaggaaaaaaagaagtatctacctctcaaatgggtgatgcgataatttcaaaattgcaataa

SEQ ID NO: 208565 - DNA, 766 bp, Unknown
  Bacterial polypeptide expressing nucleotide sequence isolated from the Sargasso Sea
atgattaaagtaaaaaaaagaaaaattttacttttacctggggatggtattggtccagaagtagtcaatgaggtaaaaaaaataattgaatggtttaacaaaaatagatcgcttgatttcgaattagaccaagatttagtaggtggggctgcgtatgataaatttaaaactcctattaccgacgaagtattttttaaagctttagaatgtgaagcagtgattttgggcgctgtgggaggccctaaatgggaaaacttagatttttctaaaaaaccagaaagagcattactaaagttaagaaaagaacttaaactttttgcaaatttacgacctgctatttgttttaaacagttagttgaggcctctagtttaaaacccgaaatagtttcaggacttgatataatgatagtaagggaattgactggaggaatttattttggtgaaccaagaggtataaaacctatcgacaatggagaaagaaaaggaattaatactcacacatatacgtctaaagaaattgagagagttgcaaaagttgcttttgaattggccaaaaaaagaaataataaagtcacctcttgtgacaaatcaaatgttatggaggccggtcaattgtggaaagaagaaataacagctcttcacaaaaaagattataaagacgtaaatttagaacatatgcttgcagataactgtgctatgcagttattaagaaatccaaaacaatttgatgtaatagtaactgataatttgtttggagaatatatta

SEQ ID NO: 208566 - DNA, 667 bp, Unknown
  Bacterial polypeptide expressing nucleotide sequence isolated from the Sargasso Sea
tcgcccacccgcggtatcgacaatgccggtgaaaatcgtcgggcctatgatctcaacgaatatacagaagctgagatcgtgcgctttgcgcggatcgggtttgaggtggcgcgccgtcggaccggaaaattgctttctgtcgacaaggccaacgtttttatggcgggcaagctttggcgtgaagtggtgcaggagattggcgaaagtgagtttcccgatgtgacgctgacccatttttttgcggacaatgccgcataccaactgtcttgcaatccaggtgactttgacgtgattctggccgataacctctttggcgacatcctctccgatcagtcagcggcagtctcgggttcactcgggatgttgccttcggcatgtctgtcacagttgccacagagcggccgatcggaacgaccagcaatttacgaacctgtgcacggcagtgcgccggatatcgccggcgccggtatcgctaatccgataggcaccattctgtccgccgccatgctgcttgaatacagcgcgggagaatcagcgggcgcccggaaaatcagcacggccgttgaggcggtgttgcaggcagggttcgcaacccctgatcttggcggtaaacacaccactcagcagatgaccgacgaggtgatccggcaggtgcggcgcatctaag

SEQ ID NO: 208567 - DNA, 805 bp, Unknown
  Bacterial polypeptide expressing nucleotide sequence isolated from the Sargasso Sea
atggctgaggttgaaaagataattgaatggttcaactcaaaaaaatctttagattttgaaatagacaaagacctagttggtggagttgcttatgataagcatggttcaccaataactgacgaggctttctataaagcacaagaaagtgcagcagttattttaggtgcagtaggtggaccgaagtgggataatcttgacttttctaaaaaaccagagagagcacttttaaaattaagaaaagaattaaagttatttgcaaatcttagacctgcaatatgttttaaacaacttgttgatgcatcaagtttaaaacccgagcttgtttctgatttagacttacttttcgtaagagaactaactggaggaatatatttcggtgaaccaagaggaattaagcctatagataatggagaaagaaaaggaataaatacacatgtttacacctcaagtgaaattcagagagtagctagagttgcatttgatctagcaagaaaaagaaacaataaagttacttcttgtgaaaaatcaaatgtaatggaagctggccaattatggaaagaagaagtccaatcaattcatgaaaaagaatatagcgatgttgaattgaatcatatgcttgctgacaattgtgcaatgcaattagtaagaaatccaaaacaatttgacgtgattgttaccgataacctttttggtgatatgttatctgatgaagcagcaatgcttactggttctctaggacttttaccttcagcttctttaggtgctaaagataaaaatggtaatatgcgatcactatatgagccag

SEQ ID NO: 208568 - DNA, 391 bp, Unknown
  Bacterial polypeptide expressing nucleotide sequence isolated from the Sargasso Sea
gttagaaatccaagccaatttgatgtgattcttacaggtaatttatttggagatattcttagcgacattgcagccatgctgacaggatcaattggcatgcttccttctgcttcgttaaccactgatgggccaggtgtctttgaacctgttcatggctcagctcctgacatcgcaggaaaagatttagctaatccaatagcaatgctcttatctgctgcaatgatgttaaaaattgcccttaatgaaaaagaagcagcaacttttttagaaaatgcaattaacgaaattcttaatgacggttatagaacttctgacttaatgagcaatcagacgactaaacaggttggttgctctcaaatgggtgaactattggcgaaaaaattaaaataat

SEQ ID NO: 208569 - DNA, 814 bp, Unknown
  Bacterial polypeptide expressing nucleotide sequence isolated from the Sargasso Sea
ttggtacaagcaaataattgatagtcttggcctagacattcaatgggacatattaacaaatccaataaatgataaaaaaaaaatatcagaagaacttgaaaaatcattatcgataacaaaggtaggattgaaaggcccccttactacacctattggggatggatttagaagtattaatgttgaaataagaaaaagatttgaattatttgcaaatgtaagacctatcaaaacccttcaaggctttaaaactaattataaagatttagatatgataattattagagaaaatacagaggatttgtatgccggaaaagaacttgaaattgcaaaaggtgtaacacaatcaatgaaaatagtgacaacagcagcatctgatagagtagctaaatttgcttttcaatatgctctagaaaacaaaagaaaaaagattactgttcttcacaaagcaaacattatgaaattaaccgatggtttatttttggatagagtaagaagaatatcccgaagaaaaatatataaagatatagaatatgaagaattaataattgataatgcatgcatgcaattagtaatgaatccaaatagatttgatatcattttaacagggaatctctttggtgatattgtttctgatctttgtgcaggacttgttggtggattaggtgctgcatcaggggcaaatcttggttcaaattatgctgtttttgaacctgttcatggtactgcacctgatattgctggaaagggtattgcaaatcccttggctacgatattgtcatcaataaatgatgttaaatcatataggaatggaaga

SEQ ID NO: 208570 - DNA, 572 bp, Unknown
  Bacterial polypeptide expressing nucleotide sequence isolated from the Sargasso Sea
aatgattaaagtaaaaaaaagaaaaatattattgttaccaggtgatggaataggaccagaggtaattgcagaagtaaaaaaagtaattgagtggttgaacaaaaacagatctttagattttgatttagatgaaggtttagtaggcggtgcggcttatgataaatatggaactcccattactgatgaagttttttataaagctctagaaagtgaagcagttatattaggagcagtaggaggacctaagtgggataatctagaattttcgaaaaaacctgagagagctcttttaaaattaagaaaagaattaaaattatttgcaaatctaagacctgcaatatgttttaaacaactagttcaagcttcaagtttgaaaccagaaatagtttcaggacttgatataatgatagttagagagttaacaggtggaatttattttggagaaccaagaggcattaaaccaattgataatggtgaacgtaagggaataaatacacatacttatacttcaagtgaaattgaaagagttgcaagagtagcttttgatttagctaaaaaaagaaaaaataaag

SEQ ID NO: 208571 - DNA, 616 bp, Unknown
  Bacterial polypeptide expressing nucleotide sequence isolated from the Sargasso Sea
actcatgtttatactactagtgaaattgagagagtagcccgtgttgcatttgatctagccagaaaaaggaataataaagttacttcctgtgaaaagtcgaatgtcatggaggcaggtcaattatggaaagaagaagttcaagcaattcatgacaaagaatatagtgatgtagaattaaaacatatgctagcagataactgtgcaatgcagttagttagaaatcccaaacaatttgatgtgatagtaacagataatctttttggtgacatgttatcagatgaagctgcaatgttgactggttctttagggcttttgccatctgcgtcccttggagccaaagataaaaacggtaatatgagatctttatatgagccagttcatggatcagcacccgatatagcaggtcaaggtattgctaatccaatagcaacaatactgagttttgcaatggctttaagatattctttagacctagataaagaggcagatagtttagaaaatgctgttcaaggtgtgcttgatgagggtcttagaactaaagatattatttctaagggaatgaaagaagtatcaacatcagtgatgggagatgcgataatttcaaaattgcaataat

SEQ ID NO: 208572 - DNA, 693 bp, Unknown
  Bacterial polypeptide expressing nucleotide sequence isolated from the Sargasso Sea
aattaacaggtgggatttactttggtgaacctagagggataaaaccaattgataatggtgaaagaaaaggaattaatactcatgtctatactactagtgaaatcgagagagtagcccgtgttgcatttgatcttgccagaaaaaggaataataaagttacttcctgtgaaaagtcgaatgtcatggaggcaggtcaattatggaaagaagaagtgcaagcaatccatgaaaaagaatatagtgatgtagaattaaaacatatgctagcagataactgtgcaatgcagttagttagaaatcctaaacaatttgatgtgatagtaacagataatctttttggtgacatgttatcagatgaagctgcaatgttgactggttctctggggcttttgccatctgcgtctcttggagccaaagataaaaatggtaatatgagatctttatatgagccagttcatggatcagcacccgatatagcaggtcagggtattgctaatccaatagcaacaatactgagttttgcaatggctttaagatattctttagacctagataaagaggcagatagtttagaaaaagctgttcaaggtgtgcttgatgagggtcttagaactaaagatattatttctaagggaatgaaagaagtatcaacatcagttatgggagatgcgataatttcaaaattgcaataat

SEQ ID NO: 208573 - DNA, 433 bp, Unknown
  Bacterial polypeptide expressing nucleotide sequence isolated from the Sargasso Sea
atgctagcggataattgtgccatgcaattagttaggtatccgaagcaatttgacgtaatagttaccgataatctttttggagatatgttatcagatgaggcagcaatgttaactggttctctaggacttttaccatcagcatcattaggagctaaagataaaaatggaaatatgagatctctatatgaaccagtccatggttcagcacctgatatagcaggtaatgggattgcaaatccaattgcaacaatattaagctttgcaatggcgttaaaatattctttagatttagataaagagtcaaaaactttagaaaaagcagttcaaactgttttagatgaaggattaagaactaaagatatattatcaaaaggcacgaaagaagtttcaacatctgaaatgggtgatgcgataatttcaaaattgcaataat

SEQ ID NO: 208574 - DNA, 454 bp, Unknown
  Bacterial polypeptide expressing nucleotide sequence isolated from the Sargasso Sea
gatgactgaggttaagcgcgttatttcttggttccaacataaacgtgagttagaaatagatattgaagaaggttcagttggaggagcgtcctatgataaacatggaacgccacttacggaagagatgctaaagaaagcactagaagtggatgctgtattgctgggagcagtcggtggccctgattatgataatcttaactttgacttgaaaccggaacgagcacttttaaaacttaggaaagaactggacttatttgccaatatacgtcctgctcaatgttttgatgcgctagcctcgttctcttcattaaagaaagaaattgtgtctggactggatattgttattgtaagagaactcacatcaggcatttattttggagaacctcgtggcattcatactgatggtttcaatgaaaagagttggtataaatactcaaagatacaccgaatctga

SEQ ID NO: 208575 - DNA, 946 bp, Unknown
  Bacterial polypeptide expressing nucleotide sequence isolated from the Sargasso Sea
atggaactccaattaactgatgaagctttttacaaggcacaagaaagcgctgcagtaatattgggtgctgttggtggaccaaaatgggataatattgatttttcaaaaaaaccagagagagctctattaaaattaagaaaagaattaaaattatttgcaaatttgagacctgcaatttgttttaaacaactcgttgatgcctcaagtttaaagcctgaatttgtctctaatttagatattctttttgttagggaattaacgggtgggatttactttggtgaacctagagggataaaaccaattgataatggtgaaagaaaaggaattaatactcatgtctatactactagtgaaatcgagagagtagcccgtgttgcatttgatctagccagaaaaaggaataataaagttacttcctgtgaaaagtcgaatgtcatggaggcaggtcaattatggaaagaagaagtgcaagcaattcatgaaaaagaatatagtgatgtagaattaaaacatatgctagcagataactgtgcaatgcagctagttagaaatcctaaacaatttgatgtgatagtaacagataatctttttggtgatatgttatcggacgaggctgcaatgttgactggttctctaggacttttgccatccgcgtctcttggagccaaagataaaaacggtaatatgagatctttatatgagccagttcatgggtcagcacctgatatagcaggtcaaggtattgccaatccaattgcaacaatacttagttttgcgatggctttaagatattctctagatcttgataaagaggcagatagtttagaaaaggctgttcaaggtgtgcttgatgagggtcttagaactaaagacattatttctaagggaatgaaagaagtatcaacatcagtgatgggagatgcgataatttcaaaattgcaataat

SEQ ID NO: 208576 - DNA, 640 bp, Unknown
  Bacterial polypeptide expressing nucleotide sequence isolated from the Sargasso Sea
atggcaatatccaacactagaaaattattattattacctggagatggaattgggcctgaggtagtaagagaagtgaagaaaataattgaatggctaaataagaataaatctttagactttaaaattgaagaagagctaatcgggggtgcatcgatagatgcgcataaaattccaattacagatgaagttttttataaatctctagaatgtgatgcagttatattaggagcatgtggaggacctaagtgggataaattagaattttcaaaaaaacctgaaagagctcttttaaaattgaggaaagagttaaaactatttgcaaatttaagaccagcaatttgttttgaacaactggttgattcttctactttaaaacctgaaatagtttctggattagatattatgattgtacgagaacttacaggcggcatatattttggggaacctcgaggtatagagccaattaaaaacaatgagcgtaaaggaataaatacacatacttatactactactgaaatcaaaagaatagcaaaagtagcatttgaccttgcaaaaaaaagaaaaaataaagtaacatcttgtgaaaaatcaaatgtaatggaagctggagttttgtggcgagaagaagttcaagattaaa

SEQ ID NO: 208577 - DNA, 871 bp, Unknown
  Bacterial polypeptide expressing nucleotide sequence isolated from the Sargasso Sea
atgattaaagtaaaaaaaagaaaaatacttttacttcctggtgatggtattggtccggaggtaatagctgaggtaaaaaaaattattaactggtttaatgataaaaaatctttagattttgaaattgatcaggagctagttggtggttgttcttatgataaacacggtaccccaatcactgatgaggttttttacaaagcactagaaagtgaagtaattatgcttggagcagttggtggtcctacatgggataacttagaattttctaaaaaaccagaaagagcattattaaaactcagaaaagaattaaagctttttgctaacttaaggcctgcaatttgttttaaacaattagtcgatgcttcaacccttaagccagagatagtttcaggactagatataatgatagtaagagagttaacagggggtatatattttggtgaacctagaggaattaagccaattgaaaacggagagagaaaaggaattaatacacacacttatacgactagcgaaattactagagtagctagtatcgcttttgatttagctagaaaaagatcaaacaaggttacttcgtgtgaaaaatcaaatgtgatggaagcaggacaattgtggaaagaagaagtccaagaacttcatgaaaaagaatacaaagatgtagaattaactcatatgttagcagacaattgtgctatgcagctcttaagaaacccaaaacaatttgatgtaattgtaacagataatttgtttggagatatgttgtcagaccaagcttcaatgttaacgggatctttaggtcttttaccttcagcatctttgggcgcaaaaaataaagatggtgagatgagagcaatgtacgagcctatac

SEQ ID NO: 208578 - DNA, 817 bp, Unknown
  Bacterial polypeptide expressing nucleotide sequence isolated from the Sargasso Sea
tatgattaaagtgaaaaaaagaaaaattttactattaccaggagatggtattggtcctgaggttgttgctgaagttaaaaaaattattgaatggtttaataaaaaaaaatctttagattttgaaaccgaagaggatttggtcggtggagcctcatacgaaaaacataaaaaaccaattacagatgaagttttttataaagctctcgagtcagaagctgtaatactaggagcggttggtggtccaaaatgggataatttagaattttcaaaaagaccagagagagcacttttaaaattaagaaaagaactaaaattgtttgctaatcttagaccagcaatttgttttaaacaacttgttgaagcttcaagtttaaagccagaaatcgtttcagggttagatataatgattgtcagggaacttaccggaggcatatattttggggagcctagaggtataaacccaatcgaaaatggagaacgaaaaggtataaacacgcacacatatactagtggtgaaataattagagttgctaaagttgcgtttgaacttgctcaaaaaagaaataaaaaagttacttcttgtgaaaaatcaaatgttatggaatcgggcattctttggagagaagaagttcaaaaattgaaagatgaagaatattcaaatatagaattaaatcatatgcttgcagataattgtgcaatgcaattgttaagagatccaaaacaatttgatgtgattgtgacagataatttatttggagatatattatccgatgaggcagctatgttgactggttcgttaggtttgttgccttctgcg

SEQ ID NO: 208579 - DNA, 628 bp, Unknown
  Bacterial polypeptide expressing nucleotide sequence isolated from the Sargasso Sea
aggcgttaacactcatacatatacttcaagtgaaattgcaagagtagcaagagttgcttttgatttagcaaaaaaaagaaataataaagttacctcatgtgaaaaatcaaatgttatggaggctgggcagttatggaaagaagaagttgcagaaattcataaaaatgaatttaaagaggttaaattagaacacatgttggcagataattgtgcaatgcaattattaagaaatccaaagcaatttgatgtgattgtaacagacaatttgtttggagatatactttctgatgaagcggctatgttaactggatctttaggtcttttaccatcagcatccttaggtgctaaagataaaaatgggaatatgagatcaatgtatgagcctgttcatggttcagcaccagatatagctggtaaaaatcttgcaaatccaattgcaacaattttaagtttttctatggcactaaggtattctttgaatttagaaaaagaagctaaggaacttgatactgcagtgcaaagcgttttagacatgggattaagaacaaaagacatatattctaagggaaataaggaagtttcaaccactgcaatgggagatgcaattattgcgcaattgcaaaaataa

SEQ ID NO: 208580 - DNA, 416 bp, Unknown
  Bacterial polypeptide expressing nucleotide sequence isolated from the Sargasso Sea
tgcaatgcaattgttaagaaacccaaaacagtttgatgttattgtaactgataatttatttggtgatatattatcagatgaagcagcgatgttaacaggatcactgggattattaccttcagcatctttaggaacaaaagataaaaatggtaaagtgagatctatgtatgaaccagtccacggatcggcacctgacattgcagggaaaggaatagctaatccaatagctacaatactaagtttttccatggctctaagatattctttagatttagataaggaagcaaataatttggatcaagcagttcaaaaagttcttgatgatggcttaagaaccaaagatattttatccgaaggtaaaaaagaagtatccaccgagcaaatgggggatgcaataatttcaaaacttaaatagt

SEQ ID NO: 208581 - DNA, 366 bp, Unknown
  Bacterial polypeptide expressing nucleotide sequence isolated from the Sargasso Sea
aacattatgatgtagttgttgccagtaacttatttggggatattctttccgatcttggtccggcatgcaccggaacaattggcatcgctccttcagccaatatcaacccatctggtgaatttccctcaatgtttgaacctgtacatggatctgcgccagatatatttggcaagaaaattgcgaatcctataggaatgatatgggcaggtgcaatgatgttacagcatcttggttatccagaagcatatgacactataatcggagctattgaaaccatattgtccagtggaatgaatcttacacctgatatgggtggtaatggtaatacatctgatattggtaaggctatcgctgatgcagtttgat

SEQ ID NO: 208582 - DNA, 591 bp, Unknown
  Bacterial polypeptide expressing nucleotide sequence isolated from the Sargasso Sea
aatgtctaaaactaggaaaattttacttttacctggtgatggtattggcccagaggtaattgctgaagtaagaaaaatactagattggatgaataaaacaaaatctttagattttgttttaagtcaggagttaattggaggtgcatctatcgatgctaataaagttccaattacagatgaggttttttataaatctttagagtcagatgcagtaatactaggtgcatgtggtggacctaaatgggacaacttagaattttcaaaaaaaccagagagagcacttttaaaacttagaaaagaattaaaactatttgcaaatttaagaccagcgatttgctttaaacaattagttgactcttcaacgctaaaaccagaaatcgtatcaggtttagacataatgatagtaagagaattaactggcggtatttattttggtgaacctagaggtatagagccgatggaaaataatcagagaaaaggtataaatactcacacttacacaacttcagaaattcatagaatagctcgcgtggcattcgatttagcgaaaaagagaagaaataaagtcacgtcctgcgagaaatcaaacgt

SEQ ID NO: 208583 - DNA, 511 bp, Unknown
  Bacterial polypeptide expressing nucleotide sequence isolated from the Sargasso Sea
aatgattaaagttaagaaaagaaaaattttactattaccaggtgatggaattggtccagaggttgtatcagagttaaaaaagataattaattggcttaatagcaaaagatctctagattttgaaatagatgaagatttagttggaggggcggcttatgacgcgcatgggacaccaataactgatgaggtattttataaagcacttgaaagtgaggcagtaattttaggtgcagtaggtggccctaaatgggataatttagatttttcaaaaaagcccgaaagagcgttattaaaattaagaaaagaattaaaattatttgctaatctaagaccagcaatttgttttaaacaacttgttgatgcctcgagccttaaaccagaaattgtttcaggacttgatattatgatagtaagagagcttacaggtggaatttattttggggagccaagaggaattaaacctattgataacggtgagagaaaaggtgttaatactcatacttatacctca

SEQ ID NO: 208584 - DNA, 439 bp, Unknown
  Bacterial polypeptide expressing nucleotide sequence isolated from the Sargasso Sea
aatgattaaagtaaaaaaaagaaaaatacttttacttcctggtgatggtattggtccagaggttattgctgaggtaaaaaaaattattaattggtttaatgataaaaaatctctagattttgaaatagatcaagagttagtaggtggatgttcttatgacaaacacggtaccccgattacggatgaggttttttataaagctttagaaagtgaagtaattatgttaggggcagttggaggtccaaaatgggatggtttagaattttcaaaaaaaccagaaagagctttattaaaacttaggaaagaattgaaactttttgcaaatctaaggccagcaatttgttttgaacaattagtaggtgcctcaacacttaagccagaagtagtttcaggattagacataatgatagttagagagttaactggaggtatatatttt

SEQ ID NO: 208585 - DNA, 760 bp, Unknown
  Bacterial polypeptide expressing nucleotide sequence isolated from the Sargasso Sea
atggctaataaaactaggaaaatattgcttttacctggtgacggaataggcccagaggtaattgcagaagtaagaaaaatacttgaatggatgaataaaacaaaatctttagatttcgttttaaaccaagaattaattggaggtgcatctatcgatgcaaataaagttccaatcacagacgaagttttttacaaatctttagagtccgatgctgttatattaggtgcatgtggtgggccaaaatgggataatttagaattttcaaaaaaacctgagagagctcttctaaaacttagaaaagaattaaaattattcgcgaacttaagaccagctatctgctttaaacaattagttgaatcatcaacactcaaaccagaaattgtctcaggtttagacataatgatagttagagaattaactggcggtatctattttggtgagccaagaggaattgaaccaatagaaaataatcaaaggaagggcgtcaatacccatacttatacaacatctgaaattcatagaatagctcgtgtagcttttgatttggcaaaaaaaagaagaaacaaagttacttcttgtgaaaaatcaaatgtaatggaagcaggtgttttatggagagaggaagttcaggtaattaaagacaaagaattcaaaaaagtagaattaaatcacatgctagccgataattgtgcaatgcagcttttaagatatccaaaacaatttgatgtaatattagctgataatctgttggagatatgtg

SEQ ID NO: 208586 - DNA, 910 bp, Unknown
  Bacterial polypeptide expressing nucleotide sequence isolated from the Sargasso Sea
gggcttaccccgcttccctcaagcggcagcgaaagaggcagatgcgatcctgcttggagcagtgggtggtccacagtgggacactctcccggcagctgagcggcccgagcgggggttgttggcgatcagggcggatctggatcttttctgcaaccttcggccagcacttttattccctgaattagccggtgcttcaagtctgcgtaaagagcgagtggcggggcttgatctgctcatcgtcagagagctgacgggtgggatttacttcggagaaccgcgtggcatttcagtgcgagaggacggggttcgggaaggcgtgaataccgaccgctacgacgagaacgaaatccgtcgtattggcagactagccttcgaggctgcgcgcaagcgcggcggtcgcttatgctccgtcgataaggcgaatgtcctggaggtgacgatgctgtggcgagaggtcatggagtcgttgcggcccgagttcccagatgtatccctgtcgcacatctatgttgataacgcggcgatgcaacttgtgcgagaacccaagcagtttgacgtcatcgtcacggggaatctcttcggggatatattgtcagatatcgccgcgatgctcaccggctccattgggatgttgccctcggcttcgcttaacgcaagctcagtcggcctgtatgagcctgtgcacggttcagcgcccgacattgcgggcgaggataaagccaatccgctggcaacgatcttgtctgctgcaatgctattgcggtactccctcgacgagctggaagcagcaagcgatattgaaagggcggtcgcggatgtgctctcggcaggtaaaagaacgggggatattgctgccgacggagcggaggaagctgtaatgggtacacgtgcaatgggcgatgcggtggtt

SEQ ID NO: 208587 - DNA, 498 bp, Unknown
  Bacterial polypeptide expressing nucleotide sequence isolated from the Sargasso Sea
gagaagtaatgagtgatttgcatgctaaagaaggtcaaggtatagaattacagcatatgtatgccgataactgcgccatgcaacttgttagagctccaaaacaatttgatgttattgtttgtgataatttatttggtgatatgttatcagactgtgctgcaatgttaacgggctcattaggaatgttaccttctgcctctttgggtgcaccaaataaagaaggcattagaaaagccatgtatgagcctgttcatggttctgctcctgacattacagggaaaggtattgcaaacccccttgctcaggttttaagtcttactatgatgcttagatattcttttgattacattgaagaagccgacttaattgaaagttctgtttcagacgctttatccactggatccagaacaccagatttaggtggaggaacaaagaaagtttcaacttctgaaatgatagatatagttattgaatttatgaacaaaagaataaattaat

SEQ ID NO: 208588 - DNA, 532 bp, Unknown
  Bacterial polypeptide expressing nucleotide sequence isolated from the Sargasso Sea
aatgaaaaattataaaattgccgtattggccggagatggtattggccctgaagtgatggttcaggcgttaaaagtactggctgtggtgtcagataaatttggattcaacattcaaagtactgaagctttaattggtggcgctgccattgatgctacaggggtcgctttaccagatgacacactgaagttgtgtaaaaacagtgatgccatattatttggctctgttggtggccctaagtggaccagcctgccgccagctcagcagccagagcgcgcctctttattgccactgcgtaaaacctttgatttgttttgcaacttacgaccaggtcagatttacccggcttttgccgagttatcgccgttgcaccccaaaatcagcagtcagggcatggatattttatgtgtgcgtgaactgacaggcggtatttattttggtgaaaaaggccgcactgaagacgcggcttttgatacgcaaaaatacagtgtcagcgaaattgaacgcattagccgtgtggcttttgaagctgcc

SEQ ID NO: 208589 - DNA, 462 bp, Unknown
  Bacterial polypeptide expressing nucleotide sequence isolated from the Sargasso Sea
tcgtggaatagaggagattgatgctcaaataaaaaaaggttatgatactaatttatacactactccggagattgaaagaattggtagggttgcctttgatatggcgagggctacaaatgggaaagttacttctgttgaaaaagctaatgtgatgatgtcgggtgttttgtggagagaagtgatgactaatctttatgaaaaagaaggttcagatatatcaattaaccacatgtatgccgataattgcgctatgcaattagtaagagaccctaagcaatttgatgttattgttactgacaatctatttggtgatattttatctgattgcgcagctatgttaactggctcacttgggatgcttccctctgcaagtttaggatctgtagatcaaaatactggaaagagacatgcgatgtatgagccggttcacggatcggccccagatatagctggacaagagtt

SEQ ID NO: 208590 - DNA, 880 bp, Unknown
  Bacterial polypeptide expressing nucleotide sequence isolated from the Sargasso Sea
atgaaagaatattctattgcgtcaattgctggtgacggtattggtaaagaagttgtgcctgaagcacaaaaaatattagaagaaatttctcaacaacatcaatttaaattaaatattgaggattatgattttgcatcatgtgattattatgaaaagcatggaaaaatgatgccagatgattggaaagataaactaactaaacacgatgcaattttttttggtgcggttggtatgccagataaataccctgaccacataacactttggggatcgttgttaaaatttagaagagagtttgatcaatttattaacttaagacctgtaaaactttttgaaggggtaaatgctccattagctaataaaaagccaggtgatattgacatgataattgtaagagaaaatactgaaggtgaatactcatcagtcggtggaagaatgtatcagggaactgatagagaggtggttattcaagaaacaataatgtcaaaatatggaatagatagagttcaacaatttgcttttgaattagctaaaaaaagaaaaagaaaaaaattaacaagtgcaacaaaatcaaatggaatatcaattacaatgccttattgggatgaaagatttaatgaaaataaaaaaaattatcctgatgttgaaactgatcaataccatatcgatatattagctgctagatttgttttaagtcctgaacgttttgatgtgatagtcgcatcgaacctttttggggatattctatctgatctaggaccagcttgtactggaactattggaattgcaccatctggaaatattaatccaacaaataaatacccatcattatttgaacctgtgcatggatctgcaccagatattgcaggccaagggatag

SEQ ID NO: 208591 - DNA, 469 bp, Unknown
  Bacterial polypeptide expressing nucleotide sequence isolated from the Sargasso Sea
atgattaaagttaaaaaaagaaaaatattattgctacctggagatgggattggtccagaagtaattggagaagtaaaaaaaataattacttggttaaataataaaaaatctcttgattttgaaattgaagaggatcttgctggaggttcttcctatgacaaacatggaacacctataactgatgaagtgttttataaagcattagagagtgaagtagtaatgttaggtgcagttggtggccctaaatgggataatgtagaattttcaaaaaaacctgaaagagcattattaaagcttagaaaagaattaaagctttttgctaatttaagaccagcaatatgttttaaacagttggtcgattcttcaactcttaagccagaaattgtttcaggtttagatattatgattgttagagagctcacaggtggaaaatattttggtgagccaaagaggaataaaaccaattgaa

SEQ ID NO: 208592 - DNA, 816 bp, Unknown
  Bacterial polypeptide expressing nucleotide sequence isolated from the Sargasso Sea
cgactcgctcgagcgcgcgctgcgccccgagcaggcgatcctcgggctgcgcaagcacctcgagctgttcgcgaacttccgcccggcaatctgctatccgcagctcgtcgatgcgtcgccgctgaagcccgagctggtcgcgggcctcgacatcctgatcgtgcgcgaactgaacggcgacatctacttcggccagccgcgcggcgtgcgcgctgcaccggacggcctgtttgccggcgagcgcgaaggcttcgacacgatgcgctattcggaaccggaagtgcgccgcatcgcgcacgtcgcgttccaggcggcccgcaagcgcgcgaagaagctgctgtcggtcgacaaggcgaacgtgctcgagacgtcgcagttctggcgcgacatcatgatcgacgtgtcgaaggaatacgcggacgtcgagctgtcgcacatgtacgtcgacaacgcggcgatgcagctcgcgaaggcgccgaagcagttcgacgtgatcgtcacgggcaacatgttcggcgacatcctgtcggatgaagcgtcgatgctgacgggctcgatcggcatgctgccgtcggcgtcgctcgacaagaacaacaagggcctgtacgaaccgtcgcacggttcggcgccggacatcgcgggcaagggcatcgcgaacccgctggcgacgatcctgtcggccgcgatgatgctgcgctactcgctgaatcgcgcggagcaggccgatcgcatcgagcgcgcggtgaaaacggtgctcgaacagggctaccgcacgggcgacatcgcgacgccgggctgccggcaggtgggcacgac

SEQ ID NO: 208593 - DNA, 706 bp, Unknown
  Bacterial polypeptide expressing nucleotide sequence isolated from the Sargasso Sea
aatgatagtcagagaacttacaggtgggatttattttggagaaccaagagggattaaaccaatagataacggggagagaaaagggatcaatacccattcttatactagcaacgaaattattagggtagctagagttgcatttgatttagcaaaaaaaagatcaaacaaagttacatcatgcgaaaaatcgaatgtaatggaagcaggacaactttggaaagaagaagttcaggctctacatgataaagaatttaaagaagttgagttaaaacatatgctagctgacaattgttcaatgcaattgttaagaaatcccaaacaatttgatgttatcgtaacagacaacttatttggcgatatgctatcagaccaagcttcaatgttaacaggatcattaggtctattaccatctgcatcccttggtgccaaaaataaagatggagagatgagagcaatgtatgagcctatacacggttcagcacctgatattgctggaaaaggactagctaatccaattgcaactgtcctgagttttgccatggcattaaggtattccttagatttagataaagaagcagatgatttagaaaaagcagttcaagaagtgctaaatgacggccttagaacaaaagatatcgtatctaaaggaacaaaagaagtaacaacatctcaaatgggagatgcgttaatttcaaaattgcaataa

SEQ ID NO: 208594 - DNA, 469 bp, Unknown
  Bacterial polypeptide expressing nucleotide sequence isolated from the Sargasso Sea
aaagacaaagagtataaaaaaattgaactaaatcacatgttagcagacaattgtgcaatgcaattattaagaaatccaaaacaatttgatgtaattcttgctgataatttatttggagatatgttgtctgatgaagcagcaatgttaacaggttcacttggattactaccatctgcttctttaggtgataaagataaaaacggcaggacaagatcattgtatgaaccagtacatggttcggcaccagatattgctggaaaaaatatttctaatcctattgcaactattctaagcttttcaatggctttgaaatattcattaggtttagaaaaggagtccaatttattaaacaaagctgttgaaaaaaccttagagggcgggctaagaactccagatataatgtcaaaaggaaagaaaaaggtatcaacctcagatatgggtgatgcaattatatcaaatttaaattaaa

SEQ ID NO: 208595 - DNA, 748 bp, Unknown
  Bacterial polypeptide expressing nucleotide sequence isolated from the Sargasso Sea
agttgatgcttctactctaaagccagaaatagtttctggtctagacatcatgattgtaagagagctgaccggtggaatttactttggagaacctaggggtattaaacccatagataatggagagagaagaggaataaatactcatacatatacaacgagtgaaatagaaagagttgcaaaagtagcttttgatcttgctagaaaacgaaagaacaaagtaacatcatgtgaaaaatcaaatgttatggaggcaggattgctttggaaagaggatgttcaagctttacatgatagagaatataaagatgtagaattaagtcatatgttagctgataactgtgctatgcaattacttagaaatcctaaacaatttgatgttattgtaacagataatttatttggcgatatgctttcagatgaagcttccatgttaacaggatctcttggattattaccctcagcatcacttggtgcaaaaaataaagatggcgaaatgagagcaatgtatgaacctattcatggttcagctccggatatcgctggtaaaggtcttgcaaatcctattgctactatattaagttttgcaatggcattaagatattctcttgatttagataaagaagctgatttgttagaaaaatcagttcaggacgttttagacaagggtttaagaacaaaagatattatgtctcaaggcactaaggaagtatccacctcacaaatgggtgatgcaatcattgcctgttgc

SEQ ID NO: 208596 - DNA, 424 bp, Unknown
  Bacterial polypeptide expressing nucleotide sequence isolated from the Sargasso Sea
aaaactgatcagtaccatattgatattctttgtgctcattttgttttaaatccagataagtttgatgttattgtagcttctaatttgtttggtgatattttatcagatttgggtcctgcatgcactggcacaattggaatagctccatcaggtaatatcaatccagagaacaatcacccgtctttatttgaaccagttcacggctccgcgccggatatagcaggaaaagggattgccaacccaataggacaaatttgggcaggagctatgatgttaaatcattttggatttgacgatgcctcaaatgaaattttaaatgcaatcaaacattctctatctgagccaaaactcagaacaaaagaccttgctggaagtgctgacactcaaacagtaggaaaagctattgaacaaataattaaatagt

SEQ ID NO: 208597 - DNA, 730 bp, Unknown
  Bacterial polypeptide expressing nucleotide sequence isolated from the Sargasso Sea
ggtgttccctctcctctaactaataaaaattctgaagatatagatttttatatcgttagagaaaatacagaaggagaatattcatcaattggtggaaaaatgtttcctaatacagagagagagtttgtagttcaagaaacagttatgacaaagattggcgtggatagagttttaaaatttgcttttgatttagcaaaaaaaacaaaaaagaaacaccttacatcagctacaaaatctaatggcatttctattacaatgccttattgggatgaaagggttgaagaaatagctaaaaattatccagaggttgaatataataaatttcatattgatatactgtgtgcacattttgtcttgaatcctcagatgttcaatgtagtggtaggatctaatctttttggtgatattttatctgaccttggtccagcttgcacaggaacaataggaatagctccatcaggtaatattaatcctgaaaataattttccttctttatttgaacctgttcatggttctgctccagatatagctgggcaaaatattgcaaatcctattggacaaatttgggcaggtgctatgatgctagaccactttgggtataaagaagcacacgatgaaattctaaattcaataaaagatattttgtcaaaaaaagaatttagaactagagatcttggtggctctgcaagcactcgcaaatgtggagatgcaatagcagataatatttgaa

SEQ ID NO: 208598 - DNA, 718 bp, Unknown
  Bacterial polypeptide expressing nucleotide sequence isolated from the Sargasso Sea
agctaatcgtggtccgggcgatgttgatatgatgattgtgcgggaaaataccgaaggtgagtattcatcagtcggcgggcgcatgtttccgggcactgaccgagaatttgtaacacaacagactgtgatgacacgtattggcgttgaccgtgtgctgaaatttgcatttgaattggcgcaatcccgcccacgcaaacatcttacatcagcaaccaaatcaaacggcatttccattacaatgccctattgggacgagcgcgtagaagagatggcaaaatccttcaaagatgttagttgggacaaatatcatatcgatattttgaccgctaattttgtacttcatccagattggtttgatgttgttgtagcatcaaacttgtttggcgacatcctgtcagaccttggccccgcttgcactggaactattggggttgctccatcgggtaatatcaatcccgaacggctgtttccatcattatttgaaccagtacatggctcagcgcctgatattgcggggaaaggtattgccaacccggtaggccaaatatgggccggagcgatgatgctagaacatcttggcttcgttgaggctgcagcctgtattactgatgccattgatgccgctctgtcaacgccagaaatgcgtaccggtgatctgaacggtactgcaaacacggtgtcatgcggcaaagcaattgctaaaattgttgctggttaa

SEQ ID NO: 208599 - DNA, 862 bp, Unknown
  Bacterial polypeptide expressing nucleotide sequence isolated from the Sargasso Sea
aaaaaaagaaaaatattactattacctggagatggaatcggtccagaggtaattgaagaagttcgaaaaataataaactggtttaactctaaaaaatctctagatttcgaaattgatgaagaccttgctgggggttgttcttatgacaaacatggagcacccatcactgatgaagtgttttataaagcattagagagtgcggtcgttatgcttggagcagtaggtggaccaaaatgggataacgttgaattttcaaagaagccggaaagagcattattaaagttaagaaaagaattaaagttatttgcaaatctaagacctgcaatttgttttaaacagttagttgatgcttcaactttaaaaccagagattgtttcaggtttagatattatgattgtaagagaacttacaggtggaatatattttggtgaacctagggggattaagcctatagaaaatggtgaaagaaaaggaattaatactcacacttacactagcagtgaaataattagagtagccaaaattgctttcgatttagcaaaaaaaagatctaataaagttacatcctgtgaaaaatctaatgtgatggaggctggacaactttggagagaggaagttcaaactttacacgataaagattataaagatgtggagctaagtcatatgttggcagataattgctctatgcaacttttaagaaatcccaaacaatttgatgttatagtaactgataatttatttggagacatgttatctgatcaagcttcaatgttgactggttcattgggtcttttgccttcagcatctttaggagcaaaaaataaagaaggtgaaatgagggctatgtatgagcctattcatg

SEQ ID NO: 208600 - DNA, 875 bp, Unknown
  Bacterial polypeptide expressing nucleotide sequence isolated from the Sargasso Sea
gcctggagacggaattggacaagaggtaactgcttccgcgatgcaaatccttgactttattatcaaaaaattttccttgaatttttctattgatacacttgatgttggtggaactgcctacgagaaatttggttcaccaattccagaaaatgttttaaaaactgccaaaaaagtagatgctgttctatttggagctgtaggagctccgcagtgggatggtcttagttgggaagacagacctgaaaatgcactgttgacattaagaaaggagttaaacttgtttgcaaatttaagacctgcctttttatttaatgaactatcagatgcttccccattaaaggaaaaaattattgaaggtttagatatattgatagtcagagaactaactggtggcatatattttggtgagcccagaggagttgttaatgataagtctcctaattatgcgtttaatactatgatttataatgaagatgagattagaagaattgcaaaaattgcttttgaatcagcacaaaaaagaaaaggtagattgtgttctgtagaaaaagcaaatgttttagaagtttcaaaattttggagatcaattgttacagaaatgtctaaagaatatcctgacgttgagctttcacatcaacttgcagataatgcggcaatgcaattagttctcaacccaaatcaatttgatgtgattgttgctagtaacttgtttggagatattttgtctgacattgctgcgacacttactggatcaataggcatgcttccttctgcatcgcttgatagctcattcaagggcatgtatgagccttgtcatggaagtgcacctgatattgctaatcaagatcttgcaaatccattagcaatgattggct

SEQ ID NO: 208601 - DNA, 859 bp, Unknown
  Bacterial polypeptide expressing nucleotide sequence isolated from the Sargasso Sea
ccaggtgacggaatcggaaaagaagtaatacctgaaggcatcaaggtacttgaaaaagtttcaaaaaagtttgatatcaatttgcattttgagcaatttgaatttagttcatgtgattattttaaaaagcatggtcaaatgatgcctgatgattggaaatcaaaaatttctaatcatgacgcgatttattttggtgcagtaggttggccagaaactgttcctgatcatatatcactttggggatcattacttaagtttagaagagaatttgatcaatatattaacttaagacctgtaaagctaatgcctggcgtgccttccccactagcaaacaaaaaacctggtgatattgatttttatattgtgagggaaaatacagagggtgaatattcatcaattggtggaaaaatgtttccacagactgagagagaatttgttgttcaagaaacggttatgaccaagattggcgttgacagagtgttgaagtatgctttcaatttagctaaaaatactaaaaagaaacatcttacgtctgccacaaaatctaatggtatatccattacaatgccatattgggatgaaagagttgaagatatttctaaacaatatccggatgtaaattataacaagttccatattgatatactatgtgcacattttgtattaaaccctcaaatgtttaatgtagttgtaggttcaaacttgtttggagacattttatccgaccttggtccagcctgcacaggcacaataggtatcgcaccttcagggaatattaatcctgaaaataattccccttcattgtttgaaccggttcatggatcagcccctgacatagccgggaaaaatatcgcaaacc

SEQ ID NO: 208602 - DNA, 769 bp, Unknown
  Bacterial polypeptide expressing nucleotide sequence isolated from the Sargasso Sea
atgaagatcgcagtcttgccgggcgacggcatcggtcccgaaatcgtcaaggaggccgtgaaggtcctgaacgtgctcggcgaaaagttcgagctcgaagaagcgccggttggcggcgcgggctacgaagccaagggccacccgcttcccgattcgacgctggcgctggcgaaggaagccgacgcgatcctgttcggcgccgtcggcgactggaagtatgactcgctcgaacgcgcgctgcgccccgagcaggccattctcggtctgcgcaagcatctgcatctgttcgcgaacttccgtccggcaatctgctatccgcaactgacgggcgcttcgtcgttgaaagaagaaatcgtttcgggtctcgacatcctgatcgtgcgcgaactgaatggcgacatttacttcggcgcgccgcgtggcgtgcgttcgtcgccggacgggctgttcgaaggcgcgaaagaaggcttcgacacgatgcgttattcggaacccgaagtacgccgcatcgcgcacgtggcgtttcaggcggcgcaaaagcgtcagaaacggctgacgagcgtggacaaggccaatgtgctcgaaacgtcgcagttctggcgtgacgtgatgatcgatgtttcgaaggaatacgcggacgtcgagttgtcgcacatgtacgtcgacaatgccgcgatgcaattggtcaaggcgccgaaggcgtttgacgtagtcgtgaccggcaacatgttcggcgacattctctccgacgaagccgccatgctgacgg

SEQ ID NO: 208603 - DNA, 847 bp, Unknown
  Bacterial polypeptide expressing nucleotide sequence isolated from the Sargasso Sea
tataaatctttagagtctgatgcggttatattaggcgcgtgtggaggacctaaatgggataatttggaattttcaaaaaaacctgagagggctcttttaaaacttagaaaagaattaaagttatttgcaaatcttagaccagcaatttgcttcaaacaattagttgactcttcaactctcaaacctgaaatagtttctggtttggatataatgatagtcagagaattaaccggtggtatttattttggcgagccacgaggtattgagccaatggaaaataatcaaagaaagggagttaatactcacacgtacacaacttctgaaattcatagaatagctcgcgtagcctttgatttggcaaaaaaaagaagaaataaagttacctcttgtgaaaaatcaaatgtaatggaggcaggtgttttgtggagagaggaagttcaagtcataagagacaaagaatttaaaaaagttgaactaaaccacatgttggctgacaactgtgcgatgcagcttttaagatatccaaaacaatttgatgtaatactagctgacaatttgtttggagacatgttgtccgatgaagctgcaatgctaactggatcacttggtcttttgccttctgcttccttaggttcaaaagataaaaatggaagaataagatcgctctatgaaccagttcatgggtcagctccagatattgagggtaaaaatatagctaatccaatagctactattttaagtttatcaatggctctaagatattctttagatcttggaaaagaggccgatcaaatcgaaaaagcagttcaaagtgttcttgatgagggattaagaacaaaagatataa

SEQ ID NO: 208604 - DNA, 429 bp, Unknown
  Bacterial polypeptide expressing nucleotide sequence isolated from the Sargasso Sea
caatgcaattagttcgttatccgaaacagtttgatgttatattgacagacaatttatttggtgatcttttgagtgatactgctgctatgctgacaggatcattaggaatgttaccatcagcagctcttggacctgttaaggaaaatggaacaagagcagctatgtatgaacccgttcatggtagtgcaccagatattgcaggacaatctaaggccaatcctcttgctatgattatgagttttgcaatgatgttaaaatatagttttgatatgcaggaagatagtaagtcaattgaaaaggctgttcaaaatgtattattaaaaggattgagaacagcagatattaaagatggtgctgataaagttatttctactcaagatatgggagatgctgtaattgaagaactaaaaattttatctggaaactaaa

SEQ ID NO: 208605 - DNA, 280 bp, Unknown
  Bacterial polypeptide expressing nucleotide sequence isolated from the Sargasso Sea
aaaagataaaaatggaaatatgcgatcattatatgagccagttcatgggtcagcgcctgatatagcgggacaaggtatagcaaacccaatagcaacaattttgagctttgccatggctttaagatattcattagaccttgataaagaggcagatagtttagaaaaagccgttcaagatgtacttgatgaggggttaagaactaaagatattatttctaaaagaatgaaagaggtgtctacatcagtaatgggtgatgcgataatttcaaaattgcaataa

SEQ ID NO: 208606 - DNA, 488 bp, Unknown
  Bacterial polypeptide expressing nucleotide sequence isolated from the Sargasso Sea
gagaagaagtgcaagcttaaaagataaagaatataaaaaaatagatctgcatcatatgttggcagataattgcgctatgcagcttttgagaaacccaaaacaatttgatgtaatattagccgataatttatttggagacatgttgtcagatgaagcagcaatgttaacaggttctttaggtttattaccttctgcttctcttggatcaaaagataaaaatggcaaaattagatctctttatgagcctatacatggttctgcaccagatattgccggaaaaaatattgccaatcctattgcaacaatattaagcttgtctatggctttgagatattctttaaatcttgataaagaagcagttttattagatacagctgttcaacaggtgttggatgatggtttgagaacaaaagacattatgtcaaatggtaaaaaagaagtttccacaactgacatgggtgatgcaattatctcaaaattgaaataaa

SEQ ID NO: 208607 - DNA, 622 bp, Unknown
  Bacterial polypeptide expressing nucleotide sequence isolated from the Sargasso Sea
aatacccacacttatactacaaaagaaattgaaagagttgcgcgagtcgcttttgatctggctaaaaaaagagataataaagttacatcatgtgaaaaatccaatgtgatggaagcaggtcagctttggaaggaagaagttcaaattttacatgataaagaatataaagacgtagagctaactcacatgttagcagacaattgtgctatgcaattattaagaaacccaaagcaatttgatgtaatcgtaacagataatttatttggggatattttatcagatgaggctgcaatgttgacaggctctttaggattgttaccatctgcatcattaggaactaaagataaagatggaaatttaagatcgatgtatgagcctgtgcatggttcagctcccgatataactggaaaaggaattgcaaatcctattgctactatattaagtttttcaatggcattaaaatattctttaaatttagataaggaatctaaagctttagataacgctgtccaaaaggtgttagatgatggattgaggacaaaagatattatttctaagggaaaaaaagaagtttctacttctcagatgggagatgcgattattgcgtgtttgcaaaaataaa

SEQ ID NO: 208608 - DNA, 736 bp, Unknown
  Bacterial polypeptide expressing nucleotide sequence isolated from the Sargasso Sea
atgattaaagtaaaaaaaagaaaaatattattattaccaggagatggaattggtccagaagttattggagaagttagaaaaataattaattggtttaatgataaaaagtctcttgattttgaaatagattcagatcttgctggaggttgttcttttgacaaacacggaacgccaatcacagatgaggtattttataaagccctagaaagtgcggtgataatgctaggtgcagttggagggccaaaatgggatggcgttgaattttcaaaaaaacctgagagagctttattaaaattaagaaaagaattgaaattatttgccaacttaagacctgcaatatgttttgaacaattagttgatgcatcaacattaaaaccagaaatagtttctggtttagacataatgattgttagagagctaacaggtggaatatattttggtgaaccaagaggaatcaaacctatagaaaatggtgaaagaaaaggaattaatactcatacttatactagtagtgaaataataagggttgctagaaccgcttttgacttagctaaaaaaagatcaaataaagtcacatcttgcgaaaaatcaaatgttatggaagcaggacaactttggaaagaagaagttcaaacattacatgataaagaatataaggacgttgaattaaatcatatgcttgctgataattgttcgatgcagttattaagaaacccaaaacaattcgatgtaatag

SEQ ID NO: 208609 - DNA, 526 bp, Unknown
  Bacterial polypeptide expressing nucleotide sequence isolated from the Sargasso Sea
aatgattaaagttaaaaaaagaaaaattttattattacctggtgatggcataggaccagaagttgttgcagaagtaaaaaaaataattgaatggtttaataaaaaaaaatccttagattttgaaacagaagaaggtttagtaggtggagcttcatacgaaaaacataaaaaaccgattactgatgaagttttttacaaagctctagagtcggaggcagtaattttaggtgcggttggtggtccaaaatgggataatttagaattttcaaaaagaccagaaagagcacttttaaaattaagaaaagaattaaaactttttgctaatcttagacctgctatttgttttaaacaattagtagatgcttctagcttaaaaccagaaatagtttccggattagacataatgattgttagagaattgacaggcggaatatattttggagaacctaggggaataaaacctatagaaaacggagaaagaaaaggtattaatactcatagttatactagtagcgaaatcatcaga

SEQ ID NO: 208610 - DNA, 805 bp, Unknown
  Bacterial polypeptide expressing nucleotide sequence isolated from the Sargasso Sea
atgattaagaaaatattagtgttgcctggagacggaattggacaagaggtgactgcttctgcgatgcaaatccttgactttattatcaaaaaattttccttgaatttttctattgatacacttgatgtgggtggaactgcctacgagaaatttggttcaccaattccagaaaatgttttaaaaactgccaaaaaagcagatgctgttctatttggagctgtaggagctccgcagtgggatggtcttagttgggaagacagacctgaaaatgcattgttgacattaagaaaggagttaaacttgtttgcaaatttaagacctgcctttttatttaatgaactatcaaatgcttccccattaaaggaaaaaattattgaaggtctagatatattgatagttcgagagcttaccggtggcatatattttggtgagcctagaggagttgttgatgataagtctcctaattatgcgtttaatactatgatttataatgaagatgagattagaagaattgcaaaaattgcttttgaatcagcacaaaaaagaaaaggtagattatgttctgtagaaaaagctaatgttttagaagtttcaaaattttggagatcaattgttacagaaatgtctaaggactatcctgatgttgagctttcacatcaacttgcagataatgcagcaatgcagttagtacttaatcctaatcaatttgatgtaattgttgctagtaacttgtttggagatattttgtctgacattgctgcgacacttactggatcaataggtatgcttccttctgcatcgcttg

SEQ ID NO: 208611 - DNA, 914 bp, Unknown
  Bacterial polypeptide expressing nucleotide sequence isolated from the Sargasso Sea
gaaaaaaccattagagaaagcattagaagtcgatgcagttttgctaggtgcggtaggtggtccaaaatatgatagcttagattttaatttaaaacctgaaagagctcttctaaagctaagaaaagagctcgacctatatgctaatataagaccggcgcaatgttttgacgcacttgcctctttttcatcactcaaaagagaaattgtttctggactagatatagtaattgtaagggagttaacgtcaggaatatattttggcgaacctcgaggtataaaaaaaaatgatgctaatgaaagagttggtattaatactcaaagatatacagaaacagaaattaaaagggtagctattagtgcatttgagcttgcaaaaaaaaggagtggtaaagtatgttcaatggaaaaagcaaatgtaatggaaagtggtgttttgtggcgagacgtagttaccgaagtacacagaggttatcaagatatagaactaagtcatatgtatgctgataacggtgctatgcagttggtcagggacccgaaacaatttgatgttatcgtcacagataatttgtttggggatattttatcagactgtgcagctatgctcacaggcagcttaggaatgcttccttctgctagtcttgggaacataatggaaaatggaaaacctagagctatgtatgaacccgttcatgggtccgcgcctgatataacgggtcaattaaaagctaatccgatagcatgtatattgagtttttcaatggcattaagatattcctattcagaattagaaagcgctaaccttctcgaatcttgcatagaaaaagttttggcaaagggttaccgaactcctgatctaatgatgggagaagaaggtgagttagtgtccacagctggaatgacagataaaatactga

SEQ ID NO: 208612 - DNA, 949 bp, Unknown
  Bacterial polypeptide expressing nucleotide sequence isolated from the Sargasso Sea
taaacatggcacaccaatcactgatgaagttttttataaagctttagaaagtgctgttgttatgttgggcgcagttggtggccctaaatgggataacgtggagttttcaaaaaagccagagagagctcttttaaagttaagaaaagagttaaaattatttgcaaatttaagaccggcaatttgttttaaacaattagttgatgcatcaactttaaaacctgaaattgtttcaggcttagacataatgattgtaagagaattaacaggaggaatttattttggtgaaccaaggggaattaaaccaattgaaaatggtgaaagaaaaggagtaaatacccacacttatacaagcagtgaaataattagagtagcaagaattgcttttgatttagccaaaaaaagatctaataaagttacttcatgtgaaaaatcaaatgtaatggaagcaggtcaactttggaaagaagaagtacaaacactccatgacaaagaatacaaggatgtagaattaaatcatatgcttgctgataactgtgcaatgcaattattaaggaatccgaaacaatttgatgtgattgtaacagataacttattcggtgacatgttatctgatcaagcatctatgttaacaggttcattaggtcttttgccttcagcatcattaggagctaaaaataaagatggggagatgcgagcaatgtatgagcccatccatggatctgctccagatatagttggtaaaggcgtagcaaatcctatcgcaacaatattaagttttgctatggccttaaggtattctttagatttagataaagaagcggaagcattagaaaaagcagtacaggacgtactaaatgatggatttagaacaaaagacattttatctaaaggaatgaaagaagtatctacatctcaaatgggtgatgcgataatttcaaaattgcaataa

SEQ ID NO: 208613 - DNA, 655 bp, Unknown
  Bacterial polypeptide expressing nucleotide sequence isolated from the Sargasso Sea
gactcagagagtaaagccgttgacacccaagtttatacaacttctgagattgatagggtttcaagagttgcatttgatttagcaaaattaagaagaaataaggtttcatctgcagaaaaatcaaatgtaatggaaacaggattattttggagaaaaaccgtaactgaacttcataaaaaagaatatgcatcaatagatttagaacacatattagcagacaattgtgcaatgcagctagttcgttatcctaagcagtttgatgttattctaacagataatttatttggtgatctattaagtgatacagctgctatgttaacaggatctttaggaatgcttccctcagcagctctcggaccagttaaagaaaatggaacaagagcagctatgtatgaaccagttcatggtagtgcaccagatattgcaggacaatccaaagccaaccctcttgcaatgattatgagttttgcaatgatgttaaaatatagttttgatatgcaagaggacagcaagttaatagagaaggctgttcaaaatgtattattaaaaggattgagaacagcagatataaaagatagtgctgataaagttatttctactcaacagatgggagatgctgtgattgaagaactaaaaattttatctggaaattaaa

SEQ ID NO: 208614 - DNA, 616 bp, Unknown
  Bacterial polypeptide expressing nucleotide sequence isolated from the Sargasso Sea
tacccatatttacactacaagtgaaattcaaagattagcaagagttgcttttgatttagctaaaaaaagaaaaaataaagttacttcatgcgaaaaatcaaatgtaatggaggcaggtttactttggaaagaggaagttcaagaactacacgataaagagtttaaagatgtagaattaaatcatatgcttgcagataactgcgctatgcaactacttagaaacccgaaacaattcgacgtgatagtaacagataatttatttggagatatgctatctgatcaagcatctatgttaactggttctttaggtttgctgccatcagcatctttgggatcgaaaaataaagatggtaaaataagagcaatgtatgaacctatacatggttcagcacccgacatagctggacaaggagtagctaatccaattgcatcaatattaagttttgcaatggctttaagatattctcttgatttagataaagaagcagatgctctagaaaaagcagtccaagacgttttagatgaaggacttagaactaaagatattttatccaaaggaatgaaacaagtatcaacatctgaaatgggtaatgcgataatttcaaaattgcaataa

SEQ ID NO: 208615 - DNA, 343 bp, Unknown
  Bacterial polypeptide expressing nucleotide sequence isolated from the Sargasso Sea
atcagatgaggcagcaatgctgactggttctctaggactcctaccttcagcatcattaggagctaaagataaaaacggaaatatgagatcattatatgaaccagttcatggttctgcacctgatatagccggaaaagggatttcaaatccaattgcaacaattttaagttttgctatggctttaaaatattctttagatttagataaagagtcaaatactttagaaaaagcagttcaaagtgttttagatgaaggacttagaactaaagatatattatcaaaaggcacaaaagaagtttcaacttctgaaatgggcgatgcgataatttcaaaattgcaataa

SEQ ID NO: 208616 - DNA, 343 bp, Unknown
  Bacterial polypeptide expressing nucleotide sequence isolated from the Sargasso Sea
gtccgatgaagcggcaatgttgacaggttctcttggattattaccttcggcttctttaggtgataaagataaaaatggtagaacaagatcattgtatgaaccagtacacggttcagcaccagatattgctggaaaaaatatttcaaatccaattgcaacgatattgagtttttctatggctttaaaatactctttaagtttagaaaaggagtctacggcactaaataaagctgttgaaaagaccttagaggatggtctaagaactccagatataatgtcaaaagggaagaaaaaggtatcaacctcagagatgggtgatgcaattatatcaaatttaaattaa

SEQ ID NO: 208617 - DNA, 676 bp, Unknown
  Bacterial polypeptide expressing nucleotide sequence isolated from the Sargasso Sea
aatgattaaaattaaaaaaagaaaaattttactattaccaggggatggtatcggacctgaagtaattgctgaagtcaaaaaaataattcaatggtttaactcaaacaaatccttggattttgaaattgaccaagatttggttggaggtgctgcttatgataaacatggaactccaataactgatgaagctttttacaaggcacaagaaagcgctgcagtaatattaggtgctgttggtggaccaaaatgggataatattgatttttcaaaaaaaccagagagagccttattaaaattaagaaaagaattaaaattatttgcaaatttgagacctgcaatttgtttcaaacaacttgttgatgcctcaagtttaaagcctgaatttgtctctaatttagatattctttttgttagggaattaacgggtgggatttactttggtgaacctagagggataaaaccaattgataatggcgaaagaaaaggaataaatactcatgtctatactagtagtgaaattgagagagtagcccgtgttgcatttgatctagccagaaaaaggaacaataaagtcacttcctgtgaaaagtcgaatgtcatggaggcaggtcaattatggaaagaagaagttcaagcaattcatgaaaaagaatatagcgatgtagaattaaaacat

SEQ ID NO: 208618 - DNA, 595 bp, Unknown
  Bacterial polypeptide expressing nucleotide sequence isolated from the Sargasso Sea
tatgatttatagtaaaactgagattaggagaattggaaggattgcttatgaagctgctcaaaaaagaaataaaaacctttgctcagttgataaagcaaatgttttagaagtaagtgttttatggagagaagtaatttctgaactttcagaagaatatcctgatgtcgagttatctcacatgcttgtagataacgctgctatgcaattggtgagagacccaaaacaatttgacgttatcgtaacaggtaatttatttggcgatattttgtcagatattgcagcaatgttgactggctcaataggtatgttgccttcagcttcactaaattcgaagaataaaggaatgtatgaacctgttcatgggtcagcacctgatatctcaggtaaagggttagctaacccgatcgcagcaattttatctgtcgctatgatgttgaaatatagttttaatatgaatgaggcatcttcagcgattgagaactctatacaagaggttttgtctgaaggttatcgtacttatgatctggaaggaagtaagaaaaataaattatctacttctgagatgggtaataagatcattgaaaaaataaaataa

SEQ ID NO: 208619 - DNA, 606 bp, Unknown
  Bacterial polypeptide expressing nucleotide sequence isolated from the Sargasso Sea
catggaaactgaatttaacattgctgtttttccgggtgatggaattggacccgaagtgattgtcgaagcaataaaagttattaagataatcgaatctaaactacatctaaagatgaatttgaacgaagcattggttgggggagcggcttatgatgccacgggccatcctttgcctgattccacactggatctagctaaaaaggctgatgcggttttgttaggcgctgtgggaggtccaaaatgggaagcaatagatttctctttgcgccctgagcgggctttgctaggccttcggtctagtttggggctctatgctaatttgcgtcctgcgaagatctttcccgctttgttggatgcatcgactctgaagcctgaggtggtagacggattggaccttctggttgtccgcgaattgactggaggaatttattttggagagccacgtgggatcggcactaatgataaaggtctcaggcatgcgtttaatactcttgtttattcggaaccagaaatacagaggattggaaagatagcttttgatgtagcaaagaaaaggtgtggcaaggtttgctcagttgataaagctaatgttttggaagctaccgg

SEQ ID NO: 208620 - DNA, 571 bp, Unknown
  Bacterial polypeptide expressing nucleotide sequence isolated from the Sargasso Sea
atgattaaagtaaaaaaaagaaaaatacttttacttcctggtgatggtattggtccggaggtaataactgaggtaaaaaaaatcattaactggtttaatgataaaaaatctttagattttgaaattgatcaggatttagctggtggatgttcttatgataaacatggaacaccaattactgatgaagtattttataaggcattagaaagtgcagtggtaatcttaggtgctgtaggaggaccaaaatgggataaggtagaattttcaaaaaaaccagagagagctttattaaaattaagaaaggaattaaaactttttgcaaatttaagaccagcaatatgttttgaacaattagtagatgcttcaacgcttaagccggaagtcgtatctggtcttgatataatgattgtaagagaattaacaggtggaatatattttggtgaacctaggggcataaagccaattgaaaatggagaaaggaaaggaattaatactcacacatatactactaaagaaattgctagagtagcaagagtagcatttgatcttgcaaaaaaaagatctaacaaag

SEQ ID NO: 208621 - DNA, 766 bp, Unknown
  Bacterial polypeptide expressing nucleotide sequence isolated from the Sargasso Sea
ataaaagaaggtttagtaggaggtgcttcttttgataaatatggtacccctctttcagatgaaactttgtcagatgcagttgatgctgatgcaattttatttggtgcagtaggaagtccaaaatacgatggagttgaatttgataggagacctgaaaatggtcttctgagattaagaaaagaaatggatttgtttgctaatcttaggcctgccatggtttttcctgcacttgttgatgcttcttcccttaaacctaatattatctcaggcctagacattttaatattaagagagttaacaggaggtatttattttgcagaacctcgcggaatagaagaaattaatactcaaataaaaaaaggttatgacactaatctttatactaccccagagattgaaagaattggcagagttgcctttgatatggcaagagccagaaatgggaaagttacttcagtagaaaaagcaaatgtaatgatgtcaggtgttttctggagagaggtgatgactaatcttcataaaaaagaaggctcagatatattaattaaccatatgtatgctgataattgcgcaatgcaattagtgagaaatcctaagcaatttgatgttattgtcacagacaatttatttggagatattttatcggactgtgcagctatgttaactggttcactcggaatgcttccttcggccagtttaggatctgtagaccaaaatactggaaagagacaggctatgtatgagcccagttccatggatcagctcc

SEQ ID NO: 208622 - DNA, 801 bp, Unknown
  Bacterial polypeptide expressing nucleotide sequence isolated from the Sargasso Sea
aatgattaaaattaaaaaaagaaaatttttactattgccaggcgatggtattggtccagaagtagttggagaagttaaaaaaataatactttggtttaataaaaataagtcgttagattttgaaatagatgaggacctagctggaggtgtttcatatgataagcatggaaccccaattacagatgaggtattttataaggctctagaatctgaagcggtaatattaggggctgttggtggtcctaaatgggataatgtagaattttcaaaaaaaccagaaagagcattattaaaattaagaaaggaattaaagttatttgctaacttaagaccagcaatttgtttcaaacaattagttgaagcgtctacgcttaaacctgaaatcgtatctggattagatatcatgatagtaagagagcttaccggtggaatttactttggcgaaccaagaggaattaagccaattgataatggtgaaagaaaaggaattaatactcatacctatacttctagtgaaatacaaagagttgcaagagtagcttttgatttagctaaaaaaagacaaaacaaagttacatcttgtgaaaaatcaaatgtaatggaagctggcttattatggagagaagaagttcaagatttacatgataaagaatttaaagaagtagagttaaaccatatgttggctgacaattgtgcaatgcaacttcttagaaatccaaaacaatttgatgttatagttacagacaacttgttcggcgatatgctctctgaccaagcatctatgttaacaggttctcttgg

SEQ ID NO: 208623 - DNA, 787 bp, Unknown
  Bacterial polypeptide expressing nucleotide sequence isolated from the Sargasso Sea
aagattattaattggtttaataataaaaagtctttagattttgaaattgatagagatttaattggaggttctgctcttgataagcatggatcaccaattacagatgaagcattttataaatctttagaaagtgaagcagtgattttgggtgctgttggaggtccaaagtgggataaccttgaattttcaaaaaaaccagaaagagcattattgaagttaagaaaagaattaaaattatttgcaaaccttagaccggcaatttgttttaaacagttagtagatgcttcaagtttaaaacccgagctggtatcagacctagatatattatttgtaagagaattaacggggggcatttattttggagaacctagaggtataaaacctatagataatggtgaaagaaaaggaataaatacacatatttatactactagtgaaattcatagggttgcgcgtgttgcatttgatctagctaaaaaaagaagcaacaaagttacttcttgcgaaaaatcaaacgtgatggaagcaggtcaactttggaaagaagaagttcaatatattcatgaaaaagaatataatgatgttgaattaaatcatatgcttgcagataactgtgcaatgcaattagtaagaaatccaaaacaatttgatgtaattgttaccgataatcttttcggagatatgctttctgatgaagcagcaatgttaacaggatctttaggacttttaccttcagcttcactaggagctaaagataaaaacggtaatatgagatctttatatgaac

SEQ ID NO: 208624 - DNA, 606 bp, Unknown
  Bacterial polypeptide expressing nucleotide sequence isolated from the Sargasso Sea
atactactaaagagattaaaagaattgctaaagttgcatttgaattagcttctaaaagaaaaaataaagtaacatcttgtgaaaaatccaatgttatggaagcaggagttctttggagagaagaagttcaatctttaaaagataaagagtataaaaaaatagaattaaaccatatgttggcagataattgcgcaatgcaattattaagaaatccaaaacaatttgatgtaattcttgctgataatttatttggagatatgttatctgatgaagcagcaatgctaaccggttcgcttggactgctaccatcagcatcactcggagataaagataaaaatggaaaaacaagatctttatatgagcccgtgcatggttctgccccagatattgctggaaaaaatatttctaatccaattgctacaatattgagtttttcaatggctcttaagtactctttaggactagaaaaagattctaagatgttagataaagctgttgaaaaaaccctggaggacggtctgagaactccggatataatgtcaaaaggaaagaaaaaggtgtcaacctctgagatgggtgatgcaattatatcaaatttaaattaaa

SEQ ID NO: 208625 - DNA, 712 bp, Unknown
  Bacterial polypeptide expressing nucleotide sequence isolated from the Sargasso Sea
aatgattaaaattaaaaaaagaaaaattttattattaccaggggatggtatcggacccgaggtaattgctgaagtcaaaaaaataattgaatggttcaactcaaataaatcattggattttgaaattgaccaagatttggttggaggtgctgcttatgataaacatggaactccaataactgatgaagctttttacaaggcacaagaaagcgctgctgtaatattgggtgctgttggtggaccaaaatgggataatattgatttttcaaaaaaaccagagagagctctattaaaattaagaaaagaattaaaattatttgcaaatttgagacctgcaatttgttttaaacaactcgttgatgcctcaagtttaaagcctgaatttgtttctaatttagatattctttttgttagggaattaacgggtgggatttactttggtgaacctagagggataaaaccaattgataatggtgaaagaaaaggaattaatactcatgtctatactactagtgaaatcgagagagtagcccgtgttgcatttgatctagccagaaaaaggaataataaagttacttcctgtgaaaagtcgaatgtcatggaggcaggtcaattatggaaagaagaagtgcaagcaattcatgaaaaagaatatagtgatgtagaattaaaacatatgctagcagataactgtgcaatgcagttagttaga

SEQ ID NO: 208626 - DNA, 543 bp, Unknown
  Bacterial polypeptide expressing nucleotide sequence isolated from the Sargasso Sea
tatggaatttgaaattgccgtgttaccgggagacggtataggtcccgaagtaactcaagaaagcgtgaagatcctaaaggctatagagacccaatttggccataaatttaacctgagctacggagatataggcggtgtttcaatagataaatacggtaccgccctcactgatgaagtagaacaaattatttcaaagagtgatgcagtattattcggtgctgttggaggacctaaatgggacgaccccactgctgataccagacctgaagatggtctactaaaaatgcgcgctaacctcgaagcctttgcaaatataaggcctgtcaaagtataccctgaattagtcaataccagcgtattgaaacctgaagtcttagataacgtagacatagtggtagtccgagaattaactggtggattatattacgggcaaccaaaaggcagaggcacacaagatggtgccgaaacagccacagacactttattttatacagctcctgaaatcgaacgggttttacgagtaggatttgaactggcaaaaag

SEQ ID NO: 208627 - DNA, 902 bp, Unknown
  Bacterial polypeptide expressing nucleotide sequence isolated from the Sargasso Sea
tatgattaaagtaaaaaaaagaaaattcttattacttcctggagatggcattggtccagaagttataggtgaagtgaaaaaaattataaattggtttaactctaataaatcactcgattttgatatggaagaagccttagtgggaggagcatcttatgataaacacggaacacccatcactgatgaagtattttataaatctttagaatgtgaggctgtaattttaggtgcggtaggtggtccaaagtatgacaatttagatttttcaaaaagacctgaaagagcactacttaaacttagaaaagaattaaaattatttgcaaacctaagacctgctatttgctttaaacaactagttgaagcatctacacttaagtcagaagtggtatcaggtttagacataatgatagtaagagagctaacaggtggaatatattttggtgaaccaagagggattaaacctatagataatggagaacgaaaaggaattaatactcattcttatacttcatcagagattattagagttgccagagttgcattcgacttagcaaagaaaagaagtaataaagttacctcatgtgataaatcaaatgtaatggaagctggacaattgtggaaagaagaagttcaaaatttacatgatagtgaatataaatatgttgaattaaatcacatgcttgcagataattgtgcaatgcagcttttgagaaatcctaagcaatttgacgtaatagttacagataatctatttggagatatgttgtcagatgaggcatcaatgttaacaggatctttaggtttgttaccttccgcttcattaggagcaaaaaataaagacggtgaaatgagagcaatgtatgagccagtccacggatctgccccagatattgcaggaaaaa

SEQ ID NO: 208628 - DNA, 542 bp, Unknown
  Bacterial polypeptide expressing nucleotide sequence isolated from the Sargasso Sea
tgaaaaatcaaatgtaatggaaacaggaatgttttggaaaaatacagtttcaaatattcatcaaaaagattttcaagatgtagagctctttcacatgttagcagataattgtgcaatgcagcttgtgcgaaacccaaaacaattcgatgttattctaacagataatttatttggagatcttttaagtgatatagcagcaatgttaacaggctctctgggaatgttaccctctgcatcattaggtccagtagcagaaaatggttcaagagcagcaatgtatgaacctgttcatggtagtgcacctgatatcgctggacaaggtaaagctaatccacttgctatgattatgagttttgccatgatgttaaaatatagttttaacatgcaagaagatagtgtcttggttgaaaatgcagttcaagcagttctatcaaacggtttaagaactgctgatattagtgatggtgccgataagatcgtatcaactcaggatatgggtaaagctgttattgaagagcttaaaaatttattaggaagctaac

SEQ ID NO: 208629 - DNA, 847 bp, Unknown
  Bacterial polypeptide expressing nucleotide sequence isolated from the Sargasso Sea
tttcaaaaaaggccagaaagagctctattaaaattaagaaaagaattaaaattgtttgctaatctaagaccagcaatttgttttaaacaattggttgatgcgtctagtttaaaacccgaaattgtatcgggactagatataatgattgtgcgagagcttacaggaggtatttattttggtgaaccaagaggaataaaacctatagaaaatggtgaaagaaaaggaataaatactcatgtgtatacaagtagtgagataattagagttgcaaaggtagcatttgaacttgcgcaaaaaagaaataaaaaagttacttcttgtgaaaaatcaaatgttatggaagcgggtattctttggagagaagaagtgcaaaaagtaaaagatgaagaatatcaaaatatagaattaaatcacatgcttgcagataattgtgcaatgcagttattaagaaatccaaaacaatttgatgtaatagtaactgataatttatttggtgatattttgtctgatgaggctgcaatgttaacaggatcattaggattattaccttcggcgtctctaggtgcaaaagataaaaatggaaaaatgagatctatgtatgagccagtgcatggttctgctcctgatattgctggtataggaaaagctaatcctatagcaacaattttaagcttttctatggcccttaaatattcttttgatttagataaagaggcagacaatttagatcaagctgttcaaaaagttcttgatgaaggcttacgaactcaagatattttatctaaaggtaaaaaagaagtatctacctcgcaaatgggtgatgcaataatttcaaaacttaaatagt

SEQ ID NO: 208630 - DNA, 837 bp, Unknown
  Bacterial polypeptide expressing nucleotide sequence isolated from the Sargasso Sea
tgatgaatttgaatttgcttcatgtgattactataaaaagcacggaaaaatgattcctgatgattggaaagaaaaaattggatctcatgacgcaatctttttcggagctgtgggggatcctgcaaaagtccctgatcatataagtttatggggatctttattaaaatttagaagagaatttgatcaatatgtaaatttaagacctgtgaaattatttaatggagtaccttgtcctttagcaaacaaaaaaccaggcgatatagatatgctaatagtgagagaaaacaccgagggagaatattcctcagttggtggcagaatgtacaaggatacagaaagagaaattgccgttcaggaaacaataatgtctagacaaggtgttgatagagttcaaaaatatgcatttgaattagctaaatctaaagggagaaaaaaagtaactaatgcaacaaaatcaaatggtatttcaattacaatgccattttgggatgaaaggtttgatattatgaaaaaaaattatcctgaaatcaaaactgatcagtttcatattgatattttaacagctagatttgttttaacacctgagtggtttgatgtagttgtagcatcgaatttatttggagatattttatcagatctaggcccagcttgtaccggcaccataggtattgcagcatcgggaaacattaatcctgaaaataaatatccttcgttatttgagccagttcatggttcagcaccggatattgctggaaaaggtattgcaaatccaattgggcaaatatggtcaggtgcattaatgcttgatcacttaggagaaaaagaagctgcaaaatc

SEQ ID NO: 208631 - DNA, 823 bp, Unknown
  Bacterial polypeptide expressing nucleotide sequence isolated from the Sargasso Sea
attagagagtgcggtcgttatgttgggtgctgtcggaggtcctaaatgggataacgtagatttttctaaaaaaccagagagagcacttttaaaattaaggaaagagttaaaactttttgcaaatttaagacctgcaatctgttttaaacagttagttgatgcatcaactttgaaaccagaaattgtttctggtttagacataatgattgttagagagttaacaggaggaatttattttggagaaccaagaggaattaaaccaattgaaaatggtgaaagaaaaggaattaatactcatacttatacaagtagtgaaataacaagagtagcgagagttgcttttgatttagcaaaaaaaagatccaacaaagtaacttcttgtgaaaaatcgaatgttatggaagctggacaactatggaaagaggaagttcaagctcttcatgataaagagtacaaagatgtagaattaagtcatatgcttgcagataattgtgcaatgcaattattaagaaatccaaaacaatttgacgtaattgtaacagataatctttttggggatatgttatctgatcaagcatcaatgttaaccggatcattaggtcttttaccatcagcatcattaggagccaaaaacaaagatggagaaatgagagcgatgtatgaacctattcatggttcagctcctgatatagcaggtaaaagtgttgccaatcctatagctacaattttaagttttgctatggctttaagatattcattagatcttgataaagaagctgaagctttagaaaaagctgttcaaagtgtgttaaatgagggttta

SEQ ID NO: 208632 - DNA, 901 bp, Unknown
  Bacterial polypeptide expressing nucleotide sequence isolated from the Sargasso Sea
atggttcttcctggagatggagttggaccagaggttatgaaagaaactttgagagttgttgattggtttgcaaaaaataaaagtataagttttaacataaaagaaggtttagtaggaggtgcttcttttgataaatatggtacgcctatttcagacgaaactttatcagatgcagttgatgctgatgcaattttatttggtgcagtaggaagtccaaaatacgatggggttgaatttgagaagagacctgaaaatggtcttctgagattaagaaaagaaatggatttgtttgctaatcttaggcctgccatggtgtttcctgcacttgttgatgcttcttcccttaaacctaatattatctcaggcctagacattttaattttaagagagttaacaggaggtatttattttgcagagcctcgtggaatagaagaaattgatactcaaataaaaaaaggttatgacactaatctttatactaccccagagattgaaagaattggcagagttgcctttgatatggcaagagccagaaatgggaaagttacttctgtagaaaaagctaacgtaatgatgtcaggtgttttgtggagagaggtgataactaatcttcataaaaaagaaggctcagatatattaattaaccatatgtatgctgataattgcgcaatgcaattagtgagagatcctaagcaatttgatgttattgttacagacaatttatttggagatattttatctgactgcgcagctatgttaactggttcactcggaatgcttccttctgccagtttaggatctgtagaccaaaatactggaaagagacatgctatgtatgagccagttcatggatcagctccagatatagctggaaaagagttagcaaatccatggcagaact

SEQ ID NO: 208633 - DNA, 655 bp, Unknown
  Bacterial polypeptide expressing nucleotide sequence isolated from the Sargasso Sea
cattcagccaattgaaaacaatgaaaggaaaggaattaatactcattcatatacaacaaaagaaattaagaggatagcaagagtagcttttgagctagctaaaaaaagaaagaacaaagttacatcatgtgaaaaatcaaatgttatggaggccggagtattatggagagaagaggttgaaaatttaaaaaataaagaatttcaaaaagttgaacttgaacatatgctagctgataattgcgcaatgcagcttttaagaaacccaaaacaatttgatgtaattttggctgataatttattcggtgatatgttatctgatgaggctgcaatgctaacaggatcgcttggactattaccctcagcttctcttggtgaaaaagacaaagatggtaaaattagatctttgtatgagcctgttcatggatctgcacctgatatagctggtaaaaatattgcaaatccaatagcaactatattaagtttatctatggcacttcgatactcactggacctggataaagaagcagatttattagaaactgcagttcagagcgtcttagacgaggacataagaaccaaggatataatgtcccctggcaaaaaagaagtttcaacttctgatatgggtgatgcaattatttcaaaattgaaataa

SEQ ID NO: 208634 - DNA, 649 bp, Unknown
  Bacterial polypeptide expressing nucleotide sequence isolated from the Sargasso Sea
attttattattgccaggcgatggtattggtcctgaagttgtgggagaagtaaaaaaaataattgaatggtttaataaatataaatctttagactttagtttcgaggaagaacttataggcggagcttcaattgacaaaaataaaattcctataaccgatgaagttttttataagtccctagagtcagacgcagttattttaggagcttgtggaggacctaaatgggataatttagagttttctaaaagaccagaaagaggtcttttaaaattaagaaaagaattaaaattatttgctaatttaagaccagctatttgttttaaacaattggttaactcttcgtctttaaaaccagaaatagtatcaggtttagatattatgattgtaagggagttgaccggaggcatatactttggggagccaagaggaattgaaccgatagaaaataatcaacgaagaggcataaatactcactcttatactacgggtgaaatacaaagaattgctagagttgcttttgatttagctaagaaaagaaaaaataaagtaacttcttgtgaaaaatctaatgtgatggaagcaggagtactatggagagaagaagtgcaagctttaaaagataaagaatataaaaaaatagaactaaatc

SEQ ID NO: 208635 - DNA, 637 bp, Unknown
  Bacterial polypeptide expressing nucleotide sequence isolated from the Sargasso Sea
aatgaataagaaaatattagtgttacctggtgacggaattggacaagaggtaactgcttctacgatgcaaatcctcgactttattatcaaaaaattttccttgaatttttctatagataagcttgatgttggtggaactgcctacgagaaatttggttcaccaattccagaaaatgttttaacagctgccaaaaaagcagatgctgttctatttggagctgtaggagctccgcagtgggatggtcttagttgggaagacagaccagaaaatgctctgttgacattaagaaaggaattaaacttatttgcaaatttaagacctgcctttttatttaatgaactatcaaatgcttccccattaaaagaaaaaattattgaaggtttagatatattgatagttagagaactaactggcggtatatattttggtgagcctagaggagttgttgatgatcagtctccaaattatgcgtttaatactatgatttataatgaagatgagattagaagaattgcaaaaattgcttttgaatcagcacaaaaaagaaaaggtagattatgttctgtagaaaaagcaaatgttttagaagtttcaaaattttggagatcaattgttacagaaatgtctgaagaatat

SEQ ID NO: 208636 - DNA, 868 bp, Unknown
  Bacterial polypeptide expressing nucleotide sequence isolated from the Sargasso Sea
atgataaaagtaaaagatagaaaacttttacttcttccaggtgatggtatcggcccagaagtagtaagagaagttagaaaaattattgagtggtttaataaaaacaaatcattagactttaaaatcgaggaaggtcttgtaggtggggcctcatacgataaacataaaaatccaattacggatgaagttttttacaaagctcttgaaagtgaagcagtaattctaggcgctgttggagggcctaaatatgataacttggaattttctaagagaccagaaagagcgttattaaaattgagaaaagaattaaaattatttgctaatttgcgaccggcaatatgttttaaacaattagtagaagcatcttcacttaaaccagaaataatatccggtttaaacattatgatcgtaagagaacttaccggtggaatttattttggtgaaccaagaggtattgagccaatagaaaataatgagagaaaaggagttaatactcatacttatactactagtgaaattcagagagtagcaagggtagcttttgatttagcgaagaaaagaaaaaataaagtaacttcatgtgaaaaatctaatgtaatggaggcaggtattttatggagggaagaagttcaggcacttagagataaagaatataaaaagatagaattaagtcatatgttagctgataactgcgcaatgcaattattaagagatccaaagcagtttgatgtaattgttactgacaacttatttggagacattctttcagatgaagctgcgatgttaactgggtctttgggtttactaccctcagcctctttgggagctaaagataaaaatggtaaaattagatcgatgtatgaacctg

SEQ ID NO: 208637 - DNA, 494 bp, Unknown
  Bacterial polypeptide expressing nucleotide sequence isolated from the Sargasso Sea
aatgagcaagaaaatattagtattgcctggagacggaattggacaagaggtaactgcttccgcgatacaaatccttgactttattatcaaaaaattttccttgaatttttctattgatacacttgatgttggtggaactgcctacgagaaatttggttcaccaattccagaaaatgttttaaaaactgccaaaaaagcagatgctgttctatttggagctgtaggagctccgcagtgggatggtcttagttgggaagacagacctgaaaatgcactgttgacattaagaaaggagttaaacttgtttgcaaatttaagacctgcctttttatttaatgaactatcagatgcttccccattaaaggaaaaaattattgaaggtttagatatattgatagtcagagaactaactggtggcatatattttggtgagcccagaggagttgttgatgatcagtctccaaattatgcgtttaatactatgatttataatg

SEQ ID NO: 208638 - DNA, 497 bp, Unknown
  Bacterial polypeptide expressing nucleotide sequence isolated from the Sargasso Sea
tgaattatggaggaatataatgatagaaacttcaaaaaaatatcctgacgttgagttgtcccatatgtatgttgataatgcttcaatgcaacttattaaaaatccaaaacaatttgatgtaattgtaacaacaaatatgtttggagatattttgtcagactgcgcatcaatgcttactggatcactagggatgttgccctctgcttctattggaatttcacccgatggaaaaaacaaagcaatgtatgaacctgttcatggttcagcaccagacatttctggtaaaggaattgccaatcctttggcaatgattctaagtattgggatgatgtttaagttttcattcaatgaccaatctgtttcaaaacttataaataatgcagtaaagtctgttcttaaaaaaggctttagaaccaaagatatatttagtaatgacaaaatactcttatccacccaagaaatgggagataaagttttagaggaaataaaaaaatgaa

SEQ ID NO: 208639 - DNA, 809 bp, Unknown
  Bacterial polypeptide expressing nucleotide sequence isolated from the Sargasso Sea
aaaagagctaaaattatttgcaaatttaagaccagctatttgtttcaaacaactagttgatgcatcaactttaaaacctgaaattgtttctggtttggacattatgatcgtaagagaattaacaggaggaatttattttggtgaaccgaggggaattaagccaattgaaaacggtgaaagaaaaggaattaatactcacacttatacaagcagtgaaataattagggtagcaaggattgcttttgatttagctaaaaaaagatctaataaagttacttcgtgtgaaaaatcgaatgtaatggaagcaggtcaactttggaaagaagaagtacaaacacttcatgacaaggaatataaagatgtagaattaactcatatgcttgctgataattgtgcaatgcaattactaaggaatccaaaacaatttgatgtaattgtaacagataatttatttggtgatatgttatctgatcaagcatctatgctaacaggttcattaggccttttaccttcagcatcattaggagctaaaaataaagatggagaaatgagagcaatgtatgaacctattcatggatctgcaccagatattgcaggtaaaggtatagcaaatcccattgctacaattttaagttttgctatggctttgagatattctttagatttagataaagaatctgaggcactagaaaaagcagtacaagatgtcttaaacgatggattgagaacaaaagacattttatctgacggaatgaaagaagtatcaacatctcaaatgggcgatgcgataatttcaaaattgcaataat

SEQ ID NO: 208640 - DNA, 667 bp, Unknown
  Bacterial polypeptide expressing nucleotide sequence isolated from the Sargasso Sea
tttgttattaccaggggatggtatcggacctgaggtaattgctgaagtcaaaaaaataattgagtggttcaactcaaataaatccttggattttgaaatcgaccaagatttggttggaggtgctgcttatgataaacatggaactccaataactgatgaagctttttacaaggcacaagaaagcgctgcagtaatattgggtgctgttggtggaccaaaatgggataatatcgatttttcaaaaaaaccagagagagctctattaaaattaagaaaagaattaaaattatttgcaaatttgagacctgcaatttgttttaaacaactcgttgatgcttcaagtttaaagcctgaatttgtttctaatttagatattctttttgttagagaattaacaggtgggatttactttggtgaacctagagggataaaaccaattgataatggtgaaagaaaaggaattaatactcatgtctatactactggtgaaattgagagagtagcccgcgttgcatttgatctagctagaaaaaggaataataaagttacttcctgtgaaaagtcgaatgtcatggaggcaggtcaattatggaaagaagaagtgcaagcaattcacgaaaaagaatatagtgatgtagaattaaatcatatgctagcagataactgt

SEQ ID NO: 208641 - DNA, 511 bp, Unknown
  Bacterial polypeptide expressing nucleotide sequence isolated from the Sargasso Sea
tttgtggagagaagtgatgactaatcttcatgaaaaagaaggctcagatatatcaattaaccacatgtatgctgataattgcgctatgcaactagtaagagatcccaagcaatttgatgttattgttacagataatttatttggtgatattttatcggattgcgcagctatgttaaccggttcactgggaatgcttccttctgctagtttaggatctatcgaccaaaatacgggaaagagacatgccatgtatgaaccagttcacgggtcagctccagatatagctggaaaagagttagcaaatccattggcagaacttttaagcttgtcaatgttatttcgttattcatttgaaatgaaagaagaggcagatttaattgatgaggctgtttcaaaagctttagatgctggaccaagaacgcaagatataatggcttcagggagagtcaaagttggtacgaaaggtatgatggactcagttatcaacaagttagaggaattaacaaaataa

SEQ ID NO: 208642 - DNA, 650 bp, Unknown
  Bacterial polypeptide expressing nucleotide sequence isolated from the Sargasso Sea
acccattgataatggagaaagaaaaggaattaatacacatatatatacttcaagtgaaattgaaagagttgctcgtgttgcctttgatcttgctagaaaaagaagcaaaaaagttacatcttgtgaaaagtccaacgtaatggaagccggtcaactttggaaagaagaagttaaagctcttcacgaaaaggaatataaagatatcgaattaaaacatatgcttgctgataattgtgctatgcaattagtgagatatcctaaacagtttgatgttattgttaccgataatctttttggagatatgttatcagatgaagctgcaatgttaactggttccctagggctattaccttctgcatcgttaggagctaaagataaaaacggaaatatgagatcattatatgaaccagttcatggttctgcacctgatatagcaggaaaaggaattgcaaatccaattgcaacaattttaagttttgctatggcgttaaaatattctttagatttagataaagagtctaaaattttggaaaaagcagttcaaagtgttttagacgaaggattaagaactaaagatatattatcaaaaggcaaaaaagaagtttcaacatctgaaatgggtgatgcgataatttcaaaattgcaataat

SEQ ID NO: 208643 - DNA, 684 bp, Unknown
  Bacterial polypeptide expressing nucleotide sequence isolated from the Sargasso Sea
ttaaaattaagaaaagaattaaaattatttgctaaccttagaccagcaatttgttttaagcagctagttgatgcctcgagccttaaaccagaaattgtttccggtcttgatatcatgatagtaagagaactaacaggtggtatatattttggagaaccaagaggtattaaacctattgataacggcgagagaaaaggcgttaatactcacacttatacttcaagcgaaattgcaagagtagcaagagttgcttttgatttagcaaaaaaaagaaataataaagttacctcatgtgaaaaatcaaatgttatggaggcaggacaattatggagagaggaagtaacagaaactcacaaaaatgaatttaaagaagttaaattagaacatatgttggcagataattgtgctatgcaattattaagaaatccaaagcaatttgacgtgattgttacagataacttgtttggagatatactttctgatgaagcagctatgttaactggatctttaggtcttttgccatcagcatctttaggtgctaaagataaaaatggaaatattagatcaatgtatgagcctgttcatggttcagcaccagatatagctggtaaaaatcttgcaaatccaattgcaacaattttgagtttttctatggcgctaaggtattctttgaatttagaaaaa

SEQ ID NO: 208644 - DNA, 916 bp, Unknown
  Bacterial polypeptide expressing nucleotide sequence isolated from the Sargasso Sea
acagatgaagttttctataaggctttagaatccgaagcggtaattctgggtgcggtaggcggacctaaatgggatgacttagaattttctaaaaggccagaaagagctttgttaaaattaagaaaagaactaaagttatttgccaatcttagaccagctatatgttttaaacagctggtagatgcatccagcttaaagcctgaaattgtatcaggattggatattatgattgtaagagagcttaccggaggaatatattttggagaacccagaggaattaaacccatagagaatggagaaagaaaaggcattaatacacacgtgtatacaagtagtgaaatcatcagagttgctaaagtagcttttgaacttgctcaaaaaagaaataaaaaagttacatcttgtgaaaaatcaaatgttatggaagcaggtatactttggagagaagaagttcaaaagttaaaagatgcagaatattcaaatatagaattaaatcatatgcttgcagacaattgtgctatgcaacttttgagaaatccaaaacaattcgatgttattgtcacagataatttgtttggagatatattgtctgatgaagctgctatgctaaccggatcgttaggtttattgccttccgcttctttaggcgcaaaagacaaaaatggtaaaatgcgatcaatgtatgaaccggttcacggttcagctccagatattgccggaacagggaaagctaatcccatagcatcaattctaagcttctctatggctcttagatattctttggatttagataaggaagcagataatttggatctggcagtgcaaaaggttcttgacgatggtttaagaactaaagatattttatccaaaggcaaaaaggaagtatccacatcacagatggggggatgcaataatt

SEQ ID NO: 208645 - DNA, 538 bp, Unknown
  Bacterial polypeptide expressing nucleotide sequence isolated from the Sargasso Sea
aagcaattgggtctggaaaaagttacatctgcgacaaagtcaaacggtattattcacacgatgccatactgggatgagcgattttcagtcatagccgaagaatatccaatgttgaccactgaccaatatcatatcgatatattgacagctaattttgtattgcaccccgattggtttgatgtcgtggtcggctcaaatttatttggggatatcttgtcagaccttggaccagctgtagcagggtcaattgctattgcgccttcagcgaatattaatccagacggagacttaccatctatgtttgagcctgtgcatggatcagcgcctgacatagcggggaaagggatagcaaaccccattggccaaatttggtcgggttctatgatgctcgaacatcatggctataaagaggcagcagatgaaattgtccgggctattgaagaagtaatatcggagggtgggccaaagacgccagatcttggtggacaagcaaataccaaggaactcggtcaggctattgcagatagtattcgttagc

SEQ ID NO: 208646 - DNA, 856 bp, Unknown
  Bacterial polypeptide expressing nucleotide sequence isolated from the Sargasso Sea
atgagtaaaaaaatattaatacttccaggtgatggtatcggacaggaagtaacgtcctcggctatacaaattcttgaattcattatagataaatttaatcttgatttttctacaaaaattcttgatgttggaggaactgcctatgaaaaatttggttctccaattcccgaagatgttttagtatctgcaaaagaggcagatgcaattctttttggtgctgtaggagcaccgcaatgggataatttgagctgggaagatcgaccagaaaatgcattattgactttgagaaaagaattaaacctgtttgcaaatttgagacctgcgtttttatttgaagaactatcgaatgcatctcctttaaaagaaaaaattattcaaggattagatatcttaattgtaagagaacttactggaggaatatattttggtgaacctcgcggtgttgtaaaagataaaaatccaaactatgcattcaatacaatggtttataacgaagatgagatcagaagaattgcaaaaattgcatttgaatcagctcaaaaaagaaagggtagattatgttctgtagaaaaggcaaacgtattagaggtatcaaagttttggagatcaattgttacagagatgtcagaggattatcctgatgttgaattgtctcatcaacttgcagataacgcagccatgcaattagttttagatcctaatcaatttgatgtgatagttgcaagcaatttatttggagatattttatctgatattgcagccacattaactggatctataggcatgcttccttcagcttcattagatagctcctttaaagggatgtacgaaccatgtcatgggcagtgctcctgac

SEQ ID NO: 208647 - DNA, 479 bp, Unknown
  Bacterial polypeptide expressing nucleotide sequence isolated from the Sargasso Sea
aatgattaaagttaaaagaagaaaaatcttattattgccaggagatggaattgggcctgaagttatagctgaagtaaaaaaaattattcaatggtttaataaaaaaaaatctttagattttgagacagaagaggatttagttggtggagcttcatatgaaaaacataaaaaaccaattacagatgaagttttttacaaagctttagagtcagaggctgtaattttgggagctgtaggaggacctaaatgggataatttggaattttcaaaaagaccagaaagggctcttctaaaattaagaaaagaattaaaactatttgctaatctcagaccagctatttgtttcaaacaacttgtagaagcatcaagtttaaaacctgaaatagtttcaggcctagatataatgattgttagagagctaacgggaggaatatattttggtgaaccgcgaggaattaaacctatagaaaatggtgagc

SEQ ID NO: 208648 - DNA, 529 bp, Unknown
  Bacterial polypeptide expressing nucleotide sequence isolated from the Sargasso Sea
tatgagttatcaaatagcagttttgtcgggtgatggtattggtcctgaagtgatggcagaagcacgtaaagtgcttagtgctgttgaaacccgttttggacttgatattcaatacaccgaatatgatgttggcggtattgccattgataaccatggttgccctttacctgatgcaacactaaaaggttgtgaagccgcagatgcgattttatttggtagtgtaggcggccctaaatgggaacatttacctccaaacgatcagcccgagcgcggagcattgttgccactgcgtggtcattttgagctattttgtaatttacgcccagcaaaattacatgacggcttagaacatatgtcaccactacgtagcgacatatcagcacgcgggtttgatgtgttgtgtgtacgtgagttaaccggtggtatctactttggtaaacctaaagggcgccaaggtgaaggtgaaagcgaagaagcgtttgataccatgcgttatagtcgccgcgagatcagccgtattgcacgtatt

SEQ ID NO: 208649 - DNA, 507 bp, Unknown
  Bacterial polypeptide expressing nucleotide sequence isolated from the Sargasso Sea
ggagaaaaacagtaactgaacttcataaaaaagaatattcatcagtagatttagaacatatattagcagataatgtgcaaatgcaattagttcgttatccgaaacagtttgatgttattttgacagacaatttatttggtgatcttttgagtgatactgctgctatgctgacaggatcattaggaatgcttccatcagcagctcttggacctgttaaggaaaatggaacaagagcagctatgtatgaacctgttcatggtagtgcaccagatattgcaggacaatctaaggccaatcctcttgcaatgattatgagttttgcaatgatgttaaaatatagttttgatatgcacgaagatagtcaattggttgagaaggcagtacagaatgttttattaaaaggtttaagaacagctgatattaaagatggtgcagaaaaaatcatttctactcaagaaatgggtaatgcagttattcaagaattaaaaattttaactggaaattaaa

SEQ ID NO: 208650 - DNA, 634 bp, Unknown
  Bacterial polypeptide expressing nucleotide sequence isolated from the Sargasso Sea
atgcccagaactatcctgatgcttcccggcgacggtatcggtccggaaattgtcgctgaagcggaaaaagtgctcaacaagatcaatgatcagttcaatctcggcctgaatttcgagtccggcctcgtgggcggtgcggcgattgatgaaaccgacacaccgctgccagatgaaaccctcgaaaaggccaccagagccgacgcgatccttctgggtgccgtgggcggtcctcagtgggacagtctgccgatggccaagcgcccggagaaggggttgctggggttgcgctctaacctggagctgtttgcaaacctgcgcccggcaattctttatccgcaactggcctccgcctcttctctgaagccggaagttgtttccgggctggatatcatgattgtccgtgaactgactggcggcatctattttggtcagccgcgcggtgtgcgcgaacttgagagcggagagcgccagggttacaacacctacgcctacacagaatcggaaattcgtcgtatcgggcgggtggcttttgaggccgcgcagcagcggggcaaaaagctgtgctccgtggacaaagccaacgtgctggaagtgactgttctatggcgggaaatcatgaacgatcttcgcccgg

SEQ ID NO: 208651 - DNA, 883 bp, Unknown
  Bacterial polypeptide expressing nucleotide sequence isolated from the Sargasso Sea
aatgagtaataaaaaaatactagttttgccaggggatggaattggcaatgaagttatggcagaggttcttaaaatcattgattggttatcaaaaacaagatcaatgtcttttgatatatctgagcgtttagttggtggtacagcctacgataaagaaggtaactctataagtgatgaaacaatgcaagaagcattggactcagatgctgttttgtttggtgcggttggaggccctcaatgggataatgttgaaagagaaaaacgcccagaggcagctttattaagattaagaaaagaattggatttatttgctaatctaagacctgctgtagtatttgatgcactagctgaagcatcacctttaaaacttaacttagttaaaggacttgatattcttattttaagagaattaacaagtggtgtttattttggacaaccacgtggggtgtcaaagataaatgataatgaagaaaaagcaattgatacccaaagttatactacttctgaaattacaagaataacacgtgtagcttttgatctagcaaaattacgagataataaagttacttccgttgaaaaatcaaatgtcatggaaacaggaatgttttggaaaaatacagtttcaaatattcatcaaaaagattttcaagatgtggagctctttcatatgttagctgataattgtgcaatgcaactagttagaaacccaaaacaatttgatgttattttaacagataacttatttggagatcttctaagtgatatagctgcaatgttaactggctctttgggaatgctgccctcagcatcattaggtccagtagcagaaaatggttcaagagcagcaatgtatgaacctgttcatggaagtgcacctgatatg

SEQ ID NO: 208652 - DNA, 538 bp, Unknown
  Bacterial polypeptide expressing nucleotide sequence isolated from the Sargasso Sea
agaccagcaatatgcttttcttcactttcagattcttcatcattaaaaaaagaaatcgttgaggatctcgatattctaattgttagagaacttacaggaggtgtttattttggagaacctcgtggcatagaggaattagagaatgggaatagaagaggtactaatactcaggtatatgaaacttgggaaattcaaaggattgctgaagtggcatttgagttggctagaaaaagaaaaaataaagttacttcgtctgaaaaaagaaatgtcatggaatcaggattgctttggtatgaagaagtaaaaaaaattcatcaagaaaaatataatgatgttgaattagatcatatgcttgcagataattgtggaatgcaattagtaagatggccaaaacagtttgatgtgattgttacagataatctttttggtgacatgttatctgatgttgctgcaatgttaactggctctcttggcatgcttccgtcagcttcacttggtaaagctgtgaatggattatttgaatcagctcctatatgag

SEQ ID NO: 208653 - DNA, 436 bp, Unknown
  Bacterial polypeptide expressing nucleotide sequence isolated from the Sargasso Sea
atgctagcagataattgtgctatgcagttactaagaatccccaagcagtttgatgtaatagtaactgataatctttttggagatatgctttcagatgaagctgctatgctacagggttcactggatttattaccatctgcttcacttggcgcaaaggacaagaatggtaatttaagatctatgtatgagccagtacatggatcagcacctgacattgcaggaaaaggaatagctaacccgattgcaacagttttaagcttttctatggctttaagatactctctaaatttagaaaaagaagcagatgatctagataaagctgtacaaaaagttttagatgatggtttaagaactaaagatattttatctaaaggcaataaagaagtttctaccaaagatatgggaaatgctattattgcgtgtttgcaaaaataac

SEQ ID NO: 208654 - DNA, 856 bp, Unknown
  Bacterial polypeptide expressing nucleotide sequence isolated from the Sargasso Sea
aaccaaccagagcgaggtttgcttcgcctaaggaaggagatggatttatttgccaacttgagacctgcacagtgttttgacgctttggcagatttttcctctctcaaacgcgatatagtttctggattagatattatgattgtacgagaattaacatcaggaatctattttggagaacccagaggaatagaggggttcggagataatagagtgggatacaatactaatagatatactactgaagaaatccgtagagttgcgcgcgcagcatttgatctagctaaaaagagagacaacaaagtttgctcgatggaaaaagcaaacgtaatggaaagcggtatcttgtggagagatgaagtgcgttttgtgcacgaaaaagaatatccagaggtggaattgtcacatatgtatgccgatgcaggtgctatgcaactggtaagatggccaaagcaatttgatgttattgtaactgacaatctttttggagatatcttgtctgattgtgcagcaatgctcacaggcagtttaggaatgctgccttctgcaagtttaggaagccttatggagtctggtaggccgaaggcgatgtatgagcccgttcacggttctgctccagatatcgctggttcgggtcaagcaaacccgtgcgcttccatattgagttttgctatggcacttcgttattcctttaatcgtgggggcgacgcagatttaattgaaaaggctgtagaaaatgtactttctcgtggcttaaggacaaaggatttaattcagatgtccggtggtacgccggtgtcaactagtcagatgggtgatgcgatactagatagccttgaagaattccataaaagctgag

SEQ ID NO: 208655 - DNA, 418 bp, Unknown
  Bacterial polypeptide expressing nucleotide sequence isolated from the Sargasso Sea
atgcttgtagataatgccgctatgcaattggtgagagacccacaacaatttgatgttatcgtaacaggtaatttatttggtgatattttgtcagatattgcagcgatgttaactggctcaataggtatgttgccttcggcttcattaaattcggagaataaaggaatgtatgaacctgttcatgggtcagcacctgatatctcaggtaaagagatagctaacccgatcgcagcaattttatctgtcgctatgatgttgaaatatagttttaatatgaatgaggcatcttcagcgattgagaactcaatagaagaggttttgtctgaaggttatcgtacttatgatctggaaggaagtaagaaaaataaactatctacttctgaaatgggtaataagatcattgaaaaaataaaataag

SEQ ID NO: 208656 - DNA, 856 bp, Unknown
  Bacterial polypeptide expressing nucleotide sequence isolated from the Sargasso Sea
acttgatcataatcttaaaccagaaaaaggacttctaaccctaagaaaagaattagggacatttgccaaccttagaccaggaaaagtttttcctgcattagctaatgcctcatcacttaaaagcgaagtacttaagggtactgatatttttgtagtaagagaattaactgggggaatctattttggagaacctagatattcaaaaattattgacaaaaagcgggtggcatcaaaccctttaatttataatgaagatgaaatagctagggtagctcatgaagcatttaaaatctcattaaaaagaaataagaaagtcacatcgcttgataaagctaatgtgttagaagtaatgcagctttggagagatgtagtcactgaggtccatgaaaaatattataaagatgaggttgaattagaacatctttatatcgacaatgcagccatgcaggttatcaaaagaccctctacttttgatgttattcttgcaagtaatttatttggtgacataattagcgacgaagttgcagagctaactggctcattaggcatgttaccatcagcttctactggaaatacgaagggcatatatgaacctgttcatggaagtgcacctgatatagctggaaaaaacatagcaaatccaattgcagcaatattatcccttggcatgatgtttaaatatagttttaatgaagataaaatttcagatttaattgatcattcaatatcggaagttctcaatgctggccatagaactaaggatattgcaaagcaaaatgatactacattgtcatgcgacgagatgggagacctaatattaggggaaataaaaaaatcacaatctaattttatttaa

SEQ ID NO: 208657 - DNA, 460 bp, Unknown
  Bacterial polypeptide expressing nucleotide sequence isolated from the Sargasso Sea
atgattaaagtaaaaaaaagaaaaatacttttacttcctggtgatggtattggtccagaggtaataactgaggtaaaaaaaattattaactggtttaatgataaaaaatctttagattttgaaattgatcaggagctagttggtggttgttcttatgataaacatggcaccccaatcactgatgaggttttttataaagcactagaaagtgaagtaattatgcttggagcagttggtggtcctacatgggataacctagaattttccaaaaaaccagaaagagcattattaaaacttaggaaagaattaaagctttttgcaaacttaaggcctgcaatttgttttaaacaattagtcgatgcttcaacccttaagccagaggtagtttcaggactagatataatgatagtaagagagttaacgggtggaatatattttggtgaacctagaggaataaagc

SEQ ID NO: 208658 - DNA, 415 bp, Unknown
  Bacterial polypeptide expressing nucleotide sequence isolated from the Sargasso Sea
aatgattaaaattaaaaaaagaaaaattttattattaccaggggatggtatcggacctgaggtaattgctgaagttaaaaaaataattgaatggtttaactcaaataaatccttggattttgaaattgaccaagatttggttggaggtgctgcttatgataaacatggaatcccaataactgatgaagctttttacaaggctcaagaaagcgctgcagtaatattaggtgctgttggcggaccaaaatgggataatattgatttttcaaaaaaaccagagagagctctattaaaattaagaaaagaattaaaattatttgcaaatttaagacctgcaatttgtttcaaacaacttgttgatgcctcaagtttaaagcctgaatttgtttctaatttagacattctttttgtcagg

SEQ ID NO: 208659 - DNA, 394 bp, Unknown
  Bacterial polypeptide expressing nucleotide sequence isolated from the Sargasso Sea
cctgctcagtttgatgttttgttaacaactaatatgtttggtgacattttgtctgatttagcatccgagctttctgggtctttgggtttagcagggtctataaatgttggggatagaatccccatggcccaggctcagcatggatctgcgccagatatagctggcaagggaatggctaaccctatatctatgatattatcagtaggcatgatgtttggctggttagggattaaaaaaaataatgatgtttttataaaagccaatgattttcttcatcaagcaatagatgaacacttaatggaacaacattgtcttacacctgatttgggaggaaaggctacaacccaagaggttactagttcaatcctaactaaattagatcttttgttttagg

SEQ ID NO: 208660 - DNA, 931 bp, Unknown
  Bacterial polypeptide expressing nucleotide sequence isolated from the Sargasso Sea
catggtactcctataactgatgaagttttttataaggctttagattgtgaagctgtaattctgggtgcagtaggaggcccgaaatgggacgatgtagaattttcaaaaaagcctgaaagagctttattaaaattaagaaaagaacttaaactgtttgctaatttaagacctgcaatatgttttaagcaattagtagatgcatcaactcttaaacctgaaattgtttcaggattagatattatgattgttcgagaacttacgggtggaatttattttggtgagcctagaggaattaaaccaattgataatggtgaacgaaaaggaattaatactcattcttatactacaaatgaaattaaaagagttgcaagagttgcttttgatttagctaaaaaaagaaaaaataaagttacatcatgcgaaaaatcaaatgtaatggaggcaggtttactttggaaagaagaagttcaagaacttcatgataaagagtttaaagatgtagaattaaatcatatgctagcagataactgtgctatgcaactacttagaaacccaaaacaatttgatgtgatagtaacagataatttatttggagacatgttgtcagaccaagcatctatgttaactggttctttaggtttattaccttctgcatctttgggggcaaaaaataaagaaggtagaataagagcaatgtacgaaccaatacacggttcagcgccagatatagctggacaaggtgtagccaatccaattgctacaatattgagctttgcaatggctttaagatattcactagatttagataaggaatcagatgctttagaaaaagcggttcaaagcgttttagatgaaggacttagaactaaagatattttatcaaaaggaatgaaactagtatcaacttctgaaatgggtgatgcgataattt

SEQ ID NO: 208661 - DNA, 955 bp, Unknown
  Bacterial polypeptide expressing nucleotide sequence isolated from the Sargasso Sea
cggcgcgggctacgaggcgagcggccatccgctgcccgacgcgacgctgaagctcgcgaaggaagccgatgcgatcctgttcggcgccgtgggcgactggaagtacgactcgctcgagcgcgcgctgcgccccgagcaggcgatcctcgggctgcgcaagcacctcgagctgttcgcgaacttccgcccggcaatctgctatccgcagctcgtcgatgcgtcgccgctgaagcccgagctggtcgcgggcctcgacatcctgatcgtgcgcgaactgaacggcgacatctacttcggccagccgcgcggcgtgcgcgctgcaccggacggcctgtttgccggcgagcgcgaaggcttcgacacgatgcgctattcggaaccggaagtgcgccgcatcgcgcacgtcgcgttccaggcggcccgcaagcgcgcgaagaagctgctgtcggtcgacaaggcgaacgtgctcgagacgtcgcagttctggcgcgacatcatgatcgacgtgtcgaaggaatacgcggacgtcgagctgtcgcacatgtacgtcgacaacgcggcgatgcagctcgcgaaggcgccgaagcagttcgacgtgatcgtcacgggcaacatgttcggcgacatcctgtcggatgaagcgtcgatgctgacgggctcgatcggcatgctgccgtcggcgtcgctcgacaagaacaacaagggcctgtacgaaccgtcgcacggttcggcgccggacatcgcgggcaagggcatcgcgaacccgctggcgacgatcctgtcggccgcgatgatgctgcgctactcgctgaatcgcgcggagcaggccgatcgcatcgagcgcgcggtgaaaacggtgctcgaacagggctaccgcacgggcgacatcgcgacgccgggctgccggcaggtgggcacgacggcgatgggcgacgcggtggtcgcggcgctgtaa

SEQ ID NO: 208662 - DNA, 253 bp, Unknown
  Bacterial polypeptide expressing nucleotide sequence isolated from the Sargasso Sea
catgtatgagcccattcatggttcagccccagatattgctggcaaaggaatagcaaatcctattgcctctatattgagttttgctatggctttaaaatattctttagagctagataaagaagcagaagccttagaaaaagcagtgcaagacgtactaaatgatggcttaagaacaaaagatattctatcaaatggaatgaaaaaagtttcaacttctcaaatgggcgatgcaataatttcaaaattgcaataa

SEQ ID NO: 208663 - DNA, 828 bp, Unknown
  Bacterial polypeptide expressing nucleotide sequence isolated from the Sargasso Sea
ataatccatctctttctgtaagacctgaagaggggttattaagaatgaggaaaaaattaggattatatgctaatcttagacctacattcactttcgaatctcttcttgaaatgtcacctattaagaaaagtatagttaagggaactgacctaatttttgtaagagaattaattgggggtatttattttggaaaaagaggtaaaagtccagaaaatgattatgcatttgatacctgtgaatacaaaaaagaagaagttgaaagaattgcaaaaattggttttgagttagctagaaaaagatctaaaaagttatgctgtattgataaagctaatgtattagaaacatctcgtttatggaggaagacggttcaatcaatggaaagaaattacaaagatgttgaggttagttatgaatttgttgatgctgttgcaatgagattaattcattctccaaataaatatgatgttttaattacaagtaatttatttggggatattttaactgatgaagcatctgtaatttcaggatcaatgggtttaatgccttcagcctcaataggatcacaaacatcagtatatgaaccaatacatggatcttttccagaggcaaagggtaaaaatattgctaatcctcttgcaacaattttatctgcttcaatgatgtttgaacgcagctttaatttaactaaagaagctgaaatgattagaaaaatagtttctgattcaatagaaaaaaagatcgtgaccgaagatttagctgaaaataataaatcattctcaactagccaggttggtgattggatcaaagaaaggatagaaaaagaataaa

SEQ ID NO: 208664 - DNA, 807 bp, Unknown
  Bacterial polypeptide expressing nucleotide sequence isolated from the Sargasso Sea
aatggccaataagactaggaaaattctacttttgcctggtgatggtattggcccagaggtagtttcagaagttaggaaaatacttgagtggatgaacaaaacaaagtccttagattttgttttaagccaagaattaattggtggcgcatctattgatgctaataaagtcccaataaccgatgaagttttttttaaatcgttagagtccgatgcagtaatattaggtgcttgtggtggacctaaatgggataatcttgaattttcaaaaaaacctgagagagctcttttaaaacttaggaaagaattaaagttatttgcaaacttaagaccagctatttgttttaaacaattagtagattcttcaacgctaaaaccagaaatagtttcagggttagatattatgattgtaagagaattaactggcggtatttattttggggaacctcgaggaatagagccaatggaaaacaatcaaagaaaaggtgtaaatactcactcttatactacttcagagattcatagaatagctcgtgttgcttttgatttagcaaaaaaaagaaaaaataaagttacatcctgcgaaaaatcaaatgtaatggaagcaggtattttgtggagagaagaagtacaggtgataaaagataaagaatttaaaaacgttgaattaaatcatatgttagctgacaactgtgcgatgcaactattaagatatccaaaacaatttgatgtcatattagcggataacttatttggagacatgttatctgatgaagcggcgatgctaacaggttcactagggcttttacc

SEQ ID NO: 208665 - DNA, 712 bp, Unknown
  Bacterial polypeptide expressing nucleotide sequence isolated from the Sargasso Sea
agagaattaacaagtggagtatactttggtcaaccaagaggaatttcaaaaattagcgatacagagagtaaagcaattgacactcaagtttatactacttctgaaatagatagagtttcaagagttgcatttgatttagcaaaagttagaagaaataaactctcatctgctgagaaatcaaatgttatggaaacaggattattttggagaaaaacagttactgaacttcataaaaaagaatattcatcagtaaatttagaacatatattagcagacaattgtgcaatgcaattagttcgttatccgaagcagtttgatgttatactaacagataatttatttggcgatcttttgagtgatactgctgctatgctaactggatccttaggaatgctcccatcagcagctcttggatctattaaagaaaatggaacaagagcagctatgtatgagcctgttcatggtagcgcaccagatattgcaggacaatcgaaggccaaccctcttgcaatgattatgagttttgcaatgatgttaaagtatagttttaatatgcatgaagatagtcaaatggttgagaaggctgtgcagaatgttttattaaaaggttttagaacagccgatataaaagatggtgcaaaaaaaatcatttctactcaagaaatgggcaatgcagttattgaagaactaaaaattttatctggaaattaaa

SEQ ID NO: 208666 - DNA, 538 bp, Unknown
  Bacterial polypeptide expressing nucleotide sequence isolated from the Sargasso Sea
caaaaacgttcgtcaaatcttacttcagtagataaagctaatgttctagaaacatcacaattatggagaaaagttgtttccgatattggtgaaaaatataaaagtgttaaactcagtcatatgtatgttgataatgcagctatgcaattagtcagatctccaaaacaatttgatgttcttcttacaggtaatatatttggtgatattttatccgatgaggcttctatgttaacaggctcaataggaatgctaccttcagcgtcattgtcatctaaatatggtatgtacgaacctattcatggatcagcaccagatattgcaggagacaatacagttaatccaattgctatgattttatctgtggctatgatgtttgaatatacatttcagaataaaaatatttcaagtattattagaaactctattaatgatgtgctgaacgaaggtgcttttacaaaggatttgtcacccaatgattacatatctacctccgatatgggtaataaaattgtaaatcaaattaagaaaaatgtttaaa

SEQ ID NO: 208667 - DNA, 499 bp, Unknown
  Bacterial polypeptide expressing nucleotide sequence isolated from the Sargasso Sea
gttttatggagagaggaagtacaagccttaaaagataaagaatataaaaaaatagaattaaatcatatgttggcagataattgcgcaatgcagcttttgagaaatccaaaacaatttgatgtgatacttgctgacaacttattcggtgacatgttgtctgacgaagcagcaatgcttacaggttctctaggtttattgccttctgcctctcttggatcaagagataaaaatggaaaaatcaggtctctttatgagcctgtccacggttctgccccagatattgccgggaaaaattttgctaatcctattgcagccatattaagcttatctatggctttgaaatattctttagatcttgataaagaagccaatttattggagacagctgttcaaaaggttttagacgacggtttaagaacaaaagatataatgtcgaacagcaaaaaagaagtcaccacagctgatatgggtgatgcaattatctcaaaattgaaataaa

SEQ ID NO: 208668 - DNA, 421 bp, Unknown
  Bacterial polypeptide expressing nucleotide sequence isolated from the Sargasso Sea
atgattaaaataaaaaaacgaaaaattttgcttttaccaggagatggaattggaccagaagttatctctgaagtcaaaaaaataataatttggttgaataaaaataagtcgcttgattttgaaattgatgaagatcttgcagggggctgttcttatgataaacatggaacaccaataactgatgaagttttttataaagctttagaaagtgaagctgtaatgcttggagcagttggaggtccaaagtgggataatttagatttttcaaaaaaaccagaaagagcattattaaaattaagaaaagagttaaaactctttgcaaatctaagacctgcgatatgctttaaacagttggttgacgcatcaacactaaagccagaaatagtatctgggcttgatattatgatagttagagaattga

SEQ ID NO: 208669 - DNA, 741 bp, Unknown
  Bacterial polypeptide expressing nucleotide sequence isolated from the Sargasso Sea
ttccttcgctattaaatatttctccgcttaaaaaagaaataatacaaggaactgactttgtttttttaagagaattaactgggggcatttactttggggaaaagggaagaaaagataatgataattccgcttttgatgtttgtttctacaataaaaaagaaattaaaaggctcgcaaaaaaaggatttgaaatggctatgaagagaaataaaaaattatgttgtattgataaagccaacgtcttagaaacttctagactttggagagaaactattaaggaaatggaaaaaaattatcctaaagtaactgtttcgtacgaatttgtagacgccgttgcaatgagattaattcagtggcctaaaagttatgatgttctaataacagagaatctatttggggatattcttacagacgaagcttcagtgatttctgggtcaatgggtttaatgccatccgcatcaattggtgagaaaattgctctttttgaaccaatacatggttcttttcctcaagtagctgggctcgatatagcaaacccgctggctatgattttatcagctgcaatgatgtttgaagaagcttttgagttaaaaaaagaaggcgaaacaattagaaatgctgtaaatgattcattagacagtaaaatcataacaaaagatttggcaaatatgaaggaaaaattttataacacaagctacgttggaacttggattgaaaataagattttaaattcaatataaa

SEQ ID NO: 208670 - DNA, 443 bp, Unknown
  Bacterial polypeptide expressing nucleotide sequence isolated from the Sargasso Sea
aatgattaaggtaaaaaaaagaaaaattcttttacttcctggagacggtataggacctgaagttattagcgaggtaaaaaaaattattacttggtttaataaaaaaaaatctcttgattttgaaattgatgaagatcttgcaggaggttgttcatttgataaacatggaactccaattacagatgaagttttttataaagcattagaaagtgccgcagtaatgttgggtgccgtagggggtcccaaatgggataatgtagaattttcaaaaaaacctgaaagagctttattaaaattaagaaaagaattaaaattatttgctaatttgagaccagcgatatgttttaagcaattggttgatgcatcaacattaaaaccagaaattgtttcaggtctagatataatgatagtaagagaattgacaggcgggatatattttggtg

SEQ ID NO: 208671 - DNA, 772 bp, Unknown
  Bacterial polypeptide expressing nucleotide sequence isolated from the Sargasso Sea
catatcactatggggttctcttttaaaatttataagagaatttgatcaatatataaacttaaggcctgtaaaattaatgccaggcgtgccttcacctctaagcggtaaaaaaccaggcgatattgattttttaattgtaagagagaatacagaaggagaatacagttccattggtggcaaaatgtttgaaggaactgagagagagtttgtcgtccaggaaactgtaatgactaaagtaggaatagagagagttttggactttgcatttaaactcgcacaaaatagaaaatcaaagcatgtaacgtctgcaacaaaatctaatggtatctcaattacaatgccttattgggatgaactttttgaaaaaatgtcaaaaacctacccagacataaaaactgatcagtaccatattgatattctttgtgctcattttgtgttaaatccagataagtttgatgttattgtagcttctaatttgtttggtgatattttatcagatttgggtccagcatgcactggcacaattggaatagctccatcaggtaatatcaatccagagaataatcatccgtctttatttgaaccagttcatggctccgcgccagatatagcaggaaaaggtattgccaacccaataggacaaatttgggcaggagctatgatgttaaatcattttgggtttgacgatgcctcaaatgaaattttaaatgcaatcaaacattctttatctgagccaaaactcagaacaaaagaccttggctggaagtgctga

SEQ ID NO: 208672 - DNA, 922 bp, Unknown
  Bacterial polypeptide expressing nucleotide sequence isolated from the Sargasso Sea
ttcaccaattccagaaaatgttttaaaaactgccaaaaaagcagatgctgttctatttggagctgtaggagctccgcagtgggatggtcttagttggaaagacagacctgaaaatgcattgttgacattaagaaaggagttaaacttgtttgcaaatttaagacctgcctttttatttaatgaactatcaaatgcttccccattaaaggaaaaaattattgaaggtttagatatattgatagttcgagagcttaccggtggcatatattttggtgagcccagaggagttgttaatgataagtctcctaattatgcgtttaatactatgatttataatgaagatgagattagaagaattgcaaaaattgcttttgaatcagcacaaaaaagaaaaggtagattgtgttctgtagaaaaagcaaatgttttagaagtttcaaaattttggagatcaattgttacagaaatgtctaaagaatatcctggcgttgagctttcacatcaacttgcagataatgcggcaatgcaattagttctcaacccaaatcaatttgatgtgattgttgctagtaacttgtttggagatattttgtctgacatcgctgcgacacttactggatcaataggcatgcttccttctgcatcgcttgatagctcattcaagggcatgtatgagccttgtcatggaagtgcacctgatattgctaatcaagatcttgcaaatccattagcaatgattggctcattatcaatggctttaagatattcattggatgaagaaactgttgcaaataaaattgatacagcaatcaaaaagttcatacaacaaggttttcgaacaaaagacatagccacggatgaaaattatttaaaaacgtctgaggttgctgaaaaaaatatagagattcttgaaaatgaatag

SEQ ID NO: 208673 - DNA, 481 bp, Unknown
  Bacterial polypeptide expressing nucleotide sequence isolated from the Sargasso Sea
gatgaataaaaaaaataatattcttgttttgcctggtgacggaataggacctgaagtatgtgatgaggcgataaaagttcttaatcatctaaacgacatttataaattaaatatagtaattgaggaatctgcagttggtggaagtgcatacgaagaatttggaaatcctcttccagaagatactttgaaggcagctaaaggggctgatgcgattttattaggcgctgtaggcggaccccaatgggacgatattgattatcacctgagacctgaaagggcattgcttggacttcgagctgaattagacttatttgctaacttaagaccagcaatcttatcaaaatatttaagtgattcttcttctctcaagccagataaagttcaagatctaaatctattaattgtaagagaactaacgggtggaatttactttggtgaacccagaggtagatctaaaactggtgattctgctttcaatacc

SEQ ID NO: 208674 - DNA, 640 bp, Unknown
  Bacterial polypeptide expressing nucleotide sequence isolated from the Sargasso Sea
aatgggcgaaagaaaaggtattaatactcacacttatacaagtagtgagattataagagtagcaaaagtagcttttgaattagcaaaaaaaaggaaaaataaagttacgtcttgtgaaaaatcaaatgtaatggaagcaggacaactttggaaagaggaggttcaggcacttcatgatgaagaatataaagaagtagaattaaatcatatgcttgctgataattgctcaatgcaattactacgaaacccaaagcaattcgatgtaattgtaacagataatttatttggtgatatgttatcggatcaggcttcaatgttaactggatcattaggacttttgccttcagcatcactaggtgcaaaaaataaagatggtaaaatgagagccatgtatgaacctatacatggttcagccccagatattgcgggaaaaggattggctaacccgattgcaacaattttaagttttgctatggcgcttagatattcattagacttagataaggatgcaggtgatttagaaaaagctgtagaagatgtattaaatgacggtttaagaacaaaagacatcgctgaaaaaggtaaaaaagaagtatctactaaagaaatgggagatgcgattatttcaaaattgaaataa

SEQ ID NO: 208675 - DNA, 808 bp, Unknown
  Bacterial polypeptide expressing nucleotide sequence isolated from the Sargasso Sea
ctgcccgacgcgacgctgaagctcgcgaaggaagccgatgcgatcctgttcggcgccgtgggcgactggaagtacgactcgctcgagcgcgcgctgcgccccgagcaggcgatcctcgggctgcgcaagcacctcgagctgttcgcgaacttccgcccggcaatctgctatccgcagctcgtcgatgcgtcgccgctgaagcccgagctggtcgcgggcctcgacatcctgatcgtgcgcgaactgaacggcgacatctacttcggccagccgcgcggcgtgcgcgctgcaccggacggcctgtttgccggcgagcgcgaaggcttcgacacgatgcgctattcggaaccggaagtgcgccgcatcgcgcacgtcgcgttccaggcggcccgcaagcgcgcgaagaagctgctgtcggtcgacaaggcgaacgtgctcgagacgtcgcagttctggcgcgacatcatgatcgacgtgtcgaaggaatacgcggacgtcgagctgtcgcacatgtacgtcgacaacgcggcgatgcagctcgcgaaggcgccgaagcagttcgacgtgatcgtcacgggcaacatgttcggcgacatcctgtcggatgaagcgtcgatgctgacgggctcgatcggcatgctgccgtcggcgtcgctcgacaagaacaacaagggcctgtacgaaccgtcgcacggttcggcgccggacatcgcgggcaagggcatcgcgaacccgctggcgacgatcctgtcggccgcgatgatgctgcgctactcgctgaatcgcgcggagcaggccgatcgcatcg

SEQ ID NO: 208676 - DNA, 673 bp, Unknown
  Bacterial polypeptide expressing nucleotide sequence isolated from the Sargasso Sea
catgaaaaaacactagagaaggcactagaagtggatgctgttttgctggttgcagtgggtggtccaaaatatgacagtttagactttaatttaaagcctgaaagggctcttctaaagctaaggaaagagcttgatctatatgctaatattagacccgcgcaatgttttgacgcacttgcctctttttcatcgctcaaaagagaaattgtgactgggttagatatagtaatcgtaagggagttgacttcagggatatattttggtgaacctcgaggtatacaaaaaactgagtcaaatgaaagagtaggtattaatactcaaagatatacagaatcagaaattaaaagggtcgctattagtgcatttgagctcgcaaaaaaaagaagtggtaaagtttgctctatggaaaaagcaaatgtaatggaaagtggtgttttgtggagggaagttgtttctgaagtccatagagattatcaagaaatagaactaagtcatatgtacgctgataacggtgctatgcagttggtcagggaccccaaacaatttgatgtcatcgttacagataatttgtttggagatattttatcagactgtgccgctatgttaacaggtagcttgggaatgcttccatctgctagccttgggagcataatggaaagcggaaaacctagag

SEQ ID NO: 208677 - DNA, 763 bp, Unknown
  Bacterial polypeptide expressing nucleotide sequence isolated from the Sargasso Sea
aaaatgctcccagatgattggaaagacaaaattggctcacatgatgctatttattttggggcagtaggagacccagaaaaagttccagatcacattagtttgtggggatctttattaaaatttagaagagaatttgaccaatatattaatttaagaccagtaaagttatttgatggagttccttgtcctttagctaataaaaaacctggcgatatagatatgttgattgttagagaaaatacagagggagaatattcttcagtaggcgggagaatgtataaagatacagatagagagattgccatacaagaaacagtaatgtctagccatggtgttgatagagttcaaaaatatgcatttgaattagctaggtcaaaaggaagaaaaaaagtaactaacgcaacgaaatcaaatggtatttcaattacaatgcctttttgggatgaaagatttaataaaattaaaaaaaaatatcctgaaattaaaactgatcaatttcatatagatattttgacagcaaggttcgttttaactccagagtggtttgatatagttgtggcatcgaatttgttcggagatattttatctgacctaggtcctgcttgtacgggtacaattggtatagccccgtcagggaatataaatccagaaaataagtatccctctttatttgaaccagtacatggatccgcaccagatattgcaggaatggggattgccaatccaattggtcaaatatggtcaggggcactaatgttagatc

SEQ ID NO: 208678 - DNA, 673 bp, Unknown
  Bacterial polypeptide expressing nucleotide sequence isolated from the Sargasso Sea
ttttggagaacaagaggtatagaacctatagaaaacaacgaacgtaagggtatcaacactcactcctacactacgagtgaaatacaaagaattgcgagagttgcttttgatcttgcaaaaaaaagaaaaaacaaagtaacatcttgtgaaaaatctaacgttatggaagcaggagtgttgtggagggaagaagttcaaaaattaaaggataaagattttaaaaaagttgaattaaatcatatgttggcagataactgtgcaatgcaattattgaggaaccctaaacaatttgatgtaatattagctgataatttgtttggagatatgctgtctgatgaggcagcaatgctaacaggctctttgggcttactaccttcagcttctcttggtgcaaaagacaaaaatggtaaaataagatctttatatgaacctgtgcatggttctgccccagatattgcaggaaaaaatattgcaaatccaattgcgacgatactaagtttgtctatggccctaaaatattcactaaaccttgataaagaagctaatttattagatgaagcagttcaacaagtattagacgatggtttaagaacaaaagatattatgtccgctgacaaaaaagaagtcacaacgactgatatgggtgatgcaattatctcaaaattgaaataaa

SEQ ID NO: 208679 - DNA, 589 bp, Unknown
  Bacterial polypeptide expressing nucleotide sequence isolated from the Sargasso Sea
aaaagggtggcaaaagttgcttttgagcttgcaaaaaaacgtaaaaataaagttacttcttgcgaaaaatctaatgtaatggaggcaggtgttttgtggagggaagaagtgcaagcacttaaagaaaaagagtataaaaaagttgagctggaacatatgttagcagataattgtgcaatgcagcttttaaaaaatcctaagcagtttgatgtaattgttactgataatttatttggtgatatgctttcagacgaagctgcaatgttgactggttcacttggactattgccctcagcctctttaggggaaaaagataagaatggcaaaacaaggtcaatgtatgaacctgttcatggatctgcaccggacattgctggaaaaaatattgctaatccaattgcaacaatattgagtttttccatggccttgagattttcacttgatttagacaaagaagctaatttattagatgctgcggttcaaaaagtattagatgatggtcttagaactaaagatataatgtcaaaaggaaaaaaagaggtcaccacaagtgatatgggtgatgcaattatttcaaaattaaaataaa

SEQ ID NO: 208680 - DNA, 454 bp, Unknown
  Bacterial polypeptide expressing nucleotide sequence isolated from the Sargasso Sea
tgcagatatagaattgaaacatatgctagcagataattgtgctatgcaattagtgagatatcctaagcaatttgatgttattgttaccgataatctttttggagatatgttatcagatgaggcagctatgttaactggttctctaggactgttaccttcggcatcattaggggctaaagataaaaacggaaatatgagatcattatatgaaccagttcatggttctgcacctgatatagcaggaaaagggatagcaaatccaattgcaacaattttaagttttgctatggcgttaaaatattctttagatttagataaagagtcaaatactttggaaaaagcagttcaaagtgttttagatgaaggattgagaactaaagatatattgtcaaaaggcacaaaagaagtttcaacatctgaaatgggtgatgcgataatttcaaaattgcaataa

SEQ ID NO: 208681 - DNA, 424 bp, Unknown
  Bacterial polypeptide expressing nucleotide sequence isolated from the Sargasso Sea
gataatgcgcaaatgcaattattaagaaatccaaaacagtttgatgtcattttagcagataatttatttggtgacatgttatccgacgaggcagcaatgctcacaggttctttgggtttattaccctcggcctcgctaggagacaaggacaaaaatggaagaacaagatctttatacgagcctgtacatggttcagcgcccgatattgccggtaaaaatgtatcaaatccaattgctacaatcttaagtttttcaatggcattaaaatattctttaggtctacaaaaagagtctaagctgctagacaaggctgttgaaaaaaccttagaagatggtttaagaacatcagatataatgtcaaaaggtaagaaaaaggtatcaacctcggatatgggtgatgcaattatatcaaatttaaattaaa

SEQ ID NO: 208682 - DNA, 268 bp, Unknown
  Bacterial polypeptide expressing nucleotide sequence isolated from the Sargasso Sea
aatattaatccagaaaaaagttttccatcattatttgagcctgttcatggatctgcgcccgacattgctggaaaaggtattgcaaaccctattggtcagatttgggctggtgcaatgatgcttgagcatttagggcataaacaggcttcagataatattgtaagcgctattgaagaagttttagaaaaaaaagagtatagaacaggtgatttaggaggtaaggcaaatactcatagttgtggttcagccatagctgatgcaatttaat

SEQ ID NO: 208683 - DNA, 889 bp, Unknown
  Bacterial polypeptide expressing nucleotide sequence isolated from the Sargasso Sea
gtgcctggatgccgatgcggtcctccttggtgctgtaggtggcccaaagtgggaacctctggacttttcttttagaccggaacgcggacttttgaaattacgatctgaacttcagctttatgccaacctcagacctgcagtcatatacggagatctggtcgatgcgtccacactcaaaagggccgtggtagaaggtgcagatttgatggtgatccgtgaattgaccggagggatttattttggagaaccacgtggtgtggaagaacgcaatggggagcgggtcggattcaatacgctggtctattctgaatccgaaatccgcagagtcggaaaaatggcctgtgaaatcgccatgaagcgaaataagaaactgacttccgtggataaagccaatgttctcgaatcaactgaactttggcgagaagtgatgacggatgtggttgaggatttccctgaaattgaactgaatcatatgtatgcggacaatgcagcgatgcaactgatccgggatccaaaacaattcgacacgatggtcaccacgaacatgttcggggacatcctcagtgatgctgccgcaatgatgacgggttcaatcgggatgcttccatcagccagtttgggcggtaacattggactttatgaaccggtccatggatccgcccctgatattgcaggacaaaatcttgccaatcccctggcaatgatcctgtcaaccggaatgatgcttcgatactccttcgaccttggtcaagcagatgacctgattcagaaagctgttgtccaaaccatcgaaacgttccggaccggagatatcatgtccccagggaaaactaagatcggatgtcggcaaatggggtgcaaggtactggagaccatcaaaacactctaa

SEQ ID NO: 208684 - DNA, 718 bp, Unknown
  Bacterial polypeptide expressing nucleotide sequence isolated from the Sargasso Sea
tatggatgaggtctgtagaataatagaatggtttgaaaaaaaattaaaaattcaatttgaaacaaaatttgatcttgtaggaggttctgcatacgatgagtatggtacaccgctttctgacgagacattaaaaatagcaaatgaagttgatgcaattttactaggagcagtcggtggtccgaagtacgataatcttgagttttccctcaaaccagaaagaggtcttttaaaattaagaaaagaattagatttattctccaatctaaggccagcacaatgttttgatgctttatcagattattcttctctgaaaccaaatatagtttcaggtcttgatataatgatagttagggaattaagttctggttcatattttggagaaccgagagggatagaaataaacaaaaaaagtggtgaaagatatgctattaatacgacttattattcagaaagtgaaatagaacgggtggccatatctgcctttgaaatagccaaaaagcgaaataaaaaagtctgttctatggagaaagctaatgtcatggaagtcggggtattgtggcgtgacgtagttcagaaaattagggataagagttacccagaaatagagcttagtcacatgtatgctgatgctggagcaatgcaacttgttagatggccaaaacaatttgatgttatcgttactgataacttatttggagatttattatctgattgtgcg

SEQ ID NO: 208685 - DNA, 570 bp, Unknown
  Bacterial polypeptide expressing nucleotide sequence isolated from the Sargasso Sea
tagatagagttcttaaatttggatttgaattagcaaataaaacagaaaaaaaacatttaacgtccgctacaaaatccaatggtatttctataaccatgccctattgggatgaaagggttgaagaaatggccaagcaatactcagaagttaaatgggataaatatcatattgatatactttgtgcacattttgtacttaaccctgacaaatttaatgttgtggtagcttcaaatttgtttggtgatattctgtcagatttaggacctgcttgtactggcacaatcggtattgctccatctggcaatatcaaccctgagaaaaaatttccatcattatttgaaccagttcatgggtctgctccagatattgctggacaaggaattgcaaatccagttggtcaaatttgggcaggagcaatgatgcttgaatatcttggatttaaagaagcatcagaacatgttgttagagcaatagaagaagttttagaaaaagaagaatatagaactggagatttaggaggaaaagctaacactattagttgtggttctgcgatagcagatgcaatttaaa

SEQ ID NO: 208686 - DNA, 388 bp, Unknown
  Bacterial polypeptide expressing nucleotide sequence isolated from the Sargasso Sea
tatgcagttagttaaacagcctagccagtttgacgtgctactttgcgataacttgtttggtgatattttgtcagatgagtgtgcgatgatcacaggctcaatgggcttattaccatcggcaagcttaaatcaatcgggctttggtttgtacgaacctgctggtggctccgcgccagatattgcaggtaaaggcgttgcaaacccaatagcacaaattttaagtgccgcactgatgctacgttactcattagggcaagacgaagcagcacgcaccattgaaaaagccgtagccgaagccgtagaagcaggcgttggcacgccagatatctacccacaaggtggatacagcacaagcgatgtggcagctgccatcgtttcacgtatttaa

SEQ ID NO: 208687 - DNA, 570 bp, Unknown
  Bacterial polypeptide expressing nucleotide sequence isolated from the Sargasso Sea
aatgtctaataaaacaaggaaaattttgcttttacctggcgacggaataggccccgaggtaattgctgaagtaagaaaaatattggaatggatgaataagacaaaatctctagattttgttttaaaccaagaattaattggaggtgcatctatcgatgcgaacaaagttccaattacagatgaagttttctataaatctttagagtccgatgctgttatattgggagcgtgcgggggtcctaagtgggataatctagagttctcaaaaaaaccagagcgggcgcttttaaaactcagaaaagaattaaaattatttgcaaatttaagacctgccatctgttttaaacaattagttaactcttcaacacttaagccagagatagtttctggtttagatataatgattgtaagagaattaacaggcggaatttactttggagaaccgcgtggtatagagccaatggaaaataatcaaagaaaaggtgttaatactcatacgtataccacttcagaaattcataggatagcacgtgtagcatttgatttagccaaaaaaagaaaaaataaagt

SEQ ID NO: 208688 - DNA, 829 bp, Unknown
  Bacterial polypeptide expressing nucleotide sequence isolated from the Sargasso Sea
gcatgtgtaggagatattaaatatgactctcttgcaagagaattaaggccagaaagtggattactaaagttaagatctgccctaaaccttttcgcaaatatcaggcctgtcaaaataagaaaatctctattagatgcaagtacattaaaaaaagaaatcgttgagaatgtagatcttattgttgtaagagaattaatagggggaatttattttggaaaaccaagaggacatataacaaatacaaaaatcccaaaagctttcaatacgatggtttatgattccgctgaaatagagagaataacagaaatagcaataaaaattgctaaccaaagaaataaaaaaatatgttcagttgataaatcaaacgttcttgaggttagtcaattgtggagagatacagttttaaatatcacctcaaaagataaaaatataactctaagcaatatgtacgttgataatgcagcaatgcaattagttagagatcctggtcaatttgatgtaattttaacgagtaatttatttggagatattttaagcgacttagccgcaatgttaactggttctattggtatgcttccttctgcttctctaaacaataatggcccaggagtttttgaacctgttcatggttcggctcctgatatagctggaaaaaatatagcgaatcctattgcaatgcttttatctgcttccatgatgttaaaaattggattaaatgaagaagaagctgcagaaaatttagagattgccattgataaagttttatcaaaaggatttagaacagccgatttagctgatgggtcttctcgaagtattatcttgcagtgaa

SEQ ID NO: 208689 - DNA, 1105 bp, Unknown
  Bacterial polypeptide expressing nucleotide sequence isolated from the Sargasso Sea
aatggctaataaaactaggaaaattttgcttttacctggtgacggaattggccctgaagtggttgcagaagttagaaaaatacttgaatggatgaataaaacaaagtcattagattttgttttaagccaagaattaattggcggtgcatctattgacgcaaataaagttccaattactgatgaagttttttataagtctttggagtccgacgcggtaatattaggtgcttgtggcggacctaaatgggataatttggaattttcaaaaaaacctgaaagagctcttttaaaacttagaaaagagttaaagttatttgctaacttaaggccagctatttgcttcaaacaactggttgattcttcaactcttaaaccggaaatagtttcagggttagatattatgattgtaagagagttaactggtggtatttatttcggtgaaccgcgtgggattgaaccaatggaaaataaccaaagaaaaggaattaatactcactcatacactacttcagaaattcaccggattgcacgtgttgcttttgatttggcaaaaaaaagaaaaaataaggttacttcttgcgaaaaatctaatgtcatggaggcaggtattttatggagagaagaagtacaagcaattaaggataaagaatttaaaaaggtcgagttaaatcacatgttagctgataactgtgcaatgcagcttttaagatatccaaaacaatttgatgttattttagcagacaacttatttggagatatgttatcagatgaggcagcaatgcttacaggctctctaggacttttaccctctgcatcattaggtgcaaaagataaaaatggaagagttagatcgttatacgaaccagttcatgggtctgcccctgatattgagggaaaaaatattgctaacccgatagctactattttaagtttatctatggcattaaggtactctttagaccttggaaaagaggcagataaacttgataaagccgttcaaagtgttttagacgatagtttaagaacaaaagatataatgtctaaaaatatgaaagaggtttctacaacagagatgggtgatgcaattatcgcaaaattgaaataa

SEQ ID NO: 208690 - DNA, 674 bp, Unknown
  Bacterial polypeptide expressing nucleotide sequence isolated from the Sargasso Sea
acttactggagggatatattttggtgaacctcgcggtattgtaaaagataaaaatccaaattatgcattcaatacaatggtttataacgaagatgagatcagaagaattgcaaaaattgcatttgaatcagctcaaaaaaggaagggtaaattatgttctgtagaaaaggcaaacgtattagaagtttcaaagttttggagatcaatagttacagaaatgtcagtggattatccagatgttgaattgtctcatcaactagcagataacgcagccatgcaattagttttagatcctaatcaatttgatgtaatagttgcaagtaatttatttggagatattttatctgatattgcagccacattaactggatccataggcatgcttccttcagcatcattagatagctcatttaaagggatgtacgaaccatgtcatggtagcgctcctgacattgctcatcaagatgttgcaaatccattagctatgattggttctttatcaatggcactaaaatattctttaggagaagaaatagtagcaagcaaaattgatctagcaatcaaaaatttaattaagcaaggctatagaactaaggatatttccaatgatgaaaattatttaaaaacttctgaggttgctcaaaagattatcgagaatattgaaaatgaatagt

SEQ ID NO: 208691 - DNA, 1108 bp, Unknown
  Bacterial polypeptide expressing nucleotide sequence isolated from the Sargasso Sea
aatgattaaagtgaaaaaaagaaaaattttattattacctggtgatggtattggtcctgaagttattgctgaagtaaaaaaaataattaattggtttaatgataaaaaatcacttgactttgaaatagatcaagatcttgcagggggttgttctattgacaaacatggaacccctataactgacgaggtgttttataaggcattagaaagtgcggtagtaatgttaggagcagtaggaggcccaaaatgggataatatagatttttcaaaaaaacctgaaagagcattattaaaacttagaaaagaattaaaattatttgcaaacttaaggccagcaatatgttttaaacaattagtcgatgcatcaactttaaaaccagaaattgtttctggtttagatattatgattgtaagagaacttactggtggaatatattttggtgaacctagaggaattaaaccaattgaaaatggtgaaagaaaaggaattaatactcatacttatacaagcagtgaaataattagggttgctaaaattgcttttgatttagcaaaaaaaagatcaaacaaagttacatcgtgtgaaaaatcaaatgttatggaagctggacaactttggaaagaagaagtccaagcattacatgaaaaagaatataaagatgtagaactaagccatatgcttgctgataactgtgctatgcagttattaagaaatcccaagcagttcgatgtaattgtaactgataatttgtttggagacatgttatcagatcaggcttcaatgcttactggatctttaggtcttttaccctcagcatctttaggtgctaaaaataaagatggagaaatgagagcaatgtatgaaccaattcatggttcagctccagatatagctggtaaaggaattgcaaatccaattgcaactatattgagttttgctatggccttaaggtattctttagatttagataaagaggctgaagcactagaaaaagctgtacaagatgtgctaaatgatggattgagaacaaaagatattctatcagatggaatgaaagaagtttcaacctctcaaatgggagatgcgataatttcaaaattgcaataa

SEQ ID NO: 208692 - DNA, 804 bp, Unknown
  Bacterial polypeptide expressing nucleotide sequence isolated from the Sargasso Sea
aatgagttctaaaattctagttttgccaggagatggcataggtgtggaagttgcagatcaagcaattagagtaattgaaaaattaaatgagcaaggccttaatgctagctatgaaaaagatttagttggaggcgcttcatatgatgctaatggcgaacctttaactaactctgttttagagaaagcaaaaaattcagatgctatattattgggagcagttggtggatcaaagtgggatgatgtagaaagatcaaaaagaccagaagctggacttttaggtttaaggaaagaattagagctttttgcaaatctgagacctgctttagtttttgatgctctggtttcagcttcaactttaaaaaatgaagtggtaaacaatttagatattatgattgtaagagaattgactggtggagtatattttggtcaacctcgaggaatagaagagacaccaaatggtaagaaagcgatcgacacacaaatatatcacgattacgaaatagatagaattgccagagttgcttttgatttagccaggaaaagaaataataaagtgacatctgttgagaaagctaacgttatggaaactggcgtactctggagggagattgttaaagaaactcatagagaattttcagatattacactagaaaatatgttagcagataattgtgccatgcaacttgttagaaacccaaaacaatttgatgtaatagttacagataacctttttggagatctgctgagcgattgtgctgctatgctgactggttcgcttggaatgttaccatcggcatcattggg

SEQ ID NO: 208693 - DNA, 337 bp, Unknown
  Bacterial polypeptide expressing nucleotide sequence isolated from the Sargasso Sea
accaccaaacctgttcggcgacatcctgtcggatctgtgcgccggtctggtggggggcttaggaatggcgcctggcgccaatatcggcgatggcgccgccatcttcgaagcggtgcatggctcggcgccggatatcgccggcaagaacatcgccaacccgacctcggtgatcctcgcctccatccagatgctggagtatctgggcatgcaggacaaggccgaacggatccgtgaggcggtgcgtgccaccatcgagtcaggcgaccgggtgacccgggatctggggggtaccgcttccaccagcgagttcacccaatccatcatcgaacgtttgtaa

SEQ ID NO: 208694 - DNA, 940 bp, Unknown
  Bacterial polypeptide expressing nucleotide sequence isolated from the Sargasso Sea
atctgatgagacacttgaaaaagctaaaaactctcacgcagttttacttggcgctgtgggtggagaaaaatgggataatttagatttttctcttaaacctgaacaaggccttttgagaattagaaaagaattagacttgtttgcaaacttaaggcccgctctatgttttgagtctatggttgacgcctcttctcttaaaccagacttagtatcaggtctcgatatattaattgttagagagcttactggtggtatttattttggtcaaccaagaggtattgaagataaaggtaacgggaatcgtgttggaattaacactcaatgttatagcactgaagaagttagaagagttgcacgaatagcatttgaacttgcaagcaaaagaggtaacagggttacttcttgtgaaaaatcaaatgtgatggagtctggaatattatggagagaagaagtatctcatgtgcacaaaaatgaatattcaaatgttgagttatctcatatgtatgcagataattgtgcgatgcaattagttagaaaccctaaacaatttgatgttattgttactgataatttatttggagacattctgtctgatgaggcagctatgcttacaggttcacttggaatgttgccctctgcttctttgggtgcagtcgatagtaataattttagaaagtccttatacgagccagttcatggttctgcgccagacatagctggtaaaggaatagcaaacccaattgcatctattcttagttttgcaatgtgtttaaagtactcattcaatatggacaaggagtcagatcttataaataaggctgtaaacaatgtacttgccagtggctttaaaactgcggatttaattggcaatgacaacaaaaacctatcaacagttgaaatgggtgatcaaatattaaatcaaataaaagaaaacttttaa

SEQ ID NO: 208695 - DNA, 673 bp, Unknown
  Bacterial polypeptide expressing nucleotide sequence isolated from the Sargasso Sea
aatgactaaagctaaaaaaagaaaaattttattattaccaggcgatggtattggacctgaagttgttagggaggtcaaaaaaataattgaatggttcaataagaacaaatctttagattttagttttgaagaagagttaattggtggtgcatcaattgatgctaataaaattccaataactgacgaagttttttataaatctttagaatcagatgctgtaatcttgggagcttgcggtggtccaaagtgggataatttagagttttctaaaaaaccagaaagagctcttttaaaacttagaaaagaattaaaattatttgcaaatcttagaccagcaatttgttttaagcagttggttgactcatcaactttaaaacctgaaatagtatctggcttagacattatgattgtaagagagttaaccggaggaatatactttggtgaaccgagaggaattgaaccaatagaaaacaatgaacgaaaaggtataaatacacactcttataccacaggcgaaatacaaagaattgctagagttgcttttgatttagcaaaaaaaagaaaaaacaaagtaacttcttgtgaaaaatctaatgtgatggaagcgggagttttatggagagaagaagtggcagctttaaaagataaagaatataaaaaaatagacctgaat

SEQ ID NO: 208696 - DNA, 809 bp, Unknown
  Bacterial polypeptide expressing nucleotide sequence isolated from the Sargasso Sea
aatgagttctaaaattttagttttacctggagatggcataggtgtggaagttgcagatcaagccataagagtaattgaaaaattaaatgagcaaggtcttaatgcaagttatgaaaaagatttagttggaggcgcttcatatgatgttaatggcgaacctttaactaactctgttttagagaaagcaaaaaattcagatgctgtattattgggagcagttggtggatcaaagtgggatgacgtagaaagatcaaaaagaccagaagctgggcttttaggtttgaggaaagaattagaactttttgcaaatctgagacctgcattagtttttgatgctcttgtttcagcttcaactttaaaaaatgaagtggtaaacaatttagatattatgattgtaagagaattgactggtggagtatattttggtcaacctcgaggaatagaaaacacgccaaatggtaagaaagcgatcgacacacaaatatatcacgattacgaaatcgatagaattgctagagttgcttttgatttagccaggaaaagaaataataaagtgacatctgttgagaaagctaacgttatggaaacaggtgtgctctggagagagattgtgaaagaaactcataaagatttttcagatattacactggaaaatatgttagcagataattgtgctatgcaacttgtaagaaacccaaaacaatttgatgtaatagttacagataacctttttggagatctgctgagtgattgtgctgctatgctgactggttcgcttggaaatgtaccatcggcgtcattgggggaag

SEQ ID NO: 208697 - DNA, 1066 bp, Unknown
  Bacterial polypeptide expressing nucleotide sequence isolated from the Sargasso Sea
atgaaagaatataacatagcatcaatacctggggacggaataggaaaagaggtgttgcctgagggtttaaaagttttaaaagacgctgctttaaaacatcaatttaaaataaattttacagaatatgattttgcttcctgtgattattacgaaaaacacggaaaaatgcttcctgatgactggaaagaacaattaagaaaacatgatgctatatttttcggagcagtcggaatgccagataaagttccggatcatatttctttatgggggtcattacttcagttcagacgagaatttgatcaatatataaatctaagacctgtaaaactttttccaggtattaatcctcctctagccaataaaaaacctggtgatatcgatatgttgatcgtcagagaaaataccgagggagaatattctactgtaggtggaagggtgtataaaaatactgatagagaaattgcaattcaagaaactatcatgtcagcacatggaatagacagagttcaaaaatttgcctttgaattggccaaacaacgaataagaaaaaaattaactaatgcaacaaaatcaaacggcatttcaattactatgcctttttgggatgaaagatttaatgaaatgaaaaaaaactatcctgaaattgaaacagatcaatttcatatagatattttagttgctagatttgtacttaatccagaatggtttgatgtagtagtggcatcaaatttatttggagatattctttcagacttaggacctgcttgtactggaactattggaatagctccttctggaaatattaatcccgaaaataaatttccatctttatttgaaccagttcatggttctgcacctgatattgcaggtaaaggaattgctaatcctataggacaaatttggtctggagcaatgatgctagattatttaggagaaaaagaagcttcacattcaattgttgaagcaattgaaaaatctttaagtgaaaaagaaaatagaactaaagatttaggtggggatgctgatactattaaatcttctaattcaattttagctaatctttaaa

SEQ ID NO: 208698 - DNA, 1009 bp, Unknown
  Bacterial polypeptide expressing nucleotide sequence isolated from the Sargasso Sea
tatgagttcacaaactattacggtcatcaaaggtgatggcataggtccaagcatagtcgaagccgctatccaggttctggataaagtaggctgtaactttaactatgaatatgttgaagctggcttaactgcgctggaaactactggtgaattgctgccacagaccacgctggacgctattgcccgtaacaaaatcaccttaaaaggcccgttaactacgcctgtaggcgaaggtttcacttcaattaacgtgaccttacgtaaaaaattcaacctgtactctaacgtacgtccggttatttcgtttaaaggcactaaagcccgttacgagaatatcgacatcattacggtacgtgaaaatactgaaggtatgtactcaggtgctggccaaatcgtgaaaaacgaaggtgagctggcagaagccatgagcgtagtaacccgtgaaggttctgaacgtattgttgagttcgcctttgaactggctcgtcgcgaaaaccgcaaaaaagtaactatcgttcacaaagccaacattctgaagtctacttctggcctgttcttaaaaactgcccgtgaagtagcattacgttaccctgatattcaggccagcgagatgatcgttgataacgcttgtatgcagctggtgatgaacccacaacagtttgatgtaatagttaccaccaacctgtttggcgatattttatctgacttatgtgctggtttagtgggtggtttaggtatggcgccaggcgctaatatcggcaaagactgcgctatttttgaagcagtgcacggcagcgcgccagacattgcaggcaaaaacctggccaacccaagctcagtgattttagcttctatccagatgctggagtatttgggcatgaaagataaagcagaaaaaattctggccgcattaactgatgtgattgcgtcaggtgaccgcaccacccgcgacttaggcggcagccacggcaccacagactttactgcagctatgctggaacgtctgtaa

SEQ ID NO: 208699 - DNA, 571 bp, Unknown
  Bacterial polypeptide expressing nucleotide sequence isolated from the Sargasso Sea
aatgattaaagtaaaaaaaagaaaaattttacttttacccggagatggtgttggaccagaggtaattaatgaagtaaaaaaaataatttcgtggtttaacaaaaataaatcattagattttgaaatagatcaagatctagttggtggagcggcttatgataagcatggaacgcctataactgatgaagtattttataaagctctagaaagtgaagcagtaatacttggtgcagttggtgggccaaaatgggataagcttgaattttctaaaaaaccagaaagagcacttttaaaattaagaaaagagttaaaactttttgcaaatttaagacctgcaatttgctttaaacaattggttgaagcttcaactttaaaaccagaggtcgtgtctggattagatattatgattgttcgagagctaactggaggaatttattttggtgaaccaagaggtattaaaccaattgataatggtgaaagaaaaggaattaatactcatacttacacatcaagtgaaatacaaagagttgctagagtagcatttgatttagcaaaaaagagacaaaacaaa

SEQ ID NO: 208700 - DNA, 706 bp, Unknown
  Bacterial polypeptide expressing nucleotide sequence isolated from the Sargasso Sea
tatgattgtaagagaattaacaggcggtatttattttggtgaaccacgaggtatagagccaatggaaaataatcaaagaaaaggtattaatactcactcttacactacttcagaaattcatagaattgcacgagtagctttcgatttggcgaagaaaagaaaaaacaaagttacttcttgcgaaaaatcaaatgtaatggaagcaggtattttatggagagaagaagtacagacaattaaagacaaagaatttaaaaaggtcgagttgaatcatatgttagcagataattgtgcgatgcagcttttaagatatccaaaacaatttgatgtcattttagctgacaacctttttggagacatgttatctgacgaggcagctatgttaactggttcacttggacttttgccttcagcttcactaggagcaaaagataaaaatggaagaattagatcactatacgaaccggtgcatgggtctgcccctgatattgagggaaaaaatattgctaatccaatagctactattttaagtttatcaatggcactaagatattctttagatcttggaaaagaggctgatcaacttgatcaagctgttcagaacgttttagatgatggtttaagaacaaaagatataatgtctaaaaatatgaaagaagtttccacaacagacatgggtgatgcaattatcgcaaaattgcaataa

SEQ ID NO: 208701 - DNA, 736 bp, Unknown
  Bacterial polypeptide expressing nucleotide sequence isolated from the Sargasso Sea
atgattaaagtaaaaaaaagaaaatttttattattagcaggtgatggaattggaccagaagttgttagcgaagttaaaaaaattattcaatggtttaatataaataaatctttagattttgaaatagatgaagatttagcaggtggagtatcatacgataagcatggaacccctataacagatgaagttttttataaggctttagaatgtgaagctgttattcttggtgctgtaggaggtccaaaatgggatgatgtagaattttcaaaaaaacctgaaagagctttattaaaattaagaaaagaactaaaactttttgccaacttaagaccagcaatctgttttaaacaattggttgatgcgtcaactcttaaacctgaaattgtttctgggttagatattatgattgttagagaactgacaggtggaatttattttggtgagccaagaggaattaaaccaattgataatggtgaacgaaaaggaattaatactcactcatatacttcaagtgaaattcaaagagttgcaagagttgcatttgatttagcaaaaaaaagaaaaaataaagttacatcatgtgaaaaatcaaatgtaatggaagcaggtttactttggaaagaagaagttcaagaattacatgataaagaatttaatgatgtagagttaaatcatatgcttgcagataattgtgctatgcaactacttagaaatcaaaacagtttgatgttatagt

SEQ ID NO: 208702 - DNA, 616 bp, Unknown
  Bacterial polypeptide expressing nucleotide sequence isolated from the Sargasso Sea
ataggttataacacaatgtcatattcaacaagcgaagttgagagaattgcagattatgcttttaatgtagctgctaaaagatcctccaaagtcgtttcggtggataaagcgaatgttctagagtcgtcacagttatggcgtgaaacagtggataaattacattcagataaatattctgatattattttatcacatatgtatgttgataatgctgcaatgcagctagtcaaagatccaaagcaatttgatgtaatattaactggtaatatttttggagatattctttctgatgaggcatctatgttgacaggatcgattggaatgttaccctcggcatcaatatcaaaatctcaaggtgtctatgaaccaattcatggatctgctcctgatattgcaggaaaaggtattgtaaacccaattgcaatgatattatctgttgcaatgatgttcgaatactcgctaaatagtaaaaagatatcaatgttaattaaaaattcgattgataatgtattaaagtctggatatcgaacaaaagatatttccactacttcagaatttattaatacgtctgaaatgggagatgctataattcaagaaattaaaagcaatgtttaaa

SEQ ID NO: 208703 - DNA, 1042 bp, Unknown
  Bacterial polypeptide expressing nucleotide sequence isolated from the Sargasso Sea
aatgagccagtattcaattgccgtattagccggagacggtatcggcccagaagttatgcaggaagccaataaggttttagatgctgttgaaaagaagtttaacgtcaccctcaaccgtactgcatatcctgtaggtggctacgccattgatactgaaggcgaagcgctaccctcaaaaacgcttttgggctgtgagcaagccgatgcgatattgtttggcagtattggcggccctaagtgggacaccttgccgttagagcaacgtcctgagcgtgccgcactacttacccttcgcagtcattttgacctgttcagcaacttgcgcccagctcgaatttatccgggccttgaaagcctgtctccccttcgtgaagacattgctaaatcaggcgtagatgttttagttgtgcgtgagttaaccagcggtatttactttggtcagccgaagggccgagaaggtgaaggcgaagaagagttcgcgtatgacaccatgcgctatagtaaacgtgaaattcgccgtattgctattgcagcgtttgaagcagcacagaagcgtcgcggcaaagtgacgtcagtagacaaagccaacgtactggtaaccagccgcttatggcgtgaaattgctgaagaagtggcaaaagactatccagatgtagagctagaccacatctatatagacaacgccactatgcaaataatgaagaacccagcgcagttcgatgtgatgctgtgttcaaacctttttggcgatatcgtttctgatgaatgcgctatgatgacgggctctatgggcttgttgccatcggcaagcatgaacgaggaaggctttggcctttatgagccagcaggcggttcggctccagatattgcaggccaaggcattgctaaccctatcgcacaaattttatcggccgccatgatgctgcgtttcagcatgaacttgaatgatgctgccgacgcaattgaaaaggcagtagtggcaacgctagaagcaggtgtacttacaggcgagttacttccttctgacaaacgcagccaagcg

SEQ ID NO: 208704 - DNA, 1078 bp, Unknown
  Bacterial polypeptide expressing nucleotide sequence isolated from the Sargasso Sea
aatgactaaaaaaattttaatccttccaggagatggaataggacaagaggtaatcgcatcggcagtagaggtattagactttattgttgagaaatttaatcttcagttttcaataaactcaatggaagttggtggaactgcttatgatgaatttggttctcctattcctagcaatgttttaaatgcagctaaggaagctgatgctgttctatttggtgctgttggaggtccaaaatgggatgatcttggttgggatgatagaccagagaatgctctattaacattaagaaaagaacttaatttgtttgcaaatttaagacctgcatttctatttgatgaactttcaggtgcatcacctttgaaggaaaatgttattaaaggattagatattttaattgtaagagaattaactggcggtatatattttggagaaccacgaggagttattgagcatcaaaaaccaaattatgcattcaatacaatgatatacaacgaagatgaaattagaagaattgcaaaaattgcttttgagtctgcacaaaaaagaaatggaagactgtgttcagttgaaaaagcaaacgtattagaagtatcaaaattttggagatcaatcgtgactgaaatgtcctcagattatccagatgtcgaactttcccatcaacttgctgataacaccgcaatgcaattagttttagaccctaatcaatttgatgtcatagttgcaagtaatctatttggtgatattttgtctgatattgctgcgacattaacagggtcgatagggatgcttccatcagcttcattagatagttcatttaagggtatgtacgaaccatgtcacggaagtgctccagatattgctgggaaagatatagctaatccaatagctatgatttcatctttatcaatggcattaagatattctcttaatgaagaagatatctcagataaaattgatttagcaattaaaaaatttgtagagcaaggctatagaactgtagatattgcaactgaagaaaactatttaaagacatccgaagtttcaaaaaaaataatagaaataatagaaaatgagtaa

SEQ ID NO: 208705 - DNA, 772 bp, Unknown
  Bacterial polypeptide expressing nucleotide sequence isolated from the Sargasso Sea
cagcaatacgtcaacttgcgcccggtgcgcttgttgcccggcatcaccccgccggtgcacggctatgagaccggcgatatcgacatgtatgttgtgcgcgagaataacgagggcgaatactccaacatcggcgggcgcatgtatgagggcacggaccttgagatgtgcatgcaggagaacattttcaccaagcggggttgcgaacggatcatgcgctatgccttcgagttggcacagagccggccgcgcaagaagttgacttcggccaccaagtcgaacggcatctcgcacaccatgccctattgggacgaaaaattcgccgaggtgggcaaggagtatccagatatcgagacagaccagttccacatcgacatcctgacagcacacttcgtgcggcatccggattggttcgacgtggtggtgggcagtaacctgtttggcgacatcctgtcggacctgggtccggcggtgaccggtaccatcgctgtggctcccggcgccaacatcaatccggagaaggattttccgtcgatgttcgagccggtgcacggctccgcgcccgatattgcgggacaggggattgccaatccgatcggccagatttggtccggagccatgatgctggagcatctcggcgagcaggaagcggcggacgccatcgttaaagcgatcgaaaccgtgctctcggacaagaacgcgccgcttacccccgatatgggcggtacggcgacaaccgaggatttaggcaaggcgatcgccgacgcggtttagg

SEQ ID NO: 208706 - DNA, 1108 bp, Unknown
  Bacterial polypeptide expressing nucleotide sequence isolated from the Sargasso Sea
aatgattaaaataaaaaaaagaaaatttctacttttaccaggagatggtattgggccagaagttgttggagaagtaaaaaaaattatttattggtttaataaaaataaatcattagattttgaaatagaagaagatcttgctggaggagtttcatacgaaaaacatggaacacccataactgatgaagttttttataaagcattagaatgtgaggctgtaattttaggtgctgtaggaggaccgaagtgggataacgtagaattctctaaaaaaccagaaagagccttactaaaattaagaaaagaactaaaattatttgccaacttaaggcctgccatatgttttaaacaattagttgaagcttctactttaaagccagagattgtttcgggattagatattatgatagtgagagaacttacaggcggaatttattttggtgaaccaagaggaataaagccaattgataatggcgaaagaaaaggaattaatacacatacttatacatcaagtgagatacaaagagttgctagagtggcttttgatttagcaaaaaaaagacaaaacaaagttacttcatgtgaaaaatcaaatgttatggaagcaggtcagctttggaaagaagaagttcaagatttgcatgataaagaatttaatgacgtagagctcattcacatgcttgcagataattgtgcaatgcaactccttagaaatccaaagcaatttgatgtaattgttacagataatttatttggcgatatgctttccgatcaagcatctatgttgacaggttccttaggtcttcttccttctgcatctttaggttcaaaaaataaagaaggacagatgagagccatgtatgagcctattcatggttctgctccagatatagctggcaaaggaatagcaaatcctatagcaactatattaagttttgctatggctttaagatattctcttgatttagataaagaagcaaatgccttagaaaaagctgttcaagatgttttggatgaaggtttaagaacaaaagatattatttctaaaggtaaaaaagaagtatccacatctcaaatgggtgatgcgataatttcaaaattgcaataa

SEQ ID NO: 208707 - DNA, 760 bp, Unknown
  Bacterial polypeptide expressing nucleotide sequence isolated from the Sargasso Sea
ttcttcatcattaaaaaagaaatcgttgaggatctcgatattctaattgttagagaacttacaggaggtgtttattttggagaacctcgtggcatagaggaattagagaatgggaatagaagaggtaccaatactcaggtatatgaaacttgggaaattcaaaggattgctgaagtggcatttgagttggctagaaaaagaaaaaataaagttacttcgtctgaaaaaagaaatgtcatggaatcaggattgctttggtatgaagaagtaaaaaaaattcatcaagaaaaatataatgatgttgaattagatcatatgcttgcagataattgtggaatgcaattagtaagatggccaaaacagtttgatgtgattgttacagataatctttttggtgacatgttatctgatgttgctgcaatgttaactggctctcttggtatgcttccgtcagcttcacttggtaaagctgtgaatggattatttgaatcagccctatatgagcctgttcatggttctgcgccagatatttccggtcaaggaattgcaaatcctttggcatctattttatccttctcaatggcgttaaagtatagttttggtagaaataaagaatcaagattacttgaggattctatatcaaaagttttagatgatggatcaagaacaaaagatatcgctgatgatggagactttatttcaaccagtgagatgggcaataaagtaattgaaaatcttgaaatacttaataaggaataag

SEQ ID NO: 208708 - DNA, 698 bp, Unknown
  Bacterial polypeptide expressing nucleotide sequence isolated from the Sargasso Sea
aagggaacttacagggggaatctactttggggagccaagaggaattaaaccgattgataagggagaaagaaaaggaattaatacccacacttatacatcgagtgaaatacaaagagttgcaagggtagcttttgatttagcaaaaaaaagacaaaataaagtaacatcctgtgaaaaatcaaatgttatggaagcaggattgctttggcgagaagaggttcaagatttgcatgataaagaatttaaagacgtaaaacttgatcatatgttagctgataactgcgcaatgcaactattgagaaatccaaaacaatttgatgtaatagttacagataatttatttggtgatatgttgtcagatcaagcatcaatgttaacaggatcactaggacttttgccctcagcttcactaggctcaaaaaataaagagggtcagatgagagctatgtatgagccaattcatggatctgcgcctgatatagctggaaaaggtattgcaaatcctattgcaactattctgagttttgcaatggcgttgagatattctcttgatttagataaagaggcaaatgcattagagagagcggtccagcatgtgctgaatgatggtttgagaacaaaagatataatttctaaaggaaaaaaagaagtatccacatctcaaatgggtgatgcgataatttcaaaattgcaataat

SEQ ID NO: 208709 - DNA, 715 bp, Unknown
  Bacterial polypeptide expressing nucleotide sequence isolated from the Sargasso Sea
taagagaattaacaagtgggagtttacttttggtcaaccaagaggtatatcaaaagttagtgatacagaaagtaaagcaattgatactcaactttacacgacttcagagatagatagagttgcaaaagttgcttttgatttagcaaaattaagaaaaaataaagttacttctgctgaaaaatctaatgttatggaaactggtttactttggagaaaaacagttactgaattacataaaaaagaatatacttcagtaaatttagaacacatgttggcagataattgcgcaatgcaacttgttcgatatccaaaacaatttgatgttattctcactgataatctttttggtgatttattaagtgacactgctgctatgctgacaggctcacttggtatgcttccttcagcatctcttggaccactaaaggaaaatggaactagagctgctatgtatgagccagttcatggaagcgcaccagatattgctggtcaatcaaaagccaaccctctagcaatgataatgagttttgcaatgatgcttaaatacagttttgatatgcaagaagatagtcaattagttgaaaacgctgttcaaaatgttttattaaaaggtcttagaactgcagatatcaaagacggagcagaaaaaattatttctacaaaagaaatgggagatgcagttattgaagaacttaaaattttatcaggacaataa

SEQ ID NO: 208710 - DNA, 1096 bp, Unknown
  Bacterial polypeptide expressing nucleotide sequence isolated from the Sargasso Sea
tatggatcataaaattttagcacttggtggcgatggaataggtccagaagttttagattttggacttcatttaatttacaaaattcaagatctttttggaataaaaataaaaattgagcacgatcttataggtggtgcttgctgggataaatttcaggtattttgtaaaaatgaaactgttgaaaaagcaaaaaactctgatgctattctcgttggcgccgtaggtggcccaaaatgggataatattaagataaaaggaacctcagaagagcaagatggcctaatgagactaagaaaagaattagatgcttatttaggaataagaccagcaaaagtttttagtggcctcaatgatcaaagtcctattaaagaaaaaaaactcaaaggaactgatattttggttttaagagaaatgactagtgggattatgtttgctcagccaagaggtaataaaatagaaaatggtttgcgttatgcatttgataccgccgcttacagggaagatgaaatagaaagatttgtaaatgcaggatttgatttagcgagaaaaagaaagaaaaaaatttgttcaattgataaagcaaatgtgatggaaagttataaattgtggagggatatcgtaaatgaagtgtccaaaaattatagtgatgttgaattaaatcattactatgcggataattgtgcctatcaattaattatgaacccttccaaatttgatattatattgggatgcaatttattaggggatattttttctgatttagttgcagttttttctggtggattaggtttgttgccttcagcttgtttgtgtggccctccaaaaaactttgtcaaaggtatttatgaaccagttcatgggtctgctcctgatatagcaggaactggaaaagcaaatcctattggtatgtttttaagtatagcaatgatgtttgaatattcgtttgagagaaaagatattagcaccattattgaaaaggctattgataaattaatttacaaagttaatctaacaccagatttaaatggtaagctttcgactgaagaagtttttttaaaatttatagatgagttaaataatgaagctagagtttga

SEQ ID NO: 208711 - DNA, 721 bp, Unknown
  Bacterial polypeptide expressing nucleotide sequence isolated from the Sargasso Sea
tctagatattttaattattagagaattgactggtggaatttattttggggaaccaagaggagtagaaaaaataaacgaaaaaatttcaagaggatttaacactcttgtctacactacaccagagatagaaagaattgcagaggttgcatttgaaacagcacttcaaagaggaaaaaaattatgttctgttgataaagcaaatgtattggaatctacagaactctggagagaaataattatttcaacaagtaaaaaatttcctgatgttgagctttcccacatgtatatagataatgcatcgatgcaacttgtaagaaacccaaaacaatttgatgtaattgttacgactaatatgtttggtgacatattatcagattgtgcatctatgcttactggatcacttggaatgttaccctcagcttcgattggctatgaccactccggaaataaaaaagcaatgtacgaacctgtccacggttctgctccagatatttcgggaaaaggagttgccaatcctttagcaatgatattgagtgttggaatgatgtttaaatattctttttctcgagatgacatttctgatttaatatctaaagtagttaattctatccttgaaaagggttatagaacaaaagatattaacaaccaaaatggtaaagaagtttcaacaagtgaaatgggtgatttagttttaaaggaattagaaaatgaaaaaatataa

SEQ ID NO: 208712 - DNA, 688 bp, Unknown
  Bacterial polypeptide expressing nucleotide sequence isolated from the Sargasso Sea
ttggccaaccgacgaggtatatcaaagataaatgatagtgaagaaaaagctgttgatacacaaagttacactacttcagaagtttcaagaattacacgtgtagcatttgatttagccagacttagaaataataaagttacttcagttgaaaaatctaatgtaatggaaacaggaatgttttggaaaaaaattgtttcaaatgttcaccaaaacgaatttcaagatatggatttacatcacatgttagctgacaactgtgcaatgcagcttgttagaaatccaaaacagtttgatgtaattttaacagacaatttatttggtgatctattaagtgatatagcagcaatgttaaccggatcacttgggatgctaccctctgcttcattaggaccattatcagaaaatggctcaagatctgcaatgtatgaacctgttcatggaagtgctccagatatagcggggcaaggtaaagcaaatcctctggcgatgatcatgagtttcgcaatgatgctgaaatatagttttaatatgattgaggatagtaacttaattgagagagcagtccaatctgttctttctcttggtctgcgaacttcagatattagtgatggagcaaataaagtcgtatcaactcaagatatgggtaaagctgtaattgaggaattaaaaaaattaacaggcaactaaa

SEQ ID NO: 208713 - DNA, 1108 bp, Unknown
  Bacterial polypeptide expressing nucleotide sequence isolated from the Sargasso Sea
atgattaaggtaaaaaaaagaaaaattcttttattgcctggtgatggtatcggcccagaagtaataggtgaagtcaaaaaaattataaagtggtttaatgataagaagtctcttgattttgaaatagatgaggatcttgctggaggttgctcttatgacaaacatggtagcccaataaccgatgaagtattttataaagctctagagagtgaagttgttatgttaggcgcggtaggtggaccaaaatgggatgatgtagaattttctaaaaaacctgaaagagcattattaaaactaaggaaagaactaaaattatttgcaaatttaagaccagcaatttgttttgaacaattggtgagtgcttcaactttaaaaccagaagtagtttcgggcttagatataatgattgttagagagcttactggaggaatatattttggtgagccaagaggaattaaaccaattgaaaatggagaaagaaaaggaattaatactcacacatatacgactagtgaaatagcaagagttgcacgtattgcatttgatcttgcaagaaaaagatcgaataaagtaacttcttgtgaaaaatcaaatgttatggaagctggacagttatggaaggaagaagtgcaagagcttcatgataaagaatttaaagatgttgaattaagccatatgcttgctgataattgtgcaatgcaactattaagaaatcctaaacagtttgatgtaattgtaactgataatttattcggcgatatgctttcagaccaagcctcaatgttaacaggttctttaggacttttgccttcggcatctttgggtgcaaaaaataaagatggagaaatgagagcaatgtatgaacctattcatggttcagcgccagatattgctggtaaatcaatagcaaatcctattgcttcaattttaagctttgctatggctttaagatattcattggatttagataatgaggctgatgcattagaaaaagcagtacagcacgtattaaatgatggtttaagaactaaagacattctatcagatggaatgaaagaggtatcaacttcagcaatgggtgatgcgataatttcaaaattgcaataaa

SEQ ID NO: 208714 - DNA, 1084 bp, Unknown
  Bacterial polypeptide expressing nucleotide sequence isolated from the Sargasso Sea
aatgacaaaaaatatattaattcttcccggagatggtatcggacaagaagtttcttcttcaatgaaggaagtgcttcattatttgattgaagaacagaacttaaattttaaaattactgaaagaaatgttggaggttcctcttatgatgaatttggcacccctttgaccgaagaaacgttaaaagtcgcaaaagactcagatgcaattttatttggtgctgttgggggaccacaatgggataacctagaatgggataatcgaccagaacaagctcttttagcattacgtaaatccttgagtttgttcgcaaatttaagacctgcttttttatttaatgagcttgcatcagcgtccccattaaaaaataacatcattgaaaatctagatattcttatagtcagggagttaacaggaggtatttactttggggaacctcgaggaattgtcgaaaatgaatctcctaaatatagctttaatacgatgatatacaacgaagatgaaataagaagaattgctaaggtagctttcgaagctgcaatgaataggaatagaaagttatgttctgttgaaaaggctaatgttttagaggtttcaaaattttggagaagtatcattactgaaatgggttcagaatatccagaggtagagctctcgcatcagcttgctgacaatactgctatgcagctggtccttaatccaaatcaatatgatgtaattgtttcaggtaatctctttggtgacattctttcagatatcgcagcaactttaagtggttcaatcggaatgcttccgtctgcatctttgaatagctcttctcaaggaatgtatgagccctgtcatggcagtgcgccagatattgctggcaaaggtgttgcaaatccaattgcaatgattgcttccctagcaatggcttttgagtactctcttgatagaatcgatatagcaaagaggattgaatcagcaataaaaatttttattagcaatgggtttagaaccaaagatattgctacttcagaagagttcgtgcgaacccaagatgttgccccagctttaattaatattttaaaggatggacatgaataa

SEQ ID NO: 208715 - DNA, 820 bp, Unknown
  Bacterial polypeptide expressing nucleotide sequence isolated from the Sargasso Sea
ttttaagcttagaaaagaattaaaattatttgcaaatttaagaccagcgatttgcttcaaacaattagttgagtcttcaacacttaaacctgaaattgtgtcagggttagacataatgatagtaagagaattaactggtggtatttattttggtgaaccaagaggtatcgaaccaatagaaaataatcaaaggaaaggcgttaacactcatacctacacaacttcagaaattcataggatagctcgtgtagcttttgatttggcaaaaaaaagaagaaataaagttacatcatgtgaaaaatcaaatgtaatggaagcaggcgtattatggcgagaagaagttcaggtaataaaagataaagagtttaaaaaagttgagctaaatcacatgttagccgataattgtgccatgcaacttttaaggtatccaaaacagttcgatgtaatattagctgataatttgtttggtgatatgctatctgatgaagctgcaatgttaactggttcacttggacttttaccatctgcttcgttaggttcaaaagataaaaacggaagaataagatcactttacgaacctgttcacggatcagctccagatattgaaggtaaaaatatagcaaatcctatagctacaattttaagtttatcaatggctttaagatattctttagatcttagtaaagaagccgaccaaattgataaagcagttcaaagcgttcttgacgagggattaagaactaaagatataatgtcaaaaaatatgaaagaggtttccacaactgacatgggtgatgcaattattgcaaaattgaaataa

SEQ ID NO: 208716 - DNA, 539 bp, Unknown
  Bacterial polypeptide expressing nucleotide sequence isolated from the Sargasso Sea
tacctcatgtgaaaaatcaaacgtaatggaagcggggcaattgtggagggaagaagttgaagctttacataaaaaagaatttaaagatgtaaaattagatcatatgttagctgataattgtgctatgcaattattaaggaatccaaagcagtttgatgtgattgtaacagacaatctttttggagacattttatctgatgaggcatcaatgttaactggttcattgggtcttctgccgtcagcttctctaggctcaaaagataaagatggtaatatgagagctatgtacgaaccagtacatggttcggccccggatattgctggaaagggaatagcaaatcctatagctactatattgagtttttctatgtcgctaagatattctttgaatcttgaaaaagaagcaaacagcttagaaaatgcagtacataaggtgttagatgatggtttaagaacaaaagatataatgtcagatggtaaaaaagaggtttccactagcacaatgggagacgcgattattgcttgtttgcaaaaataaa

SEQ ID NO: 208717 - DNA, 1084 bp, Unknown
  Bacterial polypeptide expressing nucleotide sequence isolated from the Sargasso Sea
atggcgaagacctatcggatcgcggtcatacccggcgacggcatcggtgtcgaggtgatgcctgaagcgattcgcgtgctggacacggtaaaaaaacgcttcggtatcgagctggagtatcagcacatcgaatgggcgagctgcgactactacgcgaagcacggcaagatgatgccggacgactggaaagcgcaactgcaatccgccgacgcgattctgttcggcgcggtcggctggcccgacacggtgcccgaccatatctcgctgtggggctcgctgctgaagttccgccgcgaattcgaccagtacatcaatctgcgccctgcgcgcctcttcgccggcgtgccttcgccgctcgcgggccgcaaggcgggcgacatcgatttctggatcgtgcgcgaaaataccgagggcgaatattcgtcggtgggtggcgtgatgttcgaaggcaccgagcgtgagttcgtgctgcaggaatccgtgttcacgcggcacggcagcgagcgcgtgctgaagttcgcattcgatctcgcgcaacggcgcgaacgcaagaagatcaccgtggcgaccaagagcaatggcatcgcgatcagcatgccgtggtgggacaaatgcgcggccggcatcgcggcgcagtatccggacgtgacgtgggacaagcagcacatcgacattctctgcgcgcgcttcgtgctgaacccggaccgcttcgacgtggtggtcgccaccaatctgttcggcgacatcctctccgatctcggtcctgcctgcaccggcacgatcggcctcgcgccgtcgggcaatctgaatccggaccgcaagtttccgtcgctgttcgaaccggtgcacggttcggcacccgacatcgccggcaagaacatcgccaatccgattgcaatgatctggtcggccgcgatgatgctcgatttcctcggcaatcacgagggcaaggagcgcgaggcacacgacgcgattctcgccgcgatcgaagcaacgctgatcgaaggtccgcataccggcgacctcggcgggaaggcgaacactacggaagttggcgaggccatcgcggccaaactcgcctgag

SEQ ID NO: 208718 - DNA, 1075 bp, Unknown
  Bacterial polypeptide expressing nucleotide sequence isolated from the Sargasso Sea
tttgcctggagacggtgttggtccagaagtaactaatgaggtaaaaaaaattattacatggcttaactcaaaaaaatcgttagattttgaaattgatgaagatttggcaggaggcgcatcttatgacgcgcatggaactccaattacagatgaagttttttataaagctctagagagtgaagttgtaatattaggtgcagttggtggacccaaatgggacaatcttgaattttctaaaaaacctgaaagagctttattgaaattaagaaaagaattaaaattattcgcaaatttaagaccagcaatatgttttaaacaattggttgatgcatctactcttaaacctgaaattgtttcgggtttagatattatgattgtaagagagctaaccggaggtatatattttggagaaccaagaggcattaagcctatagacaatggtgaaagaaaaggaattaatactcatacttatactagtagtgaaattgtaagagtagcgagagttgcttttgatttagccaaaaaaagatcgaataaagttacttcttgtgaaaaatcaaatgtaatggaggcaggacaactatggaaagaagaggttcaaactttacatgatgaagagtttaaagaagttgaattaaatcacatgcttgctgataattgtgctatgcaattactaagaaatcctaagcagtttgatgttattgtaactgataacttgtttggagacatgttgtcagatcaagcatctatgttgactggttcattaggccttctgccctcagcgtcattaggtgcaaaaaataaggatggtgaaatgcgagctatgtatgaaccaatacatggttcagctccagacatagctggcaaggggattgcaaatccaatagcaacaattttaagttttgctatggcattaagatattcactagacttagataaagaagctgacaatttagaaaaagctgtacaagatgtgctaaatgatggcttaagaacaaaagatattatatcaaaagggaaaaaagaagtatctacctctcaaatgggtgatgcgataatttcaaaattgcaataa

SEQ ID NO: 208719 - DNA, 1084 bp, Unknown
  Bacterial polypeptide expressing nucleotide sequence isolated from the Sargasso Sea
tatgaatattttaattttacctggtgacggcattggaaaagagatttgttttgaggttgagaaactatttaaggaactaaatagcatctttagtattgatattaattttgaaactagtgattttggtggtagcgccatcaaaaaatacaacaacccttttccaaaacacacatctgaaaatgtgatcgcttctgatgcagtaattttaggtgctgtaggtggtcctatgtttgatcatttggaaggggaaatgaagcctgaatcaggattattaaaattgagaaaaaataacaatttatatattaatttaagacctattttttcttttacacatgcaatcgaatcttctcccttaaaaaaagaaataatttctaatttagatattttaatcataagagagcttgtaggcgggttatattttggagagcccagaggttttaattctgatagaaccgagggttataatactatgagatatacaaaaacacatattaataaaatattaaaatttgcatttgaagtttcaagcttaagaaacaagaaactttgctctgtagataaagcaaatgttctcgaggtttctcaactttggagatctgaagctattgaattaaataaaagctataaagatgtagctcttgaaaatatgtatgttgataatgctgcaatgcaacttgttttaaatccaagtcaatttgatgtaattgtaactgaaaatctttttggagatatattgtctgaccttgcatcagttttaactggatcaataggacttttatcttctgcctcacttaatgatgatcattttggtgtttacgagccaatacatggatctgcgccagacatagctggtaaaaatattgctaatccatgtgcaataatattgtctgttggcttgatgtttttgcatacatttaatcgaaaagatatttatgatgctattaataatgctgtcgaaaacactataaatagtggtacaaagacaaaagatatttcattaaaaggagataaagcagctaccacacaagaaatgggagattgtataattacaaacttaaggaaatatgcaaatgaaaaattatag

SEQ ID NO: 208720 - DNA, 1096 bp, Unknown
  Bacterial polypeptide expressing nucleotide sequence isolated from the Sargasso Sea
atgagttatcaaattgcagtattagccggggatggtattgggccagaagtgatggccgaggcgcgtaaggtgttaaaggcggttgaggcacgttttggtcttaacattgaatactctgaatatgatgtcggcggtatcgctatcgacaatcatggttgtccattgcctgaagcaacactgaaaggttgtgaagcggccgatgccattctattcggttcagtcggtggtcctaaatgggaaaaactgccgccgaatgaacaacccgagcgtggtgcattgctgccgctacggggtcacttcgaactgttttgtaacctgcgcccagctaaattgcatgatggtttagaacatatgtcaccgctgcgcagcgatatttctgcccgaggtttcgatgttctttgcgtgcgtgagttaacgggtgggatctattttggtaaacctaaggggcgccaaggtgaaggtgagagcgaagaagccttcgataccatgcgttacagccgccgtgagattgcccgtatcgcacgcattgccttcgaagccgcccgcggtcgccgtaaaaaagtcacttcggtcgacaaggcaaacgtcttagcttgctcggtattgtggcgccaagtggtagaagaagtggcggtggacttccccgatgttgaactggaacacatctatatcgacaacgcgaccatgcagttgctacgccgccccgatgagtttgacgtcatgctgtgctctaacttgtttggcgacattttatcggacgaaattgccatgttgaccggctccatgggcttgttgtcttcggcgagcatgaatagcacaggctttggtttgtttgaacccgctggtggtagtgcgccggatatcgccggaaagggtattgctaacccgattgcacaaattctgtcggccgcgctgatgctgcgtcacagcttaaagcaagaagaggcggcaagtgcgattgaacgtgcagtgagtaaggcgctgaattctggctatttaaccggtgagctattaagtagcgaccaacgccataaggccaaatcgacagtcgaaatgggcgactttatcgccgatgcagttaaggcaggtgtgtaat

SEQ ID NO: 208721 - DNA, 1012 bp, Unknown
  Bacterial polypeptide expressing nucleotide sequence isolated from the Sargasso Sea
gctggaaaaagtgcaggccaaattcggcttcgccctcgactacgagcgccatgacgtgggcggcatcgccatcgacaaccacggcaccccgctgccccagagcaccattgcaggctgcgaggcggccgacgccgtgctgttcggctcggtgggcggccccaagtgggagcacctgccccccaacgatcagccggagcgcggcgccctgctgcctctgcgcgcccacttcaagctgttctgcaacctgcgtccggcccgcatctacaccggcctcgagcagttctcgccgctgcgtgccgacatctcggatcgcggttttgacatcgcctgcgtgcgcgagctgaccggcggcatctacttcggccagcccaaggggcgtgaaggggaaggccccaccgagaaggcgttcgacaccgaggtgtaccatcgcttcgagatcgagcgcatcgccaagatagccttcgaatccgcccgcgtgcgcaaggccaaggtcacctccatcgacaaggccaacgtgctcgcctcctccatcctgtggcgcgaggtggtgacgcaagtcgccaagtcctatccggacgtggcgctgaatcacatgtacatcgacaacgccaccatgcagctcatcaaggatccgtcccagttcgacgtgctgctctgctccaacctgttcggtgacatcctctccgacgagtgcgccatgatcaccggctccatggggctgctcccctccgccagcctcaacgagtcaggcttcggcctgttcgagccggccggtggctcggccccggacatcgccggcaagggcattgcgaaccccatcgcccagatcctctccgccgccctgatgctgcgttacagtctcggccaggaagccgccgcccaggccatcgagcaggccgtggcccagaccctggccgagggttacttcaccgccgacctgcatcaggccagcgcccgtcacccggtgcagagcacggccgagatgggcagccagatcgccgcgcgcatctga

SEQ ID NO: 208722 - DNA, 1111 bp, Unknown
  Bacterial polypeptide expressing nucleotide sequence isolated from the Sargasso Sea
atgactacgtcttataaattattagtgttacctggtgatggaataggtcctgaggtgatgagtgaagtacttaaggtcgcaagctgcattgaagatctctcttcagtaaattttgaaattgagcaagatgaaattggaggagctgcatatgataaatatggaacccctctttctgaagaaaccttaaagaaagctaagaacagccatgctgttttattaggtgctgttggtggaagtaaatgggataatttagatttctctcttaaacctgaacaaggtttactaaggataagaaaagaattagatttatatgctaacttgcgcccagcattatgttttgaatctatggttggagcatcttcattaaaaccagagttagtttctggtttagatattatgattgttagagaattaacaggaggtgtttattttggtgagcccagaggaataaaagagctttctgacggaactcgtcagggtactaatactcaaacttataatactaatgaaataagacgcgttgctcgaatagcttttgaattagctcaaaagagaaataaaaaagttacttcatgtgagaaatcaaatgttatggagtctggaattctttggcgtgaagaggtcgagcatgttcatcagagtgagtttgaagatttagaactttctcatatgtatgcagataactgtgctatgcaattagtaagaaatccaaaacaatttgatgttatagttaccgataatttgtttggtgacatactatctgatgaagcggcaatgttaacaggctctttaggcatgcttccatctgcatcacttggtgaaatagatgagaataattttagaaaatctttatatgaacctgtacatggttctgcacctgacatttcagggcaaggaatagcgaatccaattgcttcaatcttaagctttgcaatgtgtttaaaatattcatttggcatggataacgagtcagatttaattaataattctgtaaataaagtgttgtctgaaggatttaaaacagctgatttaataggtgatgatgataaaaatctttcaacagaagaaatgggtaatcagattatcaaagtgattaaaggattagggtaat

SEQ ID NO: 208723 - DNA, 553 bp, Unknown
  Bacterial polypeptide expressing nucleotide sequence isolated from the Sargasso Sea
gtttgaattagcaatgaaaagatcaaataagttatgttgtgtcgataaagctaacgtaatggaaagttcaagattatggagagaaacagttcaaagtctagagaaaaattatccaaaggtaaatgtatcatacgaattagttgatgctgttgcaatgaggcttattcagtggccaaactcttacgatgttttaattaccgaaaatttgtttggagatattttaactgatgaagcctcagttatatcagggtcaatgggtctaatgccatcagcttcaattggtgatggaattgccttatatgaaccaattcatggatcctttccgcaagcaacaaataaaaatatagctaaccctatagcaacaattttatcagctgcaatgatgttcgagatgagtttttctctcaaaaaagaatcagatttgattagaaaagctgtgaatatttctcttgagaaaggtatagttactgaagatatctctagtacaagaaaaccctataaaacctctgaggttggagattttttggtcaatcaaatacttattagtaattaa

SEQ ID NO: 208724 - DNA, 808 bp, Unknown
  Bacterial polypeptide expressing nucleotide sequence isolated from the Sargasso Sea
agaattaaaattatttgccaatttaagaccagcaatttgttttaagcaacttgttgatgcatcgagtttaaagccagaaattgtttctggactagatattatgatagtgagagagcttaccggcggaatatattttggagaacctagaggtattaaacctattgataatggtgaaagaaagggtgttaacacccatacatatacctcaagcgaaattgcaagagttgcaagagttgcttttgacttagcaaagaaaagaaataataaagttacatcgtgtgaaaagtcaaatgtgatggaagcaggacagttatggagagaagaagttgaggaaattcataagaacgagtttaaagaagtaaaacttgagcatatgctagccgataattgtgctatgcagttattaaggaatccaaaacaatttgatgtaattgtaaccgacaatttatttggagatatactttcagatgaagcagcaatgttgactggatctttaggtcttttgccgtctgcttccttaggtgcaaaagataaaaatggaaaaatgagatccatgtatgaaccagtccatggttcagctcctgatattgctggtaaaggcttagcaaatcctatagcaacgattttaagtttttctatggcattgagatactcgcttgatttaggaaaagaagctgatgagcttgataaagcagttcaaaatgttcttgatatgggacttcgtacaaaagatatattttctaagggaaataaggaagtttcaaccaacacaatgggagatgcaattattgcgcaattgcaaaattaa

SEQ ID NO: 208725 - DNA, 1099 bp, Unknown
  Bacterial polypeptide expressing nucleotide sequence isolated from the Sargasso Sea
aatggctaataagactaggaaaattttgcttttacctggtgacggaataggccctgaggtggttgcagaagtaagaagaatacttgagtggatgaataaaacaaagtctttagattttgttttaagccaagaattaattggtggtgcatctattgatgcaaataaagttccaattactgatgaggttttttataagtctttggagtctgatgcagtaatattaggtgcttgtggcggacctaaatgggataatttggaattttcaaaaaaacctgagagagctcttttaaaacttagaaaagagctaaagttattcgctaacttaagaccagctatttgcttcaaacaacttgttgactcttcaactcttaaaccagaaatagtttcagggttagatattatgattgtgagggaattaactggtggtatttatttcggtgaaccgcgtgggattgaaccaattgaaaataaccaaagaaaaggtattaatactcactcatatactacttcagaaattcaccggatagcacgtgttgcatttgatttggcaaaaaaaagaaaaaataaagttacctcctgcgaaaaatcaaatgtcatggaggcaggtattttatggagagaagaggtacaggcgattaaggataaagaatttaaaaaggtagagctaaatcatatgttagctgataactgtgcgatgcagcttttaagatatccaaaacaatttgacgttattttagcagacaatttatttggagacatgttgtcagacgaggcagcaatgcttacaggttctctaggacttttaccttctgcatcattaggtgcaaaagataaaaacggaagaattagatcattatacgaaccagttcatggatccgctcctgatatcgagggaaaaaatattgctaatccaatagctactattttaagtttatctatggcattaaggtattccttagaccttggaaaagaggcagatcaacttgataatgccgtacagagtgttttagacgatggtttaagaacaaaagatataatgtctaaaaatatgaaagaggtttctactacggagatgggtgatgcaatcatcgcaaaatga

SEQ ID NO: 208726 - DNA, 1078 bp, Unknown
  Bacterial polypeptide expressing nucleotide sequence isolated from the Sargasso Sea
aatgagtaaaagtattttaattttacctggcgacggtattgggcaagaagttacagcctctatggttgaggttctaaattttttgattggaaaatacaatcttgattttgatgttactaccatgagtgttggtggtacagcatataatgaatacggaacaccactaccgaataaggttttagaaaaagcaaaagaatcagatgctattttatttggagcagttggtggaacagaatgggatcatttagattgggatgatcgaccagaaaatgctttgctgtctttaagaaaagaattaaatctctttgcaaaccttcgaccggctctctcctataaagaattatctgaggcatcaccattaaaaggagaaatagttagtaatctagatatattgattgtaagagagttaactggcggaatatattttggtgaaccaagaggaattgttgaaaataaaaatcctaattatgcattcaatacaatggtttataacgaagatgaaataagacgaattgctaaagttgcttttgaatcggctcaaaaaagaaatggtaggttatgctcagttgataaagctaatgtgcttgaggtttcaaaattttggaggtcaattgttgcagaaatgtccaatgattatcctgatgttgaactatctcatcaacttgcagacaatgcagcaatgcaactagttttgaatcctaatcaatatgatgtaattgttgctagcaatctttttggagatattttgtcagatatagctgcaacacttacaggctcaatcggaatgttaccatctgcatctcttgatagttcattcaagggtatgtatgagccttgtcacgggagcgcacctgatattgcaggcaaaaatttagccaaccctattgccatgattgcttctttgtcgatggctctaaaatattctcttggagaagagtctgtttctgataagattgataaagcaatcagtaattttattaaagcaggatttagaacaaaagatatatctactgaccaaaattttttaaacacgtcagaagtagcaaataaactaatttcaattatagaagatgagtaa

SEQ ID NO: 208727 - DNA, 1108 bp, Unknown
  Bacterial polypeptide expressing nucleotide sequence isolated from the Sargasso Sea
atgattaaagtcaaaaaaagaaaatttttattattacctggtgatggaattgggcctgaagttgttggagaagttaaaaaagttgttgaatggtttaacaaaaataaatcactagattttgaaattgatgaagatttagcaggtggagcttcatatgataaacatggaactcctataactgatgaagttttctataaggctctagagtgtgaagctgtaatccttggagcagtagggggtcctaaatgggatgatgtagagttttcaaaaaaaccggaaagagctttattaaagttaagaaaagaacttaaactttttgcaaatttaagacctgcaatatgttttaaacaattagtagatgcctcaactcttaaacctgaaattgtttcaggattagatattatgattgttagagaacttacaggtggaatttattttggtgagcccagaggaattaaacctattgataatggtgaaagaaaaggaatcaatacacatacttatactacaagtgaaattcaaagagttgcaagagttgcttttgatttagccaaaaaaagaaaaaacaaagttacatcatgtgaaaaatcaaatgtaatggaggcaggtttgctttggaaagaagaagttcaagaactacatgataaagaatttaaagatgtagaattaaatcatatgctagcagataattgttctatgcaactacttagaaacccaaaacaatttgatgtaattgtaacagataatttatttggagatatgttgtccgatcaagcatctatgttaactggttctttagggttgttaccatctgcatcattaggagcaagaaataaagatggaaaaataagagcaatgtatgaacctattcatggttcagcacctgacatagctggacaaggtttagccaatccaattgcaacaatattaagttttgcaatggctttaagatattcacttgacttagataaggaagcagattctttagaaaatgcggttcaacgtgttttggatgaaggacttagaactaaagatattttatccaaaggaatgaaacaagtatcaacatctgaaatgggtgatgcgataatttcaaaattgcaataac

SEQ ID NO: 208728 - DNA, 1018 bp, Unknown
  Bacterial polypeptide expressing nucleotide sequence isolated from the Sargasso Sea
aatgattaaaattaaaaaaagaaaaattttattattaccaggagatggtatcggaccagaggtaatcgctgaagtcaaaaaaataattgaatggttcaactcaaataaatccttggattttgaaattgaccaagatttggttggaggtgctgcttatgataaacatggaactccaataactgatgaagctttttacaaggcacaagagagcgctgcagtaatattaggtgctgttggtggaccaaaatgggataatattgatttttcaaaaaaaccagagagggctctattaaaattaagaaaagaattaaaattatttgcaaatttaagacctgcaatttgtttcaaacaacttgttgatgcctcaagtttaaagcctgaatttgtttctaatttagatattctttttgttagggaattaacgggtggaatttactttggtgaacctagagggataaaaccaattgataatggtgaaagaaaaggaattaatactcatgtctatactactagtgaaatagagagagtagcccgagttgcatttgatttagccagaaaacggaataataaagttacttcctgtgaaaagtcgaatgtcatggaggcaggtcaattatggaaagaagaagttcaagcaatacatgaaaaagaatatagcgatgtagaattaaatcacatgctagcagataactgtgcaatgcagttagttagaaatcccaaacaatttgatgtgatagtaacagataatctttttggcgacatgttatcagatgaagctgcaatgttgactggttctctaggacttttgccatctgcgtcccttggagccaaagataaaaacggtaatatgagatctttatatgagccagttcatggatcagcacccgatatagcaggtcaaggtattgctaatccaatagcaacaatactgagttttgcaatggctttaagatattctctagatcttgataaagaggcagatagtttagaaaaagctgttcaaggtgtgcttgatgag

SEQ ID NO: 208729 - DNA, 883 bp, Unknown
  Bacterial polypeptide expressing nucleotide sequence isolated from the Sargasso Sea
atgagtaataaaaaaattttaattttacctggtgatggaattggcaacgaagttatggttgaggtattaaaaataattgattggatggaaaaaactaaatctttatcttttgatatttctgagagattagttgggggtacagcatacgataaagaaggtaattctataagcgatgaaactatgcaaatagctatggattgtgatgctgtattatttggtgcggtaggaggtgctaaatgggataatgtagaaagagataaaagaccagaagcagccttattaagattaagaaaagatctagatctgtttgccaatctaagaccagctgttgttttagatgctctttctgattcatcatctttaaaacctgatcttgttaaaggattagatattttgataattagagaattaacaagtggtgtatattttggacaaccaagaggtatatcaaaaattagtgagactgaaagtaaggcagttgatactcaactttataccacgtcagaagttaatagagtttcacgagtggcatttgatttagcaaaattgcgaaataataaagttacatcagtagaaaaatcaaatgtaatggaaacaggtttattttggaaagaaactgtaacagatttacacaaaaaggaatattctgatgttaatttagaacatatgcttgcagataattgtgcaatgcaattagttcgttatccaaaacaattcgatgtcatacttacagataatttatttggtgatcttttaagcgatactgcagctatgctaacaggatctttaggaatgcttccttcagcagctcttggacagttaaagaaaatggaactagagcagcaatgtatgagcccgtgcatggtagtgcaccagatatagc

SEQ ID NO: 208730 - DNA, 1054 bp, Unknown
  Bacterial polypeptide expressing nucleotide sequence isolated from the Sargasso Sea
aatgaaggaggtcataaaggttgctaagagtattggtgaacttagtaaagttaaatttgagatagaagaggacgatattggtggatctgcctatgatcgctatggcactcctctatctgatgagactcttgaaaaagctaaaaactctcacgcagttttacttggtgctgtgggtggagaaaaatgggataatttagatttttctcttaaacctgaacaaggccttttgagaattagaaaagaattagacttgtttgcaaacttaaggcctgctctatgttttgagtcaatggttgacgcctcttctcttaaaccagacttagtatcaggtctcgatatattaattgttagagagcttactggtggtatttattttggtgaaccaagaggtattgaagataaaggtaacggaaatcgtgttggaattaacactcaatcttatagcactgaagaagttagaagagttgcacgtatagcatttgaacttgcaagcaaaagaggtaacagggttacttcttgtgaaaaatcaaatgtaatggagtctggaatattgtggagagaagaagtctctcatgtgcatgaaaatgaatattcaaatgtcgagttatctcatatgtatgcagataattgtgcgatgcaattagttagaaaccctaaacaatttgatgttattgttactgataatttatttggagacattctttcagatgaggcggccatgctcacaggttcgcttggaatgttgccctccgcttctttgggtgcagtcgatagtaataattttagaaagtctttatacgagccagttcatgggtctgcgccagacatagctggtaaaggaatagcaaacccaattgcatccattcttagttttgcgatgtgtttaaagtactcattcaatatggacaaggaatcagatcttataaataaggctgtaaataatgtacttgccagtggctttaaaactgcggatttaataggagatgataacaaaaacctatcaacagttgaaatgggtgatcaaatattaaatcaattaaaagaaaacttttaa

SEQ ID NO: 208731 - DNA, 1111 bp, Unknown
  Bacterial polypeptide expressing nucleotide sequence isolated from the Sargasso Sea
atgattaaagtcaaaaaaagaaaattcttattattaccaggtgatggtattggtcccgaggttattggtgaagttaaaaaaattataacttggtttaatgtaaataaatctcttgattttgatatggaagaagccttagttggaggagcatcttacgacaagcacggaacaccgattacagatgaagtattttataaatcattagaatgtgaagcagtcattttaggagctgtgggtggaccaaaatatgataatttagatttttccaaaagacctgagagagctcttcttaagctaagaaaagaattaaaattatttgcaaatttgaggcctgcaatttgttttaaacaattagttgaggcatctaccctaaaacctgaaatcgtatcaggtctagacatcatgattgttagagaattgacaggtggcatttattttggtgagccgagaggcattaagccaattgataatggtgaacgtaaaggaataaacactcatacttatacttcatcagaaattaaaagagttgctagagttgcattcgatctagcaaagaagagaaacaataaagttacttcctgtgaaaaatcgaatgttatggaagcaggtcaattatggaaagaggaagttcaaaatcttcacgataaagaatttaaagatgttgagttaaatcatatgcttgcagataattgtgcaatgcaacttttgagaaatccaaagcaatttgatgtaattgtgacagataatttgtttggtgatatgttgtcagatgaagcatctatgctgacgggatctttaggtttattaccttcagcttctttgggtgcaaaaaataaagatggtgaaatgagagcaatgtatgagcctgttcatggatctgctccagatattgctggaaaaggaattgcaaatccaattgcaaccatcttgagttttgcaatggccctgaggtactctcttgacttagataaagaggctgatgacttagaaaaagcagtgcaaaatgtactagatgatgggttaagaactatagatattatgtcaaaaggaacaaaagaaatttcaacttctggtatgggagatgcgattattgcatatttgcaaaaataaa

SEQ ID NO: 208732 - DNA, 1084 bp, Unknown
  Bacterial polypeptide expressing nucleotide sequence isolated from the Sargasso Sea
atgagctctaaaattttagttttacctggtgacgggataggcgtggaagttgcagatcaaacaatccgagttattgaaaaattaaacgaacaaggtcttgatgctatttatgaaaaagatttagttggaggggcctcttatgatgtcaacggtgaacctttaacagaggctgtcttagagaaagcaaaaaactctgatgctatcttattgggagcagttggtggatctaagtgggatgatgtagaaagatcaaagagacctgaagccggactattaggtttaaggaaagagttagaactttttgcaaatttgagacctgcccttgtttttgatgcacttgttgatgcttcaactttaaaaaatgatgtagttaataatttagatataatgatagtaagagaattaactgggggtgtatatttcggtcaacctcgaggtattgaggatacatcaaatggtaaaaaagcgatcgacacacaagtttaccatgactatgaaattgatagaattgccagagtcgcctttgatttagctagtaaaagaaataataaagttacttctgttgaaaaggctaatgttatggaaacaggtgttctttggagagaggttgttaaagagactcataaagatttttctgatattaccctagaaaatatgttagccgataactgtgccatgcagttagttagaaacccaaaacaatttgatgtaatagttacagataacctttttggtgatcttcttagtgactgtgctgccatgttaactgggtcactgggaatgttaccatcagcatcattaggtgcagaaaaaaatggaaaaaggcatggtcttttcgaacccgttcatggaagtgctccagatattgctggtcaagataaagcaaaccctattgctactattttaagtttatcaatgatgttgaaatataaccttaataaacctgaattatcgaataaagtagaaaatgctgttcaacaaatcctctctgagggttatagaacaggagatatttacacagatgaaaaccaaacacttgtttcttgctctaaaatgggtgatttaattatagaaagaatttaac

SEQ ID NO: 208733 - DNA, 760 bp, Unknown
  Bacterial polypeptide expressing nucleotide sequence isolated from the Sargasso Sea
tttgttattacccggtgatggtattggaccagaggttattgcagaagtaaaaaaaataattaattggtttaataaaaataaatctttagattttgaaattgaagaagaaatggttggaggagcttcctatgaaaaacatggaacaccaattacagatgaagtattttataaagcattagaaagtgaagcagttatattaggtgctgttggaggccctaaatgggacgatctggagttttcaaagaaaccagagagagctctattaaaattaagaaaagaattaaaattatttgcaaatcttagaccggcaatttgttttaaacaattggtggatgcgtcaagtttaaaaccagatttagtttcagatttagacataatgtttgtaagagagttgacaggtggaatttattttggagaaccaagaggtatcaagccaattgataatggagaaagaaaaggaataaatactcatatttatacttcaagtgaaattgaaagagttgctcgtgtagcctttgatctggcaagaaaaagaaacaataaagttacatcttgtgaaaaatcaaacgtaatggaagccggccagctttggaaagaagaggtacaattactccacgaaaaagaatttaaagatgtagaattaaatcatatgttggcagataattgtgcaatgcaacttgttagaaatccaaaacaatttgatgtaattgtaacagacaatctattcggagatatgttatccgagaagcggcaatgttga

SEQ ID NO: 208734 - DNA, 1069 bp, Unknown
  Bacterial polypeptide expressing nucleotide sequence isolated from the Sargasso Sea
tatgaaagagtacaaaatcgcctcaattgctggagatggcattggaaaagaagttgttccagaagctttaaaaatacttaaagaagtagcaaatcaacatcaatttaaattaaagatagatgaatttgatttttcatcatgcgattattatgaaaaacatggaaaaatgctacctgatgattggaaacaacaaattggtaatcatgatgcaatattttttggtgcagtaggtatgccagataaatacccagatcatattactttatggggttccctactacagtttagaagagaatttgatcaatttatcaatttaaggccagtaaaattatttgaaggagtaaatgcaccattagcaaataaaaaacctggtgacatagatatgatgatagtgcgtgaaaacactgagggcgaatattcttcggtaggtggaaaaatgtatcaaaatactgaaagagaaattgttatacaagaaactataatgtctaaacatggaatagatagagttcaaaaatttgcatttgaattagcaaaaacaagagatagaaaaaaattaactaatgccacaaaatcaaatggtatttctataaccatgccatactgggaccaaagattttatgaaaataaaaaagattttcctgagataaaaacagatcaatttcatatcgatattttagctgcaagatttgttttaacaccagagtggtttgatgttgtcgtagcatcaaatttatttggagatattttatccgatttgggtccagcatgtacgggaaccattggtatagctccatcaggaaatattaacccaaccaataaacatccttctttattcgagcctgttcatggatcagcacctgatattgctggaaaaggtattgcaaatccaataggtcaaatttggtctggcgctatgatgttagattatttaggcgaaaaagaagctgccacacgaatagtgagttcaattgaaaaaactttgctagaaaaacaaaatagaactaaagatctagatggtaatagcaatacaaaagaatgtgctaataaaatcttagataatattaattaa

SEQ ID NO: 208735 - DNA, 1078 bp, Unknown
  Bacterial polypeptide expressing nucleotide sequence isolated from the Sargasso Sea
atgagtaaagagatcttaattcttccaggtgacggcgttggtcaggaagttatggcctcagcttctgatgttttagattttgtaataaatgagtataaccttgattttttggtcacatcaatgagtgttggaggaacagcctataacgaatgtggatcaccaataccaaaagaagtgcttgattcagcaaagaaggctgatgcaatattattcggagcagtcggtgggactgaatgggataacttagactgggaagatcgtcctgaaaacgcattgctgaccttaagaaaagaactaaatctttttgcaaacttaagacctgctttcttatttaatgaattatcagaagcatctcctttaaaaaaagaagttattaatgatcttgatatcttgattgtaagggaattaactggaggaatttattttggtgagccaagaggtattgtttctaacgaagaaccaaattatgcatttaatacaatgatatataacgaagaagagatcaggcgaattgctaaagttgcatttgaatctgctcaaaaaagaaataaaaaattatgctctgttgaaaaagcaaatgttctcgaagtttctaaattttggagatctatcgtatccgaaatgtctacggactatcctgatgttgagctctcacatcagcttgctgataataccgcaatgcaattggtcttaaaccctaatcaatttgatgtaatagtctcaagcaatctttttggagatattctctcggatattgctgcaacacttactgggtcaattggcatgctaccatctgcatcattagacagttctttcaaaggtatgtttgaaccatgtcatggaagcgctccagacatagctggtaaaaatttagcaaatcctctagcaatgatctcatcattatcaatggctttaaggtattcactaaatcaggctgacatctctgataaaattgataatgcaatcaaaaaatttattcaagcaggatacagaacaatagacattgcatctgatggggattatttgttgacctcagatgttgctaaaaaaataatagaaattattaaagatgagtagc

SEQ ID NO: 208736 - DNA, 819 bp, Unknown
  Bacterial polypeptide expressing nucleotide sequence isolated from the Sargasso Sea
gtccggaatcgggcctgttggccctgcgctctggcatggagctctttgccaatctgcggcccgtcaagatcgtgccagcgctgatcggcgccagcaccctgcgcgaagaggtgatcagtggcgtcgacttgatggtggtgcgcgagctcaccggcggcatttacttcggtcagcccaagggccgcgtcaccactgaaagcggcgaagagcgcgggttcaacaccatgacctacagcagcagtgagatcgatcgaattgcaagggtcggatttgatctcgctgtccagcgcagcgcccgactctgttctgttgacaaagccaatgttctcgatgtgagccagctctggcgcgaacgggttgacgccatggctagcgattacagcggagtggaggtgagccacatgtatgtggacaacgctgcgatgcagctggtgcgcgcaccccggcagtttgatgtgctgctgaccggcaacctgtttggtgacatcctcagcgatgaggccgccatgctcactggctcgattggcatgctgccgtcagcatcactgggcactgaagggcctggcctgttcgagccggtgcatggctccgcgcctgacattgccggccaagacaaggcaaatcccctagcgatggtgctgtcagcggccatgatgctgcggatcggtttaaagcaagaagcggcggcagcaagcctggagaaagccgttgacaaggtgctggcccaaggactgcgtacaggcgatttaatggccgaagactgcacccctgtgagctgtcaggccatgggagaagcattgctgaaagcactggaatgaa

SEQ ID NO: 208737 - DNA, 772 bp, Unknown
  Bacterial polypeptide expressing nucleotide sequence isolated from the Sargasso Sea
aatggcaatatctaacactagaaaattactattattacctggagatggcattggacccgaggtagtaagagaagtaaagaaaataattgaatggctaaataagaataaatccttagactttaaaattgaagaagaactaatcgggggtgcatcgatagatgcgcataaaattcctattacagatgaagttttttataaatctttagaatgtgatgcagttatattaggagcatgtggaggacctaagtgggataaattagaattttcaaaaaaacccgaaagagctcttttgaaattaaggaaggagttaaaattatttgcaaatttaagaccagcaatttgtttcgaacaattagttgactcttcaaccttaaaaccagagatagtttccggattagacattatgattgttagagaacttacaggtggtatatattttggggagccacgtggcatacaaccaattgaaaataatgaaagaaaaggaattaatacgcactcgtatactaccactgaaattaaaagaatagccaaagtggcttttgatcttgctaagaaaagaaaaaataaagtcacttcatgtgaaaaatctaatgttatggaagctggagttttatggcgagaagaagttcaagatttgaaagataaagagtataaaaacgttgaattagagcacatgttagcagataactgcgcaatgcagttattgagaaatccaaagcaatttgatgtaattttagccgataacttatttggagatatgctttccgat

SEQ ID NO: 208738 - DNA, 575 bp, Unknown
  Bacterial polypeptide expressing nucleotide sequence isolated from the Sargasso Sea
aatgattaaagtaaaaaaaagaaaaattttacttctacctggggacggaattggacctgaggtaataaacgaggttaaaaaagtcatcaaatggcttaactcaaaaaagtctctagattttgaaattgatcaagatttagcaggaggagcttcttatgacaaacatggaattccaataacggatgaagtgttttacaaagctcttgaaagtgaagttgtcatgttaggagcggtaggtggaccaaaatgggataatctggaattttcaaaaaaacctgagagagcattattgaaattaagaaaagagttgaaattatttgcaaacttaagacctgcaatatgttttaaacaattggttgatgcatctactcttaaacctgaaattgtctctggcttagatattatgattgtaagagaattaacaggaggaatatattttggagaaccaagagggattaaacctatagataatggagaaagaaaaggcattaatacacatacttatactagcagtgaaattattagagtagcaagagtcgcttttgatttagctaaaaaaagatctaatagagtta

SEQ ID NO: 208739 - DNA, 1108 bp, Unknown
  Bacterial polypeptide expressing nucleotide sequence isolated from the Sargasso Sea
atgattaaaataaaaaagagaaaaatacttcttttacctggtgatggtgtgggacccgaggttattgctgaggttaagaaaattattcaatggtttaattcaaaaaaatctttggattttgaaacagatgaagatctagcaggtggagcttcttatgataagcacggaacaccaataacggatgaagttttttataaagccttagagtccaaagcagtaatgttaggagctgtaggaggaccaaaatgggataatcttgagttttcaaaaaaacctgaacgagcactattaaaattaagaaaagaattaaagttgtttgctaacttaagaccagcaatatgttttaaacaattggttgatgcctcaacattaaaacctgaaatagtttctgatttagatataatgattgtgagagaacttacgggagggatatattttggtgaaccaagaggaattaaaccaatagacaaaggagaaagaaaaggaattaatactcatgtctacacaagtagtgaaattattagagtagctagagtagcttttgacttagcaaaaaaaagaaaaaaaaaagtaacgtcttgtgaaaagtcaaatgttatggaagcaggacagctctggaaagaagaagttcaggctttacatgaaaaagaatataaggatatagagttaaaacatatgctagcagataattgtgcaatgcaactattaagaaatccaaaacaatttgatgttatagttactgataatttgtttggtgatatgctttcagatgaagcttctatgttaacaggttctttgggtcttttgccgtcagcctcacttggcgcaaaaaataaggatggtgatatgagagcaatgtatgaaccaattcatggatcagccccagatatagccggtaaaggaattgcaaatccaatcgcaacaattttaagttttgctatggcgcttagatattcactagatttggatcaagaggcagataatttagaaaaatcagttcaagatgttttagatatgggacttagaacaaaagatattctttcgaaaggaatgaaagaggtttcaacatcacaaatgggtgatgcgatcatttcaaaattgaaataat

SEQ ID NO: 208740 - DNA, 1012 bp, Unknown
  Bacterial polypeptide expressing nucleotide sequence isolated from the Sargasso Sea
catgtcaaaaagaacgataaccgtaattccaggtgatggaattggcccaagtattattgattcagccttaaaaattcttgataaagcaggttgtgattttgaatatgaatttgccgatgccggcttaactgctctcgagaagcagggtgaactacttccgcagcgtactttagaactgatcgaaaaaaaccgcatcaccctgaaaggcccgctaactacaccagtaggcgaaggtttcacctctatcaacgtgacattacgtaagaaattcggcctgtacgctaacgtgcgtccagtgttgtctttcaaaggcactcaagcccgttatgaaaacattgatatcatcacagtacgtgaaaacaccgaaggcatgtattcaggccacggtcaaaaagtgtctgaagacggcaccaccgcagaagcgaccagtatcgtcactcgtcaaggcgctgagcaaatcgcgacattcgcctacgaactggcccgcaaagaaaaccgtaagaaagtcactatcgtacacaaagcaaacatcatgaagtcaacttcaggtctgttcctgaaagtggcccgcgaagtgagccaacgctacccagacatcaaaaccgaagaaatgatcgtcgatgcgacttgcatgaagttagtgatgaacccagaaaacttcgacgttatcgtgaccaccaacctgtttggtgacattctgtcagatctgtgtgctggtttagtcggtggtttaggtatggcacccggcgccaatattggccgtgatgcagcgattttcgaagcggttcacggcagtgcgccagatatcgcaggtaaaaacctcgcgaacccaacatctgtgatcttagcctctatccaaatgctggaatacttaggcatggccgataaagccgatctgatccgtaaagccgtatcggcagtgattgaagaaggcgaccgtacgactcgcgatttaggcggcacccacggtacgactgacttcactcaagcggtacttgaccgtttgtcataa

SEQ ID NO: 208741 - DNA, 793 bp, Unknown
  Bacterial polypeptide expressing nucleotide sequence isolated from the Sargasso Sea
atgaagaaatataagattgttttattgtcaggagatggaattggaccagagatttcagaagtttcaaaaaaagttttaaaaaagctttcaaaaaatcataatttcgatattgagattattgaaaaattatttggagggatagcgtatgaaaaatatggtactcctgctccagatgagacactagaacaatgtaaaaaaagtgacgcagtacttttagcatgtgttggagatattaaatatgattctcttgcaagagaattaaggccagaaagtgggttactaaagttaagatctgccctaaaccttttcgcaaatatcaggcctgtcaaaataagaaaatctctattagatgcaagtacattaaaaaaagaaatcgttgagcatgtagatcttattgttgtaagagaattaataggaggaatttattttgggaaaccaagaggacacataacaaatacaaaaatcccaaaagctttcaatacgatgatctatgattcaactgaaatagaaagaataaccgaaatagcaataaaaattgctaaccaaagaaataaaaaaatatgttctgttgataaatcaaacgttcttgaggttagtcaattgtggagagatacagttttaaatatcacctcaaaagataaaaatatatccctaagcaatatgtatgttgataatgcagcaatgcaattagttagagatcctagtcaatttgatgtgattttaactagtaatttatttggagatattttaagcgatttagccgcaatgttaactggttctattggtatgcttc

SEQ ID NO: 208742 - DNA, 771 bp, Unknown
  Bacterial polypeptide expressing nucleotide sequence isolated from the Sargasso Sea
aatgattaaaataaaaaaaagaaaagtattactattgcctggagatggaattggccctgaggttactagagaagtaagaaaaattattgaatggtttaataaaaataaatctttagattttgaaattgatgaagatttagctggtggagcttcttatgataagcatggcactcctattactgatgaagttttttataaagccttagagagtgaagtagtaatacttggagcggtaggtggacccaaatgggataaccttgagttttcaaaaaaaccagaaagagcattactaaaattaagaaaagaactaaaattatttgccaatttaagaccagcaatttgttttaaacagttagtagacgcatcaagtcttaaacctgaaatagtttctgggttagatattatgatcgttagagagcttaccggtggaatttattttggagaacctagagggattaaaccaatagacaaaggtgagagaaaaggcattaacactcatacttatactacaagcgaaatagtaagagtagcaaaggttgcttttgatttagctaaaaaaagagcaaataaagttacatcttgtgagaaatctaatgtaatggaagcaggacagctatggaaagaagaagttcaagcactgcatgataaagaatataaagatgttgaattaaatcatatgcttgcggacaattgcgcaatgcaattattaagaaatccaaaacagtttgatgtaattgtaactgataatttatttggtgatatgctatcaga

SEQ ID NO: 208743 - DNA, 441 bp, Unknown
  Bacterial polypeptide expressing nucleotide sequence isolated from the Sargasso Sea
tgaatcatatgcttgctgacaattgtgcaatgcaattagtaagaaatccaaaacaatttgatgtgattgttactgataatctttttggtgatatgttatctgatgaagcagcaatgctgactggttctcttggacttttaccatcagcttctttaggcgcaaaagataaaaatggtagtatgcgatcactatatgagccagttcatggatctgcaccagacatagctggacaaggtatagcgaacccaattgctacaattttaagctttgctatggctttgagatattccttagaccttgataaagaagcagatagtttggaaaaagctgttcaagatgttctagatgaaggtcttagaactaaagatataatttccaaaggtatgaaagaggtatccacatcagtaatgggtgatgcgataatttcaaaattgcaataat

SEQ ID NO: 208744 - DNA, 1066 bp, Unknown
  Bacterial polypeptide expressing nucleotide sequence isolated from the Sargasso Sea
tatgaaagaatataatattgcatcaataccaggagacggaataggaaaagaagtagttcctgaaggattaaaagtattaaaagaagctgcagaaaagcatcaatttaaaataaattttacagaatatgaatttgcatcctgtgattattatgaaaaacacggaaaaatgcttccagatgattggaaggaaaaattaggaaaacacgatgcaatattttttggagctgttggtatgccagataaagttccggaccatatatctttatggggatctttacttcagtttagaagagaatttgatcaatacatcaatcttagaccagtaaaattatttccaggtattaatcctcctttagcaaataaaaaaccgggtgacatagatatgctaattgtaagagaaaatactgaaggtgaatattcttcagttggcggaagaatgtttaaaaatactgatagagaaatagctgttcaagaaactattatgtctgcccatggagtagatagagttcaaaaatttgcttttgaattagcaaaacaaagaaaaaggaaaaaattaacgaatgcaacaaaatcaaatggtatttcaattacaatgccgttttgggatgaacgttttaatgcaatgaaagaaaattatcctgatattgaaacagatcaatatcatattgatattttggttgctagatttgtacttaatcctgaatggtttgatgttgttgttgcatccaatttatttggagatattctttctgatttaggacctgcttgtacaggcactattggaattgctccatctgggaacattaatcctgaaaataaatttccatctttatttgaaccagttcatggttcagcacctgatattgcaggaaaaggtattgctaatcctgtaggacaaatttggtctggtgcaatgatgttagattatttaggagaaaaagaagcttctaattcaattgttgaagctattgaaaaatctttaagtgaaaaagaaaatagaactaaagacttaggtggagaagctgataccttgatatgttctaattcaatattggctaatctttag

SEQ ID NO: 208745 - DNA, 950 bp, Unknown
  Bacterial polypeptide expressing nucleotide sequence isolated from the Sargasso Sea
tatgattttaaaaatagctgtattatctggagatggaattggacctgaagttactaaacaatctattaaagtacttaaatctttaggtaaaaagtttaatcataaaattaaattagaaagtggattagttggagcagttgcaattgataaatacaatgatccctatccagatgaaactcatcaagtttgtctaaactcagatgcaattctttttggtgcgattggcgaccctaaatatgataatgatccaaaagctaaagtaagacctgaacaaggtttactcaaaatgagaaaaaagctcggactatacgcaaaccttcgtcccacaaaggtctttgaatccttattagagatgtcaccaataaaagaagaaagaatatctggaactgatattctttttgttagagaattaactggaggtatttactttggagaaagaggcagaaaggataatgataattttgcatttgacacatgtgaatataatagagatgaaattgttagaattgcaaaaataggatttgaatatgcgcaaaaaagatctaataaattatgttgtgttgataaagcgaatgttcttgaaacatcaagactatggagagagacagttcaaagtatggagaaaaactatccaaatatacaggtatcatatgaatttgtagatgctgttgcaatgagattagttcaatggccaaattcatatgatgttttgattacttcaaatcttttcggtgatattttaacagatgaagcttcagtcatttctggatcaatggggcttatgccatctgcttcagttggttctgaaaacgctttatatgagccgattcatggatcttatccagaagcagcaggaaaaaatattgcaaatcctattgcctcaattttatctctttcaatgatgctagatcattcatttggtttgaagatagaatcacaaataattaata

SEQ ID NO: 208746 - DNA, 1066 bp, Unknown
  Bacterial polypeptide expressing nucleotide sequence isolated from the Sargasso Sea
atgaaaacttataacattgcatcaattgctggagacgggatagggactgaagttgtaccagaagcgcacaaagttttaaaaaaaatatcagaacaacatcaatttaaattagtaattgatgaatttgattttgcatcttgtgattactatgaaaaatatggaaaaatgatgcctgataactggaaagaaaaaattgaaaaacatgatgctattttttttggcgccgttgggatgcctgacagatatcctgatcatataactttatggggctcattattaaagtttagaagagaatttgatcaatacatcaatttaagaccagtaaaattgtttccaggtgttaaatcacctctagctgacaaaaaacccggtgacattgacatggttattattagagaaaatactgagggagaatattcatcagttggtggaagaatgtttgagggaactgacagggagatggctcttcaggaaacaattatgtctaagcatggaattgacagagttcaaaaatttgcttttgaattagctaaatctcgaaaaagaaaaaaacttacaagtgcaacaaaatcaaatggtatttcaattacaatgccatattgggacgaaagatttaataaaaataaaaaaaattatttagatattgaaacagatcaatttcatattgatattctagttgctcgatttgttttaaatcctgagtggtttgatgttgttgtagcctctaatttatttggagatattttgtcagatttaggtccagcttgtactggaaccattggtattgcaccatctggaaatattaatcctgaaaaaaaattcccatcattatttgaaccagttcatggatctgcacctgatattgcaggaaaaggtattgctaatcctattggtcaaatttggtctggtgctttaatgttagattatttaggtgaaaaagaagctgctaattcaattatgacgtcaattgaaaaaactttatttgataaaaaaaatagaacaaaagatttaaatggagaaagcaacactattcagtgtgctcaagcagtaatagataatttgtaat

SEQ ID NO: 208747 - DNA, 1072 bp, Unknown
  Bacterial polypeptide expressing nucleotide sequence isolated from the Sargasso Sea
atgacaaaaaacaaatataatattgcagtaattccaggggatggaataggaactgaggtaatgccagaggcattaaaagtgttagaagtgatatcaaataaatatggtattaatcttcactttgaccactttgatttcagttcatatgagtatttttctaagcatggtcaaatgatgccagatgactggaaaactcaaattggatctcatgatgctctattttttggggcagttggctggccagataaaatccctgatcatatatctctttggggatcattattaaaatttagaagagattttgatcaatatattaatctcagaccagtaaaattaatgccgggtgttccttcaccattagctaataggaatcctggagatataaatttttatattattagagaaaatactgaaggagaatattcctcaataggtggaaaaatgtttccagacactgacagagaaattgttatgcaggaaaccataatgtcaagagttggtgtagatagagtgctaaaatttgcgtttgaattagcccaaagttcagataaaaagcatttaacatcagctacgaaatctaatgggatttcaattaccatgccctactgggacgaaagagttgaggaaatggctaaaaaatatactgatgtaaagtgggataaatatcatatcgatattctttgtgctcattttgtacttaatcctgataaattcaatgtagtagtagcttcaaatttgtttggagatattttatcagatttaggccctgcttgtactggaacaataggaatagctccgtctggaaatattaatccagaaaaaaaatttccttcattatttgaacctgttcatggttctgctcctgatattgcaggtaaaggtatagcaaatcctattggtcaaatttgggccggcgcaatgatgctagagcatttgggtcataagcaggcctcagataatattgtaagcgcaattgaagaagttttagaaaaagaagactatagaactggtgatttgggaggtaaggcaaatactcatagttgtggttcagccgtcgctgatgcagtttagt

SEQ ID NO: 208748 - DNA, 637 bp, Unknown
  Bacterial polypeptide expressing nucleotide sequence isolated from the Sargasso Sea
atgactactaagaaaattcttattacacctggagacgggattggccccgaagttacagaacaggctgtccaaattttagaaaatgttgctccactttttgacatccagcttgatcttaccgaaaagccagtcggaggcattgcatatgatttaactggtacacctcttcctgacgaaacattggatgccgcaaagatttctgatgcggtgctgcttggagcagtaggcggacctaaatgggagccgctagatttttcagttcgtccggagcggggacttctgaagcttcgttcggagctgggattatttgcaaatttacgccctgctgcaatatacggggatctggtaaatgcttcaacacttaaagctgaagttgttgatggagcagaccttatggttgtgcgggagttaacaggaggtatttattttggaaaccctcgcggagttgaagaacgcgatggtgagcgggtaggcttcaacacgctcgtttattcagaatctgaaatccgacgtattgctaaagtaggctttgaaactgcaatgaagcgtagaaagaaactaacttcagtggataaggcaaatgtccttgaatctactgagttttggcgtgaaattgttactgacgtggggatctaat

SEQ ID NO: 208749 - DNA, 1094 bp, Unknown
  Bacterial polypeptide expressing nucleotide sequence isolated from the Sargasso Sea
aatgattaaagtaaaaaaaagaaaaattctattattaccaggcgatggtattggtcctgaggtagttggagaagttaaaaaaataattaaatggtttaataataaaaaatctttagattttgaaatagacgaagatcttgctggtggatgttcttatgataaacacggcacacctataacagatgaagttttttataaagctttagaaagtgaagttgttatgcttggtgcagtcggaggacctaagtgggataatattgagttttcaaaaaaacctgagagagctttattaaaattaagaaaagaattaaaattatttgcaaatttgagacctgcaatatgttttgaacaattagttggcgcatcaacacttaaaccagaagtggtttctggtttagatataatgattgtaagagaattaacaggtggaatttattttggtgaaccgagaggtattaaaccaatagaaaatggtgaaagaaaaggaataaacactcatacttatactactagtgaaattactagagttgcaagagttgcttttgatcttgctagaaaaagatcaaataaagttacctcttgtgagaaatctaatgtaatggaagccggacaactatggaaagaagaagttcaggaacttcatgaaaaagaatacaaagatgtcgagctaagtcatatgcttgcagataactgtgcaatgcaattacttagaaatccaaaacaatttgatgtaattgttactgataatttatttggtgacatgctttcagatcaagcttcaatgttaacaggatctttaggtttattaccttctgcatctttaggtgcaaaaaataaagatggtgaaatgagagcaatgtatgaacccatacatggttcagctcctgatattgaaggaaaaggactagcaaatccaatcgcaacagtacttagttttgcaatggctttaagatattctttaaatcttgataatgaagctgatgctttagagaatgcagtacaagctgtgttaaatgatgatctaagaacgaaagatatcctttctgagggtatgaaaaaagtatctacttcgcaaatgggcgatgcgataactt

SEQ ID NO: 208750 - DNA, 964 bp, Unknown
  Bacterial polypeptide expressing nucleotide sequence isolated from the Sargasso Sea
aggtgcatctatagatgctaacaaaataccaattactgatgaagttttttttaaatctttagagtctgacgctgttattttaggtgcttgtggtggaccaaagtgggataagttagaattttctaaaaagcctgaacgagcattattaaaacttagaaaggaactcaaattatttgcaaatttaagaccagcaatttgttttaaacaacttgttgactcttctactttaaaaccggagatagtttcgggtttagatataatgattgttagagagcttactggaggaatttactttggagaaccaagaggaatagaacctatggaaaataatcaaagaaaaggagtaaatactcactcatatactacgaatgaaatacatagaattgctaaagttgcttttgatttagcaaaaaaaaggaaaaataaagtaacatcttgtgaaaaatccaatgtcatggaagccggtgtactttggagggaagaggttcagataatcagagataaagattataaatcagttgaattagatcacatgttagcagataactgtgcaatgcaacttttaagaaatcctaagcaatttgatgtaatattagccgataatctttttggagacatgctttctgacgaagctgcaatgttgacagggtcactaggtttacttccttcagcctcactaggcgcaaaagacaaaaatggaaagattagatctctatatgaaccggtccatggttctgctccagatattgccggaaaaaatttagccaacccgattgctactattttaagcttatcgatggctttaagatattctttaaatcttgataaagaagcaaatcagcttgaagaggcggtacaaaaagtactagatgatggtttaagaaccaaagatataatttctaagggaaaaaaagaagtctccacaacagatatgggtgatgcaattatatctaaattgaaataa

SEQ ID NO: 208751 - DNA, 568 bp, Unknown
  Bacterial polypeptide expressing nucleotide sequence isolated from the Sargasso Sea
aaggattacaaaatttgcaattgatatcgcacttaaaagaaacaaacatattacttctgttgataaagctaacgtccttgagtgttctcaattatggcgacaaactgttgatagaacaatgcaaggccacagtaatattgatctacaacatatgtatgttgataatgcagcaatgcagatcataaaaaatccaaagcaatttgatgtaatattaacacccaatctattcggagatattttatccgatgctgcatcaatgcttactgggtcaatagggttactgccatctgcatcactctctgaaactataggaatgtttgagccgattcacggctctgcgcctgatattgctgggaagggagtggtaaatccaattgctatgattttatcccttgcgatgatgtttgaatatacttttgatcgacaagatttggcaaggataataaaaaaatctgtagacgatgtgttagagtctggatactttacaaaagatttatctcaaaatgattatattacaacaaacgagatgggtgataagattctagagagtattaaaaaaatatgttaa

SEQ ID NO: 208752 - DNA, 1108 bp, Unknown
  Bacterial polypeptide expressing nucleotide sequence isolated from the Sargasso Sea
atgattaaagtaaaaaaaagaaaaatcttactacttccaggagatggaataggcccagaagttatagccgaggttagaaaaattataaattggttcaatgataaaaaatcattagattttgaaatagatgaagatttagcaggtggctgttcttatgacaaacatggtaatccaattactgatgaggttttttataaagccttagaaagcgcagtagtaatgcttggagcggttggcggtccgaagtgggacaatgtagagttttcaaaaaaacctgagagagcacttttaaaattaaggaaagaattaaaactttttgcaaatttaaggccagcaatatgctttaaacaactagtagatgcctcaaccttaaaaccagaaattgtatcaggtttagatataatgatcgtcagagaattgacaggaggaatttactttggtgagccaaggggaattaaaccaattgaaaatggagaaagaaaaggaataaacactcatacttatacgagtaacgaaattattagagttgctagagtagcttttgatttagcaaaaaaaagatctaataaagttacatcttgtgagaaatcaaatgttatggaagcaggacaactttggaaagaggaagtacaatctcttcatgaaaaagaatataaagatgtagaattaagccacatgcttgcagataattgtgcaatgcaactacttagaaaccctaaacaatttgatgtaatcgtgacagataatctttttggagatatgttatctgatcaggcatcaatgctaacaggatccttaggacttttgccctcagcatcattgggagcaaaaaacaaagctggagaaatgagagcaatgtatgagcccatacatggatctgctccagacattgctggaaaaggaatagcaaatccaatagccacaatcttaagctttgctatggccttgagatattctttagacctagataaggaagcagaagcacttgaaaaagctgttcaaattgtattgaatgagggtttaagaacgaaagatatcttatcaaaggggacgagggaagtatctacatcagaaatgggtgatgcgataatttcaaaattgcaataat

SEQ ID NO: 208753 - DNA, 1090 bp, Unknown
  Bacterial polypeptide expressing nucleotide sequence isolated from the Sargasso Sea
atgacaaagaaaattttaatactaccgggcgatggtgttggtcccgaaatagtggctcaagctgaaaaggtcttattattccttatcgaacagggtaaattatcagttaaattagagcatgggttgattggtgggtgcgctattgatgaaaccggctctcctttacctgacgaaactctaaaaaaagcaaggcattcagcagcgatattgatgggttccgttggcggtccaaaatgggataacgttgatcgtgcaattcgtccagaaagaggtctattagcgattcgttcagaacttgctttatttgctaacctgcgacctgcctatttgtttccgcaacttgtcgaagcttccactttaaaaaaagatgtagttagcgggcttgacataatgatagttcgagaattaactggtggtatttactttggcatgccacgcggcataagagaacttgatgatggtcaacgggagggatttaatacactcgtttatagtgaaaatgaaattaagcgtattgccagagttgcttttgagaccgcaaataagcgtaggggaagattgtgttctgtcgataaagcaaacgttcttgaggcaacagagttatggcgtgaaattgtcaatgatatggcaaaagaatatgaagcagttgagttacaacatatgtatatagataacgcctctatgcaattagtgaaagagccaaaacaatttgatgttattcttacaactaatatgtttggtgatattttatcagaccttgcatctatgttgactgggtcgatcggaatgttgccctcagcttcattagctgaaaatggtacaggcatgtacgaacccgttcatggttctgctcctgatattgctggaaaaaatattgcaaatccattagccactattttatcgttatcgatgttattaagattttctctaggagaagaaaaattagccaaaaaattagagcaagctattgatcttgttttaacagatggttttagaacaaaagatatttattcaaaaggaatgaaatctataggaactaacgagataggtgatgaggtaattaaagctctgacgtcgttattagtataag

SEQ ID NO: 208754 - DNA, 277 bp, Unknown
  Bacterial polypeptide expressing nucleotide sequence isolated from the Sargasso Sea
aatgattaaagtaaaaaaaagaaaaatattattattacctggagacggaattggccctgaggttatcgaagaagttaagaagataattaattggttaaataaaaataagtctcttgattttgagattgacgaagatcttgctggaggttgttcttatgataagcatggaactccaattactgatgaagttttttataaagcattagaaagtgaagctgtaatgcttggtgcagttggtggaccaaagtgggataatctagatttttcaaaaaaaccc

SEQ ID NO: 208755 - DNA, 532 bp, Unknown
  Bacterial polypeptide expressing nucleotide sequence isolated from the Sargasso Sea
atgattaaaattaaaaaaagaaaatttctgcttttgccaggagacgggattgggcctgaagtagttgctgaagtaaaaaaaattatagtttggtttaataaaaataaatctttagattttgaaattgatgaagatctagcaggtggtgtttcatatgataaacatggtactccaattaccgatgaagtattttataaagcattagaatcagaggctgtaatattgggtgctgtaggtggtcctaaatgggataatgtggaattttcaaaaaaaccagagagagcattactaaaactaagaaaagagctaaaactttttgcaaatttaagacctgctatttgctttgaacaattggtcgaagcatcaaccttaaaacctgaaatagtttcaggattagatatcatgatagtaagagaacttacaggaggtatttattttggagagccaagaggaataaaaccaattgataatggagaaaggaaaggaattaacactcatacatatacatcgagtgaaatacaaagagtgcaag

SEQ ID NO: 208756 - DNA, 1108 bp, Unknown
  Bacterial polypeptide expressing nucleotide sequence isolated from the Sargasso Sea
atggcaatatctaacactagaaaattactattattacctggagatggtattggacccgaggtagtaagagaagtgaagaaaataattgaatggctaaataagaataaatccttagactttaaaattgaagaagaactaatcgggggcgcatcgatagatgcgcacaaaattcctattacggatgaagttttttataaatctctagagtgtgatgcagttatattaggagcatgtgggggaccaaagtgggataaattagaattttcaaaaaaacctgaaagagctcttttaaaattgaggaaagagttaaaactatttgcaaatttaaggccagcaatttgttttgaacaattggttgactcttctactttaaaacctgaaatagtttcaggattagatattatgattgtaagagaacttacaggtggaatatattttggggaaccaaggggtattgagccaattaagaataacgagcgtaaaggaattaatacacatacgtatactaccactgaaatcaaaagaatagctaaagtggcgtttgatcttgctaagaaaagaaaaaacaaagtaacttcttgtgaaaaatcaaatgtaatggaagctggggtcttatggcgagaagaagttcaagatttgaaagataaagaatataaaaccgttgaattagagcacatgttagcagataactgcgcaatgcagttattgagaaatccaaaacaatttgatgtaattttagccgataatttatttggagatatgctatcagatgaggcggctatgttaactggttctttaggtcttcttccatctgcttccttaggatccaaagataaaaatggaaagctgagatcactttatgaacctgttcatggatctgcaccagatatagctggaaaaaatgttgctaacccgatcgcaacaattctaagtttatcaatggctttaagatattccttggatttagataaagaggctgatttattagatcaagctgttcaaaaagttttaaatgacggtcttagaacaaaggatattgtatctaaagggaataaagaagtcaccacttctcagatgggtgatgcaattatatcaaaattaaattaat

SEQ ID NO: 208757 - DNA, 379 bp, Unknown
  Bacterial polypeptide expressing nucleotide sequence isolated from the Sargasso Sea
gtaattgtaactgataacctttttggcgatatgttatcggatgaagcagcgatgctaactggatcgctgggattacttccgtctgcttctttaggagctaaagataaaaatggaaatatgagatctttatatgaaccagttcatggttcagcgcctgatatagctggcaaaggaatagctaacccaattgccactattttaagtttcgcaatggcattaagatattctctaaatttagacagtgaagcagatacattggaaaaagcagtacaagatgtattagatgagggcttaagaactaaagatatcctttcaaaaggaatgaaagaagtgtcaacatcggcaatgggtgatgcgataatttcaaaattgcaatagt

SEQ ID NO: 208758 - DNA, 913 bp, Unknown
  Bacterial polypeptide expressing nucleotide sequence isolated from the Sargasso Sea
aatgattaaagttaaaaaaagaaaatttttattattgccaggtgatggaataggaccagaagttgttggtgaggtcaaaaaaattattcattggtttaataaaaataaatcattagattttgaaatagatgaagatttagcaggaggagtttcatatgataaacatggaacacccataactgatgaagttttctataaagccttggaatgtgaagctgtgattttaggtgcagttggaggtcctaaatgggatgatgtggagttttcaaaaaaacctgagagagctttattaaaactaagaaaagaacttaaactttttgcaaatttaagacctgcaatatgttttaaacaattagtggatgcctcaactcttaaaccagaaattgtttcaggactggatattatgattgttagagaacttacaggtggaatttattttggagagcctagaggaataaaaccgattgataatggtgagagaaaaggaattaatactcacacttatactactagtgaaatccaaagggttgcaaaagttgcttttgatttagctaaaaaaagaaaaaataaagtaacatcatgtgaaaaatcaaatgttatggaggctggtttattatggaaagaagaagttcaacaattgcatgataaagaatacaaagatgttgaattaaaccatatgcttgcagacaattgtgctatgcaattacttagaaatccaaaacaatttgatgtaattgttactgataatttatttggagatatgctatctgatcaagcatcaatgttaactggttccctaggattgttaccttcagcatcattaggtgcgaaaaataaagagggaaaagtgagagcaatgtatgaacctattcatggctcagctccagatatagctgggcaaaggtgttgctaa

SEQ ID NO: 208759 - DNA, 1108 bp, Unknown
  Bacterial polypeptide expressing nucleotide sequence isolated from the Sargasso Sea
atgattaaagtaaaaaaaagaaaatttttacttttacctggagatggtatcggcccagaggttattaatgaagttaaaaaaataattaactggtttaataataaaaagtcattagattttgaaatggaggaagatttagcaggaggtatatcttatgacaaacatggcacaccaattactgatgaagttttttataaagctttagaatgtgaagcggtaatattgggagctgttggtggaccaaagtgggataatgttgagttttcaaaaaagcctgagagagcactattaaaattaagaaaagaattaaaattatttgccaatttacgaccagcaatttgttttaaacaattggttgatgcatcaacacttaaaccggaagtagtttctggactagatattatgattgtaagagaattaacaggtggtatttactttggtgaacctagaggtattaaaccaattgataatggggaaagaaaaggaattaatactcatacttatacttctagtgaaattcgaagagtagccaaagttgcttttgatcttgcaaaaaaaagacaaaataaagttacatcttgtgaaaaatcaaatgtaatggaagctggattactttggagagaagaagttcaggaattacatgataaagaatataaggatgttaatttaaatcacatgttggctgataattgttcaatgcagcttcttagaaatccaaagcaatttgatgtaattgttacagataatttattcggcgatatgctatctgatcaagcatcaatgttaactggatccctaggattgttgccatcagcttcattaggtgcaaaaaataaagatggtaaattgagagcaatgtatgaaccaatacatggttcagcgccagatattgccggaaaaggaatagcaaatccaattgcatcaatattaagttttgcaatggcacttaagtattctttaaatcttgataatgaagcaaacgctttagaaaaagctgttcaggatgttttagacgatggtctaagaacaaaggatattatttctaaaggaacaaaagaagtatcaacctctcaaatgggtgatgcgataatttcaaaattgcaataat

SEQ ID NO: 208760 - DNA, 750 bp, Unknown
  Bacterial polypeptide expressing nucleotide sequence isolated from the Sargasso Sea
agcttgcttcagcttcaccaataaaagaggaaattatcaatgatttagatatcttaatagtaagagagctaacaggcggtatttattttggagagccaagaggaattgatactttttcaaaccctccacatgcttttaatactatgatttatgacgaaaaagagattgaaagaattggtcgagtagcatttgaatcagctcaaaaaagaaataaaaaactatgttcagtagaaaaagcaaatgttcttgaagtttcaaagttttggagagaaataattacaaacctatcaaaggagtatcctgatgttgaattgacacatcagcttgctgacaatactgcaatgcaattagtgcttgatcccaatcagtttgatgtaattgtttctagtaacctatttggtgatattttatctgatattgctgcaacactaactggctctataggtatgctgccttccgcatcactcaacagctcttctcaaggaatgtatgaaccgtgtcacggcagcgcacctgatatagctggcaagaacttagcaaatcccttagcaatgatcctctctctagcaatggcttttaggtactctcttgaaaatcacgaagtagcaaacataatcgaagaatctgtaaaagaatttatttcaagaggttttagaacacaagatttaacagaagatacatctttcttaaagactggtgaggttgcatctgaactaattccaataatcaaggaaaaatctgatgtctaag

SEQ ID NO: 208761 - DNA, 1078 bp, Unknown
  Bacterial polypeptide expressing nucleotide sequence isolated from the Sargasso Sea
aatgagtaaaagtattttaattttacctggcgacggtattgggcaggaagttacagcctctatggttgaggttttaaattttttgattggaaaatacaatcttgattttaatgttactaccatgagtgtcggtggtacagcatataatgaatacggaacaccactaccaattaaggttttaaaagaagcaaaagagtcagatgctattttatttggagcagttggtggaacagaatgggatcatttagattgggatgatcgaccagaaaatgctttgttgtccctgagaaaagaattaaatctctttgcgaatcttcgaccagcatttttattcaatgaattatcagaagcatctcctttaaaaaaagaaataataaatgatttagatatattaatagttagagaactaactggaggtatttattttggcgagcctagaggcatcgtttcaaatgaaagccctaagtatgcttttaatactatgatatacaacgaagatgaaataagaagaatagcaaaggttgcatttgagtcagcgcaaaaaagaaatgggagattgtgttcagttgaaaaagctaacgtgcttgaagtttcaaaattttggaggtcaatcctaactgaagtgtctaaagattatccagatgtagagctttcccatcaattggcagacaatgcagcaatgcagttagttttggatccaaatcaatttgacgttattgttgccagcaacctttttggagatatattgtcagatattgcagcaatacttactggttccataggcatgttaccgtctgcatctttagatagttcatttaagggtatgtatgagccttgtcatggaagtgctcctgatatttcaggacaaaatgtagccaatccaattgcaatgattgcatcactctctatggcatttaaattctcattaggagaggaacgcgtatctgataagattgatatggcaatcagtaacttcattaaattagggtatagaaccaaagatatagctattgatgaaaattatttaaagacatctgaagtagcaaataaactaattacaataatcgaaaatgagtaa

SEQ ID NO: 208762 - DNA, 1111 bp, Unknown
  Bacterial polypeptide expressing nucleotide sequence isolated from the Sargasso Sea
atgattaaaataaagaaaagaaaaatcttactattaccaggggatggaataggtccagaagttgtatcggaagtaaaaaaaataattaattggtttaatagtaaaagatccttagattttgaaacagatgaagatttagtaggtggcgctgcctatgataaacatggaacaccaatcactgatgaggtattttataaagcacttgaaagtgaggcagttatcttaggtgcagtcggtggccccaaatgggataacttagatttttcaaaaaaacccgaaagagcgttattaaaattaagaaaagagctaaaattatttgctaatttaagaccagcaatttgttttaaacagcttgtagaagcatcgagccttaaacccgaaattgtttctggacttgatattatgatagtaagagagttaacaggtggtatatattttggagaaccaagaggaattaaacctattgataacggcgagagaaaaggtattaacactcatagttatacttcaagcgaaattgcaagagtagcaagagttgcttttgatttagcaaaaaaaagaaataataaagttacctcatgtgaaaaatcaaatgttatggaggcaggtcagttatggaaagaggaagtaacagaaactcacaaaaatgaatttaaagaagttaaattagaacatatgttggcagataattgtgctatgcaattattaagaaatccaaagcaatttgacgtgattgtaacagataacttgtttggagatatactttctgatgaagcagctatgttaactggatctttaggtcttttaccatcagcatctttaggtgctaaagataaaaatgggaatattagatcaatgtatgagcctgttcatggttcagcaccagatatagctggtaaaaatcttgcaaatccaattgcaacaattttgagtttttctatggcgctaaagtattctttgaatttagaaaaagaagctaaggaaattgatactgcagtgcaaagcgttttagacatgggattaagaacaaaagacatatattctaagggaaataaggaagtttcaacaactgcaatgggagatgcaattattgcgcaattgcaaaaataaa

SEQ ID NO: 208763 - DNA, 729 bp, Unknown
  Bacterial polypeptide expressing nucleotide sequence isolated from the Sargasso Sea
aatgattaaggtaaaaaaaagaaaaattttactattgccaggagatggtattggtcccgaagtaattagagaggtaaaaaaaataattatatggctaaatgaaaatagatctttagattttgaaatagatgaagatttggttggaggtgcggcttatgataaacatggaacaccaattacagatgaggtattttttaaagctttagaaagtgaagcggttatattaggagcagttggcggtcctaaatgggacaatcttgatttttcaaaaaaacctgaaagagcgcttttaaaactaagaaaagaattaaaattatttgctaatttaagacccgcaatttgttttaaacaacttgtagacgcatctagtcttaaaccagatgtagtttccggtttagatattatgattgttagagagttaacaggcggtatttactttggagagccaagaggaattatgcctattaacaacggagaaagaaaaggggtaaatacacacacttacacaactaaagaaatagagagggttggaagagttgcattcgatttggcaaagaaaagaaataaaaaagttacctcatgtgaaaaatcaaatgtaatggaagcaggtcaactttggagagaagagatacaatcgcttcatgataaagattttaaggatattgagttagaccacatgttagcagataattgtgcaatgcagttattaagaaatccaaaacaattcga

SEQ ID NO: 208764 - DNA, 1056 bp, Unknown
  Bacterial polypeptide expressing nucleotide sequence isolated from the Sargasso Sea
aatgattaaagtaaagaaaagaaaaatcttactattgccaggagatggaataggtccagaagtagtatcggaagtaaaaaaaataattaattggtttaatagtaaaagatccttagattttgaaacagatgaagatttagtaggtggcgctgcctatgataaacatggaacaccaatcactgatgaggtgttttataaagcacttgaaagtgaggcagttattttaggtgcagtcggtggtcccaaatgggataacttagatttttcaaaaaagcccgaaagagcgttattaaaattaagaaaagaattaaaattatttgctaatctaagaccagcaatttgttttaaacagcttgtagaagcatcgagccttaaacccgaaattgtttctggacttgatattatgatagtgagagagcttacaggtggaatttattttggggagccaagaggaattaaacccatagataacggcgagagaaaaggcgttaatacccacacatatacttcaagtgaaattgcaagagtagcaagagttgctttcgacttagcaaaaaaaaggaataacaaagtaacatcgtgtgaaaaatctaatgttatggaagctgggcagttatggaaagaagaagttgcagaaattcataaaaatgaatttaaggaggtcaaactcgagcacatgttagccgataactgcgctatgcaattattaagaaacccaaaacagtttgacgtaattgtaacagataatctattcggagatattctttctgatgaagcggcgatgttaacaggatctcttggtcttttgccatcagcttccctaggagctaaagataaaaatggaaaaatgagatcaatgtacgaacctgttcatggttctgccccagatatagcagggaaaaaccttgcaaatccaattgcaacaattttaagtttttctatggcgctaaggtattctttaaatttggaaaaagaagctaaagaacttgatttagcagtgcaaagcgttttggacatgggattaagaacaaaagatatatattctaagggaaataa

SEQ ID NO: 208765 - DNA, 328 bp, Unknown
  Bacterial polypeptide expressing nucleotide sequence isolated from the Sargasso Sea
atgctaacgggatctttagggctgttaccttctgcatctttaggtgcaaaaaataaggacggagaaatgagagcgatgtatgagcctattcatggttcagcaccagatattgccggtaaaggaattgctaatccaattgcatcaatattaagttttgcaatggcactaagatactcattagaccttgataacgaagctgatagtctggaaaaagctgttcaagcagtacttaatgaaggtctaagaactaaagatattttgtcagaaggaatgaaagagacatctacatcagcgatgggtgatgcgataatttcaaaattgcaataat

SEQ ID NO: 208766 - DNA, 433 bp, Unknown
  Bacterial polypeptide expressing nucleotide sequence isolated from the Sargasso Sea
tatgcttgcagataactgtgcaatgcagctactaagaaatccaaagcagtttgatgttatagttactgataatttatttggagatatgctatctgaccaagcatctatgttaactggttctctaggtttattaccatccgcatctttgggagcaaaaaacaaagatggaaaaataagagcaatgtatgaaccaatacatggttcagcacctgatatagctggaaaaggaatagccaatccaattgccacgatactaagttttgcgatggctttaaaatattctcttgatctagataaagaggcagatgcattagaaaaagcagttcaaactgttttagatgaaaaactaagaaccaaagatattttgtctcctgggatgaaggaagtttcaacttctgaaatgggtgatgcgataatttcaaaattgcaataa

SEQ ID NO: 208767 - DNA, 1012 bp, Unknown
  Bacterial polypeptide expressing nucleotide sequence isolated from the Sargasso Sea
atgtcaaaaagaacgataaccgtaattccaggtgatggaattggcccaagtattattgattcagccttaaaaattcttgataaagcaggttgtgattttgaatatgaatttgccgatgcaggcttaaccgctctcgagaagcaaggcgaactacttccgcagcgtactttagaactgatcgaaaaaaaccgcatcaccctaaaaggcccgctaactacgcctgtaggcgaaggttttacctctatcaacgtgacattacgtaagaaattcggcctgtacgctaacgtgcgtcctgtgttgtctttcaaaggcactcaagcccgttatgaaaacattgatatcatcacagtgcgtgaaaacaccgaaggcatgtactcaggccacggtcagaaggtttctgaagacggcagcaccgcagaagcgaccagtattgtcactcgccaaggcgctgagcaaatcgcgaccttcgcttacgaactagcccgtaaagaaaaccgcaagaaagtcacaatcgtgcacaaagcaaacatcatgaagtcaacctcaggcctgttcctgaaagtggcccgtgaagtgagccaacgctacccagacatcaaaactgaagaaatgatcgtcgatgcgacttgcatgaagttagtgatgaacccagaaaacttcgacgtcatcgtgaccaccaacctgtttggtgacattctgtcggatctgtgtgctggtttagtcggcggtttaggtatggcacccggcgccaacattggccgtgatgcagcgattttcgaagcggttcacggcagcgcgcccgatatcgcgggtaaaaacctcgcaaacccaacctctgtgatcttagcctctatccaaatgctggaatacttaggcatggctgataaagccgacatgatccgtaaagccgtatcggcagtgattgaagaaggcgaccgtacgactcgcgatttaggcggcacccacggtacaactgacttcactcaagcggtgcttgaccgcctgtcataat

SEQ ID NO: 208768 - DNA, 1111 bp, Unknown
  Bacterial polypeptide expressing nucleotide sequence isolated from the Sargasso Sea
aatgattaaagtaaagaaaagaaaaatcttactattacctggagatggaataggtccagaagttgtatcggaggtaaaaaaaataattaattggtttaatagtaaaagatccttagattttgaaacagatgaagatcttgtaggtggtgctgcctatgataaacatggaacacctatcactgatgaggtgttttataaagcacttgaaagtgaggcagttattttaggtgctgtcggcggtcccaaatgggataacttagatttttcaaaaaaacctgaaagagctttattaaaattaagaaaagaattaaaattatttgctaatctaagaccagcaatttgttttagtcagcttgtagaagcatctagccttaaacccgaaattgtttctggacttgatattatgatagttagagagcttacaggtggaatctattttggggagccaagaggaattaagcctatagataacggcgaaagaaaaggcgttaacactcatacatatacctcaagtgaaattgcaagagtagcaagagttgctttcgatttagcaaaaaaaaggaataacaaagtaacgtcgtgtgaaaaatctaatgttatggaggctgggcaattatggaaagaagaagttgcagaaattcacaaaaacgaatttaaggaggtcaaactcgagcacatgttggctgataactgtgctatgcaattattaagaaacccaaaacagtttgacgtaattgtaacagataatctattcggagatatactttctgatgaagctgcgatgttaacaggatctcttggacttttgccatcagcttccttaggagctaaagataaaaatggaaaaatgagatcaatgtatgaacctgttcatggttctgccccagatatagcagggaaaaatcttgcaaatccaattgcaacaattttaagtttttctatggcgctaaggtattctttaaatttggaaaaagaagctaaagaacttgatttagcagtgcaaagcgttttggacatgggattaagaacaaaagatatatattctaagggaaataaggaagtttcaactagtgaaatgggagatgcaattattgcgcaattgcaaaaataa

SEQ ID NO: 208769 - DNA, 577 bp, Unknown
  Bacterial polypeptide expressing nucleotide sequence isolated from the Sargasso Sea
atgattaaagtcaaaaaaagaaaaatattgttacttcccggagatggaataggaccggaagttattaatgaggtgaaaaagataattaattggtttaatgataaaaaatctttagattttgaaatggatgaggatctagcaggtgggtgttcttatgataaacatggtactccaattactgatgaagttttctataaagcattagagagtgccgtagttatgttgggtgctgtaggtggacccaaatgggataatgttgagttttcaaaaaaacctgagagagcacttttaaagttaagaaaagaattaaagctttttgcaaatttaaggccggcaatatgttttaaacagttagttgatgcatcaactctaaaaccagaaatcgtttctggtttagatattatgatcgtaagagaattaacaggaggaatatattttggagaaccaaggggaatcaaacctatagaaaacggtgaaagaaaaggaattaacactcacacttacacaagtagtgaaattataagagtagcaaaaatcgcttttgatttagcaaaaaaaagatctaataaagttactt

SEQ ID NO: 208770 - DNA, 328 bp, Unknown
  Bacterial polypeptide expressing nucleotide sequence isolated from the Sargasso Sea
aatgaaagcagaaatcaccgtattggctggagatggtatcggacctgagatcactgagcatgcattaaatattctcaatgcaatcgaaaagaaatatggacatgaattcacattgcatgatgcactgtttggcggaattgcaattgatgaaacaggcgatccatatccactagaaacaagagaactttgtaaaaaatctgatgcagtccttttgggcgcagtcggcggtccgaaatggagtgatcccaaagcaaaaacaagacctgaaaagggactacttgatatgcgatcagacctaggtgtctatgctaacttaaggcaaataaaa

SEQ ID NO: 208771 - DNA, 1087 bp, Unknown
  Bacterial polypeptide expressing nucleotide sequence isolated from the Sargasso Sea
catgaccgacaggacttacaagattgccgtgattcccggcgacggcatcggccgcgaagtgatgcccgagggcctgcgcgcactcgaggccgtgaccgcgcgcttcggcgtgcgcttcgacttcgtccagatcgactgggcgagctgtgactactacgcgcagcacggcaagatgatgccggacgactggaaggcgcagctgtcgggcatggacgcaatcctgttcggtgcggtcggctggccggcgacggtgcccgatcacatttcgctgtggggctcgttgctgaaattccgccgcgagttcgaccagtacatcaacctgcgtcccgcacgcctgttcgacggcgtgccgtcgccgctcgccggccgccgcgcgggcgacatcgacttcatgatcgtgcgcgagaacaccgagggcgagtattcgtcggtcggcggcacgatgttcgaaggcaccgaacgcgagatcgtgatgcagcagtcgatcttcacgcgtcacggcaccgagcgcgtgctgaaattcgcgttcgacctcgcacagcggcgcgcgaagcgcctcaccgtcgcgacgaagagcaacggcatcgcgatcagcatgccgtggtgggacgcgcgcacggccgagatggccgaacgctatcccgacatcgccgtcgacaagcagcacatcgacatcctgtgtgcgcgcttcgtgctgcagcctgaccgcttcgacgtcgtcgttgcgtcaaacctgttcggcgacatcctgtcggatctcgggccggcctgtacgggcacgatcggcatcgcaccgtcggcgaacctgaatcccgaccgcaagtttccgtcgctgttcgaacccgtgcacggctccgcgcccgacatcgcggggcaatacatcgcgaaccccgttgcgatgatctggtcggcagcgttgatgctcgacttcctcggcaatggcgccggccgcgaacgcgaagcgcacgacgcgatcgtcgccgcgatcgaggatgtgctgcgcacggggccgcattcgcgcgatctcggcggcaatgcgggcacgcaggaagtcggcgaggcgatcgccgcgcgcatcgcgggctga

SEQ ID NO: 208772 - DNA, 1087 bp, Unknown
  Bacterial polypeptide expressing nucleotide sequence isolated from the Sargasso Sea
atgaataaaaagattcttattttgccaggtgacggcatcggccctgaagtaacaagttctgcaatggagatattaagatttgttaaagatctatactctcttgatcttgatattgaaactcatgatgttggcggagcagcctatgataagactggttatcctcttcctgataagactttagagatagctagaaaatctgatgctattctcttcggagctgtaggtggtccagaatgggaggatttagattgggataaaagaccagagcaagcattgttaggattaagaaaagagctaggattatttgctaacctaagacctgccttcctttttaatgagcttgcttcagcttcaccaataaaagaggaaattatcaatgatttagatatcttgatagtaagagagttaacaggcggtatttattttggtgagccaagaggaattgatacttcttcaaaccctccacatgcttttaatacaatgatttatgacgaaaaagagatcgaaagaattggtcgagtagcttttgaatcagctcaaaaaaggaataaaaaactatgttcagtagaaaaagcaaatgttcttgaggtttcaaagttttggagagaaataattacaaacctatcaaaggagtatcctgatgttgaattgacacatcagcttgctgacaatactgcaatgcaattagtacttgatcccaatcagttcgatgtaattgtttctagtaatctatttggtgatattttatctgatattgctgcaacgctaactggctctattggtatgcttccttccgcatcactcaatagctcttctcagggaatgtatgaaccatgtcatggcagcgcacctgatatagccggtaaaaatttagcaaaccctttagcaatgatcctctccctagcaatggcttttaggtactctcttggaaattctgaagcagcaagcataatcgaaaaatctgtaaaagaatttatctcaaggggttttagaacaaaagatttaaccgatgattcatcctttttagagactgatgaagttgcttctgagcttatttcaataatcaaggaaaaatctaatgtctaag

SEQ ID NO: 208773 - DNA, 403 bp, Unknown
  Bacterial polypeptide expressing nucleotide sequence isolated from the Sargasso Sea
catgcagatcataagagatccaaagcagtttgacacaatggttacaactaatatgtttggtgacataatcagtgatgctgcagcaatgatgacgggttcattgggtatgttgccctctgctagcataggaggcggaattggcatgtatgaacctgtgcatggttcagctccagacataacaaatgaggataaggccaatccgctggcaatgattctttctgtaggtatgatgatgcgctattcgtttaatctgactgatgcggatgaaatgataaaaaaggcagtgattgatacactggaaaaataccgtactattgacattatggctgaaggaaaaatacagattggctgccgggaaatgggcgaaagggttcttcaatcacttaaagaaaacaattcttga

SEQ ID NO: 208774 - DNA, 1114 bp, Unknown
  Bacterial polypeptide expressing nucleotide sequence isolated from the Sargasso Sea
atggcatcaaatagaaaattacttgtactgccgggtgatggaattgggcccgaggttgtggggcaagttctaagagttgttgactggcttggcgctaaacggtctttgtcgtttgacctacaggaggggttggttggtggagcggcatatgatgcacacgggacaccattaacggatgaaaccctcgctgatgcagttagtgccgatgctgttttgtttggatcggttggtggtccaaaatatgatgatgtaccgttcgagctaaaacccgaaagaggcttgctgcgcctgcgaaaggagatggatcttttcgcgaaccttcgccctgcaatggtttttgatgcaatggtagattcttcaacattgaaaaaggaagtgatagcaggccttgatattttaatccttcgtgagctcacaggaggtatttatttcgctgaacctcgtggcatcgaggaattacctaatggagaaaagaaaggttacgatacaaatttatatacgacgtcagaaattgaaagaattggccgagtagcaattgatcttgctagaaagcggcgtggaaaagttacgtcagttgaaaaagctaatgtaatgatgtcggggatactctggcgcgaagttatggataatttatttaaaggtgaagctcaaggcattgaaacagaacacatgtatgctgataattgtggaatgcagttagtgagaaacccaaaacagtttgatgttatagtaacagataatctttttggtgacatgttatcagattgcgcagctatgctaactgggtctttagggatgcttccgtcggcctctttaggggcggtagatgaaatcactaaaaagagatttgcactttatgaaccggtacacgggtcagctccagatatcgcaggaaagaaaatggctaatcctatagccgaacttttaagcttctccatgtccttacgatactcctttgatatgcaggaggacgcagacttgattgacaatgctatacaatctgttctggcatctggcatcagaacgcctgacattatgcaggatggaatgacgttagtttcgactgatgcaatgatggacaatatcctcaaagcactggaccaatcggtttaaa

SEQ ID NO: 208775 - DNA, 1114 bp, Unknown
  Bacterial polypeptide expressing nucleotide sequence isolated from the Sargasso Sea
atgagtaataaaaaaattctagttttaccaggtgatggaattggtaatgaggttatggcagaggtgcttaatataattgattggttatctaaaacacgctcaatgtcttttgatatatctgagcgcttagtgggtggaactgcgtatgataaggagggtgactcaataagtgactcaacaatgcaagaagcattaaactctgatgcagttttgtttggtgctgtgggaggacccaaatgggatagtgtagaaagacacaaacgccctgaagcagctcttttaagattgagaaaagaattagacttatttgctaatttaagacctgctgttgttttagatgctcttgcagaatcttcttctttgaaattagatttagtaaaaggtttagatattttaatagtaagagaattaacaagtggcgtatattttggtcagccaagaggcatttctaaaattagtgatacagaaagtaaagcaattgatactcaagtttatactacatcagagatagaaagggtttcaagagtagcttttgaattggcaaaattacgaagaaataaagtttcatcagctgagaaatccaatgttatggaaacaggaatattttggagaaatattgttaccaatttacatagaaatgaatatgcttctgttgatttagaacatatattagctgataattgtgcaatgcaacttgttagatatccaaaacaatttgatgttattctgacagacaatctttttggagatttacttagtgatactgctgctatgttaacaggttcactaggaatgcttccttcagcatcacttggaccagtaaaagaaaatggtactagagcagctatgtacgaaccagttcatggaagtgccccagatattgctggtcaatcaaaagctaacccacttgctatgattatgagttttggaatgatgttgaaatatagttttgatatggaagaagatagcaaactaattgaaaaggctgttcaaaatgttttgttaaaaggtttaagaactgctgatattaaggatggagcagataaaattatttctactaaagaaatgggtgttgctgttatagaagagttgaaagttttatctggaaattaaa

SEQ ID NO: 208776 - DNA, 798 bp, Unknown
  Bacterial polypeptide expressing nucleotide sequence isolated from the Sargasso Sea
atcatatgaacaacacggatctccccttactgatgaggtaatcaacaaagcaaaagaatcagatgcaatactttttggagcagtgggaggcccacaatgggataatttaccttggaataaaagaccagagcaggcattacttggattaagaaaagaattagaattatttgcaaatctgcgacctgcatttttgtttaaagaattagcagcagcatcaacacttaaaaccgaagttattgctgatcttgatctattgatagttagagagctaacaggaggagtttattttggagaaccaagaggtattgaaaaagacgttgttaataatcaagggtatgcatataacactatgatttattatgaaaatgaaattaaaagaattgcaaaaattggttttgaagcagctcaaaaaagaaataaaaaattatgttcagtcgataaggcaaatgttttagaagtctcaaagttttggagagaaatcgtagaagaggtcagcaatgattatcctgatgttaagctaacacatcaattagcagacaatgcagctatgcaattagtaataaatccaaagcaatttgatgtcatagtttcaagtaatctttttggagacattctctcagatatagctgcaactttatctgggtcaattggtatgttgccttctgcctccctaaatagttcttctcaagggatgtatgaaccttgtcatggtagtgctccagatattgcccatttaaatgttgcaaatccaattgctatgattttatctttatcaatggcttttaaatattctcttga

SEQ ID NO: 208777 - DNA, 1123 bp, Unknown
  Bacterial polypeptide expressing nucleotide sequence isolated from the Sargasso Sea
atggaagcaagagtttgtgttttagctggtgatggtgttggagaagaagtcacacaggaatcaatgaaagtccttgaagcaatttgcagaaaattcgatcataattttgaatttattcatgcacttgttggaggagctgcgatagataagtttaataatcctctccctccagagtctatgaatttagctctaggttctgatgctatcctttttggagcagttggtgggcctaaatgggataatcccagtgcagatgttaggcctgaagatgcaatcttagcattaagaaaaaggcttggattatatgctaatatgcgaccagtaaaggtatatcctgagctattgcattccagtccattaaagccagaatttttagagggtgtagactttgttattgttagagaacttacgggtggattgtactttggaagaccaaaaagaagaagtgcaagtacaagaggtagaagagcggttgatacacttgcttattcagaaaaagaaattgctagagttgtaagagtcgcttttgaactagcaaaatctagaagacaaagattgcattcattagataaaatgaatgtgcttgaaactggtagactttggagagaaatagctaacgaggtttcaagagattatccagaagttgagcttatacatatgcttgctgataatgcagcaatgaaaattattacaaacccatcagaatttgatgttattgttgcagaaaatagtattggagatatactttctgacgaagcttcagttataactgggtcaatgggaatgctcccttcagccagtttagcgtcttctcctcctcctccagggaaaagaagaggtaggcgtggaagaccagctctatatgaacccattcatggatctgctcctgatatagcaggtcataatgtagcaaaccctgttgcatcattcctttctgcagctcttatgttgagatggtcttttggtttacatgaagaggctgatgaaatagaatcagctataaataagataatttcagagggatacagaacagttgatatagcaggagagcaagatcataagctctctaccagccaaatgggagatttagttgcaggcattatttcaagtggtccaaaatagt

SEQ ID NO: 208778 - DNA, 1084 bp, Unknown
  Bacterial polypeptide expressing nucleotide sequence isolated from the Sargasso Sea
aatggcaaaaaaaatattaattcttcctggagacggcataggtcaagaagttacctcttcaatgagcgaggttttgcattatctaatcgatgagcaaagcctagactttcaaatatcagagagaaaagttggcggatcatcttatgatgaatttggcacacctttaactgaggaaactctgaagattgcgcaaaactccgacgcaattttatttggagctgttggggggccgcaatgggataatcttgagtgggatgttcgaccagagcaagctttgctaagattgcgtaaatcacttggtttgttcgctaatcttaggcctgcattcttattcaatgagcttgcatctgcatccccgctaaaaaaccacattatagaaaatttagacattctgatagtgcgagaactaaccggtgggatatattttggagagccaagaggtattgttgaaaatgaaactcctaaatatggttttaatactatgatctataacgaaggtgaaattagaagaattgcaaaggtcgcttttgaagctgccatgaatcgagataagaagctctgttctgttgaaaaagctaatgttttagaggtttcaaaattttggagaagcatagtttctgaaatgagctctgattatccagaggtcgagctctctcatcagcttgctgataatactgccatgcaattagtgctcaatccaaatcaatatgatgtgattgtttctggaaatctttttggagatatgctttcagacatagcagctactttaagcggttccattggcatgcttccctctgcatctcttaatagttcgtcccagggcatgtatgaaccatgtcatgggagcgcaccagacattgctggtcaaggcattgctaatccaattgcaatgattgcttctcttgcaatggcttttgagtactctctggaaagagttgatctagctagaagaattgagtcagcaataaaaatctttattagcaaaggtttgagaacaaaagatatctccacctccaaggaatttattcaaactaaagaagttgctccatctataatcaacatttttaaggatgagcatgaataa

SEQ ID NO: 208779 - DNA, 1096 bp, Unknown
  Bacterial polypeptide expressing nucleotide sequence isolated from the Sargasso Sea
tatgagttatcaaattgcagtattagccggggatggtattgggccagaagtgatggccgaggcgcgtaaggtgttaaaggcggttgaggcacgttttggccttaacattgaatacactgaatatgatgtcggcggtatcgctatcgacaaccatggttgtccattgccagaggcaacactgaagggctgtgaggcggccgatgccattctgttcggctctgtcggtggccctaaatgggagaaactgccgcccaatgaacagcccgagcgtggtgctctgttgccgctacggggtcacttcgaactgttttgtaacctacgccccgctaaattgcatgatggtttagaacatatgtcaccgctgcgcagtgatatttctgcaagaggtttcgatgttctctgcgtgcgtgagttaacgggtgggatctacttcggcaagcctaaggggcgccaaggtgaaggtgagagcgaagaagccttcgataccatgcgttacagccgccgtgaaattagccgtattgcgcgcattgcctttgaagccgctcgcggacgccgtaaaaaagtcacttcggtcgataaggcaaacgtattggcttgctcggtattgtggcgccaagtggttgaagaagtggcggtcgattttcccgacgttgagctggaacatatctatatcgacaacgcgaccatgcagttgctgcgccgccccgatgagtttgacgttatgctgtgttctaacttgtttggcgacattttatcggatgaaatcgccatgctgacgggttctatgggcttgttgtcttcggcgagcatgaatagcactggctttggtttgtttgaacccgcaggtggcagtgcgccggatatcgcaggtaaaggtattgctaatccgattgcacaaattctgtcggcggcactgatgctgcgccacagcttaaagcaagaagaggcggcaagtgcgattgaacgtgctgtgactaaggcgctgaattctggctatttaaccggtgagctattaagtagcgaccaacgccataaggctaaatcgacggtcgaaatgggcaactttatcgccgatgcagttaaggcaggtgtgtaa

SEQ ID NO: 208780 - DNA, 769 bp, Unknown; identical to SEQ ID NO: 208360
  Bacterial polypeptide expressing nucleotide sequence isolated from the Sargasso Sea

SEQ ID NO: 208781 - DNA, 1111 bp, Unknown
  Bacterial polypeptide expressing nucleotide sequence isolated from the Sargasso Sea
tatgagcaaattatataaattattaattttatctggagacggtattggtccagaagtaatggatgaagttattaaagttgctaaatgtgttgaagaaaaaagtaatgttgtatttgaaatacaaaaagatgatattggtggagcggcttatgatcgatatggtgtccccttatcagatgaaacattagctaaggcaaaagactctcacgcagtcttacttggcgctgttggaggagaaaagtgggacaatcttgatttttctctaaggcctgagcaagggcttttaagtattagaaaagaaatggatctatttgctaatttaagacctgctttatgttttgaatcaatggttgatgcatcatctttaaaatctgaacttgtttctggtttagacatcctaattgtcagagaacttacaggcggtatttattttggagagccaaggggtattgaagaaaaaagtgacggaaccagaattggaattaatacccagtcatacactacagaggaaataagaagagttgcaagaattgcttttgaattggcaagcaaaagagacaatagagtaacttcatgtgaaaaatcaaatgttatggagtcaggtattttatggagagaagaggtttcttacattcataaaaatgaatatccaaatgttgagctttcacatatgtatgcggacaactgtgctatgcaacttgtaagaaatccaaagcaatttgatgtaattgttactgacaatttatttggagatattctttctgatgaagctgctatgttaacagggtctttaggaatgctgccttcagcttcattgggcgcttttgattcaaataactctcgaaaatctctttacgagcccgttcacggatcagcgcctgatattgccggcaaaggaatagcaaatcctattgcatctatcttaagttttgcaatgtgtcttaaatattcatttaatatggataaggaatctgatctcattagtcaatctgttaataaagtactttcagatggctataagacagccgacttaataggtgatgctaataaaaatttgtcgacagttgaaatgggagacaaaattattaatcaattaaaacagaatttctaa

SEQ ID NO: 208782 - DNA, 1111 bp, Unknown
  Bacterial polypeptide expressing nucleotide sequence isolated from the Sargasso Sea
aatgattaaagtaaaaaaaagaaaaatccttttattaccaggagatggtatcggaccagaggtaattgcagaggttagaaaaataatagaatggctaaatcacaatagatcacttgattttgaaatcgatgaagatttagttggtggagctgcttatgataagcatggaacaccaattactgacgaagtattttataaagcattagaaagccaagcagtagttttaggagcagtgggtggtcctaaatgggataatttagaattttcaaaaaaaccagaaagagcacttttaaaacttcgaaaagaattaaagttatttgcaaatttaagacctgcgatatgctttaagcaacttgttgatgcatccagtcttaagcctgaaatagtttccggattagatataatgattgttagagaattaacaggagggatttatttcggtgagcctagaggcatcaaaccaattaataatggagaaaggaaaggaattaatacacatacctatacatcaaaagaaatagaaagggttggtaggattgcttttgaattagcaaagaaaagaaataataaagttacctcatgtgaaaaatctaatgtgatggaagcaggacaactctggaaagaggaaatacaaacattacatgataaagattttaaagatgtacaactagagcacatgcttgcagataattgtgctatgcagcttttaagataccctaagcaatttgatgtcatagttactgataacctttttggagacattctttctgatgaagcagctatgttaacgggttcattaggattgcttccctcagcatcactaggagcaaaggacaaggatggaaatatgagatcaatgtatgaacctgtccatggttcagcccctgatatcgctggtaaaggtttagctaatcctattgcaacaattttaagttttgcaatggctttaaaatactcattaaatttagataaagaagctaaagagatagaaaatgcggttcaaaaagtcttgaatgatggactaagaacaaaagacattttgtctaagggtaataaggaagtttctacaaaagtgatgggtgatgcggttattgcatatttgcaaaagtag

SEQ ID NO: 208783 - DNA, 596 bp, Unknown
  Bacterial polypeptide expressing nucleotide sequence isolated from the Sargasso Sea
agaaactatcatgtcggcacatggaatagacagagttcaaaaatttgcctttgaattagccaaacaacgaacaagaaaaaaattaactaatgcaacaaaatcaaacggaatttcaattactatgcctttttgggatgaaagatttaatcaaatgaaaaaaaactatcctgaaattgaaacagatcaatttcatatagatattttagttgctagatttgtactcaatccagagtggtttgatgtagtagtagcatcaaatttatttggagatattctttcagacttaggacctgcttgtacaggaactattggaatagctccttctggaaatattaaccctgaaaataaatttccatctttatttgaaccagttcatggttctgccccagatattgcaggtaaaggaattgcaaatcctgtaggacaaatttggtctggagcaatgatgctagattatttaggagaaaaagaagcttcgaattcaatcgttgaagcaattgaaaaatctttaagtgaaaaagaaaatagaactaaagatttaggtggggatgctgatactattaaatcatctaattcaattttagctaatctttaaa

SEQ ID NO: 208784 - DNA, 1075 bp, Unknown
  Bacterial polypeptide expressing nucleotide sequence isolated from the Sargasso Sea
atgaaagaatattctatagcttctattgctggtgacggcattggcaaagaagttgtacctgaagcacaaaaaatattaaaagaaatttctcaacaacatcaattcaaattaaatatagaggattatgattttgcatcatgtgattattatgaaaaacatggaaaaatgatgcctgatgattggcaagataaattaattaaacacgatgcaattttctttggtgcagttggtatgccagataaataccctgaccacataaccctttggggatcattgttaaaatttagaagagaatttgaccaatttattaatttaagacctgtaaaactttttgagggtgtaaatgctccattagctaataaaaaacctggtgatattgacatgataattgttagagaaaatactgaaggagaatattcatcagttggtgggagaatgtatcaaggtactgatagagaagttgttattcaagaaacagtaatgtcaaaatatggaatagatagagttcaacaatttgcttttgaattagctaaaaaaagaagaagaaaaaaactaacaagtgcaacaaaatcaaatggaatatcaattacaatgccttattgggatgaaagatttaatgagaataaaaaaaatttttctgatgtagaaactgatcaataccatattgatatattagctgctagatttgtgttaagtcctgaacgttttgatgtgatagttgcatcgaacctttttggggatattctatctgatctaggaccagcttgtactggaactattggaattgcaccatctggaaatataaatccaacaaataaatacccatcattatttgaacccgttcatggatcggcaccagatattgcgggacaagggatagctaatccggtgggtcaaatttggtcagctgcaatgatgttagattacttaggtgaaaaagaagcttctgacagaatagtaaaatcaattgaattaactcttaaagataaagacagtcgaacaaaagatcttcaaggctctagtaatacagaacagtgttcaaaaaaaattttagataatcttagctcggtctaaa

SEQ ID NO: 208785 - DNA, 700 bp, Unknown
  Bacterial polypeptide expressing nucleotide sequence isolated from the Sargasso Sea
atgaagaaatataagatagttttattgtcaggggacggaattggaccagagatttcagaagtttcaaaaaaagttttaaaaaagctttcaaaaaatcataatttcgatattgagattattgaagaattatttggagggatagcttatgaaaaatatgggagtcctgctccagataagacacttgatcaatgcaaaaaaagtgatgctgtacttttagcatgtgtaggcgatattaaatatgactctcttgcaagagaattaaggccagaaagtggattactaaagttaagatccgccctaaacctcttcgcaaatatcaggcctgtcaaaataagaaaatctctactagatgcaagtacattaaaaaaagaaatcgttgagcatgtagatcttattgttgtaagagaattaatagggggaatttattttggaaaaccaagaggacatataacaaatacaaaaatcccaaaagctttcaatacgatggtttatgattcggccgagatagagagaataacagaaatagcaataaaaattgctaaccaaagaaataaaaaaatatgttctgttgataaatcaaacgttcttgaggttagtcaattatggagagatacagttttaaatatcacctcaaaagataaaaatatatctttaagcaatatgtacgttgataatgcagcaatgcaattagttagagatc

SEQ ID NO: 208786 - DNA, 622 bp, Unknown
  Bacterial polypeptide expressing nucleotide sequence isolated from the Sargasso Sea
aaatacgcatacttatactagcagtgaaatcgagagagttgctagagtagcttttgatttagcaaaaaaaagaaaaaataaagtcacttcgtgtgaaaaatcaaatgttatggaagcaggacagctttggaaggaagaagtacaatctcttcatgataaagaatttaaagaaattgagttagatcatatgttagcggacaattgtgctatgcaattattaagaaatccaaaacaatttgacgttattgttactgataatttatttggagatatattgtcggatgaagcagcaatgttgacgggatctttaggtcttttaccatcagcatctttaggagcaaaagataaagatggaaacttgagatcaatgtatgagccagtacatggatcagctccagatattgagggaaaaggtattgctaatccaatagcatcaattttgagcttctcaatggctttaagatattcgttaaacttagataaggaagctgacgaacttgataaatctgtacaaagtgtactagataaaggattgaggactagggacattttatctaaaggaaaaaaggaagtttctacaaaagaaatgggtgatgctattattgcttatttgcaaaaataa

SEQ ID NO: 208787 - DNA, 1114 bp, Unknown
  Bacterial polypeptide expressing nucleotide sequence isolated from the Sargasso Sea
aatgagtaataaaaaaattttaattttacctggtgatggaattggcaatgaagttatggctgaggtattaaaaataattgattggatggaaaaaactaaatctttatcttttgatatttctgaaagattagttggtggtacggcatacgataaagaaggtaattctataagtgatgaaacaatgcaagtagctatggattgtgatgcagtattatttggtgcggtaggaggcgctaaatgggataacgtagaaagagataaaagacctgaagcagccttattaagattaagaaaagaccttgatctctttgctaatctaagaccagcggttgttttagatgctctttcagattcatcatctttaaaatctgatcttgttaaaggattagatattttgataataagagagttaacaagtggtgtatattttggacaaccaagaggtatatcaaaaattagtgagactgaaagtaaggcagttgatactcaactgtataccacatcagaagttaatagagtttcacgagtggcatttgatttagcaaagttgcgtaataataaagttacatcagtagaaaaatcaaatgtaatggaaacaggtttattttggaaacaaaccgtaacagatttacataaaaaggaatattctgatgttaatttagaacacatgcttgcagataattgtgcaatgcagttagttcgttatccaaaacaatttgatgtcatacttacagataacttatttggtgatcttttaagtgatactgcagctatgctaacaggatctttaggaatgcttccttcagcagctcttggaccagttaaagaaaatggaactagagcagcaatgtatgagcccgttcatggtagtgcaccagatatagctggtcaatctaaagcaaatcctttagcaatgatcatgagctttgctatgatgttgaaatatagttttgatatgcaagaagatagtcaaatggttgagaaagctgtacagaatgtattactaaaaggtttaagaacagctgatataaaagatggagcagaaaaaattatctcaactcaagaaatgggcaatgctgttattgaagaattaaaaattctatctggaaattaa

SEQ ID NO: 208788 - DNA, 1072 bp, Unknown
  Bacterial polypeptide expressing nucleotide sequence isolated from the Sargasso Sea
aatgtcatcaaatagaaaactaatggtgatgccaggtgatggtataggtcctgaggtaatgaatgaaactttaagactattggattggcttgcaaaatataaaaatataaattttgatactatagaaagagatgttggtggtaagtcgtgtgatcttcatggcacaccactaactgatgaagctctaagcgatgcccttgaatgtgatgctgtattatttggtgcagttggtggtccaaaatacgatgacttagattttgaattaaagcctgaaagaggtctcttgacactcagaaaagagctggatctgtttgctaatcttcgaccggcaattgtttttccaccattagttgaagcatctacacttaagccagaagtggtcgaaggattagatataatgatacttcgtgaattaactggtggagtttattttgcagagccaaggggtattgatattatgcctgacggttcaaaaaaaggttatgataccaatttatatacaacatctgaaattgaaagaattggcagagtggcatttgatcttgctaaaaagagaaataataaagttacttcagtagaaaaagctaatgtaatgctatctggtgttttatggagagaagtaataacagaactgcataaaaaagaaggaaacaatataaagttagagcatatgtttgcagataattgtgcaatgcaactggtaagagctccaaaacaattcgatgttattgtttgtgataatttatttggtgatatgctttctgactgtgcagcaatgctgacgggatcacttggaatgcttccatctgcttctcttggagcgccaaataaagatggcatcagaaaagcaatgtatgaacctgttcatgggtcagcacccgatataacagggaaaggtgtagcaaacccactagctcaggtattaagttttactatgatgttacgttactcttttgattataatcaagaagctgatctaattgaaaatgcagtttctgaagctttatcatctggcgctagaacacctgaccttggtggtggtagcaaaaaatgtttccacaacactgaaatg

SEQ ID NO: 208789 - DNA, 680 bp, Unknown
  Bacterial polypeptide expressing nucleotide sequence isolated from the Sargasso Sea
tcttgatatgcttatcgtaagagagctcactggcggtatatattttggtgagcctagagaaaaaaaatcatcctctgcttttaatacaatgatttatgaaaggcatgaagttgaaagaatcgctagggttgcttttgattctgcatccttgagaaacaaaaaagtttgttcagttgataaatcaaatgttcttgaagtgtctgaattttggagggaagttgtaatagatgtatcgaaagattatccagatatagaattaagtcatatgcttgtcgacaacgctgccatgcagcttgtgaaaaaccccaaacaatttgatgtcattctttcaggcaacttatttggagatatcctctctgatatttctgcaatgcttactggatctatcggaatgcttccttctgcttccttggataacagaaataaagggttgtatgaaccagttcatggcagtgctcctgatattgcaggacaaggaacagtaaacccaatcgcgatgattctttcagttgggatgatgtttaggtattcacttaatcaattagaaatatcagaaaacattaaaagtgcagtctcaaatactcttaatgatggatacgctactaaagatattgctgataagaatagtaaaatttgttcaactagagaattaacaaaaataattatcgatcatgtctaat

SEQ ID NO: 208790 - DNA, 1001 bp, Unknown
  Bacterial polypeptide expressing nucleotide sequence isolated from the Sargasso Sea
atcattagattttgaaattgaggaaggcctagccggtggagcatcttatgatgagtatggaactccaattactgacgaagttttttataaagctttggagtccgaggcagtcattcttggagcagtaggaggaccaaaatgggataatttagaattttcaaaaaaacccgaaagagcattattgaaattgagaaaagagttaaaactatttgcaaacttaagacctgcgatatgttttaaacaattagtaaatgcatctacactaaaaccagaaattgtttcaggattagatattatgatagtgagagaacttacaggaggtatctattttggtgaaccaagaggtattaaaccaattaataatggtgaaagaaaaggaataaacactcacacttatacaagcaatgaaattattagagtggctagagttgcatttgatttagcaaaaaaaaggtcaaataaagtaacttcttgtgaaaaatcaaatgtaatggaagcaggacaactttggaaagaagaagttcagtctttgcatgaaaaagaatataaagatgttgaacttaaccatatgcttgcagataattgtgccatgcaattactacgaaatccaaaacaatttgatgttatagttactgataatttatttggagatatgttatctgatcaagcttcaatgcttacaggatctttaggtttattaccttccgcttctttaggtgctaaggataaaaatggtaaaatgagagcaatgtatgaacctattcatggttcagcgccagatatagcaggaaaaggtattgctaatccgatagctacaattttaagcttttctatggcactgagatattctttaaatttagataaagaagcagatgttttagaaaatgctgttcaagaagtactaaatgacggattaagaacaaaagatatagtatcaaaaggaactaaagaagtatcaacaactaaaatgggagatgcaattatttcaaaattgaaataat

SEQ ID NO: 208791 - DNA, 940 bp, Unknown
  Bacterial polypeptide expressing nucleotide sequence isolated from the Sargasso Sea
aaaaattttagataaggttggctgtgactttgcctatgactatgccgatgctggcctagtcgcactggaagaacatggcgagcttctacctcaagaaactttagacctaatcgcaaaaaacaaagttgcgcttaaaggtcctttaacgacccccgttggtgaaggttttacttcaatcaacgttagtcttcgcaagcagttcaaactgtacgcaaaccttcgtcctgtgatgtcattcaaaggtacaaaagcacgttacgaagacatcgatatcattaccgttcgtgaaaacacgcaaggtatgtactctggtcttggccaagttgtatcagaagacggtaacgaagctgaagcaatgagtaagatcactcgtgacggcgctgaaaaaatcgttgtttttgcttatgaattagcgcgccgtgaaggtcgtaagaaagtaacagctgttcacaaagctaacatccttaagtcaacatcaggtcttttccttaaagtagcccgtgaagttggtgagcgctatcctgacatcgagtcagctgaaatgatcgttgataactgctgtatgcagcttgtgatgaacccgcatcagtttgacgttatcgttacgactaaccttttcggtgacattctatctgacctatgtgctggtctagttggtggtcttggtatggcaccaggtgcaaacatcggtgaagattgtgcaatcttcgaagccgttcacggttctgcaccagacattgctggtaagaacttagctaacccgacgtcagtaatcttggcagcagcgcaaatgcttgagtacttaaacatgggcgataaagcagagaaaattcgcgcagcactaaaagacgttatcgagtctggcgatcgcacaacacgtgaccttggtggtgaagcaggtacaaccgagttcactcaggcgcttcttgaccgcctataa

SEQ ID NO: 208792 - DNA, 714 bp, Unknown
  Bacterial polypeptide expressing nucleotide sequence isolated from the Sargasso Sea
aatgattaaagttaaaaaaagaaaatttttattattacctggcgatggaattggaccagaagttgtcggagaagttaaaaaaattattgaatggtttaacaaaaataaatctttagattttgaaattgatgaagatttagcgggcggtgcttcatatgataagcatggagttcccataacagatgaggttttttacaaagctttagaatgtgaggctataattcttggtgctgtaggaggccctaaatgggacaacttagaattttcaaaaaagcctgagagggctctattaaaattaagaaaagagctgaaactatttgctaatttaagaccagcaatatgttttaaacaattagttgatgcctcaactcttaaacctgaaattgtttctggattagatattatgattgttagagaacttacaggtggaatttattttggagaaccaagaggaattaaaccaattgataatggtgagagaaaaggaattaatactcacacttatacttcaagcgaaatcaaaagagttgcaagagttgcatttgatttagccaagaaaagaaaaaataaagttacatcgtgtgaaaaatcaaatgtaatggaagcaggtttgctctggagagaagaagttcaagaattgcatgataaagaatttaaagatgtacaattaaatcatatgcttgcagataactgtgcaatgcaactactaagaaa

SEQ ID NO: 208793 - DNA, 781 bp, Unknown
  Bacterial polypeptide expressing nucleotide sequence isolated from the Sargasso Sea
atggatgaagttattaaagttgctaaatgtgttgaagaaaatagtaatgttgcatttgaaatacaaaaagatgatattgggggagcggcttatgatcgatatggtgtccccttatcagatgaaacattagataaggcaaaagactctcatgccgtcttacttggcgctgttggaggagaaaagtgggatcatcttgatttttctttaaggcctgagcaagggcttttaagcatcagaaaagaaatggatctatttgctaatttaagacctgccttatgttttgaatcaatggttgatgcatcatctttaaaatctgaacttgtttctggtttagacatcctaattgttagagaacttacaggcggtatttactttggagagccaagaggtatcgaagaaaaaagtgacggaactagagttggaattaatactcagtcatacagtacagaagaaataagaagagttgcaagaatagcctttgaactggcaagcaaaagagacaacaaggtaacttcatgtgaaaaatcaaatgttatggagtcgggcattttatggagagaagaagtatcttacgttcataaaaatgaatatccaaatgttgaactctcacacatgtatgcggataattgcgctatgcaacttgtaagaaatccaaaacaatttgatgtaattgttacagataatttatttggtgatattctgtctgatgaagccgctatgttaacaggatctttaggcatgctgccttcagcttcattgggcgcatttgattctaaataac

SEQ ID NO: 208794 - DNA, 1069 bp, Unknown
  Bacterial polypeptide expressing nucleotide sequence isolated from the Sargasso Sea
atgaagattgcagtgctgcccggcgacggcatcggtccggaaatcgtcaatgaagccgtgaaggtgctgaacgcactcgacgagaagttcgaactcgaacaggcgccggtcggcggcgcgggctacgaggcgagcggccatccgctgcccgacgcgacgctgaagctcgcgaaggaagccgatgcgatcctgttcggcgccgtgggcgactggaagtacgactcgctcgagcgcgcgctgcgccccgagcaggcgatcctcgggctgcgcaagcacctcgagctgttcgcgaacttccgcccggcaatctgctatccgcagctcgtcgatgcgtcgccgctgaagcccgagctggtcgcgggcctcgacatcctgatcgtgcgcgaactgaacggcgacatctacttcggccagccgcgcggcgtgcgcgctgcaccggacggcctgtttgccggcgagcgcgaaggcttcgacacgatgcgctattcggaaccggaagtgcgccgcatcgcgcacgtcgcgttccaggcggcccgcaagcgcgcgaagaagctgctgtcggtcgacaaggcgaacgtgctcgagacgtcgcagttctggcgcgacatcatgatcgacgtgtcgaaggaatacgcggacgtcgagctgtcgcacatgtacgtcgacaacgcggcgatgcagctcgcgaaggcgccgaagcagttcgacgtgatcgtcacgggcaacatgttcggcgacatcctgtcggatgaagcgtcgatgctgacgggctcgatcggcatgctgccgtcggcgtcgctcgacaagaacaacaagggcctgtacgaaccgtcgcacggttcggcgccggacatcgcgggcaagggcatcgcgaacccgctggcgacgatcctgtcggccgcgatgatgctgcgctactcgctgaatcgcgcggagcaggccgatcgcatcgagcgcgcggtgaaaacggtgctcgaacagggctaccgcacgggcgacatcgcgacgccgggctgccggcaggtgggcacgacggcgatgggcgacgcggtggtcgcggcgctgtaac

SEQ ID NO: 208795 - DNA, 449 bp, Unknown
  Bacterial polypeptide expressing nucleotide sequence isolated from the Sargasso Sea
tgatattaccctagaaaatatgttagccgataactgtgccatgcagttagttagaaacccaaaacaatttgatgtaatagttacagataaccttttcggtgatcttcttagtgactgtgctgccatgttaactgggtcactgggaatgttaccatcagcatcattgggtgcagaaaaaaatggaaaaagccatggtctttttgaacctgttcatggaagtgctccagatattgctggccaagataaagcaaatcccattgctactattttaagtttatcaatgatgttgaaatataaccttaataaacctgaattatcaaataaagtagaaaatgctgttcaacaaatcctctctgagggttatagaacaggagatatttacacagatgaaaaccaaacacttgtttcttgctctaaaatgggtgatttaattatagaaagaatttaac

SEQ ID NO: 208796 - DNA, 578 bp, Unknown
  Bacterial polypeptide expressing nucleotide sequence isolated from the Sargasso Sea
gcgcgttgcatttgatctagctagaaaaaggaataataaagttacttcctgtgaaaagtcgaatgtcatggaggcaggtcaattatggaaagaagaagtgcaagcaattcacgaaaaagaatatagtgatgtagaattaaatcatatgctagcagataactgtgcaatgcagttagttagaaatcctaaacaatttgatgtgatagtaacagataatctttttggtgacatgttatcagatgaagctgcaatgttgactggttctctagggcttttgccatctgcgtctcttggagccaaagataaaaatggtaatatgagatctttatatgagccagttcatggatcagcacccgatatagcaggtcaaggtattgctaatccaatagcaacaatcctgagttttgcaatggctttaagatattctttagacctagataaagaggcagatagtttagaaaaagctgttcaaggtgtgcttgatgagggtcttagaactaaggatataatatcaaaaggaatgaaagaagtatcaacatcagtaatgggagatgcgataatttcaaaattgcaataat

SEQ ID NO: 208797 - DNA, 262 bp, Unknown
  Bacterial polypeptide expressing nucleotide sequence isolated from the Sargasso Sea
aatgattaaagttaaaaaaagaaaatttttgttattacctggagatggtattggtccagaagtaattggtgaagtaaaaaaaataataaattggtttaacaaaaataaatcattagactttgaaattgaggaagaactagtaggaggcgcttcttttgaaaaacatggaacaccaattacagatgaagtattttataaggcattagaaagtgaagcagtgatattaggagcagttggaggtcctaaatgggatgatcttgaa

SEQ ID NO: 208798 - DNA, 492 bp, Unknown
  Bacterial polypeptide expressing nucleotide sequence isolated from the Sargasso Sea
aatgattaaggttaaaaaaagaaaaattttattgttagcaggtgatggtattggccccgaggtaattgctgaagttaaaaaaattataaattggtttaataaaaatcgatctcttgactttgaaatagatgaagatttggttggaggtgcagcttatgacaaacatggaattccaattactgatgaagttttttttaaagcattagaaagtgaggcagtaatgttgggtgctgttggaggtcctaaatgggacaatattgatttttcaaaaaaaccagagagagcacttttaaaacttagaaaagagttaaaactatttgcaaatttaagacctgcaatttgttttaaacaacttgtagatgcttcaagccttaaaccagaaatagtctctgggttagacataatgctagttagagagttaacaggaggaatttactttggtgagcctaggggaattaagcctattaacaatggtgagagaaaaggaataaa

SEQ ID NO: 208799 - DNA, 1105 bp, Unknown
  Bacterial polypeptide expressing nucleotide sequence isolated from the Sargasso Sea
aatggcaacaaatcaaaaaaaaatatttcttttacctggtgatggtataggcccagaggttgttggagaaaccagaaaagttattgattggtttaataaaaaaaaatccctagattttaaaattgaccaagatcttattgggggagctgcaatagataaacatggtgtaccaataactgatgaagtattttataaagctttagaaagtgatgcagtaatagttggagcatgtggtggaccacagtatgataaattagagttttcaaaaaaacctgaaagagctcttttaaaattaagaaaagaattaaaattatttgcgaatttaagaccagccatttgttttaaacaacttgtagattcttcaacgttaaaaccagaaatagtttcaggtctcgatattttaattgtaagagaattaacaggaggcatatattttggtgagccaagaggtgtaaaaccaatagaaaacggtgaacgaagaggagtgaatacacacgtttatacaacaaaggaaattaaaagaattgccaaagtagcatttgaactagctgctaaaagaaataataaagtaacatcttgtgaaaaatcaaatgttatggaggcaggtgttctttggagagaggaagttcagtctttaaaggataaagattataaaaaaatcgagctaaaccatatgttagcagataactgtgcaatgcaattattgagaaatccaaaacagtttgatgttattttagctgataatttatttggggacatgttatcagatgaagctgcaatgttaacaggttcactaggtttgctaccatctgcatcattaggtgataaagataaaaatggaagaacaagatctttgtatgaacctgtccacggttcagcaccagatattgctggtaaaaatatatcaaacccaattgcaacaatattaagtttctcaatggcattaaaatattctttaggaatgcaaaaagagtctacaatgttagataaggctgttgaaaaaacactagaagacggtttaagaactccagatataatgtcaaaaggtaagaaaaaggtatcaacctcagagatgggtgatgcaattatatcaaatttaaattaa

SEQ ID NO: 208800 - DNA, 439 bp, Unknown
  Bacterial polypeptide expressing nucleotide sequence isolated from the Sargasso Sea
atgattaaaataaaaaaaagaaaatttttattattacctggagacggcattggtccagaagttgttggtgaggttaaaaaaataatattctggtttaacaaaaacaaatctttagattttgaaatagatgaggatctagcaggcggaatttcgtatgataaacacggaactcctatcactgacgaggttttttataaagctcttgaatcagaggcggtaatattaggagctgtgggtggacctaaatgggataacgtagagttttcaaaaaaaccagaaagagcattgcttaaattaagaaaagaattgaaactttttgctaatttaagacctgctatttgctttgaacaattggttgaagcatcaacacttaaacctgaaatagtttcagggttagatattatgatagtaagggaacttacagggggaatctactttg

SEQ ID NO: 208801 - DNA, 1087 bp, Unknown
  Bacterial polypeptide expressing nucleotide sequence isolated from the Sargasso Sea
atgaataaaaaaattcttattttgccgggtgatggcatcggccctgaggtaacaagttctgcaatggagatattaagatttgttaaagatctatactctcttgatcttgatattgaaattcatgaggttggcggagcagcttatgataagactggttatcctcttcctgataagactttggagatagctagaaaatctgatgctattctcttcggagctgtaggtggtccagaatgggaggatttagattgggataaaagaccagagcaagcattgttaggattgagaaaagagcttggattatttgctaacctcagacccgccttcctttttaatgagcttgcttcagcttcaccaataaaagaggaaattatcaatgatttagatatcttaatagtaagagagttaacaggcggtatttattttggagagccaagaggaattgatacatcctcaaatcctccacatgcttttaatactatgatttatgatgaaaaagagatcgaaagaatcggtcgagtagcatttgaatcagctcaaaaaagaaataaaaaactatgttcagtggaaaaagcaaatgttcttgaagtttcaaagttttggagagaaataatcacaaacctatcaaaggactatcctgatgttgaattgacacatcagcttgctgacaatactgcaatgcaattagtgcttgatccaaatcagtttgatgtaattgtttctagtaatctatttggtgatattttatctgatattgctgcaacactaactggctctattggtatgttgccttccgcatcactgaacagctcttctcagggaatgtatgagccatgtcacggcagcgcacccgatatagctggtaagaatttagcaaatcctttagcaatgatcctctctctagcaatggcttttagatactctcttgaaaactatgaagcagcaaacataatcgaagaatctgtaaaagaatttatctcaagaggctttagaacaaaagatttaacagaagatatgtcctttctagagactgacgaggttgcatctgaacttattccaataatcatggaaaaatctgatgtctaag

SEQ ID NO: 208802 - DNA, 788 bp, Unknown
  Bacterial polypeptide expressing nucleotide sequence isolated from the Sargasso Sea
aatgatcaaagttaaaaaaagaaaaatattacttctacctggagatgggataggaccagaggttataaatgaagtaaaaaaagttattgaatggtttaattcaaaaaaatctttagattttgaaattgatcaagatctagctggtggagcttcttatgatgagcatggtacaccaattaccgatgaggtattttacaaggctttagaaagtgaagtggtgatgttaggtgctgtaggtgggccaaagtgggataatcttgaattttctaaaaaacctgagagggcgttattaaaattacgaaaagaattaaaattatttgccaaccttagaccggcaatatgttttaaacagcttgtagaagcatcaacattaaaaccagaaattgtttcaggtttagatattatgattgttagagagttaacaggtggaatatattttggagaacctaggggaattaaaccaatagataatggagaaagaaaaggtattaatacccacacctatactagtagtgaaattattagagttgctagagtagcttttgatttggcaaaaaaaagatcaaataaagttacttcttgtgaaaaatcaaatgtcatggaagcaggtcaactttggagggaagaagttcagaaattacatgatgatgaatacaatgaagtggagttaaaacatatgcttgcagacaactgctccatgcaattgctaagaaatcctaaacaatttgatgttattgtaactgaccatttgtttggagatatgctttcagatccagcttctatgttaa

SEQ ID NO: 208803 - DNA, 921 bp, Unknown
  Bacterial polypeptide expressing nucleotide sequence isolated from the Sargasso Sea
aatgtcatcaaacaataaaaaaatattattattaccaggagatggtattggccctgaagtagttagagaaaccaaaaaagttataaattggtttaataaaaaaaaatctcttgattttaaaattgacgaagatttgataggaggtatatcgattgataaacacaaaactccaatcacagacgaagttttttataaagccatagaaagtgatgctataatatttggtgcttgcggtggacctaaatacgataatcttgaattttccaaaaaacctgaaagaggcctgatgaaattaagaaaagaacttaaactttttgctaacctaagaccagctatatgctttaatgaacttgttgaatcatcatctcttaaaccagaaattgtttcaggtttagacatattaattgttagagaacttacaggaggaatatattttggcgagcctagaggtattaaacctattgaaaatggagaaagaaaaggaattaatacccatgtctacactacaaaagaaattaaaagaattgcaaaagttgcttttgaattagctgaaaaaagaaaaaataaagttacatcatgtgaaaaatctaatgttatggaagcggggattttatggagggaagaagttcaaacattaagagataaagaatttaaaaaaattgagttaaaccacatgttcgcagacaattgtgcaatgcaactcctaagaaatcctaaacaatttgatgtaattttagcagacaacctttttggagatatattatctgatgaggcagctatgttaactggatctttaggtttgttaccttctgcatctttaggagacaaagataaaaaaggtagagttaaatcattatatgaacctgtgcatggatctgccccagacatagctggaaaaaatatttctaatccaattgctac

SEQ ID NO: 208804 - DNA, 436 bp, Unknown
  Bacterial polypeptide expressing nucleotide sequence isolated from the Sargasso Sea
atgattaaattaaaaaaaaaaaaaatcttattactacctggggatggaattggcccagaagtcactgatgaggtaaaaaagataattaattggtttaatgacaaaaaatcattaggttttgagacagatgaggaactagttggaggttgttcatatgataagcatggaacacctattactgatgaagtcttttataaagctttagagagtggagttataatgctaggtgctgttggtggaccaaagtgggaaagtgtagaatttgataaaaaaccagaaagagcattattaaagctaagaaaagaattaaaactttttgctaacttaagaccagcaatatgctttaaacaattagttgatgcctcaactttaaaaccagagataatttcaggcctggatataatgatcgttagagaattaacaggtggagtttatt

SEQ ID NO: 208805 - DNA, 1078 bp, Unknown
  Bacterial polypeptide expressing nucleotide sequence isolated from the Sargasso Sea
atgagtaagaatattttaatcttaccgggtgatggcgttggtcaagaagtaacagcctctgctgtcgaggtcttagattttcttataaaagaatatggccttgatttttcagtgaaatcaatgaatgtaggaggaacggcatttaatgaatgcggatcacctttaccaaaagaagttcttaacgcagccaaagaatcagatgcaatactgtttggcgcagttggcggcacggagtgggataatttagattgggatgatcgacctgaaaatgcattattaacccttagaaaagaattaaatctttttgcaaatttaagacctgcatttttatttaatgaattatcagaagcctctccattaaagaaagaaataattaacaatcttgatattttaattgtgagagagcttaccggtggcatctattttggtgaaccaagaggcattgtttcagataaagagcctaattatgcttttaacactatggtttacaacgaagatgagattagacgtattgcaaaagtaggatttgaatctgctcaaaaaagagatggtaaattatgctctgttgaaaaagcaaatgtccttgaagtttcaaaattttggagatctatagttaccgaaatggcatctgaatatcctgatgttcaacttacacatcaactagcagacaatgctgcaatgcaattagttctagatccaaaccaatttgatgtaattgttgctagtaatctttttggagatattttatctgacatagctgcaactttgactggttcaatcgggatgttgccatctgcatcattagacagttcttttaaaggaatgtatgagccttgtcatggtagtgcgccagatatagcaggacaaaatatagctaatccattggcaatgatttcgtctctttctatggcattaagatactctctaaatcaagaaagtatttctggtaaaattgataccgcaattaaattatttatccagtctggatatagaacaaaagatattgcagttgatgagaattatctaaaaacctctgaagttgcacaaaaaattatagatataatacaaaatggataaa

SEQ ID NO: 208806 - DNA, 1108 bp, Unknown
  Bacterial polypeptide expressing nucleotide sequence isolated from the Sargasso Sea
aatgattaaagttaaaaaaagaaaatttttattattaccaggtgatggaattggacctgaagttattggagaagttaaaaaaattattcaatggtttaataaaaataaatcactagattttgaaattgatgaagatttagcaggtggagcttcttatgataagcatggaacacctataactgatgaagttttttataaggctttagaatgtgaggccgtaattcttggtgctgtaggaggtccaaaatgggataatgtagaattttcaaaaaaacctgaaagagccttactcaaattaagaaaagagctaaagctttttgcaaatttaagacctgcaatatgttttaaacagttagttgatgcttcaactcttaaacctgaaattgtttctggattagatattatgattgttagagaacttacaggtggaatttattttggtgagccaagaggaattaaaccaattgataatggtcaacgaaaaggaattaatacccacacatatacttcaagtgaaatccaaagagttgcaagagttgcatttgatttagctaaaaaaagaaaaaataaagttacatcatgtgaaaaatcaaatgtaatggaagcaggcttactttggagagaagaagttgaagtattacatgataaagaatttaaagatgtacaattaaatcatatgcttgctgataattgtgccatgcaactactaagaaatccaaaacagttcgatgttatagttactgataatttatttggggatatgttatctgatcaagcgtctatgttaactggttctttaggattgttaccttcagcatctttaggagccaagaataaggatggtaaattaagagcaatgtacgaacctatacatggttcagcacctgatatagctggacaaggtatagccaatccaattgcaacaatattaagttttgcaatggctttaagatattcacttaatttagataaggaagcagatgctttagaaaaagcggttcaaaatgttttagatgagggacttagaactaaagatattttatctaaaggaatgaaagaagtatcaacatctgaaatgggtgatgcgataatttcaaaattgcaataa

SEQ ID NO: 208807 - DNA, 1108 bp, Unknown
  Bacterial polypeptide expressing nucleotide sequence isolated from the Sargasso Sea
atgattaaagttaaaaaaagaaaatttttgttattacctggagatggtattggtccagaagtaattggcgaagtaaaaaaaataataaattggttcaacaaaaataaatcattagattttgaaattgaagaagaactagtaggaggcgcttcttttgaaaaacatggaacaccaatcacagatgaagtattttataaagcattagaaagtgaagcagtgatattaggagcagttggaggtcctaaatgggatgatcttgaattttcaaaaaaacctgagagagcattattaaaattaagaaaagagctaaaattatttgctaatcttagacctgctatatgcttcaaacaactagtagatgcttcgagtttaaaacctgaattagtatcagatttagatatcttgttcgtgagagaactaacaggaggaatttattttggagaaccaagaggaattaaaccaattgataatggagaaagaaaaggaattaatactcacgtatatacttcaagtgaaatcgaaagagttgctcgtgttgcctttgatcttgcaaggaaaagaagtaaaaaggttacatcttgtgaaaaatcgaatgtaatggaagcaggccaactttggaaagaagaagttaaagctctacatgaaaaagaatataaagatatagaattaaagcatatgctggcagacaattgtgctatgcaattagttaggtatcctaagcaatttgacgtaatagttactgataatctttttggcgatatgttatcagatgaggcggcgatgttaactggttctctaggacttttaccatcagcatcattaggagctaaagataaaaatggaaatatgagatcattatatgaaccagtccatggttcggcacctgatatagcaggtaatgggatcgcaaatccaattgcaacaatattaagttttgcaatggcgttaaaatattctttagatttagataaagagtcaaaaactttagaaaaagcagttcaaactgttttagatgaaggattaagaactaaagatatattatcaaaaggctcgaaagaagtttcaacatctgaaatgggtgatgcgataatttcaaaattgcaataat

SEQ ID NO: 208808 - DNA, 1057 bp, Unknown
  Bacterial polypeptide expressing nucleotide sequence isolated from the Sargasso Sea
aatgaaagcagaaataactgtattgtcgggtgatgggattggtcctgaaatcacagagcatgcattgcatattctcactgcaattgaaaaaaaatatggccatgagtttattttgcacgatgctctgtttgggggtattgccatcgacaaaactggcgatccttatccacaggaaacaagggatctttgcaaaacatctgatgctgttcttttaggtgctgttgggggaccaaaatggagcgatcccaaggcaaagacgagacctgagaaaggcttgttagatatgagatcagacctcggtgtttatgcaaacctaaggcaaataaagacttatcctcagttaattgataattcaccgattgaaaactccagattgaaagatattgatatcttatttgtccgggagttaatcggcggcatatattttggcgaaaaagaaaagtcagaagattatgcaaaagatgtatgcgaatattcagcgactgagatagagcgtatcgttaaagttgctgcagatttatcgaagaaaagaaaaaataagctgacgtccgttgataaagcgaacgtgatggcaacttcacaactttggagatcagtgacaactactatgattgaaaatgaatatccggatttagaaattgaacaccttttagtcgatgctgcaaccatgcatctgctctctcgtccagcagactttgatgtagttgttgctgagaatctctttggagacatcttaacggatgaggcatccatgctgacgggatcgataggcatgatcccttccgcttctctcggcgataataattttggcgtgtatgaacctattcatggttctgcaccagatattcagggcaaaggccttgcaaatccatgcggcatgattctttcagttgctatgatgcttaagcactcactgaatctgattgacgaagcaaatgaaattgagaatgcagttcaaacagtactcaatcaaggaatctttaccgccgatctttcatctcatgaccatgtttcaacggatgagatgggagaagccatactctcaaatataaattaa

SEQ ID NO: 208809 - DNA, 682 bp, Unknown
  Bacterial polypeptide expressing nucleotide sequence isolated from the Sargasso Sea
ggtatatattttggtgaacctagaggaattaagccaattgaaaatggagaaagaaaaggaattaatacccatacttatacaaccagtgaaattaatagagtagctaggatcgcttttgatttagctagaaaaagatcaaataaggttacttcatgtgaaaaatcaaatgtgatggaagcagggcaactgtggaaagaagaagttcaagaacttcatgaaaaagaatacaaagacgtggaattaagtcatatgttagcagacaattgtgcaatgcagcttttaagaaacccaaagcaatttgatgtaattgtaactgataatttatttggagatatgctgtctgaccaagcttcgatgttaactggatccttaggtcttttgccgtcagcgtctttgggtgcaaaaaataaagatggtgagatgagagcaatgtatgagccaatacatggatcggctcctgatatagctggacaaggtattgcaaatccaattgcctctattttaagttttgctatggctttaaggtactctttagatcttgataaagaagcagatgttttagaaaaggcagttcaagatgttctaaatgatggtttgagaaccaaagacataatgtcagaaggcatgaaagaaacatctacttcagcaatgggtgatgcgataatttcaaaattgcaataaa

SEQ ID NO: 208810 - DNA, 1011 bp, Unknown
  Bacterial polypeptide expressing nucleotide sequence isolated from the Sargasso Sea
aaccaaatatattgagaaaaataacattaatacctggtgatggtattggacaagaggttattctaggaacaaaagatataatagatagtcttaatctagaaattgaatgggatatcatatcaaaccctatggatgataaaaccaaaaaaatttcatcagagcttgaaaaatctttatcaattactaaagttggactaaagggtcccttgactacaccagtaggagaaggttttagaagcattaatgtagagattagaaaaagattcgaactatttgcaaatttcagaccaataaaaaccctacaaggttttaaaactaattataaagatttggatatgataattataagagaaaatactgaggatctatatgcaggtaaagagctcgaaatcgcaaaaggggttactcaatccatgaaaattataacgactgcggcctcagatagagtggcaaaatttgcgtttcaatatgctttagagaataaaagaaagaaaataacagttttacataaagctaatatcatgaaattaactgatggattattcttagatcgagtaagaagaatctccagaaggaaaatttacagagatattgaatatgaggaattaattattgacaatgcttgcatgcagcttgttatgaatccaaataaatttgatatcatacttactggaaatctttttggtgatattgtttcagatttatgcgctggactagttggaggactaggtgctgcgtcaggtgcaaatataggttcaaactatgcagtttttgaacctgtccatggtactgccccagatatcgcaggaaaaggtattgcaaaccctttggctactatactatcttcaattatgatgctgaatcatattgggatgaaaaagagcgctataaaattaaataaggcggtcctttatacactatcatttcctgagaatagaatgcgcgatatgggtggaaaattgaaaacaaaagactttataaataaaatcatttctaatattaaaaattaaa

SEQ ID NO: 208811 - DNA, 391 bp, Unknown
  Bacterial polypeptide expressing nucleotide sequence isolated from the Sargasso Sea
aatgactgacaaaaaaaagattttaatattaccgggtgatggtatcggtcctgaagtttgtactgaagcaaagaaagtcttagttgctttaaatgacaaatttcaatatgacatcgaatttgaagaggcggaagttggtggagcagcctttgacaaatatggtaaacccttaccagaagcaacacttgaagctgctcaaaacgccgatgcaatcttactaggtgctgtaggagggcctgcatgggatgatcttgactatgatcttagaccagaaagagcactactgggattacgctctcaattagatttatttgctaatctaagaccagctattttatctaagcatcttgtggagtcgtcttcgcttaaatcggagaaagtagaagatcta

SEQ ID NO: 208812 - DNA, 1066 bp, Unknown
  Bacterial polypeptide expressing nucleotide sequence isolated from the Sargasso Sea
atgaaagaatataatattgcagccataccaggagatggaataggtaaagaagttgtgcctgagggacttaaaattttaaaagaggcagccctaaaacatcaatttaaaattaatttcactgagtacgattttgcatcatgtgattattatgaaaagcacggaaaaatgttacctgatgattggaaagaaaaattaagtaaacataatgctattttttttggcgctgttggtatgcctgatcaggttcctgatcatatttcattatggggatcgctactccaatttagaagaggatttgatcaatacataaatttaagaccagttaaactttttccaggggtaaatcctccactggcaaacaaaaaacctggcgatattgatatgatgattgttagagaaaacactgaaggagaatattcatcagttggtggcagaatgtatcaaaatactgacagagaaatagcgatacaagaaactattatgtctgctcacggcatagatagagttcaagagtttgcttttgaattagcaaaaaaaagaaagagaaaaaaactaactaatgcaacaaaatctaatggtatttcaataacaatgccattttgggatgagcgtttcaataaaatgaaaaataaatatcctgaaattgaaactgatcaatttcatattgatatattagcagcaaggtttgttcttaatccagaatggtttgatgtggttgtggcatccaatttatttggagatattttatctgatttaggtccagcatgtaccggaaccataggaattgccccatcagggaatataaatcctgaaaataaacatccatcattatttgaaccagtgcacggctcagcgcctgatatagctggaaaaggggttgcaaatcctgttggtcaaatttggtcgggtgcgatgatgcttgattacttaggagagaaagaagcttcgaattcgatagtctccgctattgaaaagtctttaagtgttcaaaaaaatagaactaaagacttggggggtgaaagtaatacaattgagtgttcaaattctattttatctaatctttaaa

SEQ ID NO: 208813 - DNA, 646 bp, Unknown
  Bacterial polypeptide expressing nucleotide sequence isolated from the Sargasso Sea
attgaaaaatggtgaaagaaaaggaattaatactcatacatatacaactagtgaaattacaagagtagctagagttgcttttgatttagctagaaaaagatctaacaaagttacatcatgtgaaaagtcaaatgtaatggaagctggacaattatggaaagaagaggttcaagagctacataataaagaatataaagatgtagaattaagccatatgttagcagataactgtgcaatgcaacttttaagaaacccaaaacaattcgatgtaattgtaaccgataatttatttggggatatgctgtctgatcaagcttcgatgttaactggatctttaggacttttaccgtcagcgtctttgggagcaaaaaataaagatggtgagatgagagcaatgtatgagccaatacatggatcagctcctgatatagctggacaaggtattgcaaatccgattgcttctattttaagttttgctatggctttaaggtactctttagatcttgataaagaagcggatgttttagaaaaggcagttcaagatgttctaaatgatggtttaagaacaaaagatataatgtcagatggtatgaaagaatcgtctacttcagcaatgggtgatgcgataatttcaaaattgcaataa

SEQ ID NO: 208814 - DNA, 478 bp, Unknown
  Bacterial polypeptide expressing nucleotide sequence isolated from the Sargasso Sea
aatgattaaagtaaaaaaaagaaaaatattattattacctggtgatggtatcggtccagaagttattgctgaagtaaaaaaaattataaactggtttaatgataaaaaatcattagattttgaattagatcaagagcttgtaggtggttgttcttatgacaaacatggtaccccaattactgatgaagtattttataaagctttagagagtgaggtaattatgttaggggctgtaggaggccctacatgggacggattagaattttcaaaaaaacctgaaagagcattattaaaacttagaaaggaattaaaattattcgcaaatttaagacctgcaatttgttttgaacaattggtaagtgcttcaacactcaaaccagaagtagtttcaggtttagatataatgatagtaagagagttaacgggtggcatatattttggtgaacctagaggaataaaaccaattgaaaaatggtga

SEQ ID NO: 208815 - DNA, 1099 bp, Unknown
  Bacterial polypeptide expressing nucleotide sequence isolated from the Sargasso Sea
gttaaaaaaagaaaatttttactattacctggtgacggaattggaccagaagttgttggagaagttaaaaaaattattcaatggtttaataaaaataaatctttagattttgaaattgatgaagatttagcaggtggagcttcgtacgataagcatggaactcctataactgatgaagttttctacaaagccttagagtgtgaggctataattcttggtgctgtaggaggccccaaatgggataatgtagagttttcaaaaaaacctgagagagctctattaaaattaagaaaagaattgaagctgtttgctaatttaagaccagcaatatgttttaaacaattagttgattcctcaacccttaaacctgaaattgtttctggattagatataatgattgtaagagaacttacaggtggaatttattttggtgagccaagaggaattaaaccaattgataatggagagagaaaaggaattaatacacatacttatacaacaagtgaaatcaaaagagttgcaagagttgcatttgacttagctaaaaaaagaaaaaataaagttacatcatgtgaaaaatcaaatgtaatggaagcaggtttgctctggagagaagaagttcaagaattacatgataaagaatttaaagatgtacagttaaatcatatgcttgcagataattgtgcaatgcaactactaagaaatccaaaacaatttgatgtgatagttactgataatttatttggagatatgctatctgatcaagcatctatgttaactggctctttagggttgttgccatctgcatctttgggagtaaaaaacaaagatgggaaaataagagcaatgtatgaaccgatacatggttcggcacctgatatagctggaaaaggaatagccaacccgattgccacgatattaagttttgcaatggctttaaaatattctcttgatctagataaagaggcagatgcattagaaaaagcggttcaaactgttctggatgaaaaacttagaaccaaagatattttgtctccagggatgaaggaagtttcaacttctgaaatgggtgatgcgataatttcaaaattgcaataac

SEQ ID NO: 208816 - DNA, 1066 bp, Unknown
  Bacterial polypeptide expressing nucleotide sequence isolated from the Sargasso Sea
aatgaaagaatataacattgcttcaatagctggtgacgggattggtaaagaggtgttacctgaaggcttaaaagttttaaaagatgttgctttaaaacatcaatttaaaataaattttacagaatatgattttgcttcctgtgattattacgagaaacatggaaaaatgcttcctgatgattggaaagaaaaattaggaaaacatgatgctatattttttggagcagtcggtatgccagatagagtaccagatcatgtttctttatggggatccttacttcagtttagaagagaatttgatcaatacataaatcttagacccgtaaaacttttccctggtattaatcctcctctagccaacaaaaaacctggtgatatcgatatgttgattgttagagagaatacagagggagaatattctactgtaggcggaagaatgtataaaaataccgatagagaaattgcaattcaagaaactatcatgtcagcacatggaatagacagagttcagaaatttgcttttgaattagctaaaaaacgaaaaagaaaaaaattaacaaatgcaacaaaatcaaacggaatttcaattactatgcctttttgggatgaacgatttaatgaaatgaaaaaaaactatcctgaaattgaaacagatcaatttcatattgatattttagtcgctagatttgtgctcaatcctgaatggtttgatgttgtagtagcatcaaatttatttggagatattctttcagacttagggcctgcttgcacaggaacaattggaattgctccctctggaaatattaatccagaaaataaatttccatctttgtttgaaccagttcacggttctgcccctgatattgcaggaaaaggaattgctaatcctgtaggacaaatttggtctggagcaatgatgctagattatttaggagaaaaagaagcatctaattcaatagttgaagcaattgaaaaatctttaagtgataaaagtaacagaactaaagatttaggtggtgatgctgatactattaaatcttctaattcgattttagctaatctttaa

SEQ ID NO: 208817 - DNA, 349 bp, Unknown
  Bacterial polypeptide expressing nucleotide sequence isolated from the Sargasso Sea
catgctttctgaccaagcctctatgctgactggttctctaggacttcttccttcagcgtccttaggggaaaaaaataaagatggtcaaatgagagctatgtatgaacctattcatggttctgctcctgatatagcaggaaaaggaatagcaaatcctatagcaacaatcttaagttttgctatggctttaagatattctcttgatttagataaggaagctaattctcttgaaaaagctgttcaagatgttttagatgaaggtctaagaacaaaagatattatttctaaaggcaaaaaagaagtatccacatctcaaatgggtgatgcgataatttcaaaattgcaataa

SEQ ID NO: 208818 - DNA, 904 bp, Unknown
  Bacterial polypeptide expressing nucleotide sequence isolated from the Sargasso Sea
gaaagtgaagtaattatgcttggagcagttggtggtcctacatgggataacctagaattttccaaaaaaccagaaagagcattattaaaactcagaaaagaattaaagctttttgctaacttaaggcctgcaatttgttttaaacaattagtcgatgcttcaaccctaaagccagaagtagtttcaggactagatataatgatagtaagagagttaacgggtggtatatattttggtgaacctagaggaattaagccaattgaaaatggagaaagaaaaggaattaatacacacacttatacgactagtgaaattactagagtagctaggatcgcttttgatttagctagaaaaagatcaaataaagttacttcttgtgaaaaatcaaatgtgatggaagcaggacaattgtggaaagaagaagttcaagaacttcatgaaaaagaatacaaagatgtagaattaagtcatatgttagcagacaattgtgctatgcagcttttaagaaacccaaaacaatttgatgtaattgtaacagataatttgtttggagatatgttgtcagaccaagcttcaatgttaacgggatctttaggtcttttaccttcagcatctttaggcgcaaaaaataaagatggtgagatgagagcaatgtacgagcctatacacgggtcagctccagatatagctggtaaagggatagcaaatccaattgcttctattttgagctttgctatggcactaagatattctttagatcttgataaagaagcagatattttagaaaaagcagttcaagatgttttaaatgatgggttaagaactaaagatataatgtcagagggtatgaaagagacttccacgtcagcaatgggtgatgcgataatttcaaaattgcaataaa

SEQ ID NO: 208819 - DNA, 382 bp, Unknown
  Bacterial polypeptide expressing nucleotide sequence isolated from the Sargasso Sea
aatgattaaaataaaaaaaagaaaatttctgttacttccaggtgacggtattggtcctgaagtaattactgaagttaagaaaattataaattggtttaacacaaataaatctttagattttgaaattgatgaagatttagctggtggggcatcatatgataaacacggcactccaattactgatgaggttttttacaaagcattagagtgtgaggcagttattttaggagctgtaggtggtcctaaatgggataatctagaattttcaaaaaaacctgaaagagctttattgaaattaagaaaggaacttaaactttttgcaaacttaagacctgcaatttgctttaaacaattagttgatgcttcttctctaaagccagaa

SEQ ID NO: 208820 - DNA, 412 bp, Unknown
  Bacterial polypeptide expressing nucleotide sequence isolated from the Sargasso Sea
aatgcaattacttagagatccaaaacaatttgatgtgattgtaactgacaatttattcggagatatgttatccgatcaagcatccatgctaacaggctcattaggccttttgccttccgcgtcattgggagctaaaaataaagatggagaaatgagagcaatgtatgaaccgatccatggatctgccccagatattgctggaaaaggtattgcgaaccccattgcaacaatattgagttttgctatggctttaaggtattctttagatttagataaagaggccgaagcactagaaaaagcagtacaagacgtgctaaatgatggattgagaacaaaagatattttatccaatggaatgaaggaagtttccacatcccaaatgggtgatgcgataatttcaaaattgcaataa

SEQ ID NO: 208821 - DNA, 1099 bp, Unknown
  Bacterial polypeptide expressing nucleotide sequence isolated from the Sargasso Sea
catggattttcgaatgaataaaaaaattcttattttgccgggtgatggcatcggtcctgaagtaacaagttctgcaatggagatattaagatttattaaagatctatactctcttgatcttgatattgaaattcatgatgttggcggagcagcctatgataagactggtcatcctcttcccgataagactttggagatagccagaaaatctgatgctattctcttcggagctgtaggtggtccagaatgggaggatttagattgggataaaagaccagagcaagcattgttaggattaagaaaagagctcggattatttgccaacctcaggcctgccttcctttttaatgagcttgcttcagcttcaccaataaaagaggaaattatcaatgatttagatatcttaatagtaagagagttaacaggcggtatttattttggagagccaagaggaattgatacttcttcaaacccaccacatgcttttaatactatgatttatgacgaaaaagagattgaaagaattggtcgagtagcatttgaatcagctcaaaaaagaaataaaaaactatgttcagtagaaaaagcaaatgttcttgaagtttcaaagttttggagagaaataattacaaacctatcaaaggagtatcctgatgttgaattgacacatcagcttgctgacaatactgcaatgcaattagtgcttgatcccaatcagtttgatgtaattgtttctagtaacctatttggtgatattttatctgatattgctgcaacactaactggctctataggtatgctaccttctgcatcactcaacagctcttctcaaggaatgtatgaaccgtgtcacggcagcgcacctgatatagctggcaagaacttagcaaatcctttagcaatgatcctctctctagcaatggcttttaggtactctcttgaaaatcatcaagtagcaaacataatcgaagaatctgtaaaagaatttatctcgagaggttttagaacaaaagatttaacagaagatacatcttttttagagactggtgaggttgcatctgaactaattccaataatcaaggaaaaatctgatgtctaa

SEQ ID NO: 208822 - DNA, 880 bp, Unknown
  Bacterial polypeptide expressing nucleotide sequence isolated from the Sargasso Sea
aatgagtaacaaaaaaattctcatactaccaggtgatggcataggtaatgaggttatgtcagaagttcttaaaattatagattggatggcaaaaactaaatctatgtcttttgatattactgagagactagttggtggcacagcatatgataaagaaggtgattctattagtgatggcacaatgcaattagccttagattcagatgctgtattatttggagccgttggcggctctaagtgggataacgttgagagagacaaaaggcctgaagcagctttattaagacttagaaaagatctagatttatttgcaaatctcagaccagcagttgttttagatgcacttgcagaagcatcctctttaaaattagatttagttaaaggtttagatattttaattgtgagagaattaacaagtggagtatattttggtcaaccaagaggaatttcaaaaattagcaatacagaaagtaaagccattgacactcaagtttatactacttctgagatagatagagtttcacgagttgcatttgatctagcaaaagttagaagaaataaggtctcatctgcagaaaaatcaaatgttatggaaacaggattattttggagaaaaacagttactgaacttcataaaaaagaatattcatcagtagatttagaacatatactagcagacaattgtgcaatgcaattagttcgttatccaaagcagtttgatgttatacttacagataatttatttggtgatcttttgagtgatactgctgctatgctaacaggatccttaggaatgctaccatcagcagctcttggacctgttaaagaaaatggaacaagagcagctatgtatgaacctgttcatggtagcgcaccagat

SEQ ID NO: 208823 - DNA, 1114 bp, Unknown
  Bacterial polypeptide expressing nucleotide sequence isolated from the Sargasso Sea
gttggcctcaaatagaaagttattagtgcttccaggtgacgggattggtcctgaggtagtttctcaagttttaagagttgtcgattggttggctgcaaaaagatctgtatcgtttgatcttcaagaaggcttagtaggaggcgccgcatatgacgcacacggcactcctttaactgatgagaccctcacggacgcattggccgccgatgcgattctttttgggtcggtaggtggccctcagtatgatgatttgccttttgaccttaagccggaacggggtttgctccgattgcgaaaggagatggatcttttcgctaatctccggccagcaatggtttttgatgcgatggtggattcatcgacactaaaaaaggaagttatcgaaggactggacattcttatcctccgggaattgacgggcggaatctacttcgcggagcccaggggaattgaagatctgcctggtggaataaggaaagggtatgacacaaatctgtacacgacgccggagatagaaaggataggacgagtagccatggaccttgcccgcaaaaggcgaaaaaaagttacatcagttgagaaggcaaacgttatgatgtccggtgttttgtggcgtgacgtaatgaataatttatttgaaaatgaagctgaaggtctggaaacagaacacatgtatgcggataactgcggcatgcaattggtaagaaacccaaaacaatttgacgtgattgtcacggataatctattcggcgacatgttatcggattgtgcggcgatgctgacaggttcgcttggtatgttgccatcggcttccctcggagcagttgatgagacgacacaaaaaagatatgcgctatatgagcccgttcacggatccgcccctgatattgcaggtaaggaaatggcaaaccccatagcagagttgcttagcttttcaatgtcgcttcgatattcgttcgatatgccagaagatgcagacttaatagagagggctattcaagctgttttggctgaaggaattagaactccagatattatgcaagacggaatgaagctagtttccactaacgttatgatggacaacattgttagtaaattagatcggtctgtctga

SEQ ID NO: 208824 - DNA, 1108 bp, Unknown
  Bacterial polypeptide expressing nucleotide sequence isolated from the Sargasso Sea
aatgattaaagttaaaaaaaggaaaatattacttttgcctggtgatggcattggaccagaagttataaatgaagttaaaaaagttattacatggtttaattcaaaaaaatctttagattttgaaattgatgaagatttagcaggaggagcttcttacgataaacatggaaccccaataacagatgaagtcttctataaagctctagagagcaaggttgttatgttaggtgctgtaggtggaccaaaatgggataatcttgaatttcaaaaaaagcctgaaagagcattattaaaattaagaaaagaattaaaattatttgcaaatttaaggccagcgatatgttttaagcaactcgtagatgcatcaacgcttaaacctgaaatagtctctggtttagatattatgattgtaagagaactcacaggtggaatatattttggggagcctagaggaattaaacccatagataatggcgaaagaaaaggtatcaacacccatacatatactagcagtgagattattagagtagcaaaagttgctttcgatttagcaaaaaaaagatcaaataaagttacatcatgtgaaaaatcaaatgtaatggaggcaggacaactttggaaagaggaagtgcagactttacacgatgcagaatataaagaagtagaattaaatcacatgcttgcagacaattgttcaatgcaattattaagaaatcctaagcaatttgacgtgatcgtaactgataatctatttggagatatgctttcagaccaagcatcaatgttaactggttcattaggacttttaccttcagcatctcttggtgaaaaaaataaagatggtgaaatgagagcgatgtatgaaccaatacatggttctgctccggatatagccggaaaaggattggcaaatcctattgctactattctgagttttgcaatggcattaagatactcattagatttagacaaagaggctgacactttagaaacggcagttcaagatgtgcttaatgatggattaagaacaaaagatataattgcaaaaggaaataaggaagtatcgacttctcaaatgggggatgcgattatttcaaaattgaaataa

SEQ ID NO: 208825 - DNA, 724 bp, Unknown
  Bacterial polypeptide expressing nucleotide sequence isolated from the Sargasso Sea
atgattttaaaaatagctgtattatctggagatggaattggacctgaggttactcagcaatcattaaaagtacttaaagctttaggtagaaaatttaatcataaaattgaattagagagtggattagttggagccgttgctattgataaatatggagatccttatccagatcaaactcatcaagtatgtctaaactcagatgcaattctttttggagcaattggggatccaaagtatgataatgacccaaaagctaaagtaagacctgagcaaggcttactgaaaatgcgaaaaaagcttggactttatgcaaacctgagacctacaaaggtattcaaatctctattagacatgtcaccaataaaagaagagagaatatctggaactgatatcctttttgttagagaattaaccggaggtatttattttggagaaagaggcagaaaggataatgataattttgcatttgatacatgtgaatatagtagagatgaaattattagaattgcaaagatagggtttgaatatgcacagaaaagaactaataaattatgttgtgttgataaagcaaatgttcttgaaacatcaagactatggagagaaacagttcaaagtatggaaaaagaatttccggacatagaggtatcatatgaatttgtagatgctgttgctatgagactagttcaatggccaaattcatatgatgttttgattacttcaaatc

SEQ ID NO: 208826 - DNA, 1105 bp, Unknown
  Bacterial polypeptide expressing nucleotide sequence isolated from the Sargasso Sea
atgcctacaaatcaaagaaaaatattactattaccaggtgacggtattggaccagaagtagttcgtgaaactaaaaaagtaattgattggtttaataaaaaaaaatctttggatttcaaaattgatcaagatctaataggtggagctgctattgatgaacatggtgtaccaataacagatgaagtattttataaagcattagagagtgatgcagtaatatttggagcttgcggtggtccaaaatatgacaaattagaattttcaaaaaagcctgagagagctttattaaaattaagaaaggaacttaaattattcgcaaatttgagaccagcaatttgttttaaacaattggtagatgcttcaagcttaaagccagaaattgtttcaggccttgacatacttattgtcagggagcttacaggtggaatttattttggagaaccaagaggagtcaaaccaattgaaaatggggaaagaagaggagttaatacccatgtctataccactaaagaaataaaaagaattgcaaaagtggcattcgaattggctgcgaaaagaaataacaaagttacctcttgtgaaaaatccaatgttatggaggctggagtactttggagagaagaagttcaaaatttaaaagataacgagtataaaaaaattgatcttaaccatatgttagctgataactgtgccatgcagctattaagaaatccaaaacagtttgacgttatacttgcagataatttgtttggagatatgttatctgacgaagcagctatgctaacaggatcgctaggcctcctaccttcggcatctttaggtgataaggataaaaatggacgaactagatctttatacgaaccagtgcatggctcagcccctgatattgagggaaaaaacatttctaatccaatcgcaacgatactaagtttttcaatggctttaaaatactcattaggattggaaaaagagtctgcacatctcgacaaagctgttgaaaagaccttggaagacggtttaagaactcctgatataatgtcaaaaggaaagaaaaaggtatcaacctctgatatgggtgatgcaattatatcaaatttaaattaaa

SEQ ID NO: 208827 - DNA, 1108 bp, Unknown
  Bacterial polypeptide expressing nucleotide sequence isolated from the Sargasso Sea
aatgactaataaaattctaattttacctggtgatggcattggccaagaggtaatgattgaggttgaaaagatcattggttggtttaattctaacaaagactttaatgctgaaatcgaatatggccttgttggcggagcatcatatgatgctgatggtgtagcaattagtgatgctacaatgcaacttgctcaaaaatctgatgctgttttatttggtgcagtcggtggaccaaaatgggatgatgttgcttatgaacatagacctgaagctggtttattgcgattaagaaaggatctcgatctttttgctaatttaagaccagcaatatgcttttcttcactttcagattcttcatcattaaaaaaagaaatcgttgaggatctcgatattctaattgttagagaacttacaggaggtgtttattttggagaacctcgtggcatagaggaattagagaatgggaatagaagaggtactaatactcaggtatatgaaacttgggaaattcaaaggattgctgaagtggcatttgagttggctagaaaaagaaaaaataaagtcacttcgtctgaaaaaagaaatgtcatggaatcaggattgctttggtatgaagaagtaaaaaaaattcatcaagaaaaatataatgatgttgaattagatcatatgcttgcagataattgtggaatgcaattagtaagatggccaaaacagtttgatgtgattgttacagataatctttttggtgacatgttatctgatgttgctgcaatgttaactggctctcttggtatgcttccgtcagcttcacttggtaaagctgttaatggattatttgaatcagctctatatgagcctgttcatggttctgcgccagatatctccggtcaaggaattgcaaatcctttagcatctatcttatccttctcaatggcgttaaagtatagttttggcaggaataaagattcgaaattacttgaggattctatatcaaaagttttagatgatggatcaagaacaaaagatatcactgatgatggagactttatttcaactagcgaaatgggtaataaagtaattgaaaatcttgaattacttaataaggaataa

SEQ ID NO: 208828 - DNA, 514 bp, Unknown
  Bacterial polypeptide expressing nucleotide sequence isolated from the Sargasso Sea
atgatcaaagttaaaaaaagaaaaatattattattaccaggtgatggtattggtccagaagttgttggggaggttgaaaaaattattaattggttcaattctaaaaaatcattagattttgaaattgataaagatttaattggaggttctgcttatgataaacatggatcaccaattactgatgaggcgttttataaagcattggaaagtgaagcggtaattttgggtgctgttggaggtccgaaatgggacaatcttgaattttcaaaaaaacctgaaagagcattattgaaattaagaaaagaattgaaattatttgcaaacctaagaccagcaatttgctttaaacaattagtggatgcttcgagtttaaaacctgaattagtatcagatttagatatattatttgttagagaattaacaggtggtatttattttggagagccaagaggaataaaacctattgataatggcgaaagaaaaggaataaacacacatttacaccacaaggaaa

SEQ ID NO: 208829 - DNA, 754 bp, Unknown
  Bacterial polypeptide expressing nucleotide sequence isolated from the Sargasso Sea
aatgattaaagtaagaaaaagaaaaatacttttattgccaggtgacggaataggtcctgaggttattaatgaagttaaaaaaatcattaattggtttaatgataaaaaatctttagattttgaaatagatgaggctcttgtcggcggttgttcgtatgataaacatggaacgccgattactgatgaggttttttataaagctcttgaaagtgaagtggtaatgctaggagctgttggaggccccaaatgggatgatattgaattttcaaaaaaacctgaaagagcactattaaagcttagaaaagaattaaaattattcgcaaatttaagaccagcaatatgttttgaacaattagttgatgcatcaactctcaaacctgaaattgtatcaggcttagatataatgatagttagagagctgacaggtggaatttattttggtgaaccaaggggaattaaaccaatagacaatggtgaaagaaaaggaataaacacacatacatatacgactagtgagattactagagtagctagaattgcttttgatttagcaaaaaaaagatctaataaagtaacctcatgtgaaaaatcaaatgtaatggaagcaggtcaactttggaaagaagaagtccaagaacttcacgataaagaatataaagatgtagagctaagtcatatgcttgcagataattgcgcaatgcagcttttaagaaatccaaaacaatttgatgttattgtaactgataatttggtt

SEQ ID NO: 208830 - DNA, 1078 bp, Unknown
  Bacterial polypeptide expressing nucleotide sequence isolated from the Sargasso Sea
attgttaccaggtgatggaataggtcctgaagttattgcagaggttaaaaaagtaatcaattggtttaatgataaaaaatctttagattttgaaattgatgaggatttagttggaggaatttcttttgataagcatggaacacctcttactgatgaagttttttataaagcattagagagcgctgtaataatgttaggtgcagttggtggaccaaaatgggatggtgtagaattttcaaaaaaacctgagagagcccttttaaaacttagaaaagaactaaaactttttgctaatttaaggccagcaatatgctttgaacaattagtaaatgcttcaactttaaaaccagaaattgtatcaggtttagatattttaatagttagagaattaactggtggagtatattttggtgaaccaagaggaattaaaccaatagaaaatggagaaagaaaaggagtaaacactcatacttatactagtagtgaaattattagagtagctagagttgcttttgacttagctaaaaaaagatcaaatagagtcatatcttgtgaaaaatctaatgtaatggaagcgggtcaactttggaaagaagaagtgcaatcattacatgataaagattataaggatgttgagttaagtcatatgttggctgataattgtgcgatgcaattagtaagaaacccaaaacaatttgatgtaatcttaactgataatttatttggtgacatgttatcagatgaggcttctatgttaacaggttctcttggattactaccttctgcatcattaggtgcaaaaaataaggatggcgaaatgagagctatgtatgaacctattcatggttcagctccagacattgctggaaaaggagttgctaatcctatcgcctcaattttgagttttgctatggcactaagatattctttagatttagataaagaggcagaggccttagaaaaggctgtacaagaggctcttaatgatggattaagaacaaaagatataatgtctgataaaatgaaagaggtttctacttctcaaatgggtgatgcgatcatttcaaaattgcaataa

SEQ ID NO: 208831 - DNA, 934 bp, Unknown
  Bacterial polypeptide expressing nucleotide sequence isolated from the Sargasso Sea
aatggcaatatctaacactagaaaattactattattacctggagatggcattggacccgaggtagtaagagaagtaaagaaaataattgaatggttaaataagaataaatctttagactttaaaattgaagaagaactaatcgggggtgcatcgatagatgcacacaaaattccaattacagatgaagttttttataaatctttagagtgtgatgcagttatactaggagcatgtggaggaccaaagtgggataaattagaattctcaaaaaaacctgagagagctcttttaaaattgaggaaagagttaaaactatttgcaaatttaagaccagcaatttgctttgaacaactggttgactcttctactctaaaacctgaaatagtttcaggattagatattatgattgtaagagaacttacaggcggcatatattttggtgaaccacgtggtatagagccaattaagaacaatgagcgcaaaggaattaatacacatacgtatactaccactgaaatcaaaagaatagcaaaagtggcgtttgatcttgccaagaaaagaaaaaacaaagtaacttcatgtgaaaaatcaaatgtaatggaagctggggtgttatggcgagaagaagttcaagatttgaaagataaagaatataaaaacgttgaattagagcacatgttagcggataactgtgcaatgcagttattgagaaatccaaaacaatttgatgtaattttagccgataatttatttggagatatgctatcagatgaggcagctatgttaactggttctttaggtcttcttccatctgcctccttaggctccaaagataaaaatggaaagcttagatcactttacgagcctgttcatggatcggcaccagatatagctggaaaaaatattgctaatccgattgcaacaattcttagt

SEQ ID NO: 208832 - DNA, 961 bp, Unknown
  Bacterial polypeptide expressing nucleotide sequence isolated from the Sargasso Sea
attcttgatgttggaggaactgcctatgaaaaatttggttctccaattcccgaagatgttttagtatctgcaaaagaggcagatgcaattctttttggtgccgtaggagcaccgcaatgggataatttgagctgggaagatcgaccagaaaatgcattattgactttgagaaaagaattaaacctgtttgcaaatttgagacctgcgtttttatttgaagaactatcaaatgcatctcctttaaaagaaaaaattattcaaggattagatatcttaattgtaagagaacttactggaggaatatattttggtgaacctcgcggcgttgtaaaagataaaaatccaaactatgcattcaatacaatggtttataacgaagatgagatcagaagaattgcaaaaattgcatttgaatcagctcaaaaaagaaagggtagattatgttctgtagaaaaggcaaatgtattagaggtatcaaagttttggagatcaattgttacagagatgtcagaggattatcctgatgttgaattgtctcatcaacttgcagataacgcagccatgcaattagttttagatcctaatcaatttgatgtgatagttgcaagcaatttatttggagatattttatctgatattgcagccacattaaccggatctataggcatgcttccttcagcttcattagatagctcctttaaagggatgtacgaaccatgtcatggcagtgctcctgacattgctcaacaagatattgcaaatccgttagccatgattggttctttatcgatggcactaaaatattctttaggagaagaaatggtagcaagcaaaattgatctagctatcaaaaatttaattaagcaaggctttagaactaaggatatttcaaatggtgaaaattatttaaagacttcagaggttgctcagaagattatcgagaatattgaaaatgaatagt

SEQ ID NO: 208833 - DNA, 772 bp, Unknown
  Bacterial polypeptide expressing nucleotide sequence isolated from the Sargasso Sea
atatgttttgaacaattagttggcgcatcaactcttaaaccagaagtggtttcggggttagatataatgattgtaagagaattaacaggtggaatttattttggtgaaccgagaggtattaaaccaatagaaaacggtgaaagaaaaggaataaatactcatacctacactactagtgaaattactagagttgtacgtgttgcttttgatcttgctagaaaaagatctaacaaagttacatcatgtgagaaatctaatgtaatggaagctggacaactatggaaagaagaagttcaagaactccacgaaaaggaatataaagatgttgagctaagtcacatgcttgctgataattgtgcaatgcaattgcttagaaatccaaaacaatttgatgtaattgttactgataatttatttggtgatatgctctcagatcaagcttcaatgctaacaggatctttagggttgttgccttcagcatccttaggtgcaaaaaataaagatggagaaatgagagcaatgtatgaaccaatacatggttcagcacctgatattgcaggaaaaggtctagcaaatccaattgcaactgtattgagttttgcaatggcattaagatactctttagatcttgataatgaagctgacgccttagaaaaatcagttcaagcagtattaaatgatggtttaagaacaaaagacattctttctaaaggcatgaaagaagtgtccacatcagaaatgggcgatgcgataatttcaaaattgcaataaa

SEQ ID NO: 208834 - DNA, 1111 bp, Unknown
  Bacterial polypeptide expressing nucleotide sequence isolated from the Sargasso Sea
aatgattaaagtcaaaaaaagaaaatttttattattaccaggtgacggtattggtcccgaggttattggtgaagttaaaaaaattataacttggtttaatgtaaataaatctcttgattttgatatggaagaggctttagttggtggagcatcttatgacaagcatggaacaccgattacagatgaagtattttataaatctttagaatgtgaagcagttattttgggagctgtcggtggaccaaaatatgataatttagatttttccaaaagacctgagagagctcttcttaagctaagaaaagaattaaaattatttgcaaatttgaggcctgcaatttgttttaaacaattagttgaggcatctactctaaaacctgaaattgtatcaggtctagacatcatgattgttagagaattgacaggtggtatttattttggtgaaccaagaggtatcaagccaattgataatggcgaacgtaaaggaataaatactcatacttatacctcatcagaaattaaacgagttgccagagttgcatttgatttagcaaagaagagaaacaataaagttacttcctgtgaaaaatcgaatgttatggaagcaggtcaattatggaaagaggaagttcaaaatcttcacgataaagaatttaaagatgttgagttaaatcatatgcttgcagataattgtgcaatgcaacttttgagaaatccaaagcaatttgatgtaattgtgacagataatttgtttggtgatatgttgtcagatgaagcgtctatgcttacgggatctttaggtttattaccttcggcttctttgggtgcaaaaaataaagatggcgaaatgagagcaatgtatgaacctgttcatggatctgctccagatattgctggaaaagggattgcaaatcctattgcaactatcttgagttttgcaatggccttgaggtactctcttgatttagataaagaagctgatgatcttgaaaaagcagtgcaaaatgtactagatgatgggctaagaactaaagatattgtgtcaaaaggaacaaaagaaatttcaacttctggtatgggagatgcgattattgcatatttgcaaaattaa

SEQ ID NO: 208835 - DNA, 958 bp, Unknown
  Bacterial polypeptide expressing nucleotide sequence isolated from the Sargasso Sea
aagagggcattagttggtggttctgcctacgatcagactgaaaagccattacctaaagagactttgaatgtagcccataaatcggatgcaattttattaggagctgttggaggccctaaatgggatgagttagattatcaatttagacctgaaagagccttgttaggattaagatctgaattggatctgttcgctaactttagacctgcgatcctttcagagtatctaacttcttcatcaagcctgaaatcagaaaaggttgagaatcttgatttattgataataagagaattaacgggcggtatttacttcggagaacctaggggaagaaaagaagataaacttgaagcttataataccatgatttataacaatgaagagatagagagaattggaagggtagctttcgaagcagcccagaaaagaaacaaaaatctatgttcagttgataaggcaaatgtattagaggtaagtgttttatggagagaagtaattacagacctttctcgagactatccagatgtaaatcttacacatatgttagttgataatgcagctatgcaattggtaagagagcctaaacagtttgatgtcatagtaacaggtaatctatttggagatattctatcggacatagctgctatgatgacaggatcaataggaatgttgccttctgcttccataaattctgacaataagggcatgtatgaacctgttcatggttcagcacccgatattgcagggcagggtttggctaatccacttgctacaatttcttcagttgccatgatgcttagatatagttttgggttagagcaagcagctagaaatatagagatggcaatagataaagttcttaaggaaggttacaggacacatgatcttgaaggtccagaagatatgaaattaaatacagatcaaataagtcaaaagatattagacaatttaaaaagttgag

SEQ ID NO: 208836 - DNA, 1048 bp, Unknown
  Bacterial polypeptide expressing nucleotide sequence isolated from the Sargasso Sea
atgaaacttaatataatagcttttgatggtgatggtataggaccagaaattgtaagttctactttaaatataattaacttattaaattctaaattaaagctagacatagaaatacagagagagatcttaggttttaatttactaaaaaaaaatggggttactttcacagatgatttgttattaaaatctaaggaagctgatggtataattttaggtcctgttgatcataatgcttatccttcagtttctaatggtggaataaatccatcagctaaacttcgtattgaactagatttatactctaatattagacctgctaaaaattatgttaacgtaaaatcattatcacaaaatatggacttagtgattgttcgtgaaaacactgaaggtttttatgcagataggaacatgtatgacggtagtggagagtttagtcctatacctggtgttggattatcattgcgaaagattacaaaagaagcctctttaaaaattgcaaaatcagcatttgaaatagccaaatctagatctgtcaataaatcaacaaaatctaaaatccatgtagttcacaaagcaaatgtaatgaaaattactgacggtattttccttgatgcatgtagactcgtatcatcaaagtataatgatgttgattatgaagagatgctagtagacgcatgcgccgcacatcttgttaggaaacctgatcagtttgatgttattgtaactacaaacatgtttggtgatattttatctgacttagcaactgaattatctgggtctttaggtcttgctggatcattaaatgctggtaacaatcatgcaatggctcaagcacaacacggagctgctccagatattgctgacaaaaatattgcaaatccaatatcattaattttatcttcggctatgttattagattggcttggaaaaaatagggaaatagacaaattaattttagcttccaatttaatcaacgactcagtgttagaattacttaaagacagagaaaactttactagggatcttggtgggaatgcttcccactagt

SEQ ID NO: 208837 - DNA, 1084 bp, Unknown
  Bacterial polypeptide expressing nucleotide sequence isolated from the Sargasso Sea
atgacaaaaaatatattaattcttccaggagacggcattgggcaagaagttacctctgcaatgagagaagtgctttcttatcttattgatgaacaaggcttagatttaaatatatctgaaagagatgtaggtggctcatcttatgatcagtttggggtccctttaacagaagaaacattagaaattgcaaaaaaatccgatgcaattttatttggagccgtaggaggaccacaatgggacgacctagactgggatcatcgaccagaacaagctttattagcgcttagaaaatctcttgggttatttgctaacttaagacctgcttttctgtttaacgagcttgcatctgcctctcctttaaaaaataacattattgaaaatttagatattcttatagtcagagagcttactggaggtatttattttggtgagcctcgtggaattgttgaaaatgaatctcctaaatatagctttaatacgatgatatataacgaagatgaaataagaagaatagctaaggtggcttttgaagccgctatgaacagaaataaaaagctatgctcagttgaaaaggctaacgttttagaggtttcaaaattttggagaagtatcgtaactgaaatgagttcagaatacccagaggtcgaactatctcatcagcttgccgataatactgctatgcaactagttcttaatcccaatcaatatgatgtaattgtttcaagcaatctttttggagacatactctcagatattgccgcaactttgagtggctctatcggaatgcttccctcagcatctttaaatagttcttctcaagggatgtatgaaccttgtcatggaagtgctccagatatagcaggtcaaggcattgcaaatccaattgctatgatagcttctctggcaatggcctttgaatattctcttgatagaattgatcttgcaaggagaattgaagcagcaattaaaacatttatcagcaaagggtttagaacaaaagatattgcttcttcagaagaattcataaaaactcaggaagttgccccgataattatcagcattctaaaggatgggcatgaataag

SEQ ID NO: 208838 - DNA, 1057 bp, Unknown
  Bacterial polypeptide expressing nucleotide sequence isolated from the Sargasso Sea
aatgaaagcagaaatcaccgtattggccggagatggtatcggacctgagatcacagagcatgcattaaatattctcaatgcaatcgaaaagaaatatggacatgaattcacattgcatgatgcactgtttggcggaattgcaattgatgaaacaggcgatccatatccactagaaacaagagaactttgtaaaaaatctgatgcagtccttttgggcgcagtcggcggtccgaaatggagtgatcccaaagcaaaaacaagacctgaaaagggactacttgatatgcgatcagacctaggcgtctatgctaacttaaggcaaataaaaacttaccctcaactcatcgataattcaccgatagaaaatgccaaactaaaagacattgatattttatttgtaagagaattaataggtggtatttatttcggtgaaaaagagaaaactgacgactacgctaaagatgtgtgtgaatattcagcatctgaaatagagcgaatcgtaaaagtcgcagcagatttgtcaatgaaaagaaaaaacaagcttacatctgttgataaggccaacgtaatggctacatctcaactctggagatctgtaacaatcgctatgattgaaaaagaatatcctgagatagaaattgaacaccttcttgttgatgctgctactatgcacctcctctcacgtccagctgattttgatgtgattgttgctgagaatttatttggcgatattctgacggatgaagcatctatgctgactggatctattggtatgattccatctgcatcgctcggagataataactttggtgtatatgaacctattcatggctcagcgcctgatatccaaggtaaaggactcgcaaatcctagtggcatgattctttcagtggcgatgatgttaaaacattcactcaatctgattgaagaatcaaatgatatcgagaatgccgttgaagaggttctcagtgacgggatatttacagctgatttgtcatctgaagatcatgtttcaacagatgagatgggtaatgccattctctcaaaaatagtttaa

SEQ ID NO: 208839 - DNA, 1108 bp, Unknown
  Bacterial polypeptide expressing nucleotide sequence isolated from the Sargasso Sea
gatgacgaataaaattttaattttacctggggacggtattggccaagaggtaatggttgaagttgagaagattatcaattggtttaactcaaataataattttaatgcagagattgaatatggtcttgttgggggagcgtcttatgatgcagatggcgtagcaattagtgatgctacgatggatctcgctaaaaaatctgatgcagttctatttggtgcagtaggcggaccaaaatgggatgatgttgcttacgaacatagacctgaggctggtttattgcgcctcaggaaggacttagatctttttgctaatttaagaccagcaatatgtttttcttcactttccgattcctcgtctcttaaaaaagaaattgtccaagatcttgatatcttgatagtgagagagcttacgggaggggtatattttggtgaacctcgtggaattgagagcctagagaatggaaatagaagaggcattaatacccaagtctatgaaacttgggagattcagaggattgccgaggtcgcatttgagcttgctagaaaaagaaataataaagtcacatcatcggaaaaaagaaatgtcatggagtctggattgctatggtatgaggaagtaaaaaaaattcatgaagaaaaattccaagatgttgagttagaccatatgcttgctgataattgtgggatgcaacttgttaggtggcccaaacaatttgatgtaattgtcaccgacaatctttttggtgacatgctttcagatgtagctgccatgttaactggatcattgggaatgcttccatccgcttcattgggtaagtccgttgatggattatttaaatctgctctctatgaacctgttcatggttctgctccagatatttcagggcaaggaattgcaaatcccttagcatcaatattatctttttctatggctttgaagtatagttttggaagaaatgaagactctaaattgctagaggattctatttctaaagtcttagatgatgggtcaagaacaaaagatattgctgatcaagaaaactttatttcaaccaatgaaatgggtgataaggtgattgaaaatcttgaattattgagtaaggaataa

SEQ ID NO: 208840 - DNA, 732 bp, Unknown
  Bacterial polypeptide expressing nucleotide sequence isolated from the Sargasso Sea
aatgattaaagtaaaagatagaaaacttttacttttaccgggagatggaattggacctgaggtagtaagagaagcaagaaaaataatagaatggttcaataaaaataaatctttagattttaaaatcgaggaaggtttagtaggaggcgcctcgtatgataaacataaaaacccaatcactgatgaagtattctataaagcattagaaagcgaagctgttattcttggagcagttgggggaccaaaatatgaaaatcttgaattttcaaaacgtccagaaagagccctactaaaactaagaaaagaattgaagctttttgctaatttacgtccagctatttgttttaaacaattagtcgaagcttcctcattaaaacctgaaataatttcagggttagatataatgattgttcgtgagctgacaggtggaatttattttggtgagccacgtggtattgaaccaatagaaaataatgagagaaaaggaattaatacacacacttacacaacaagcgaaattcaacgtgttgctagagtagcttttgatttagcaaaaaaaagaaaaaataaagttacgtcttgtgaaaaatccaatgtaatggaggcaggaatattgtggagagaagaagttcaatctttaaaagataaagagtataaaaaaatagaacttcaacatatgcttgcagataattgtgcaatgcaattacttagaaatccaaaacaattcgatgt

SEQ ID NO: 208841 - DNA, 1108 bp, Unknown
  Bacterial polypeptide expressing nucleotide sequence isolated from the Sargasso Sea
aatgattaaagtaaaagatagaaaacttttacttcttccgggtgatggtattggcccagaggtgataagagaagtaagaaaaattattgagtggtttaataaaaataaatcattagactttaaaatcgaggaaggccttattggtggagcctcatacgataaacataaaaatccgattacagatgaggttttttataaggcacttgagagtgaagcagtaattttaggtgctgttggaggacccaagtacgataatttggaattctctaagagaccagaaagggcattattaaaattaagaaaagaattgaagttatttgctaatttacgaccagcaatatgttttaaacaattagtagaagcatcttcgctaaaacctgaaattatatccggtctagatataatgattgtaagagaacttactggtgggatttactttggtgaacctaggggcattgaaccaattgaaaataatgaaagaaaaggaattaatactcatatttataccacaaatgaaattcagcgagtagctagagtagctttcgatttagcaaagaaaagaaaaaataaagtaacttcttgtgaaaagtctaatgtaatggaggcaggtattttatggagggaagaagttcaggcacttaaagataaagaatacaaaaaaattgaattaagccatatgctagcagacaattgtgcaatgcagttattgagagacccaaagcaatttgatgtaattgttactgataacctatttggtgatattctttcagatgaagctgcgatgttaactggttccttgggtttactaccatcagcctccttaggagctagggataaaaaaggaaaaataagatcaatgtatgaacctgttcatgggtctgcaccagatattgctgggaaaaatattgctaaccctattgctacaattttaagcttatctatggctttaaaatattctctcgacttagataaagaggcagaacaattagataaagctgttcaaagtgttcttgatgacgggttaagaaccaaagatataatgtcaaaaaatatgaaagaggtcactacttctgtcatgggtgatgcaattatagcaaaattaaaataa

SEQ ID NO: 208842 - DNA, 766 bp, Unknown
  Bacterial polypeptide expressing nucleotide sequence isolated from the Sargasso Sea
caatttataaatctaagaccagtaaaattatttgaaggtgtaaatgccccactagctaacaagaaacccggcgatattgatatgatgatagttcgagaaaatacagagggagagtattcttcagttggtggaaagatgtatcaaaacactgaaagagaaattataattcaagaaactattatgtcaaaacatgggatagacagagtacaaaagtttgcatttgaattagcaaaaaaacgtaaaagaaaaaaattaactaatgctactaaatctaatggtatatcaattactatgccttactgggatgaaagatttaatgaaaacaagaaaagctatcctgaaattaaaactgatcaatttcatattgatatattaactgcaagatttgttttaactcctgaatggtttgatgttgtcgtggcttcaaacttgtttggtgatattttatcagatctaggtccagcatgtactggaactataggcattgcaccttctgggaatattaaccctacaaacaaatatccatcattatttgaaccggtacatggttcagccccagatatagcaggaaaaggtattgctaatcccgtaggacaaatatggtctggtgccatgatgttagattacttgggagaaaaagaggctgcatcaagaatagtaaaatcaatcgaaaagactttattagagaagaataatagaacaaaagatttagatggtgatagcaataccacagaatgtgctagtaaagttctaagcaacttgtaga

SEQ ID NO: 208843 - DNA, 1108 bp, Unknown
  Bacterial polypeptide expressing nucleotide sequence isolated from the Sargasso Sea
aatgattaaagtaaaaaaaagaaaaatacttttacttcctggtgatggtattggtccggaggtaataactgaggtaaaaaaaatcattaactggtttaatgataaaaaatctttagattttgaaattgatcaggagctagttggtggttgttcttatgataaacatggcaccccaatcactgatgaggttttttataaagcactagaaagtgaagtaattatgcttggagcagttggtggtcctacatgggataacctagaattttccaaaaaaccagaaagagcattattaaaacttaggaaagaattaaagctttttgcaaacttaaggcctgcaatttgttttaaacaattagttgatgcttcaacccttaagccagaggtagtttcaggactagatataatgatagtaagagagttaacgggtggaatatattttggtgaacctagaggaataaagccaattgaaaatggtgaaagaaaaggaattaatactcatacatatacaactagtgaaattacaagagtagctagagttgcttttgatttagcaagaaaaagatcaaacaaagttacatcatgtgaaaagtcaaatgtaatggaagccggacaattgtggaaagaagaagttaaagaacttcatgagaaagaatacaaagatgttgagttaagccatatgttagcagacaactgcgctatgcaacttttaagaaacccaaagcaatttgatgtaattgtaaccgataatttatttggggatatgctgtctgatcaagcttcgatgttaactggatctttaggtcttttgccgtcagcgtctttgggtgcaaaaaataaagatggtgagatgagagcaatgtatgagccaatacatggatcggctcctgatatagctggacaaggtattgcaaatccaatagcttctattttaagttttgctatggctttaaggtactctttagatcttgataaagaagcagatgttttagaaaaggcagttcaagatgttctaaatgatggattaagaacaaaagacataatgtcagaaggcatgaaagaaacgtctacttcagcaatgggtgatgcgataatttcaaaattgcaataa

SEQ ID NO: 208844 - DNA, 382 bp, Unknown
  Bacterial polypeptide expressing nucleotide sequence isolated from the Sargasso Sea
gataatctttttggagatttgcttagtgatactgctgctatgttaacaggctcgcttggcatgcttccttcagcatcacttgggccagtaaaagaaaatggtactagagcagctatgtatgaaccagttcatggaagcgctccagatattgctggacaatcaaaagctaacccacttgcgatgattatgagttttgcaatgatgctcaaatatagttttgatatggaagaggatagcaaactaattgaaaaggctgttcaaaatgttttgttaaaaggtttaagaactgctgacattaaggatggagcagataaaattatttctactaaagaaatgggtgttgctgttatagaagagttgaaagttttatctggaaattaaa

SEQ ID NO: 208845 - DNA, 1009 bp, Unknown
  Bacterial polypeptide expressing nucleotide sequence isolated from the Sargasso Sea
taaaaataaatcattagattttgaaattgatgaagatttagcaggtggagtttcatatgataaacatggcacccctattactgatgaagttttttacaaagctttagagtgtgaagctataattcttggagcagtaggaggtcctaaatgggacgatgtggaattttcaaaaaaacctgagagagctttgttaaaattaagaaaagaacttaaactgtttgctaatttaaggccagcaatatgctttaaacaactagttgatgcttcaactcttaagccagaaattatttcagggttagatattatgatagttcgagagcttacaggtggaatttattttggggaaccaagagggattaaaccaattgataatggtgagcgaaaaggaattaatactcatagttatacaacaagtgaaatccagagagttgcacgggttgcatttgatttagctaaaaaaagaaaaaataaagttacatcttgtgaaaaatcaaatgtaatggaagcaggcttattatggaaagaagaagttcaggagttacacgataaggaattcaaagatgtagaattaaatcacatgctagctgacaattgtgcaatgcaactacttagatatccaaaacaatttgatgttatagttactgataatttatttggagatatgctatctgatcaggcatctatgttaactggctctctaggattattaccttccgcatctttaggtgcaaaaaataaagaaggtaaagcgagagcaatgtatgaacctatacatggttcagcacccgacatagctggaaaaggaatagcaaacccaattgcaacaatactaagttttgcaatggctttaagatattctcttgatttagataaagaagctgacgctttagaaaaagcagttcaatctgttttagatgaaggacttagaactaaagatattctatctaaaggaacaaaagaagtatcaacctctaaaatgggggatgcgataatttcaaaattgcaataa

SEQ ID NO: 208846 - DNA, 325 bp, Unknown
  Bacterial polypeptide expressing nucleotide sequence isolated from the Sargasso Sea
atgattaaaattaaaaaaagaaaaattttattgttaccaggagatggtatcggaccagaagtaattgctgaagtcaaaaaaataattgaatggtttaactcaaataaatccttggattttgaaattgaccaagatttggttggtggtgctgcttatgacaaacatggaactccaataactgatgaagcattttataaggcacaagaaagtgctgcagtaatactaggtgctgttggtggaccaaaatgggacaatattgatttttcaaaaaaaccagaaagagctctattaaaattaagaaaagaattaaaattattgcaaattg

SEQ ID NO: 208847 - DNA, 435 bp, Unknown
  Bacterial polypeptide expressing nucleotide sequence isolated from the Sargasso Sea
aatgaataaaaaaattcttattttgccaggtgacggcatcggccctgaagtaacaagttccgcaatggagatattaaaatttattaaagatctatactctcttgatcttgatattgaaactcatgatgttggtggagcagcttatgataagactggttatcctcttcctgaaaagactttggagatagctagaaaatctgatgctattctctttggagctgtcggtggtccagaatgggaggatttagattgggataaaagaccagagcaagcattgttaggattgaggaaagagcttggattatttgctaaccttagacctgccttcctttttaatgagcttgcttctgcctcaccaataaaagaggaaattatcaatgatttagatatcttaatagtaagagagttaacaggcggtatttattttggtgagcc

SEQ ID NO: 208848 - DNA, 655 bp, Unknown
  Bacterial polypeptide expressing nucleotide sequence isolated from the Sargasso Sea
atgacagctaatcaaaaaaaaatattacttctaccaggcgatggtattggccccgaggttgttggagaaacaaaaaaagtaattgattggtttaacaaaaaaaaatctttagattttaaaatagaccaagatcttattggaggcgcagcaatagacaaacatggagtgcctataactgatgaagtattttatagagctttagaaagcgatgcagtaattgttggtgcttgtggcggaccacaatatgacaaattagagttctcaaaaaaacccgaaagagctcttttgaaattgagaaaagagttaaaattatttgcaaatttgagaccagcaatttgttttaaacaacttgtagattcatctactttaaaatcagaaatagtttcaggtcttgacattttaattgtgagggaattaacaggtggaatttattttggtgaaccaagaggaataaagcctatagaaaacggtgaaagaagaggtgtaaatacgcacgtttacactacaaaagaaattaaaagaattgcaaaagtagcttttgaattagcttcgaaacgaaataataaagtaacatcgtgtgaaaaatcaaatgttatggaggctggtgttttgtggagagaagaagttcagtcgcttaaggataaagattataaaa

SEQ ID NO: 208849 - DNA, 1108 bp, Unknown
  Bacterial polypeptide expressing nucleotide sequence isolated from the Sargasso Sea
aatgattaaaattaaaaaaagaaaaattttattattaccaggggatggtattggacctgaggtaattgctgaagttaaaaaaataattgaatggtttaactcaaataaatccttggattttgaaattgaccaagatttggttggaggtgctgcttatgataaacatggaatcccaataactgatgaagctttttacaaggctcaagaaagcgctgcagtaatattaggtgctgttggcggaccaaaatgggataatattgatttttcaaaaaaaccagagagagctctattaaaattaagaaaagaattaaaattatttgcaaatttgagacctgcaatttgtttcaaacaacttgttgatgcctcaagtttaaagcctgaatttgtttctaatttagatattctttttgtcagggaattaacgggtgggatttactttggtgaacctagagggattaaaccaattgataatggcgaaagaaaaggaattaacactcatgtctatactactagcgaaattgagagagtagcccgtgttgcatttgatctagccagaaaaaggaataataaagtcacttcctgtgaaaagtcgaatgtcatggaggcaggtcaattatggaaagaagaagttcaagcaattcatgaaaaagaatatagtgatgtagaattaaaacatatgctagcagataactgtgcaatgcagttagttagaaatcccaaacaatttgatgtgatagtaacagataatctttttggtgacatgttatcagatgaagctgcaatgttgactggttctctagggcttttgccgtctgcgtctcttggagccaaagataaaaatggtaatatgagatctttatatgagccagttcatggatcagcacccgatatagcaggtcaaggtattgctaatccaatagcaacaatactgagttttgcaatggctttaagatattctttagacctagataaagaggcagatagtttagaaaaagctgttcaaggtgtgcttgatcagggccttagaactaaggatataatatcaaaaggaatgaaagaagtatcaacatcagtgatgggagatgcgataatttcaaaattgcaataa

SEQ ID NO: 208850 - DNA, 448 bp, Unknown
  Bacterial polypeptide expressing nucleotide sequence isolated from the Sargasso Sea
atgagtaaaaaagtattaatacttccaggtgatggtatcggacaggaagtaacttcctcagccatacaaattctggaattcattgtagataaatttaatcttgatttttctacaaaaattcttgatgttggaggaactgcctatgaaaaatttggttctccaattcccgaagatgttttagtatctgcaaaagaggcagatgcaattctttttggtgctgtaggagcaccacaatgggataatttgagctgggaagatcggccagaaaatgcattattaactttgagaaaagaactaaacctgtttgcaaatttgagacctgcgtttttatttgaagaattatcgaatgcatctcctttaaaagaaaaaattattcaaggattagatatcttaattgtaagagaacttactggaggaatatattttggtgaacctcgcggtgttgtaa

SEQ ID NO: 208851 - DNA, 1048 bp, Unknown
  Bacterial polypeptide expressing nucleotide sequence isolated from the Sargasso Sea
aatgattaaagtaaaaaaaagaaaaatacttttgttacctggtgatggtatcggacctgaagttattggtgaagttaaaaaaattattaattggtttaacgataaaaagtcattagattttgaaatagatcaagatcttgcaggcgggtgttcgtacgataaacatggaacaccaattaccgatgaagtattttataaggctttggaaagtgaagttgttatgttgggtgctgttggaggacctaaatgggatgatgtagaattttctaaaaaacctgaaagagcattattgaagcttagaaaagaattaaaattatttgcaaacttaagacctgcaatttgttttgaacaattagtaggtgcatctacccttaagcctgaaattgtgtcaggattagatataatgatagttagagaattaacaggtggaatttatttcggagaacctcgaggaattaaacccatagataatggagaacgaaaaggaattaatactcatacttataccagcagtgagatagtaagggttgcaagggttgcgtttgatttggctaaaaagagatcgaataaagttacatcttgtgaaaaatcaaatgtgatggaagctggacaactttggaaagaagaggtccaagagcttcatgataaagaatataaagacgtagaattaagtcatatgcttgccgataactgtgcaatgcagcttttaagaaatccaaaacagtttgatgtaattgtaactgataatttatttggagatatgctttcagatcaagcttcaatgttaactggatctttagggctccttccttcagcatccctaggggcaaaaaataaagatggagaaatgagatctatgtatgagcccatccatggctcagcacctgatattgctggaaaaggaattgccaatccaatagcatcaatattaagttttgcaatggcacttagatattcattagacttagacaaagaggctgatgctctagaaaaagctgtacaagaagttttaaatgatggcttaagaaccaaagatatttctatctga

SEQ ID NO: 208852 - DNA, 625 bp, Unknown
  Bacterial polypeptide expressing nucleotide sequence isolated from the Sargasso Sea
agttatacaacttcagaaattgaacgcatatctcgtgttgcttttgatttagctaaattaagaaacaacaaagtaacatcagtagaaaaatctaatgttatggaaactggaatgttttggaaaaaaattgtcactaaaattcatacagatgagtacacttctgttgaattaaatcatatgcttgctgataattgtgctatgcaacttgtaagatatccgaaacaatttgatgttattttaactgataatttatttggagatttattaagtgatatctctgctatgcttacaggctctttaggaatgttaccttcggcttctttaggaccagcatcttctagtggtacaagatctgctatgtatgaaccagttcatggtagtgcacctgatatagctggtgaaggaaaggccaatcctttagcaatgattatgagttttgcaatgatgttgaaatatagttttaatatggttgaagacagtaatttaattgaaaaagctatacaaaatgtcttatctttaggatttagaacactagatataaaacaagaagcaaaaaaaattctttcaacttctgaaatgggacaagaagttatcaaagaacttagtaaactaattggaaaataat

SEQ ID NO: 208853 - DNA, 583 bp, Unknown
  Bacterial polypeptide expressing nucleotide sequence isolated from the Sargasso Sea
tatgaaaaacagtgaaggtaaaattttattattacccggagatggtattggccctgaggtaaataaggccttgaaagatgtaattaattctgctgatgctaatactgctatcaatatcgaggttgaagaagatcttgtaggaggagcatcttatgataaacataataccccattgacagatgatgtgttaaacaaagctatatccgctgatgcagtaattttagggtctgttggtggttatcagtatgataagttaccatttgaggtaaagcctgaacgagcattattaaaaataagaaaagagttagatttatttgctaatataagaccagcaaaagtttttgatgctttaaaagatgcttcatctttaaaaagcgaaatagtagagggaatggatataatagtgttaagagagctcacaggaggaatttattttggagagccaagaggaataagaaagttaccagatggccagagggaaggtataaatacagaggtatatactactaatgagattgttagattaggtaaagtaggttttgagattgctgaacaaaggaaaaaagatagtacattcagttga

SEQ ID NO: 208854 - DNA, 547 bp, Unknown
  Bacterial polypeptide expressing nucleotide sequence isolated from the Sargasso Sea
gctgaacaaaggaaaaaagatagtacattcagttgaaaaggcaaacgtaatggagtcaggaatactttggagagaagaaataatgaagttacataatgaaaaatataaacatatagatttatcaaatatgtacgctgataattgtgctatgcaattagtaaaacagccaaaacaatttgatgtgattattacaggaaatttatttggagatattttatctgacatatctgccgaacttactggttcactaggtatgttaccttcagcaagtctaggagatgaggttaatggtaagagaaaagctttgtatgagcctgtgcacggaagtgcgccagatatagcaggaaaaaatattgcaaatccaattgctatgattttatcttttgcgatgttcttaaagttatctcttaaaaataataaagtatctgaattaatagagtcttctgttgaaaatgttttaggaaaaggttatagaacaaaagatataatgcaatctggtaagaatttagttactacatcagatatgggatctctgataagtgaagaa

SEQ ID NO: 208855 - DNA, 1078 bp, Unknown
  Bacterial polypeptide expressing nucleotide sequence isolated from the Sargasso Sea
aatgagtaagaatattttaatcttgccgggtgatggtgttggtcaagaagtaacagcctctgctgttgaggtcttagattttcttataaaagaatatggccttgatttttcagtaaaatcaatgaatgtaggtggaacggcatacaatgaatgcggatcacctttaccaaaagaagttcttaatgcagccaaagaatcagatgcaatactgtttggggcagttggcggcactgagtgggataatttagattgggataatcgacctgaaaatgcattattaactcttagaaaagaattaaatctttttgcaaatttaagacctgcatttttatttaatgaactatcagaagcctcaccattaaagaaagaaataattaacaatcttgatattttaattgtgagagagcttaccggtggtatctattttggtgaaccaagaggcattttttcagataaagagcctaattatgcttttaacactatggtttataacgaagatgagattaggcgtattgcaaaagtagcatttgaatctgcacaaaaaagagatggtaaattatgttctgttgaaaaagcaaatgtccttgaagtttcaaaattttggagatctatagttaccgaaatggcatctgaatatcctgatgttcaacttacacatcaactagcagacaatgctgcaatgcaattagttctagatccaaaccagtttgatgtaattgttgctagtaatctttttggagatattttatctgacatagctgcaactttgactggttcaatcgggatgttgccatctgcatcattagacagttcttttaaaggaatgtatgagccttgtcatggtagcgcaccagatatagcaggacaaaatatagctaatccattggcaatgatttcgtctctttctatggcattaagatactctctaaatcaagaaagtatttctgataaaattgataccgcaattaaattatttatccagtctggatatagaacaaaagatattgcagttgatgagaattatctaaaaacctctgaagttgcacaaaaaattatagatataatacaaaatggataa

SEQ ID NO: 208856 - DNA, 1126 bp, Unknown
  Bacterial polypeptide expressing nucleotide sequence isolated from the Sargasso Sea
aatgaaagaaaaagttaacttattacttttacctggagatggtattggtcctgaggtatgtaatccagtaaaaaaaattattaattttttaaataattttactaatattgaattctcagttgaagaagatctaattggaggtagttcatatgataaacataaagtgcctataaccaaaaatgttgtttctaaagctaatgcaagtgatggagtattattaggagcggtaggggcaccaaagtatgaaaatcttccatttgatttgagaccagaaaggggattattaaaacttaggaaagatttagatttgtatgccaacattagacctgcaaaagtttttaatgctttggctgatgcctcatcattaaaacaggatatagttacaaatatggacatagttgtgctaagagagctaacaggaggaatttattttggagaacctcgaggcatatttaacttaaacgacggacagaggaaaggaataaatacagaggtctacacaacaaatgaaattatcagattaggtagaataggttttgaaattgcaaacttaagaaataaaactgttcattcagtagaaaaggcaaatgttatggagtcgggagtgctttggagagaagaaataaataaattacattcagcagagttcgatgatataaacttaaaacatatgtatgccgataactgtgctatgcaacttgtaaaagatcctaaacaatttgatgtgatattaacaggaaatttatttggagatattttatcagatatctctgctgaacttacaggttctcttggtatgttaccatcagctagtttgggagaaataggagaaagtaaaaaaagaaaatcattatacgagccagtccatggaagtgctcctgatatagcaggaaagaatattgctaacccaattgcaatgatattatctttatcaatgttttttaattatactcttaaaaacaatattctttcaaagctgattgaagatgctgtagaaaaaactttagaaaatggttatagaactaaagatataatgcaagatggtagaaatttgcttacaacgactgaaatgggcgacaaagtaatagagaatctaaaaatattgttagaaaaaaatgagttataa

SEQ ID NO: 208857 - DNA, 1066 bp, Unknown
  Bacterial polypeptide expressing nucleotide sequence isolated from the Sargasso Sea
atgaaagaatataatattgcagccataccaggagatggaataggtaaagaagttatacctgagggtcttaaagttttaaaagaggcagccctaaaacatcaatttaaaattaatttcactgaatatgattttgcatcatgtgattattatgaaaagcacggaaaaatgttacctgatgattggaaagaaaaattaagtaaacacaatgctattttttttggtgcagttggtatgcctgatcaagttcctgatcatatttcattatggggatcactactccaatttagaagagaatttgatcaatacataaatctaaggccagttaaactttttccaggtgttaactctccattagctaataaaaaacctggagatattgacatgatgattgttagagagaacactgaaggagaatattcatctgttggtggaagaatgtataaaaatacagatcgtgaaatagctattcaagaaacaattatgtcagctcatggaattgacagagttcaaaaatttgcttttgaattagcaaaaataagaaaaagaaaaaaattaacaaatgcaacaaaatcaaatggtatttcaatcaccatgccattttgggatgaacgttttgaaaaaatgaaaaaaaattatcctgaaattaacactgatcaatttcacatagatattttggtagcaagatttgttttaaaccctgagtggtttgatgtagttgtggcctcaaacctatttggagatattttgtctgatctcggaccggcttgtactggaactattggaattgctccatcaggtaatattaatccagaaaataaatacccgtcattgtttgagccggtacatggttctgcacctgatatagctggaaaaggagttgctaatccagttggacaaatttggtctggtgcaatgatgttagattatttgggggaaaaagaagctgcaaattcaattgtaacagctattgaaaaatcattaaaaaatgaaaaaaatagaactaaggatttaggtggtgaaagcaatactattgaatgttctaaatctatattatcaaatctttaaa

SEQ ID NO: 208858 - DNA, 1111 bp, Unknown
  Bacterial polypeptide expressing nucleotide sequence isolated from the Sargasso Sea
aatgattaaagtaaaaaaaagaaaaattttacttttacctggggatggtattggtccagaagtaatcaatgaggtaaaaaaaataattgaatggtttaataaaaatagatcgcttgatttcgaagtagatcaagatttagtaggtggggctgcgtatgataaatttaaaactcccattaccgacgaagtattttttaaagccttagaatgtgaagcagtaattttaggcgctgtaggaggccctaaatgggacaacttagatttttctaaaaaaccagagagagcattactaaaattaagaaaagaacttaaactttttgcaaatttacgacctgctatttgttttaaacagttagttgaggcttctagtttaaaacccgaaatagtatcaggacttgatataatgattgtaagggaattgactggagggatttattttggtgaaccaagaggtataaagcccatcgataatggagaaagaaaaggaattaatactcatacatatacatctaaagaaattgaaagagttgcaagagttgcttttgaattagccaaaaaaagaaataataaagttacttcttgtgagaaatcaaatgttatggaagctggtcaactgtggaaagaggaggtaacaactcttcacaaaaaagactataaagacgtaaatttagaacacatgcttgcggataactgtgctatgcagttattaagaaatccaaaacaattcgatgtaatagtaactgataatttgtttggagatatactttctgatgaagcagcaatgcttacaggttcattaggattactaccttcagcctcacttggtgcaaaagataaagatggaaatttaagatcaatgtacgaacctgtgcatggttctgctccagatatcgcaggcaaaggtattgctaatccaattgcaacaattttaagtttttcaatggccttaaaatattctttaaacttagataaagagtccactgaattggacaatgcagttcagaaagttttagacgatggattaaggacaaaagacattatttctaaaggaaaaaaagaagtttccacctccatgatgggggatgcgattattgcgtgtttgcaaaaataa

SEQ ID NO: 208859 - DNA, 1108 bp, Unknown
  Bacterial polypeptide expressing nucleotide sequence isolated from the Sargasso Sea
aatgattaaggtaaaaaaaagaaaagtattacttttacctggcgatggaattggaccagaagttattaatgaggtaaaaaaagttattaaatggtttaattcaaaacgatccttagattttgaaatggatgaagatttagcaggaggtgcatcttatgataaacacggaactccaataaccgatgaagtgttttataaagctctagaaagtgaagtagtaatgttaggtgcggttgggggaccaaaatgggatggtcttgaattttcaaaaaaaccagaaagagcattattaaaactaagaaaagaattaaagctatttgcaaacttaagaccagcaatatgtttcaaacaattagttgatgcatcaactcttaaacctgaaatagtttctggtctagatataatgattgttagagaacttacaggaggaatatattttggtgaacccagagggattaaacctatagacaacggagaaagaaaaggaattaacactcattcctacaccagtagtgagataataagggtagctagagttgcttttgatttagcaaaaaaaagatcaaataaagttacatcatgtgaaaaatcaaatgtaatggaagccggccaactttggaaagaagaagttcaggcattacatgagaaggaatataaggaagtagaactaagtcatatgcttgctgataattgtgctatgcagttattaagaaatcctaagcaatttgatgtaatcgttactgataatttatttggtgatattttgtcggatcaagcatccatgttaacaggttcattaggtcttttaccctcagcatcacttggcgcaaaaaataaagatggtgaaatgagagcaatgtatgaacctatacatggttcagctcccgatattgctggaaaaggattggcgaatccaattgcaacaattttaagttttgctatggcgttaagatactctttagacctggataaagaagcagacgatttggaaaaggcagtacaggatgtacttaatgaaggcctaagaacgaaggatatagctgaaaaagggaaaaaagaagtatccaccaaagaaatgggagatgcgattatttcaaaattgaaataa

SEQ ID NO: 208860 - DNA, 943 bp, Unknown
  Bacterial polypeptide expressing nucleotide sequence isolated from the Sargasso Sea
gatgaaagaatacaaaatcgcctcaattgctggagatggtattggaaaagaggttgttccagaggctttaaaaatacttaaagaagtagcaaatcaacatcaatttaaattaaagatagatgaatttgatttttcatcatgtgattattatgaaaagcacggaaaaatgctaccagatgattggaaacaacaaattggtaatcatgatgcaatattttttggtgcagtaggtatgccagataaatacccagatcatattactttatggggttccctactacagtttagaagagaatttgatcaatttatcaatttaaggccagtaaaattatttaaaggagtaaatgcacccttagcaaataaaaaacctggtgacatagatatgatgatagtgcgtgaaaacactgagggcgaatattcttcggtaggtggaaaaatgtatcaaaatactgaaagagaaattgttatacaagaaactataatgtcaaaacatggaatagatagagttcaaaaatttgcatttgaattagcaaaaacaagagatcgaaaaaaattaactaatgccacaaaatcaaatggtatttctataaccatgccatactgggaccaaagattttatgaaaataaaaaagatttccctgagattaaaacagatcaatttcatatcgatattttagctgcaagatttgttttaacaccagagtggtttgatgttgttgtagcatcaaatttatttggagatattttatccgatttgggtccagcatgtacgggaacaattggtatagctccatcaggaaatattaacccaacaaataaacatccttctttattcgagcctgttcatggatcagcacctgatattgctggaaaaggtattgcaaatccaataggtcaaatctggtctggcgctatgatgttagattatttagggaaaaagaag

SEQ ID NO: 208861 - DNA, 816 bp, Unknown
  Bacterial polypeptide expressing nucleotide sequence isolated from the Sargasso Sea
tattccgccgcgagttcgaccaatacatcaacctgcgccccgcgcgcctcatgcccggcgtggtcgcgccggtggtgcgccgcgacggcagtccgcgcctgcccggcgagatcgacatgctgatcgtgcgcgagaacaccgagggcgaatactccagcatcggcggccgcatgtacgagggtacgccgcgtgagatcgtgatgcaggagacggtgatgtcgcgccatggcgtggaccgcgtcctgaagtttgcgtttgagctggcccagtcgcgccccaagaagcacctgaccagcgccaccaagtccaacggcatcgccatcaccatgccctactgggacgagcgcgtggccgagatggccaaggcctatcccgatgtgaaggtggacaagttccacatcgacatcctcacggcccacttcgtgcagcgccccgacttctttgatgtggtggtggccagcaacctgtttggcgacatcctttccgacctgggaccggcctgcacaggcaccatcggcatcgcgcccagcgccaacctcaaccccacacgcaccatgccgtcgctgttcgagcccgtgcacggctcggcgcctgacatcgcaggcaagggcatcgccaaccccatcgggcagatctggtgcggcgccatgatgctggacttcctggggtaccgcgctgcgcacgacgctgtgctggccgcgattgaggccgttttgcaacccggtagtggtgctcctcgcaccccggatctgggtggcacgggcagcacgcaggatgtgggcaaagccatcgcgcaggcgctcacagcccgttgag

SEQ ID NO: 208862 - DNA, 310 bp, Unknown
  Bacterial polypeptide expressing nucleotide sequence isolated from the Sargasso Sea
atgattaaagttataaaaagaaaattattattattgcctggagatggtattggtcctgaagttattggtgaagtaaaaaaagttattacttggctaaacaaaaatagatcactagattttgaaatagacgaagagttagttggaggttcttcatatgatcagcatggtacaccaattacagatgaagtattttataaagcattagaaagcgaagcggttattctaggagctgttggtggtccaaaatgggataatctagaattttctaagaaaccagaaagagcattattaaaactaagaaaagaatgaa

SEQ ID NO: 208863 - DNA, 1102 bp, Unknown
  Bacterial polypeptide expressing nucleotide sequence isolated from the Sargasso Sea
atgtctaaaactaggaaaattcttcttttacctggtgatggtattggtccagaggtaattgctgaagtaaaaaaaatactagattggatgaataaaacaaagtctttagatttcgttttaagccaagagttaattggaggtgcatctatcgatgctaataaagtcccaattactgacgaagttttttataaatcattggagtcagatgcagtaatattaggtgcatgtggtggacctaaatgggacaacttagaattttcaaaaaaaccagaaagagctcttttaaaattaagaaaagaattaaaactatttgcaaatttaagaccagcgatttgcttcaaacaattagttgactcttcaactcttaaaccagaaatcgtatcaggtttagacataatgattgtaagagaattaactggcggcatttattttggtgaaccaaggggcatcgaaccaatggaaaataatcaaaggaaaggtgttaatactcacacttatacaacatcagaaattcatagaattgcccgtgtagcttttgacttggcaaaaaaaagaagaaacaaagttacatcttgtgaaaaatcaaatgtaatggaagcaggcgtgctatggagagaagaagttcaatcaataaaagacaaggagtttaaaaaagttgagttaaatcatatgttagctgataattgtgctatgcaacttctaagatatccaaaacagttcgatgtaatattagctgataatctgtttggtgatatgttgtctgatgaggctgcaatgttaactggttctcttggacttttaccctctgcctctttaggttcaaaggataaaaatggaagaattagatctctttacgaacctgttcatggttcagccccagatattgaaggtaaaaatatagcaaatccaatagctacaattttaagtttatcaatggctttaagatattccttggaacttggtaaagaggctgatcaaattgataaagcagttcaaagcgttcttgacgaaggattaagaacaaaagatataatgtcaaaaaatatgaaagaggtttccacaactgatatgggtgatgcaattattgcaaaattgaaataaa

SEQ ID NO: 208864 - DNA, 631 bp, Unknown
  Bacterial polypeptide expressing nucleotide sequence isolated from the Sargasso Sea
aaacacaacctactactcagagagcgaaattgaaagagttgccatatctgcatttgagatagcttcaaagagaaataaaaaggtttgttctatggagaaagcaaatgttatggaagttggagtattatggcgtgaggtagtacagaagataagagatagagattatcctgaaatagaacttagtcatatgtatgcagatgctggagcaatgcagttagtaaggtggcccaagcaatttgatgttatagttacagacaatttgtttggagatttattatctgactgtgcagcaatgcttactggaagtttaggtatgttaccatcagctagtctaggaaataaaaatgctaatggtaaattaaaagctatgtatgaacccgttcatggttctgctccagatatatgtggtaaagggctcgctaatcccgtagcttgtattttaagtttttcaatggctttaaaatacacttttgatttaaagaaagaagctgagttgttagacaaatctgttgaacgagtacttagcaagggtattagaactgccgatttacttcaaaaagaaaatcaaaaaccatcaagtactaaagaagtttgcgatgagattttaaatgaacttaatttacaattataa

SEQ ID NO: 208865 - DNA, 1111 bp, Unknown
  Bacterial polypeptide expressing nucleotide sequence isolated from the Sargasso Sea
atgattaaagttaaaaaaagaaaaattcttcttttaccaggagatggaataggtccagaggttatcgcagaagttaaaaaaattattcagtggtttaacaaaaacaaatccttagattttgaaattgacgaagatcttgttggtggagcagcgtatgataaatacaagacacccataacagatgaagtgttttataaagctttagaaagtgaagcagtaatacttggtgctgtaggaggacctaaatgggacaagcttgaattctcaaaaaaacctgaaagagcacttcttaaacttagaaaagaattaaaactttttgctaatttaagacctgccatttgctttaagcaattagtggacgcttcaagtttaaaaccagaaattgtttcaggtttagatattatgatagtaagggaattaacaggcggaatatatttcggggagccgagagggatcaaaccgatagacaatggtgaacgaaaaggaattaatacccatacttatactacaaaagaaattgaaagagttgcgcgagttgcttttgatttagctaaaaaaagaggcaataaagttacatcttgtgaaaaatctaatgtgatggaagcaggtcagctttggaaagaagaagttcaaattttacatgacaaagaatataaagatgtagaactaactcatatgttagcagataattgtgctatgcaattattaagaaatccaaagcaatttgatgtaatcgtaactgataatttatttggagatatcctatcagacgaagctgcaatgttgacaggctctttaggtctattaccatctgcatcattaggagctaaagacaaagatggaaatatgagatcgatgtatgaacctgtgcatggttcagcacctgatataactggtaaaggaattgcaaatcctattgcaactatattaagtttctcaatggcattaaaatattcattaaatttagataaagaatctaaagccttagataacgctgttcaaaaggtattggatgatggattaaggacaaaagatattatttctaaggggaaaaaagaagtttctacttcagagatgggagatgcgattattgcgtgtttgcaaaaataaa

SEQ ID NO: 208866 - DNA, 1004 bp, Unknown
  Bacterial polypeptide expressing nucleotide sequence isolated from the Sargasso Sea
aatgactaaaaaaatattaattcttccaggagatggtataggagaggaagtcacttcttcggcaaaagaggtattagattttattattgataattatgatattgattttgaaataaatactatgaaagtaggtggtgctgcatatgatgagtttggatcccctttgccagaagaagttttacatgaagcaaaaagatctgatgctattctatttggggcagtaggtggacctgaatgggataatcttgaatgggatttaagaccagaatatgcacttttaaaattaagaaaagatttggaactattcgcaaatcttaggcctgcatttttattcaatgagttggcatcagcatcgccgattaaaaatgaaattataaaagatctagacatacttattgttagagagcttacaagtggtatatattttggagagcctaggggtttagttgaatcagaaaatccaaaatatgcctttaataccatgatttataacgaagatgaaatcaaaagaattgctaaaattggttttgaatcagcacagaaaagaaataataaactatgttctgttgacaaggctaacgtattagaggtttcaaagttttggcgagaaattgttacagatatgtcaaaagattatcctgatgtcgagttatctcaccagcttgcagataatgcggccatgcaattagtgctaaatccgaaccagtttgatgtgattgtttcaagtaacctttttggagatatactttctgatattgctgctacattatctggttcaattggaatgttaccttccgcttcactaaatagttcttcaaaaggaatgtatgagccatgtcatggaagtgcgcctgacattgctggtaaaaatatagcaaatccaattgcgatgattgcatctttatcaatggcattaaggcactctttagatcaagaaaatattgcaaaaatgcttgataattcaataatgaaatatgtatcgcaaggtaacagaacaaaagata

SEQ ID NO: 208867 - DNA, 529 bp, Unknown
  Bacterial polypeptide expressing nucleotide sequence isolated from the Sargasso Sea
atgattaaaataaaaaaaagaaaatttttattattaccaggtgatggaattggtccagaagttgttggtgaagtaaaaaaaataattctttggtttaataacaataaatctctagattttgaaatagaagaggatcttgctggtggtgtttcatatgataagcatggaacgcctatcacagacgaagtattttataaagctcttgagtctgaagcagtaatattaggtgcagtaggaggtcccaaatgggataatgtagaattctcaaaaaaaccagaaagagcattattgaaattacgaaaagaattaaaactttttgccaatttaagaccagcaatttgttttgaacaattagttgaagcatcaacacttaaacctgaaatagtatctggccttgatatcatgatagtaagagaactaaccggaggaatttattttggagagccgagaggaattaagccaattgataatggagaaagaaaaggaataaatacccatagctatacatcaagtgaaatacaaagagttg

SEQ ID NO: 208868 - DNA, 1069 bp, Unknown
  Bacterial polypeptide expressing nucleotide sequence isolated from the Sargasso Sea
tatgaacttaaaaatagctttattgcctggtgatggtataggacctgaggttatcaaagaagctgttaaaatctgtaatgctatctcaaaaaaatttaatcattcaataacttggcaagaaggtcttgttggtgctgcagcaatcgataagactggagatccatacccagatacaacccacgaaatctgtgtaaattcagatgccgtgctgtttggtgctgttggtgatcctaaatttgataataatccatctctttctgtaagacctgaagaagggttattaagaatgagaaaaaaactaggattatatgctaatcttagacctacattcacgtttgaatctcttcttgaaatgtcacctattaaaagaagtatagttaagggaactgacttaatttttgtaagagaattaactgggggcatttattttgggaaaagaggcaaaagtccagaaaatgattatgcatttgatacctgtgaatacaaaaaagaagaagttgaaagaattgcaaaaataggttttgagttagctagaaaaagatctaaaaagttatgctgtattgataaagctaatatattagaaacatctcgtttgtggaggaagacggttcaatcaatggaaagaaattacaaagatgttgaggttagttatgaatttgttgatgctgttgcaatgagattaattcattctccaaataaatatgatgttttaattacgagtaatttatttggggatattttaactgatgaagcatctgtgatttcaggatcaatgggtttaatgccctcagcttcaattggttcacatacatcaatttatgaaccaatacatggatcttttcctgaggcaaaggggaaaaatatagctaatcctcttgcaacaattttatctgcttccatgatgtttgaacgcagctttaatttaactaaagaagctgaaatgattagaaaaatagtttctgattcaatagaaaaaaagatcgtaaccgaagatttagctgaaaataataaatcattctcaactagccaggttggtgattggattaaagaaaggatagaaaaagaataa

SEQ ID NO: 208869 - DNA, 1129 bp, Unknown
  Bacterial polypeptide expressing nucleotide sequence isolated from the Sargasso Sea
atgaataataatgaatttcagatagctaccgtacctggagatgggataggcaaagacatagtaaattcagctatctcaattgttgacttgtcttctgaaataacaggtggatataaatgcgaatggcatatgatcaaagcaggagctgaatattattctttgactggaaaagatgttgaaccaggaggagaaaaaaaagttgatgaactcgatagtatttttttaggtgcaattgggttacctagtgttcgtcataaagatggaactgaaatatgccctcacctaagatttagagaaatgtttggtttgtatgcaggtgtaagaccagttaaagcatacaaaaacataccaaagagactaagtaatgaattatcaagaaatatagatttaattattttaagagaatctaccgaaggattattttatactgctgctgttcacaatagatgtcctgttgaaaataatcaagaagtgcaagatgtaatgaaaataactagagcaactactgaaaaattacatgattttgcatttaaattggcaaggcaaagaaagaaaaaaggtaaacttggaaaagtaacttgcgttgataaagctaatgtttttagatcacaggcatttttcaggaaaatatttgatgaaagaaaagttaaatttaaagatatagatgctgagcattgctatgttgatgcaatggcactcaacttgattagaaatccttgggaatatgatgtaatggtaatggaaaatatgtttggtgacatattatctgatttaggaggaggccttatcggaggaatgggtatggcatcatgtgctgaaataggtgataatcacggattatttcaacctgcccatgggagtgcaccagatatactcggacaggataaggctaatccgctagctactattttaagtgcatctctgatgcttgaatatctatctgaaaaaacagattgtaaaagtactttgttagggtctagattaattgaaactgcagttgaaattggttttgaaagaaatgaattaagaccaatagaatttggaggcgatatgggaacaaaagcaataactgaaactttaagtgatttattaaaagataatgaaattcaaaaacaaatattaacttaag

SEQ ID NO: 208870 - DNA, 1078 bp, Unknown
  Bacterial polypeptide expressing nucleotide sequence isolated from the Sargasso Sea
atgagcaagaaaatattagtattgcctggagacggaattggacaagaggtaactgcttccgcgatgcaaatccttgactttattatcaaaaaattctccttgaatttttctattgatacacttgatgttggtggaactgcctacgagaaatttggttcaccaattccagaaaatgttttaaaaactgccaaaaaagcagatgctgttctatttggagctgtaggagctccccagtgggatggtcttagttgggaagacagacctgaaaatgcattgttgacattaagaaaggagttaaacttgtttgcaaatttaagacctgcctttttatttaatgaactatcaaatgcttccccattaaaggaaaaaattattgaaggtttagatatattgatagtcagagaactaactggtggcatatattttggtgagcccagaggagttgttaatgataagtctcctaattatgcgtttaatactatgatttataatgaagatgagattagaagaattgcaaaaattgcttttgaatcagcacaaaaaagaaaaggtagattgtgttctgtagaaaaagcaaatgttttagaagtttcaaaattttggagatcaattgttacagaaatgtctaaagaatatcctgacgttgagctttcacatcaacttgcagataatgcggcaatgcaattagttctcaacccaaatcaatttgatgtgattgttgctagtaacttgtttggagatattttgtctgacattgctgcgacacttactggatcaataggcatgcttccttctgcatcgcttgatagctcattcaagggcatgtatgagccttgtcatggaagtgcacctgatattgctaatcaagatcttgcaaatccattagcaatgattggctcattatcaatggctttaagatattcattggatgaagaaactgttgcaaataaaattgatacagcaatcaaaaagttcatacaacaaggttttcgaacaaaagacatagccacggatgaaaattatttaaaaacgtctgaggttgctgaaaaaattatagagattcttgaaaatgaatagt

SEQ ID NO: 208871 - DNA, 565 bp, Unknown
  Bacterial polypeptide expressing nucleotide sequence isolated from the Sargasso Sea
cggcgaggcaataaagtctgctcaatggaaaaagcaaatgtgatggaatcgggtgttctttggcgtgaggtcgttcagaaagtccatgatgaagattaccaggatgtggaactttcccatatgtatgcggatgcgggagctatgcagttatgccgttggccgaaacaatttgatgttattgtaaccgacaacttgtttggtgatctattatctgatgctgcagcaatgctgacgggctcactagggatgttgccctcagcttctctaggggctccaatggctaatggtcgacctaaggctttatatgaaccagttcatggatcagcgcctgacattgctggcgaaggtaaagcaaatcctattgcttgtattttaagttttgcaatggcgcttagatactcttttgatcaaggtaaagaagccgatcgtttggaagctgctgtcgaaagtgttcttgcagatggttttcgaacggctgatttgcttggtgaagagggggttgaccctgtaacgacacagcaaatgggcgatgctattttggtggctctaaattctactttgtagc

SEQ ID NO: 208872 - DNA, 799 bp, Unknown
  Bacterial polypeptide expressing nucleotide sequence isolated from the Sargasso Sea
gcgtaagcacttcaaattattcagcaatctgcgcccagctaagctctatcagggtctggaagcgttttgcccgctgcgcgcagatattgccgcgaacggtttcgacatcctgtgcgtacgcgaactgactggcggaatttacttcggtcaaccaaaaggccgcgaaggcagcggacaacatgaaaaagcctttgataccgaggtttatcaccgtttcgagatcgaacgtattgcgcgtatcgcgtttgaatccgcccgtaaacgtcgccgtaaagtcacgtcgattgataaagctaacgtactgcaaacgtctattctgtggcgcgaaatcgtcaatgaaattgctaatgaatacccagacgttgaactggcgcatatgtacatcgacaacgcgacgatgcaattgatcaaagatccttcccagttcgacgtgttgctgtgctctaacctgtttggcgacattctgtctgacgagtgcgccatgatcaccggttcaatgggcatgttaccgtccgccagcctgaatgatcagggcttcggtttgtacgagcctgctggcggctccgctcctgacatcgccgggaaaaacattgccaaccctatcgcccaaatcctgtcgctggcgctgctgctgcgctacagcctggatgccaatgatgcggcaaccgcaattgagagcgccatcaaccgcgcattagaagaaggcattcgcaccggtgacttagcccgtggcgctgccgcagtcggtaccgatgaaatgggcgacatcattgcccgttacgtcacagaaggggtgtaa

SEQ ID NO: 208873 - DNA, 742 bp, Unknown
  Bacterial polypeptide expressing nucleotide sequence isolated from the Sargasso Sea
actcttaaacctgaagtagtttcaggtcttgatatcatgattgttagagagttgaccggtggtatatattttggtgaaccaagaggaattaaaccaatagacaatggtgaaagaaaaggaattaatactcatacatatacttcaagcgagataagacgggtagctaaagtagcttttgatcttgcaaaaaaaagacaaaataaagttacttcatgtgaaaaatctaatgtaatggaagcaggattactctggagggaagaggtacaagaattacatgacaaagaatataaggacgtagagttagatcatatgttggctgataattgttcaatgcagcttcttagaaatccaaaacaatttgatgtaattgttaccgataatttgtttggtgacatgctttctgatcaagcatcaatgttaacaggatctttaggattattaccatcagcatctttaggtgcaaaaaataaagatggtaaaatgagagcaatgtatgaaccaatacatggttcagccccagatattgcaggcaaaggtattgcaaatccaattgcttcaatattgagttttgctatggcgcttaaatattctttaaacctcgataaagaagcaaattctttagaaaaagctgttcaggatgttttagacgatggtcttagaactaaagatattatttctaaaggaacaaaagaagtatcaacatctcaaatgggtgatgcgataatttcaaaattgcaataat

SEQ ID NO: 208874 - DNA, 550 bp, Unknown
  Bacterial polypeptide expressing nucleotide sequence isolated from the Sargasso Sea
tacttccgttcgaaaggcgaatgttatgatgtcaggtgttttgtggcgagaagtaatggtaaaccttcataaaaaagaaggtgccgggattgatataaatcatatgtatgcagataattgtgcaatgcaattagtaagagaccctaatcaatttgatgtaatagtaactgataacttatttggagatattttgtctgattgcgcagctatgttaactggttcacttggcatgctcccatctgcaagtttaggatcagttgataaaaatactggaaagagatatgccatgtatgagccagttcatggatcagctcctgacatagcaggtaaaggactggctaaccctttagctgaattgctaagtttatcaatgttattgagatattcctttgatatgaaagaagaagctgacttaatcgacaaagctgtctcaaaagcgttagaaacagggccaaggacgccagatataatagcagaaggaagagaaaaagttggaactaaaggaatgatggacttagttatacataaattagaggaaataactaattaa

SEQ ID NO: 208875 - DNA, 676 bp, Unknown
  Bacterial polypeptide expressing nucleotide sequence isolated from the Sargasso Sea
tactttggtgaacctagagggataaaaccaattgataatggtgaaagaaaaggaattaatactcatgtctatactactagtgaaatcgagagagtagcccgtgttgcatttgatctagccagaaaaaggaataataaagttacttcctgtgaaaagtcaaatgtcatggaggcaggtcaattatggaaagaagaagtgcaagcaattcatgaaaaagaatatagtgatgtagaattaaaacatatgctagcagataactgtgcaatgcagttagttagaaatcctaaacaatttgatgtgatagtaacagataatctttttggtgacatgctatcagatgaagctgcaatgttgactggttccctagggcttttgccatctgcgtcccttggagctaaagataaaaacggtaatatgagatctttatatgagccagttcatggatcagcacccgatatagcaggtcaaggtattgctaatccaatagcaacaatactgagttttgcaatggctttaagatattctttagacctagataaagaggcagatagtttagaaaaagctgttcaaggtgtgcttgatgagggtcttagaactaaagacattatttctaagggaatgaaagaagtttcaacatcagtgatgggagatgcgataatttcaaaattgcaataat

SEQ ID NO: 208876 - DNA, 715 bp, Unknown
  Bacterial polypeptide expressing nucleotide sequence isolated from the Sargasso Sea
ttagctaataaaaaacctggcgatattgatattatgatagttagagaaaatacagagggagagtattcatcagttggtggaaaaatgtatcaaaatacagaaagagaaattgtaattcaagaaaccatcatgtcaaaacatgggatagacagagtgcaaaattttgcgtttgaacttgcaaaaactcgcaaaagaaaaaaattaactaatgccacgaaatcaaatggtatatcgataaccatgccctattgggatgaaagattttatgaaaataagaaaaactatcctgaaattgaaactgaccaatttcatattgatatattaactgctagatttgttcttactcctgaatggtttgatgttgttgtggcttcaaatttatttggagatattttatcagatttaggtccagcttgtactggaacgataggtattgcaccttctggaaatattaatccaacaaacaaatatccatctctatttgaaccagtacatggttctgctccagatatagccggaaaaggtattgccaatcctataggacaaatttggtctggcgccatgatgttagattatttgggagagaaagaagctgcatcaagaatagtaaattcaatagaaaaaactttattagagaaaaataatagaacaaaagatttagatggtgatagcaatacgatagagtgtgctaataaaattctaagcaacctgtaaa

SEQ ID NO: 208877 - DNA, 322 bp, Unknown
  Bacterial polypeptide expressing nucleotide sequence isolated from the Sargasso Sea
ttcttctgagggaggaatctctgatatgcattattcaatatcaaatactgcagagtttggtgattacttaacaggcccaagaatcattactgaagaaacaaaaaaagaaatgaaaaaagtccttgaagacattcaatcaggtgattttgcggataagtttcttgacgattgtcgtcaaagtaacgatggaagtggcggcccttttttaaaaaataatcgagaaaaaactaaggaacattctatagaattcgttggaaaagaacttcgatccaagatgaagtttttgagtgaaaaaaagcttgttgataaagaaaaaaattaa

SEQ ID NO: 208878 - DNA, 277 bp, Unknown
  Bacterial polypeptide expressing nucleotide sequence isolated from the Sargasso Sea
atagcgcgtaaacgtttgtatgaaatgaacgtggttatttcagacactgctgaatacggtaactacctgttcagtaacgctgcagtgccactgttacgtgatttcgttaacaagctgagtactgagtatgtaggcaagggcttaagctctgctgccaatggtgttgacaatattcgcctgattgctgtgaacgaagcaatccgccagcatcctgtagagctggtaggcaaaaagttaaggggctatatgaccgcgatgaaaaaaatcgtcggttgat

SEQ ID NO: 208879 - DNA, 117 bp, Unknown
  Bacterial polypeptide expressing nucleotide sequence isolated from the Sargasso Sea
aatgacccaactcttttacgacacagatgcagatctaagtcttttaaataacaaaacaatagcgattattgggtatggttcacaaggtcatgcacatgccctaaacctaaaagatag

SEQ ID NO: 208880 - DNA, 309 bp, Unknown
  Bacterial polypeptide expressing nucleotide sequence isolated from the Sargasso Sea
tatgaaaattttttatgacgatgacgcaaacctagaaataattaagaatatgaaagtgagcattattggatatggttcacaaggccatgctcatgcaaacaacttaaacgattctggtgtagatgttactgttggtctaagagagggatcatcttcttggaaaaaagcagaggatgctggattgaaagttgcttctgtctcagaggcatcacaaggagcagatctaattatgatccttgcaccggatgagtttcaacaagcgctttacgataatgaaattaaaccaaatatatcaaatgggtgcgtatt

SEQ ID NO: 208881 - DNA, 835 bp, Unknown
  Bacterial polypeptide expressing nucleotide sequence isolated from the Sargasso Sea
ggaaaggccggataccagccagagcaggatgaacgtcattttctctacgaagagtacctgcacgtaatccgtgaacaccgtcctacagtcttcgtgatggagaacgtaagaggactcttatcggccaccgtcaggaaccaacagatcctccagaacatattgacggaccttcgtgctcctgatgcagatgacccgagtttggcatacaggcttttcggtctggccattcagggagatgatctttcgctcttccgtgatgtgatagatccccgtgagttcgtcattgaaatggaaaggcatggtgttccccaagcacgtcggagattgatcatcgtcggggtcggcaatgacgtctcaagagagccctcaaggctggccgcctccgagcggttgtcgactgtgagcgacgtcatcaaagatttgcctcctcttcggagtgggctgtctcgcggtcaggattctgaggaagcttggagaagtgcaatcgccaagttcgcactcgattggtcaggttctaaggggagcgcgagtagtgatctggtcgagcgggcaaggcagcacatcgaacagatttcgtctggtgacggtcccagctcgaggggaggaaggtggattcctgcccgcgttggtccctcatcacacgctggttggtttgttgattcccgactggaaggggtactcaatcacgaaacgcgtggtcatatcgtagaagatctgcagcgctacctttttgcggccgttttcggggaaatgtcggagcaacagcgctcgcctactcttcacgattttccagcaacgcttctgccgaagcatgagaatgtaaatcagaccttga

SEQ ID NO: 208882 - DNA, 308 bp, Unknown
  Bacterial polypeptide expressing nucleotide sequence isolated from the Sargasso Sea
aatatcaaatatgcattattcaatatccaacacagcagaatttggagattatgcaactggtcctagaataattacacatgaaacaaagaaagaaatgaaaaaggttttagaagatattcaatctggagcatttgcagatagatttttagaagattctaggcagagtaatgatggatctggaggccctttcttaaaaaataatcgagaaatgacaaaggaacactcaatagaatctgtgggaaaagaacttcggtccaagatgaagtttttgagtgaaaaaaagcttgttgataaagataaaaattaac

SEQ ID NO: 208883 - DNA, 292 bp, Unknown
  Bacterial polypeptide expressing nucleotide sequence isolated from the Sargasso Sea
atggcaaacatgagatattcaatctcaaatactgcagagtacggagattattcaagaggtccaagactaattactgatgaaacaaaaaaagaaatgaaaaaaattctttcagaaattcaatctggtcaatttgctaaagaatggatgcaagagcatcagagtggtcaaactaaatttaaagtaatgagaaaagaacaagctgaacatccaattgaagcagttggagataagttgcgaactttgatgccatggattgctgaaggaaaaatggttgataaatcaaaaaactaga

SEQ ID NO: 208884 - DNA, 187 bp, Unknown
  Bacterial polypeptide expressing nucleotide sequence isolated from the Sargasso Sea
atgaaaattttttatgatgacgatgctgacatttcaatcattcgacaactaaaagtaactatagttggttatggatctcagggtcacgcgcatgcaaataatcttcatgagtcaggagtggatgttacagttgctttaagagagcactccacgtcatggaaaaaggctcaagaagctggattaaaag

SEQ ID NO: 208885 - DNA, 229 bp, Unknown
  Bacterial polypeptide expressing nucleotide sequence isolated from the Sargasso Sea
gtagtaaataaagaggaaactaaaaaaagaatgaaggaagttttggctgaaatccaatcaggaaaattcactaaggagtggatggatgaatgtaaaaatggtcagaaaaattttctagctacaagggctaaattagctgagcatccagttgaaaaagttggtgctgaacttagagctatgatgccttggattggtaagaaaaaattagttgatagtgataaaagttaaa

SEQ ID NO: 208886 - DNA, 153 bp, Unknown
  Bacterial polypeptide expressing nucleotide sequence isolated from the Sargasso Sea
tatggctaattatttcaacaccctgtcacttcgccagcagttagatcagcttggccgctgccgattcatggcacgcgaggaattcgctgacggttgtcagttcttaaaaggcaaagaaattgtcattgtgggctgcgggcgcacaggtctaaa

SEQ ID NO: 208887 - DNA, 247 bp, Unknown
  Bacterial polypeptide expressing nucleotide sequence isolated from the Sargasso Sea
atgaaaatatattatgatgatgatgcaaacatagaaattataaaaaatatgaaagtttctattattggttatggatctcaaggccatgctcatgcaaataatctaaatgactcaggtgttgatgtgactgttggtctcagagaaggttctgcctcatggaaaaaagctacagatgctggtttaaaagttgcagcagtttcagattctgtcatgaatgctgatatggttatgattctagcaccagata

SEQ ID NO: 208888 - DNA, 317 bp, Unknown
  Bacterial polypeptide expressing nucleotide sequence isolated from the Sargasso Sea
tgttgatttattatatgagggtggaatggcaaatatgagatattcaatttcaaatacagcagaatatggtgactattcaagaggtcctcgattgattactaacgaaacaaaaaaagaaatgaaaaaaattcttgctgaaattcaatctggtcagtttactaaagaatggatggacgaacataaaagcggtcagacaaaatttaagttaatgcgaaaacaacaagctgaacatccaatagaggctgtaggagaaaaattaagaactctcatgccttggatagctgaaagcaaaatggttgataaatcaaagaactaaa

SEQ ID NO: 208889 - DNA, 518 bp, Unknown
  Bacterial polypeptide expressing nucleotide sequence isolated from the Sargasso Sea
aaaggatcataaagaaaaagtagaaaattatatttcaattggtgaaaaagaaggcgcagaattaatattagatggtagaaattataaaatacaaggttatgaaaatggttacttcattggaccaactatttttgacaaagttaaagaaaatatgaaagtatatcaagatgaaatatttggcccagtcttatcagttgtaagagtaaataattacaacgatgctttaaatttagtaaataatcataattatggaaatggcactagcatttatacatctgatggggaaatatctcgtcatttttctactaattgtaaaataggaatggttggtgtaaatgttccaataccagtacctatggcttttcatagctttggcggttggaaaaattcattatttggggaccatgctatgcatggagttgaaggagtgagattttacacgaaacttaaaactataacttcaagatggccaaatagtattaaatccggtcctgaattttctatcccaacaaattaat

SEQ ID NO: 208890 - DNA, 256 bp, Unknown
  Bacterial polypeptide expressing nucleotide sequence isolated from the Sargasso Sea
tatggtgagtatcagtcagcgtccaagaataattaaaaaagatgaaactaagcaaagaatgaaagaagttttagcagaaattcaatctggtaaatttacaaaagaatggatggatgaatgcaaaaatggtcaaaaaaactttctagcaactagggctaaattagcagaacactcggttgaaaaagttggtgctgaacttcgggctatgatgccttggatttcaaaaaagaaacttgttgatagcgataagaagtaa

SEQ ID NO: 208891 - DNA, 388 bp, Unknown
  Bacterial polypeptide expressing nucleotide sequence isolated from the Sargasso Sea
attgtaccagtggcgtttaccccggacacgatgtccgacacaatacgcccccttttttcgggccccaatcgaggacacgccagtgagtaactatttcaactcccttccgcttcgcacccagcttcaggaactgggcaagtgccggtttatggacccggctgaattcgaggcgggcgtggagccgctggcaggcaagaaactcgtgattattggctgcggcgcccaaggctttaaccagggcctgaacctgcgcgacagcgggctgaacgtggcctacgcactgagaaaagaagcaattgaagaaaagcgcccctcctgggtcaaagccaccgaggcaggttttcaggttggcacttatgaagagatggtcccagaggccgacatggtg

SEQ ID NO: 208892 - DNA, 196 bp, Unknown
  Bacterial polypeptide expressing nucleotide sequence isolated from the Sargasso Sea
aaagaagttttggctgaaattcaatctggaaaattcactaaagaatggatggatgaatgcaaaaatggtcaaaaaaactttcttgctacgagagctaaattagccgagcatccagttgaaaaagttggcgcagaattaagagctatgatgccttggataggtaaaaaaaaattagttgatagcgataaaagttaaa

SEQ ID NO: 208893 - DNA, 147 bp, Unknown
  Bacterial polypeptide expressing nucleotide sequence isolated from the Sargasso Sea
gatggcccagctcttttacgactccgacgccgatctaggtctgctgaacggggcagacgtagccatcattggttatggctcccagggtcatgcccacgctctgaacctgaaaggatcaggcgtggacgtggtggtgggcctctatga

SEQ ID NO: 208894 - DNA, 106 bp, Unknown
  Bacterial polypeptide expressing nucleotide sequence isolated from the Sargasso Sea
tatgaaaacgtattacgataaagatactaataaagatttaatcaaaaataaaaaagttgcgattttcggttacggaagccaaggtcatgctcacgctttaatttaa

SEQ ID NO: 208895 - DNA, 847 bp, Unknown
  Bacterial polypeptide expressing nucleotide sequence isolated from the Sargasso Sea
ggtgtccggcgcggccgaacgcatcggtctgacgctgcagcgctgccgctggctttccgccgacgtcattatggtgctggtcgggctgatttgcgggatcacgctgttcgttgaggtcggcgtggtgctgttgattccactggccttttcgattgctaaaaaaaccaatacctcattactgaagctggcgattccgctgtgtacggcgctgatggcggtacactgcgtcgtacctccgcatccggccgccctgttcgtggcgaataagctgggcgcagacattggcaccgtgattgtctacggcttactggtgggtttaatggcttcgcttgtcggtgggccgctgtacctgaaattcctcggtaaccgtctgccatttaaaccggtaccggctgagttttccgacctgaaagtgcgtgatgaaagcacgctgccatcgctgggcgcgacgctgtttaccgtactgctaccaattggcctgatgctggtgaaaaccgtcgcggaactgaacatggcgaaaggcagcacggtgtatacgctgctggagtttattggtaacccgatcaccgcgatgtttatcgccgttttcgtagcctattacattctcggtctgcgtcagcacatcggtatgggtgcgctgctgacccacaccgaaaacggttttggctcgattgctaacattttgctgattatcggcgcaggcggcgcattcaacgctattctcaagagcagcgggctggcggatactctggcgctgatcctctcaaacatgcatatgcacccgattctactggcgtggctggtcgctctgattctgcatgcggcggtaggctctgccacggtggcg

SEQ ID NO: 208896 - DNA, 244 bp, Unknown
  Bacterial polypeptide expressing nucleotide sequence isolated from the Sargasso Sea
gagactgcaagatatggtggactcacaagaggtccgatggttatgacatctgacacaaaagatagaatgaaaaaagtacttgaaatgattcaagatggaacattcaacaaagaatggattgataattatcaacatgaaggaaaaactgcatttgataaatacatgaaagatttagacaatcatcaaatcgaaactgtaggaaaacagatgagaaagatgatgtggccagactctactgaataaa

SEQ ID NO: 208897 - DNA, 217 bp, Unknown
  Bacterial polypeptide expressing nucleotide sequence isolated from the Sargasso Sea
gaggaaactaaaaaaagaatgaaagaagttttagctgatattcagtctggtaaatttacaaaagaatggatggatgagtgtaaaagtggtcagaaaaactttcttgctacaagggcaaaactagccgaacatccagttgaaaaagttggggctaatttaagagctatgatgccatggattggtaagaaaaaattagtggatagtgataagaagtaaa

SEQ ID NO: 208898 - DNA, 199 bp, Unknown
  Bacterial polypeptide expressing nucleotide sequence isolated from the Sargasso Sea
atgaaaattttttacgacgatgatgctgatatctcaatcattcaacaacttaaagtaactatagttggttatgggtctcaaggtcacgcgcatgcaaacaatcttcatgaatcaggagtggatgtaacagttgctttgagagagggctcctcatcatggaaaaaagcacaagaagctggattaaaagtagccaaggttc

SEQ ID NO: 208899 - DNA, 835 bp, Unknown
  Bacterial polypeptide expressing nucleotide sequence isolated from the Sargasso Sea
tgttgaggtaaacgttgtagctggtggtggtgctggtggttacaatgttggtggtggaggtggtgctggtggttttgtaagaactgaagttaatgtttgtggtagcacacaatatgatattacagtaggtggtggcggtgctggttcaggagatgttgcaccaagaaatggtggatcaggaactgattcaacatttggatctacaacagctacaggtggtggtggcggtgctggttattcttgtggttctgctggtttaccaggaggatcagggggtggtgctagaggttatacaagttgttcacctagagctggtggctctggaactgcatgtcaaggaaatgatggtggatctttatctgcaccaaaaggtattggtggaacaggcgcaggaggaggtggtgcaggtggcgctggagctaattcaatttgtgttggatcaccaaaatcaggttgtgtagcaggtggtgtaggtttagcatctccaattaatggtacaacttatgctgctggtggaaaaggtatggctgattgtagtccaggctcctctgcttcatcaaatacagggaacggtggagacggtggtggaaatccaaattgtgcaggagcaggtggatcaggaatagttgtcgtaaaagaattaaataaagcaagtggtgtgtggtcaatgcaatctcaatatcaagcgagatcagaaggaacatgggttcttcctcctgttatttatacaggagtaaattttatggttatagccggtggtggttcaggttcagctaacgcaggtggtggtggaggagctggaggttatcgtgcctctggttttggtccaagtcca

SEQ ID NO: 208900 - DNA, 324 bp, Unknown
  Bacterial polypeptide expressing nucleotide sequence isolated from the Sargasso Sea
ttcttcatgagggaggaatctctaatatgcattattcaatatcaaatactgcagagtttggtgattacttaacaggtccaagaatcattactgaagaaacaaaaaaagaaatgaaaaaagtcctcgaagacattcaatcaggcgattttgcggataagtttcttgacgattgtcgtcaaagtaacgatggaagcggcggcccttttttaaaaaataatcgagaaaaaactaaggaacactctatagaatctgttggaaaagaactgcgatccaagatgaagtttttgagtgaaaaaaagcttgttgataaagataaaaattaac

SEQ ID NO: 208901 - DNA, 110 bp, Unknown
  Bacterial polypeptide expressing nucleotide sequence isolated from the Sargasso Sea
aatgaaaatctattatgatgaagatgcaaatctagaaattattaagaaccttaaagttgcaataattggatatggttcacaaggacatgctcatgcaaataatttacatg

SEQ ID NO: 208902 - DNA, 388 bp, Unknown
  Bacterial polypeptide expressing nucleotide sequence isolated from the Sargasso Sea
aaacatacaagatggaacgttttcaaatactcctctaaattttgcaggtatttatggattaacggaaattgctaatgcacttgttaatgccggcgcagatctaaacctagtaaacgctgacaactttactccattatgtaatgcagcagcttgggggcatacagaagtggtcactatacttcttgatgcaggtgctgatatatcagcaaagtgttttgaaacacaaattggactttctgtagctgtagcaattgctatcagcgcaccatattcagattatataaaagcactgtatgtcgatcatggagaaaaatataatattccttatgacgaagcaaaaatcattgcaggtagagaaaaagttacagaacttcttagtagtagataa

SEQ ID NO: 208903 - DNA, 272 bp, Unknown
  Bacterial polypeptide expressing nucleotide sequence isolated from the Sargasso Sea
aatcaatggaatgtggagacgtgtttcagaaactgcaagatatggtggacttacaagaggtccaatggtcatgacatctgatacaaaagaaaacatgaaaaaagttctaacaatgattcaagatggaacatttaacaaagaatggattgacaattatcaaaatgaaggcaaggctgcatttgataaatacatgaaagacttggatggtcatcaaatcgaaactgtaggaaaacagatgagaaaaatgatgtggcctgactctactgaataaa

SEQ ID NO: 208904 - DNA, 148 bp, Unknown
  Bacterial polypeptide expressing nucleotide sequence isolated from the Sargasso Sea
gatggatgaatgtaaaaatggtcagaaaatctttttagcaactagagctaagctagctgagcattctgtggaaaaagttggcgctgaactaagagctatgatgccgtggatcagtaagaaaaaactagttgatagtgacaaaagttaa

SEQ ID NO: 208905 - DNA, 382 bp, Unknown
  Bacterial polypeptide expressing nucleotide sequence isolated from the Sargasso Sea
tatgaagcaattcgcaggcggtgtggccgtcatcacgggcggtgcgtcgggttttggcaaggagttcgccaagattggtgccgggttgggcatgaagctggtgctggccgatatccagcaggatgcgctggatgccgccgtggccgaattctcggcgcagggcgtggaagtgatcggcctgcgcgtcgacgtgtcgaaggtggaagacgtgcaagcgctggccgatgccgccatcaaggcgttcggcaaggtcaacctcctgttcaacaacgccggcgtgggtgcgggcgggctgatctgggagaacaccgagcgcgactgggattgggtgctcggcgtgaacctgcacggcgtcatccacggtgtacgctcttcacgccgc

SEQ ID NO: 208906 - DNA, 325 bp, Unknown
  Bacterial polypeptide expressing nucleotide sequence isolated from the Sargasso Sea
aaattaattgttgatcttctttatgaaggtggaatggctaatatgagatattcgatttcaaatacagctgagtatggagactattctagggggcctcgattaattacagatgacacaaaaaaagaaatgaaaaaaattcttgctgaaattcaatcaggtcaatttaccaaagaatggatggatgagcataaaagtggtcagacaaaatttaaattgatgagaaagcaacaagctgaacattcaattgaagctgttggtaaaaaactaagaacactaatgccttggattgcagaaagcaaaatggttgataaatcaaagaactaga

SEQ ID NO: 208907 - DNA, 398 bp, Unknown
  Bacterial polypeptide expressing nucleotide sequence isolated from the Sargasso Sea
aatgattgctttatttaaggcaggtgtcgagttagcttatgaaattatggtcaataatgggattaaagaggagtcagcttattatgaatcattacatgaactcccgttaattgcaaatttagttgcaagaaaaaaattatatgaaatgaataacataatatctgatactgctgaatatggttgctacctatttaataatgatgcaattcctctgttaaaagacttttttaataatattgatgttgatataattggaacaaatgctttaagtatcagtgataatccagttgatgatgaaaggttaaaagtcataaatgataatgtaagagaccattcaattgaaaaaataggttctgagctaagacagcatatgacttcaatgaaaaatattcattaaa

SEQ ID NO: 208908 - DNA, 99 bp, Unknown
  Bacterial polypeptide expressing nucleotide sequence isolated from the Sargasso Sea
aattggccgaacaccctgttgaaaaagtaggagctgaacttagagccatgatgccttggattggtaagaaaaaactggttgatagtgacaaaagttaat

SEQ ID NO: 208909 - DNA, 108 bp, Unknown
  Bacterial polypeptide expressing nucleotide sequence isolated from the Sargasso Sea
tatgaaaacttattacgacaaagaaacaaacttaaatttaattaaaaataaaaagggagccatcttcggctacggaagccagggtcacgctcatgcactaaatttaaa

SEQ ID NO: 208910 - DNA, 241 bp, Unknown
  Bacterial polypeptide expressing nucleotide sequence isolated from the Sargasso Sea
atgagagtttattatgacagagatgcagacattaatctaattaaaaataaaaaaatagttatagttggttatggtagtcaaggtcatgctcatgcaatgaacttaagggatacaggaataaatgatttggcaatagccttaagagaaggttctccttcgcgtgaaaaagctacaaaagcaaactttaaagttatgacacctgcagaggcttcttcgtgggctgacattttaatgattttaa

SEQ ID NO: 208911 - DNA, 256 bp, Unknown
  Bacterial polypeptide expressing nucleotide sequence isolated from the Sargasso Sea
tatggtgaaataccaatctggaccaagaattataaataaagaggaaaccaaaaaaagaatgaaggaagtattgtctgatattcaatctggaaaattcactaaagagtggatggatgaatgtaaaaatggtcagaaaaactttttagcaactagagctaagttagcagagcattctgtggaaaaagttggtgctgaacttagagctatgatgccatggattggcaagaaaaaactagttgacagtgataaaagttag

SEQ ID NO: 208912 - DNA, 196 bp, Unknown
  Bacterial polypeptide expressing nucleotide sequence isolated from the Sargasso Sea
atgagcaccaacgacctgccccagaccaagatcgccgtcatcggctacggcagccagggccgcgcccacgcactgaacctgcgcgaatccggcttcgacgtggtggtaggcctgcgcccgggcggcccgaccgaggtcaaggcgcaggccgacggcttcaccgtgaaagcaccggccgaagcgggaaggacgccga

SEQ ID NO: 208913 - DNA, 99 bp, Unknown
  Bacterial polypeptide expressing nucleotide sequence isolated from the Sargasso Sea
gatggccacgctgtactacgacaccgacgctgacctgggcctgctcagcggtaagaccgtggcgatcattggctatggctcccaaggccatgcccatgc

SEQ ID NO: 208914 - DNA, 163 bp, Unknown
  Bacterial polypeptide expressing nucleotide sequence isolated from the Sargasso Sea
ttttgctagagagtggatgttagagaataaaattggtcaaataggttttagagccgtacgatcaagagaatctgagcatcctattgaagaagttggaaggaagttaagaggcatgatgccttggatatctgaaaataaactagttgataaagataaaaattag

SEQ ID NO: 208915 - DNA, 109 bp, Unknown
  Bacterial polypeptide expressing nucleotide sequence isolated from the Sargasso Sea
tatgaaaacttattacgataaagatactaataaagaattaattagagataaaaaagtagcaatttttggatatgggagccaaggtcatgcacacgcattgaatcttaaa

SEQ ID NO: 208916 - DNA, 294 bp, Unknown
  Bacterial polypeptide expressing nucleotide sequence isolated from the Sargasso Sea
tttgtctaagatttactacaacaaagatgcggatataaaaatcataaagaaaaaaaccatcgctatcatcggttacggtagtcagggtcacgcccacgcccgaaatctgcatgacagtggggtgaaagttatggttggccttcgaaaaaatagtgccttctggaaacgagctgaaaaagatggtctcagggtggtcactgtccctgaagccgccaaacaggcggacattatgatgatcctcattcccgatgacaaacaacgggagatgtacgataacgatattgcccctcattt

SEQ ID NO: 208917 - DNA, 119 bp, Unknown
  Bacterial polypeptide expressing nucleotide sequence isolated from the Sargasso Sea
gatgtattacgacaaggacgccgatctcgggctgctcagcgacaaaacggtcgctgtaatcggatacgggagccaaggacacgcccacgcgctcaaccttcacgacagcggtgtcaagg

SEQ ID NO: 208918 - DNA, 196 bp, Unknown
  Bacterial polypeptide expressing nucleotide sequence isolated from the Sargasso Sea
ggcccgcatgaagacattctggaagagatccaggacggcacctttgcgcgcaactggatcgccgagaacgaggccggcaagccgcaatacgaggcctggctgaaggcggaccgcgagagccagatcgaacaggtgggcgctcgtctgcgcgaacgcatggcctggctgaacacgcccaaggcagaagcggcctgat

SEQ ID NO: 208919 - DNA, 280 bp, Unknown
  Bacterial polypeptide expressing nucleotide sequence isolated from the Sargasso Sea
ttttcagctgaatttggggattacgttagtggtcctaaagtcatcaattccgatacaaaagaagaaatgcgagcaattttaaaacgtattcaatcaggagaatttgcaaatgaattcatgtctgattgcagagaaagcaatgatgggaaaggagggcctaggatgaaagaatatcgtcaacagacctctgaacattctattgaaaaagtaggatctgaattacgagctatgatgccctggatagcacaaaataagatagtagataaagctaaaaattaaa

SEQ ID NO: 208920 - DNA, 250 bp, Unknown
  Bacterial polypeptide expressing nucleotide sequence isolated from the Sargasso Sea
gatggcggcaaaggtatattacgataaagatgcggatagttcatatattgcagataaaactgttgcaataattgggtatggtagccaaggacatgctcatgctttaaacatgaaagacaatggtgtaaaagttattattgggttgtatgaaggaagttcaagttggtcaaaagctgaagatgatgggtttgaggttatgactacctctgaagctacagaaaatgctgatattataatgatgctcttacct

SEQ ID NO: 208921 - DNA, 106 bp, Unknown
  Bacterial polypeptide expressing nucleotide sequence isolated from the Sargasso Sea
tatgaaagtatattacgatcacgattgtgatataaatcttttaaagaaaaaaaatatagtcattcttggatatggtagtcaaggtcatgctcacgctttaaactaa

SEQ ID NO: 208922 - DNA, 460 bp, Unknown
  Bacterial polypeptide expressing nucleotide sequence isolated from the Sargasso Sea
aatgaagaattactttaatagtctatcatttagagaaaaacttatgcaattaggtaaatgtcggtttatggactcgtctgagtttcaaaatggtgttgattttctaaaatataaaaaaattgctattgtaggatgcggtgcccaggggttacatcaaggattgaatatgagagattctggtttagacatatcctatgctttaagacaatcatcaatagactctaaaagacagtcttttataaatgcatcttcaaatgatttcaatgttggaaattttgatgaaataataccaaattctgatttagttataaacctaactccagataaaaatcatactcctgtggttgaacaacttatgccaataatgaaaaaaaattcaatattatcgtactctcacggattcaatattgtagaagaaggaattaaagtatcgagaagatataactgtaataatggttgc

SEQ ID NO: 208923 - DNA, 1231 bp, Unknown
  Bacterial polypeptide expressing nucleotide sequence isolated from the Sargasso Sea
atggaatttacagtagtaagtattattgttttttgtggaataacaatgtgtttagtgctcttgctaagcctagcagagaagaagctcattccgcagggtgatgtgtcaatcttaattaatgatgagccagataaagcaattaatgtaggtgctggcggcacattattgggagccttaagcgggcaaaaagtatttttaccatctgcatgcggtggaggtggaacctgcgcgatgtgcaagtgtcaggtctttgaaggtggtggagatatactacctactgaaaccagtcatattagtaggccagaagcgaaagagagctggcgcctagcttgccaggttaaagtaaaagaaaatatgaagattcatgtccctgacgaggttttcagtgtgcgcaagtgggattgtacagtgaaatcaaataccgatgttgcgacttttataagagagtttgttttagaattaccacctggagaaaaccttgattttgaagcaggtggatatattcagattgatatcccagagtatcatgatctaggattcaaggggtttgatattgataaagaatatcacgaggattgggataagtataacatatggggtttagttgcaaataatgatgagcctgaatttcgtgcctactctatggccaatcacccagctgagggtaacaaggtaatgttaaacgttcgtatagcgacaccgcctcctgccctctggaatgatgttcctcctgggattgcctcatcatatatatatagtttaaaacctggagatccggtgaccatatctggtccattcggagagttttttattaaagacacagatcgtgaaatggtttatataggtggtggagctggaatggccccgatgagatcgcatttgtttcacctttttcacacattgaagaccggaaggaaggtttctttttggtatggagctagatccttaagagaaatgttctacgatgatgagtttaaaagaattgagaaagaatttccaaattttagttatcatgtcgctctatcagagcctctccctgaagataattggactgggcctactggttttattcaccaagttgcgcatgacaactacctaagtaaccacgatgatccaacagaaatagagtattacatgtgtggtccccctccgatgatcaaagctgttgaggatatgcttgatgagcttggtgttgaaaaagagatgatagcatttgatagttttggctagg

SEQ ID NO: 208924 - DNA, 216 bp, Unknown
  Bacterial polypeptide expressing nucleotide sequence isolated from the Sargasso Sea
aagaaaccaaaaaaagaatgaaagaagttttagcagatattcagtctggtaagtttactaaagattggatggatgagtgtaaaaatggacaaaagaacttcttgaaaactagagaaaaattagcagaccatccggttgagaaagtaggagcggtgctccgggctatgatgccatggatttctaagaagaaacttgtagatagtgataagaaatagt

SEQ ID NO: 208925 - DNA, 163 bp, Unknown
  Bacterial polypeptide expressing nucleotide sequence isolated from the Sargasso Sea
atggctaattatttcaacaccctgtcacttcgccagcagttagatcagcttggccgctgccgtttcatggcacgcgacgaattcgctgacggttgtcagttcttaaaaggcaagaaaattgtcattgtaggctgcggcgcgcagggccttaaccaaggctgaa

SEQ ID NO: 208926 - DNA, 217 bp, Unknown
  Bacterial polypeptide expressing nucleotide sequence isolated from the Sargasso Sea
gaagagacaaaaaaaagaatgaaagaagttttagctgaaatccaatctggtaaatttacaaaagaatggatggacgaatgtaaaaatgggcaaaaaaacttccttgcaacaagagctaaattggcagaacattctgttgaaaaagttggagcagagcttagagctatgatgccatggatctccaaaaagaaattagttgatagtgacaagaaataga

SEQ ID NO: 208927 - DNA, 303 bp, Unknown
  Bacterial polypeptide expressing nucleotide sequence isolated from the Sargasso Sea
aattaattgtagatatgattcaaagatatggaatcaatggaatgtggagacgtgtttcagaaactgcaagatatggtggacttacaagaggcccaatggtcatgacatctgatacaaaagaaaacatgaaaaaagttctaacaatgattcaagatggaacatttaacaaagaatggattgacaattatcaaaatgaaggcaaggctgcatttgataaatacatgaaagacttggatggtcatcaaatcgaaactgtaggaaaacagatgagaaaaatgatgtggcctgactctactgaataaa

SEQ ID NO: 208928 - DNA, 1171 bp, Unknown
  Bacterial polypeptide expressing nucleotide sequence isolated from the Sargasso Sea
atgacaagaaaaaagccacgtatattaaataaaatttatgctcttgaagatcttgaagttcacgcaaaaaaacatcttccaaaacctgtttttggatatgtagctggtggagctgaaagaaaccatacactacgcaataacgctgaagattttgcaaattataagtttgtgccaaatattcttcgaaatgtgtctaagcgatctacgaaaactgagatatttggtaggcaatgggatgctccttttggtatttcacctatgggtgtgagtgcgcttgccgcatacagaggagatattgttttggctgatgcagcacaaaaaatgaatatcccaatggttatcagtggctcatctttaattccaatggaggaaatcattaagttagcgcccgggacatggtttcaggcatatcttcctggagagcatgataaggttgaaaatcttgttttacgggtaaaaaaagcaggctttgagacgctcgttttaactgttgatgttgcggttttggcagggagagagaataatcttcgaaatggtttttcgacgccactcagaccttcatttagtttactttatcaaggcttaacacacccaaattggtccatgaatacttttctgaaaacgatatttaaacatggcatgccccactttgaaaattttctagcggaaagaggtgagcctgtgttttctgcatcaataaacagagacttcggtaaaaggtcaaatctaaactgggagcacttgaagcaaattagaaaactctgggatggtaatttaattgtaaaaggtattctgaataagggagacactctcaaagctatcaatttaggtgcagatgctattataatttcaaaccatggtggtcggcagctagactcggcgatatcctcaattaaagccctagaaaatattaggccgcatgtaaaaggtgactgcaaattattcgtagatagcggctttagaaggggtactgatataattaaagcacttgctttaggagccgatttcgtctttattgggagaccctttctctatgcggcttcaatagccggtatagctggcgttacacacaccattaatttattgaaagaagaaatagacagagatatggcgcttctaggggtaaatgaaatcgatgagttgggcctcgaacttcttcaaaaatattaga

SEQ ID NO: 208929 - DNA, 170 bp, Unknown
  Bacterial polypeptide expressing nucleotide sequence isolated from the Sargasso Sea
aatgcagaaaattctaaaagatattcaagatgggactttcgctaagaattttgtagaagaatgcgatagaaataagcccttaatgacaaaattaagagaagagaactcaaaacatgaaattgagaaagtaggtaaagggttgcgctctatgttcagttggctgaaataaa

SEQ ID NO: 208930 - DNA, 382 bp, Unknown
  Bacterial polypeptide expressing nucleotide sequence isolated from the Sargasso Sea
atgtcatctccaaagaacttagaatacaaaaaaacatcatttttaagcaaatcaaacagctcgtttattgaagaaatgtatataaaatacattgaaaaagatccttctttgccagctagttgggaaaattatttcaatactttaaatgaagatttaaatttaattacaaaagaaattgaaggaccaatctggaaaaaaaataaaaaaaaaattacttcaaaaacaaacattcaaagtactgaaaaaattgaaagtactgaaaatattgaaaaatataaagctgaatcaattaaagctatagcattaattagagcatatagaatcagaggtcatcttattgcaaatcttgatccacttggtttaatggaaagaaaatatcttc

SEQ ID NO: 208931 - DNA, 106 bp, Unknown
  Bacterial polypeptide expressing nucleotide sequence isolated from the Sargasso Sea
aatgaaggttttttatgaaaaagacgcagacttaaagttaataaaaaataaaaaggttgcgattattggttatggttcacaaggccatgctcatgcaaataattaa

SEQ ID NO: 208932 - DNA, 307 bp, Unknown
  Bacterial polypeptide expressing nucleotide sequence isolated from the Sargasso Sea
atgttttatgaaaaagatactgatgtaaatttaattaaggataaaaaaattgcaatttttggttatggtagtcaagggcatgctcatgcattaaatttaaaagatagtggagtaaatgaagtagttgttgctttaagagaaggttcttcaagtattaaaaaggcagagtcaaaaggacttaaagttatgaatttgtctgacgctgcagaatgggcagatgttgtgatgatattaactccagatgaattacaagctcaaatttacaaaaaccatatgaacaaagagctaaagaaggaacaagtatagc

SEQ ID NO: 208933 - DNA, 250 bp, Unknown
  Bacterial polypeptide expressing nucleotide sequence isolated from the Sargasso Sea
tatgcaggtttattacgataaagatgcaaatatagatattatcaaggataaaaaggtagtaattgtcggctatgggtctcaaggccacgctcacgctaacaatcttaaggattccggagggaatgtaacggtagccctaaggaaagaatcatcctcttgggcaaaggcagaagcagccgggttaaatgttcaagaagtatctgaggctgtgcaagatgcagatatggtaatgattcttatgcctgatgag

SEQ ID NO: 208934 - DNA, 361 bp, Unknown
  Bacterial polypeptide expressing nucleotide sequence isolated from the Sargasso Sea
atgttttatgaaaaagatacagatgtaaatttgattaaggacaaaaaagttgcaatttttggatatggaagtcaaggacatgctcatgctcttaacttaaaagatagcggtgttaaagaagttgttgttgcgctaagagatggatctgcaagcaaaacaaaagctgagtcaaagggattaaaagttatgaatctttcagatgctgctgaatgggctgatgtagttatgattttaactcctgatgaattacaagctacaatttataaaaatcatattgaacaaagagtaagagaaggaacttcaattgcttttgcacatggattaaatattcattatgatttaatcaaagcaagaaaagatt

SEQ ID NO: 208935 - DNA, 165 bp, Unknown
  Bacterial polypeptide expressing nucleotide sequence isolated from the Sargasso Sea
aatgaagatatattatgacgaagatgcgaatcttgaaataattaaaaaccttaaagtcacaattattggctatggttcccaaggtcatgcacatgcaaataacctcagagactctggagttgatattacagttggtctaagagaagggtcaagctcttggaaaaa

SEQ ID NO: 208936 - DNA, 245 bp, Unknown
  Bacterial polypeptide expressing nucleotide sequence isolated from the Sargasso Sea
aatgaaagtatattacgaaaaagatgctgacttgaatttagtcaaaacgaaaaaaattgctgtatatggttatggcagtcaaggtcatgcccatgcgttaaatttaaaagattctggtgccagcaatgttgtagtggctttaagagatggttcctcaagcgcaaaaaaagcagaagccgaaaggtttaaagtaatgtctatgtctgatgcagctgaatgggctgatataatgatgatgttaatac

SEQ ID NO: 208937 - DNA, 253 bp, Unknown
  Bacterial polypeptide expressing nucleotide sequence isolated from the Sargasso Sea
atgcatcgggttctgtataaaaaattagaaatagaaagaaggagaaaaatggcaaaattatattatgacaaagacattgatgatcaaatattaagaaataaaacaatttctgttataggttatgggtctcaaggacatgcacatgctcaaaatctaaaagattctggctttaatgtgattattgggctttacgaaggctcaaaatcaaaagatcaagctgaacatgatggttttgaagtttatagcatttctg

SEQ ID NO: 208938 - DNA, 205 bp, Unknown
  Bacterial polypeptide expressing nucleotide sequence isolated from the Sargasso Sea
aatgtattatgaaagcgatatagataaaggattaattaaatctaaaaaaattgctgttcttggttatggtagccaaggacatgctcattctttaaaccttaaagattcaggttttgatgtggtagtcggtttatatgaaggaagcaaaagtaaagaaaaagcagaaacagcaggacttaatgttctttcaaattctgaagcagtg

SEQ ID NO: 208939 - DNA, 306 bp, Unknown
  Bacterial polypeptide expressing nucleotide sequence isolated from the Sargasso Sea
aatgagagtctattatgatagagatgctgatattaatttaattaaggataaaaaaattgtaattgtgggatatggaagtcaaggacatgctcatgcaatgaatttaagagattctggaattgataatgttgctattgctctaagagaaggttcgctttctagaaaaaaagctgagcaagctggatttaaggtaatgtctccttctgaatctgcatcttgggcagatatcattatgatgttaactccagacgaattacaatcagagatttataataatgaaattgcagcaaatataaaagatggcac

SEQ ID NO: 208940 - DNA, 364 bp, Unknown
  Bacterial polypeptide expressing nucleotide sequence isolated from the Sargasso Sea
atgaaaatatattatgacgaagacgcaaagatagaaattattaaagatatgaaagtttctatcattggatatggatcacaaggacatgcacacgcaaataatctgaatgattcaggggtagatattacagttggtcttagagaaggttcttcatcgtggaaaaaagctgaagatgcaggtttaaaagttaaatctgtttctgattcagtcactgatgcagatatggttatgatcttagcgcctgatgagtttcaaaaaggcatttatgagaatcaaattaaacctaacctaaaaccaaatgccattctgggttttgcacatggatttaacaaacactttgaaaaaatcatacctgaaaaaggaa

SEQ ID NO: 208941 - DNA, 193 bp, Unknown
  Bacterial polypeptide expressing nucleotide sequence isolated from the Sargasso Sea
atgttttatgaaaaagatgcagatgtaaatctgattaaaagtaaaaaagttgcaatctttggttatggtagtcaaggacatgcacatgcattaaatttaaaagatagtggtgttaaagaaatagttgtagcgcttagagaaggttcttctagtgctgcaaaagcagaatcaaaaggattaaaagttatgaact

SEQ ID NO: 208942 - DNA, 124 bp, Unknown
  Bacterial polypeptide expressing nucleotide sequence isolated from the Sargasso Sea
tttgcgcacgggttcaatatccattttggcaagatcaaacctactgatgatattagcgtagttatgattgcaccaaaaggacctggacacactgtaagaagcacatatttgtctggaggaggag

SEQ ID NO: 208943 - DNA, 313 bp, Unknown
  Bacterial polypeptide expressing nucleotide sequence isolated from the Sargasso Sea
atgaaaacttattacgataaggatacaaatatagatttaattaaaaataaaaaagtagctatttttggttatggtagtcaaggtcacgctcacgcattaaatttgaaggatagtggagtaaaagaagttgtagtggctttaagagagggatcttcaagtatcaagaaagctgaaagcgctggattaaaagtaatgtctctatctgatgcagcagcttgggcagatgttgtgatgatgttaacaccagatgaacttcagtcagagatatataaaaatcatattgagcaaagaatgaaagaaggaacaagtttag

SEQ ID NO: 208944 - DNA, 253 bp, Unknown
  Bacterial polypeptide expressing nucleotide sequence isolated from the Sargasso Sea
atgaagatattttatgagaaagatacaaacacagatttgattaaagataaaaaaattgcaatttttggatatggtagccaaggacatgctcatgcacttaatttaaaagatagtggtgttaaagaagttgtagttgccttaagagacggatctgcaagtaaagtaaaagctgagtcaaaagggcttaaggttatgaatttatcagatgctgcagagtgggctgatgtagttatgattttaactccgagatgaa

SEQ ID NO: 208945 - DNA, 239 bp, Unknown
  Bacterial polypeptide expressing nucleotide sequence isolated from the Sargasso Sea
aatgaaaatattttatgagaaagatacaaattcaaatttaattaaagataaaaaaatagcaatatttggttatggaagtcaaggacatgctcatgcactaaatttaaaggatagcggagtaaaagaagtagttgtagctttaagagatgggtctgctagcaaaataaaagcagagtctaaaggacttaaagttatgaatttatctgatgctgcagaatgggctgatgtagttatgattt

SEQ ID NO: 208946 - DNA, 220 bp, Unknown
  Bacterial polypeptide expressing nucleotide sequence isolated from the Sargasso Sea
atgaaaatgttttatgaaaaagatacggatgtaaatttgataaaaaataaaaagattgcaatctttggctatggaagccaaggtcatgcacacgcacttaatcttaaagacagtggagtaaaagaagtggtagttgctcttagagatggttctgctagcaaagcaaaagcagaatcaaaaggaaaaaaagttatgaatttatctgatgcggcagaatggg

SEQ ID NO: 208947 - DNA, 355 bp, Unknown
  Bacterial polypeptide expressing nucleotide sequence isolated from the Sargasso Sea
aatggcatattttgaatgtttgcacgaagtaaaactgattgttgaccttctttacgagggggggatggcaaatatgagatattctatctcaaatactgctgaatatggagattattcaagaggaccgagacttatcactgatgaaactaaaaaggaaatgaaaaaaatattgtcagaaattcaatctggtcaatttgccaaagaatggatggatgagcatagatctggtcaaattaaatttaaaaaaatgagaaaagatcaaagtgtgcaccctattgaggctgttggagaaaaattaagaactctaatgccttggattgctgaaggtaaaatggttgataaatcgaaaaactag

SEQ ID NO: 208948 - DNA, 289 bp, Unknown
  Bacterial polypeptide expressing nucleotide sequence isolated from the Sargasso Sea
catgaaaacttattacgataaagatactgataaagatataattaaaaataaaaaagttgctatcttcggttatggaagtcaaggtcatgctcatgcattaaatcttaaggacagcggtgtaaaagaagttgtagttgctttgagagaaggatcgtcaagcataaaaaaagctgagagtgcggggttaaaagttatgactttatcagatgcagctgcatgggctgatgtcgtaatgatgttaacacctgatgaactacaatcagaaatttataaaaaccatatcgagcaa

SEQ ID NO: 208949 - DNA, 128 bp, Unknown
  Bacterial polypeptide expressing nucleotide sequence isolated from the Sargasso Sea
aatgttttatgaaaaagatactaatgtagatttaataaaagataagaaagtagcaatttttggctatggaagccaaggacatgcgcatgcacttaatctaagagatagtggtgttaaagaagttgtgg

SEQ ID NO: 208950 - DNA, 400 bp, Unknown
  Bacterial polypeptide expressing nucleotide sequence isolated from the Sargasso Sea
atgaattactttaatacgctgccccttcgcctccaacttgagcaactcggcaaatgccgcttcatggagcaatctgagtttagtgacggtgtgaataagctcaaaggcgccaaaatagtcatcgtggggtgcggagcgcaagggttaaatcaaggccttaatatgcgtgatagcggtctagatatttcgtttacattaagagaggcagccatttcggaaaaacgggcttcatggaaaaatgccactgaaaatggttttttggtgggaacgtaccaagatctcgtcccgtcagctgatctagtgttgaacttaacccccgacaaacagcacaccgccgtagtgaatcaaataatgcctctcatgaaaaaaggtgcatgcttagggtattctcacgggtcaa

SEQ ID NO: 208951 - DNA, 126 bp, Unknown
  Bacterial polypeptide expressing nucleotide sequence isolated from the Sargasso Sea
catgcaagtttattacgacaaagatgcagacctagaaataattaagaacaaaaaagtagtgatagttggttacggttctcaaggccatgcccacgctaataatcttaaagattctggtggaaatgt

SEQ ID NO: 208952 - DNA, 141 bp, Unknown
  Bacterial polypeptide expressing nucleotide sequence isolated from the Sargasso Sea
aatgttttatgaaaaagacgcagatgtagatttaattaaaaataaaaaaatagctatttttggttatggtagccaaggacatgcgcatgctttaaatcttaaagatagcggtgttaaagaaattgttgtagcgcttagaga

SEQ ID NO: 208953 - DNA, 281 bp, Unknown
  Bacterial polypeptide expressing nucleotide sequence isolated from the Sargasso Sea
gatgtattatgaaaaagacactgatgttaatttaattaaagataagaaagttgcaatttttggttatggaagccaaggacatgcacatgctttaaatttaagagatagtggagttaaagaagttgttgtagcgcttagagatggatcttctagcgcagctaaagctgagtcaaaaggattaaaagttatgaatctttcagatgcagctgagtgggctgatatagttatgattttgacacctgatgaaattgcagcatctatatataaaaatcacattgaac

SEQ ID NO: 208954 - DNA, 304 bp, Unknown
  Bacterial polypeptide expressing nucleotide sequence isolated from the Sargasso Sea
atgaaaacttattacgataaagatactaatctaaatttaataaaagataaaaaggtagccatctttggttacggaagccagggtcatgcacatgctttaaacctaaaagatagtggtgtcaaagaagttgtagttgctttaagagagggatcctcaagtattaaaaaagcagaaagtgctggattaaaagtaatgtcattatctgatgctgccgcttgggcagatgtcgtaatgatgttaactcctgatgagcttcagtctgagatttacaaaaatcatattgagcaaagaagaaagagggaac

SEQ ID NO: 208955 - DNA, 151 bp, Unknown
  Bacterial polypeptide expressing nucleotide sequence isolated from the Sargasso Sea
gctgaagtatttaaataatcaaaaggagataattatgaaaatgtattatgaaaaagacactgatgtaaatttaattaaaaataagaaagttgcaatttttggttacggtagccaaggacatgctcatgctttaaatctaagggatagtgga

SEQ ID NO: 208956 - DNA, 370 bp, Unknown
  Bacterial polypeptide expressing nucleotide sequence isolated from the Sargasso Sea
aatgttttatgaaaaagatactgatgctaatttaattaaagataaaaaaatagcgatttttggttatggaagtcaaggacatgctcatgctcttaatctaaaagatagtggagtaaaagaagttgtagtagctttaagagaagggtcttcaagcaaaacaaaagcagagtcaaaaggcttaaaagttatgaacctatctgacgctgcagagtgggcagatgtagttatgattttaacacctgatgaattgcaagctacaatttataaaaatcatattgaacaaagagttaaagaaggaacctctatagcttttgcgcatgggttaaatattcactatgatttgataaaagcaagaaaagatttagatgta

SEQ ID NO: 208957 - DNA, 937 bp, Unknown
  Bacterial polypeptide expressing nucleotide sequence isolated from the Sargasso Sea
gaagagtatttaagaggttttggagttccaacttttattgctgttcatccagaaaatgaccttaatggaataggttttgatgcagctaaagcgtatgcagtctctcttggctctaataaagcaggagtactagaatcatcttttgttgctgaggtaaaatctgatttaatgggtgaacaaacaatattatgtggaatgcttcaaacaggctcaatattatgttttaatagaatgaaagaactaggaattgatccaaactattctgcaaagcttatccaacatggatgggaaactattacggaatcacttaaacatgggggaataactaatatgatggatagactgtcaaatcatggaaaagttaaagtatttgaattatctgaagaattaaaattaatattagctccactgttcattaagcatatggataatgttttatctggtagtttttctgagactatgatgaaagattgggaaaatgatgataaagagcttttaagctggagagagcaaacaagtaaaactgattttgaaatgacagagcctacttcaaatgaaatttcagaacaagaatactttaataatggactcttaatgatagcaattgttaaagctggtgtagagttagcctacgagacaatggttgaagcaggaataaaagaagaatctgcatattatgaatctttacatgagctacctttaatagccaacttaatatctagaaaaaaattatatgagatgaataatataatttcagatactgcggaatacggatgttatttgtttaacaatgaggcaatacctcttctttctaaattttttgataaagtagaaactgatataattggttcggaatcaattagtaatagtacagactctgttgataataaaaaattaattgagattaaacgaacaatcagataccactcaatttgaa

SEQ ID NO: 208958 - DNA, 194 bp, Unknown
  Bacterial polypeptide expressing nucleotide sequence isolated from the Sargasso Sea
aatgaaaatgttttatgaaaaagatactgatgcaaatttaataaaggataaaaaaattgctatctttggatatggtagccaaggacacgcacacgctttaaacctaaaagatagtggagtaaaagaagttgttgtagctcttcgagaagggtcttcaagtattgcaaaagcagaatctaaagggttaaaagtta

SEQ ID NO: 208959 - DNA, 142 bp, Unknown
  Bacterial polypeptide expressing nucleotide sequence isolated from the Sargasso Sea
atgaagatgttctatgaaaaagatacagacgtaaatcttattaaagataaaaaaattgcaatatttggttacggaagtcagggtcatgcgcacgctttaaatttaaaagatagtggagttaaagaagtttgttgtagcttga

SEQ ID NO: 208960 - DNA, 237 bp, Unknown
  Bacterial polypeptide expressing nucleotide sequence isolated from the Sargasso Sea
tttaattaaaaataaaaaaatggctatttttggttatggaagccaggggcacgctcatgcactcaatctaaaagaaagcggagttaaagagatagtggttgctttaagggaaggatcatcaagtgttgctaaagcagagtcaaaagggttaaaagtaatgaatttatctgaagcagctgcttgggcagaagttgttatgatattaactccagacgaattacaagctgaaaattataa

SEQ ID NO: 208961 - DNA, 484 bp, Unknown
  Bacterial polypeptide expressing nucleotide sequence isolated from the Sargasso Sea
ggagagaagaacaagtaagactgattttgaaaagacagatccaacatcagatgaaatttctgagcaagaatattttgataatggaattttaatgatagcacttgtaaaggctggtgtagagttagcctacgagacaatggttgaagcaggtataaaagaagagtctgcatactatgaatctcttcatgaacttccgcttatagctaatctagtttccagaaaaaaattatacgaaatgaataatattatttctgatactgcagaatatggatgctatctttttaataatgatgcaattccacttctctctaaattctttgataaagtagaagctgatatgattggttcagactcaataagtaagagttctagctctgttgataataaaaaattaattgagattaacgaaacaattagataccactcaattgaaataattggtgatgaacttaggcagtacatgacttcaatgaaatctgtttag

SEQ ID NO: 208962 - DNA, 154 bp, Unknown
  Bacterial polypeptide expressing nucleotide sequence isolated from the Sargasso Sea
atgaaaatgttttatgaaaaagatacagatgtaaatttaattaaaaataagaaaatagcaatctttggctatggtagccaaggacatgctcatgcattaaatttaaaagatagcggggtaaaagaagtagtggtcgctctcagagatgggtcag

SEQ ID NO: 208963 - DNA, 560 bp, Unknown
  Bacterial polypeptide expressing nucleotide sequence isolated from the Sargasso Sea
aatggaaaattactttaacactctatcatttagagagaaactaatgcaattaggaaaatgtaggtttatgagctcttctgaatttagtaatggggtggaatttctcaagaataaaaaaatagctattgttggttgtggtgcacaaggtttacatcaaggtcttaatatgagagattctggtcttgatatttcatacgctcttaggcagtcctctattgattcaaaaagacaatcatttgttaatgcaagtacaaataattttaatgttggtaatttcgaagaaataataccaaattctgacttggtaataaatttgacaccagataaaaaccatactccagttgttgaacaactcatgccattaatgaaaaaaaactctattctctcctattcacacggatttaacatagtagaggagggtattaaagttagagacgatataaccgttattatggttgcaccaaaatctccaggatctgaggtaagagaagagtacttaagaggttttgggagtcctacacttattgctgttcatcctgaaaatgatgctaatggaattg

SEQ ID NO: 208964 - DNA, 259 bp, Unknown
  Bacterial polypeptide expressing nucleotide sequence isolated from the Sargasso Sea
aatgttttatgaaaaagatgcagatgtaaatctaattaaaactaaaaaagttgctatttttggttatggaagtcaagggcatgctcacgcattaaatttaaaagatagtggagtaaaagatattgttgttgctttaagagaaggttcgtcgagtgcagcaaaagcagaatcaaaaggattaaaagtaatgaatttatcagatgccgctgagagggctgatgtagtaatgattttaactccagatgagttaacaagcaga

SEQ ID NO: 208965 - DNA, 154 bp, Unknown
  Bacterial polypeptide expressing nucleotide sequence isolated from the Sargasso Sea
atgacacaactcttttacgacacagatgcagatctaagccttttaaataacaaaacaatagcgataatcggatatggttcacaaggtcatgcacatgccttaaacctcaaggatagcggtatggatgtaattgtaggattgtataaagggagta

SEQ ID NO: 208966 - DNA, 94 bp, Unknown
  Bacterial polypeptide expressing nucleotide sequence isolated from the Sargasso Sea
atggcatactttgaaacccttcatgaagtaaaactaattgtagatttgatttatgagggtggaatagcgaacatgaactattcaatttcaaata

SEQ ID NO: 208967 - DNA, 332 bp, Unknown
  Bacterial polypeptide expressing nucleotide sequence isolated from the Sargasso Sea
aatgttttatgaaaaagatactgatgtaaatttaattaaaagtaaaaaaatagcaatttttggttatggtagtcaaggacatgctcacgcacttaatttgaaagacagtggtgttaaagaagttgtagttgcgctaagagatggatcgtcaagcaaggcaaaagcagagtctaaaggacttaaagttatgaatttgtcagatgccgcagagtgggcggatgttgtaatgattttaacaccagatgaattacaagctacaatttacaaaaatcatattgagccaagagtcagaagaagaaacttcatcgcattcgcacatggattaaatattc

SEQ ID NO: 208968 - DNA, 855 bp, Unknown
  Bacterial polypeptide expressing nucleotide sequence isolated from the Sargasso Sea
tattgctgttcatccagaaaatgaccttaatggaataggttttgatgcagctaaagcatatgctgtctctcttggctctaataaagcaggggtactagaatcatcttttgttgctgaggtaaaatctgatttaatgggtgaacagacaatattatgtggaatgcttcaaacaggttcaatattgtgttttaatagaatgaaagaattaggagttgatccaaactactctgcaaagcttatccaacatggatgggaaactattacggaatcacttaaacatgggggaataactaatatgatggatagactgtcaaatcctggaaaagttaaagtatttgaattatctgaagaattaaaattaatattggctccattgttcattaagcatatggataatgttttatctggtagtttttctgagactatgatgaaagattgggaaaatgatgataaagagcttttaaactggagagagcaaacaagtaaaactgattttgaaatgacagagcctacttcagatgaaatttcagaacaagagtactttaataatggactattaatgatagcaatcgttaaagctggtgtagagttagcctacgagacaatggttgaagcaggaataaaagaagaatctgcatattatgagtctttacatgaactccctttaattgccaacttaatatctagaaaaaaattatatgagatgaatagtataatttcagatactgcagaatacggatgttatttgtttaacaacgaggcaatacctcttctttctaaattttttgataaagtagaaactgatataattggttcggattcaattagtaatagtacagactctgttgataataa

SEQ ID NO: 208969 - DNA, 366 bp, Unknown
  Bacterial polypeptide expressing nucleotide sequence isolated from the Sargasso Sea
aatgttttatgaaaaagacacagacgtaaatttaattaaaaaaaagaaaatagcaatctttggctatggaagccagggacatgctcatgcattaaatttaagagatagcggggtaaaagaagtagtagttgctcttagagatggatccgcaagtaaagcaaaagcagaatcaaagggattaaaagttatgaatttatcagatgctgctgagtgggccgatgttgtaatggttttaacaccagatgaattacaagctacaatttataaaaatcatatagaacaaagagtaagagaaggaacatcaatagctttcgctcacggtttaaatattcattatgatttaattaaagcaagaaaagacttaga

SEQ ID NO: 208970 - DNA, 295 bp, Unknown
  Bacterial polypeptide expressing nucleotide sequence isolated from the Sargasso Sea
attgcaaatatgaattattcaatttcaaatacagcagagtatggtgaatatacatctggccctagaattataaaaaaagaagaaactaagaaaagaatgaaagaagtattagacgatattcagtctggaaagtttactaaggaatggatggatgagtgtaaaaacggtcaaaaaaactttttaaaaactagagaaaaacttgcagaacatccagttgaaaaagttggtactagactaagagcaatgatgccgtggattgctaagaaaaaattagttgatagcgataagaagtaga

SEQ ID NO: 208971 - DNA, 316 bp, Unknown
  Bacterial polypeptide expressing nucleotide sequence isolated from the Sargasso Sea
agatttaatttatgagggtggaattgcaaatattaattattccatatcaaatacagctgagtacggtgagtataaatctggacctagaataattaataaagaagaaacaaagaaaaaaatgaaagaagtattatctgatattcagtctggtaaattcacaaaagagtggatggaagaatgtaaaaacggccaaaagaacttccttgctacaagagcaaaattagcagagcattctgtagaaaaagttggtgcagaattaagagctatgatgccgtggattagtaagaaaaaactagttgatagtgataagagttaa

SEQ ID NO: 208972 - DNA, 190 bp, Unknown
  Bacterial polypeptide expressing nucleotide sequence isolated from the Sargasso Sea
atgagagtatattacgatagagatgcagatttaaatttaataaaggataaaaaaatatcaattgtaggatatggaagtcaaggacatgcccatgcaatgaatttgagagattctggaatagaaaatgtttcaattgcattaagagaaggttcaaattcaagaagtaaagcagagcaagctaattcaaagt

SEQ ID NO: 208973 - DNA, 173 bp, Unknown
  Bacterial polypeptide expressing nucleotide sequence isolated from the Sargasso Sea
aatgttttatgaaaaagatactaacgtaaatttaataaaagataaaaaagtagcaatttttggttatggaagtcaaggtcatgcacatgcacttaatttgaaagatagtggtgttaaagaagttgtggtagctttaagagaaggttcatcaagtattgaaaagctgaatctaa

SEQ ID NO: 208974 - DNA, 394 bp, Unknown
  Bacterial polypeptide expressing nucleotide sequence isolated from the Sargasso Sea
aatggttacaaaaattatatatgatgattcgatagaccaagatttaattaagtcaaaaaaagttactgtaattggatttggcagccaaggtcatgcccacgcacttaatctacatgaatcaggtgtggatgttactgttggattaagagagtcttctgaatcctttaaaagagcatctgatatgggattaaaagttaagaatgtagaagatgcgacttctggagcagatgtagttatgcttctattgcccgatcagctcatggcagatatatataacagtgatattgcaccgcatatgaaagatggctctacattgctgtttgcacatggatttaatatacattttggtgaaataattcctcgtgaagatatatctataggtatggtggcccct

SEQ ID NO: 208975 - DNA, 273 bp, Unknown
  Bacterial polypeptide expressing nucleotide sequence isolated from the Sargasso Sea
aatgaaaatattttacgaaaaagatacaaattcaaatttaattaaggacaaaaaaattgcaatattcggttatggtagtcaaggacatgcccatgcattaaatttaaaagatagtggtgttaaagaagtagttgtggctttaagagatggatctggaagcaaagcaaaagcagaatcaaaaggacttaaggttatgaatttatctgatgctgcagagtgggctgatgtcgttatgattttaactcctgatgaattacaagcagaaatttataa

SEQ ID NO: 208976 - DNA, 388 bp, Unknown
  Bacterial polypeptide expressing nucleotide sequence isolated from the Sargasso Sea
atgttttatgaaaaagacactgatacaaatttaattaaaggtaaaaaaattgctatatttggatatggaagtcaaggtcatgcacatgctttaaatttgagggatagtggtgttaaagatgttgtagtagccttaagagatggatcatctagcaaatctaaagcagagtcaaagggattaaaagttatgaatctttcagatgcagcagaatgggcagatgttgttatgattttaactccagacgaactacaagcatctatatataaaaatcatattgagcaaagagtaagagagggtacttctattgcatttgcacatggactaaacattcattatgacttaatcaaagcaagaaaagatttagatgtatttatggtggctccataaa

SEQ ID NO: 208977 - DNA, 199 bp, Unknown
  Bacterial polypeptide expressing nucleotide sequence isolated from the Sargasso Sea
atgaaaatgttttatgaaaaagatacagacgtaaatttaataaaagataaaaaaatagctatttttggttatggaagccaaggtcacgcacatgcattaaatttaaaagatagtggagttaaagaagttgtggttgctttaagagatggatcatcaagtattcctaaagcagaatctaaaggtttaaaagtgatgaatt

SEQ ID NO: 208978 - DNA, 352 bp, Unknown
  Bacterial polypeptide expressing nucleotide sequence isolated from the Sargasso Sea
ggcctactttgagtgtctacatgaagtgaaattaattgttgatcttctatatgagggtggaatggcaaacatgcgatattctatctctaatacagcagagtacggcgattattctcgtggaccaagattaattactgatgaaacaaaaaaggaaatgaaaaaaattctctctgaaattcagtcaggtcaatttacaaaagaatggatgcaagagcataaaagtggtcaaacaaagtttaaggttatgagaaatcaacaagcagaacatccaattgaagcagttggtgaaaaattaagaacattgatgccatggatagcagaaggaaaaatggttgataaatctaaaaactag

SEQ ID NO: 208979 - DNA, 316 bp, Unknown
  Bacterial polypeptide expressing nucleotide sequence isolated from the Sargasso Sea
atgttttatgaaaaagatacagatgtaaatttaataaaaagtaaaaaagttgctatattcggatacggcagtcaaggacatgcgcatgctttaaatttaaaagatagtggggttaaagaagtagtagttgctttaagagatggatcatccagcaaagagaaagcagagtcaaaaggtttaaaggtaatgaatttatcagatgccgcagagtgggctgatattgtaatgatattaactccagatgaattacaagcatctatttacaaaaatcatatagaacaaagagtaaaagaaggaacttcagtagcttttgccc

SEQ ID NO: 208980 - DNA, 542 bp, Unknown
  Bacterial polypeptide expressing nucleotide sequence isolated from the Sargasso Sea
ggagttttcaaaaacaatgatggaagattggaaaaatggagatgctaatctattaaagtggagagctgaaactggagaaactgcttttgaaaaaacagaaccgactaatgaaccaattagagaacaagaattttttgacaacggagttttattagttgcactcgttagagcaggtgttgaacttgcttttgaaactatgattgatgctggaattaaagatgcttctgcctactatgaatcgttacacgaagcaccattaatagccaataccatagcaagaaaaaaactatttgaaatgaataggatcatttcagacactgctgaatacgggtgttacttatttgaccatgcttgtaagcctttattaagcgacttttttaatcaaatagagaaaaaacatattggaaatttatttagtaacaataacgatgccgacaatcaaaccttgattaaaataaacgacaccatcagaaaccatcctgtagaaataattggaaaagaattaagagcatccatgacagctatgaaaaaaatagtctaaa

SEQ ID NO: 208981 - DNA, 351 bp, Unknown
  Bacterial polypeptide expressing nucleotide sequence isolated from the Sargasso Sea
aatgttatatgaaaaagatgctcaagtagatttaattaaatcaaaaaaggttgctatctttggttttgggagtcaaggacatgctcatgcactaaatttaaaagacagtggagtaaaggaagttgttgttgctcttagagaaggatctacaagtaaaaaaaaagccgaagcacaagggcttagagtaatgtcgctttcagacgcggccgaatgggcagatattttaatgatgcttacccctgatgaattgcagtctaaaatttataaaaatcatatagaacaaagaatgcgacagggatctacactagcatttgcgcatggtttaaatatacattttaatttaattaacgc

SEQ ID NO: 208982 - DNA, 206 bp, Unknown
  Bacterial polypeptide expressing nucleotide sequence isolated from the Sargasso Sea
tgttgttgatgattccgtaaaagaaaatatgaaagaaatattatctcaaattcaagacggtacttttgctcgagaatggataagtgaaaatgatgaaggtcgaccttcttttaatcggttaagaaaagacaatgctgaccatccaattgaaaaagtaggaaaagaattaagagatatgatgacatttctcactgattctgattaat

SEQ ID NO: 208983 - DNA, 339 bp, Unknown
  Bacterial polypeptide expressing nucleotide sequence isolated from the Sargasso Sea
tatgaatgttctttatgaccgcgatgcaaaagaaggtcttattaaagagaaaaaggttgcgatcatagggtatggatcacaaggccatgcgcacgctttaaatctttctgaatctggagttaatgtttgcgttgggctcagaaaaaatggtgcctcatgggcaaaggccgaaaaggctgggatggtagtgaaagaagtacatgaagcagtaaggggcgcggacatagttatgctcttgatgcctgatgaaaccatttctactgtgtatctaaaacatattgagtctgagatgaaggaggggtcatgcttaggcttcgctcatgggtttaatattcatta

SEQ ID NO: 208984 - DNA, 300 bp, Unknown
  Bacterial polypeptide expressing nucleotide sequence isolated from the Sargasso Sea
aatgttttatgaaaaagacaccgacgtaaatttaattaaaaaaaagaaaatagcaatctttggctatggaagccaaggacatgctcatgcattaaatttgaaagatagcggtgtaaaagaagtagtggttgctcttagagatggttctgcaagtaaatcaaaagcagaatcaaagggattaaaagttatgaatttatcagatgctgctgagtgggctgatgttgtaatggttttaacgccagatgaattgcaagctaccatttataaaaatcatatagaacaaagagtaagacaaggaac

SEQ ID NO: 208985 - DNA, 280 bp, Unknown
  Bacterial polypeptide expressing nucleotide sequence isolated from the Sargasso Sea
aatgttttacgaaaaagatactgatgcaaatttaataaaggataaaaaaattgcaatttttggatatggtagtcaaggacacgctcacgctttaaacctcaaagatagtggagtaaaagaagttgttgtagctcttcgagaaggatcttcaagtattgcaaaagcagaatctaaaggtttaaaagttatgaacctttcagatgctgctgaatgggctgatgttgtgatgattttaactccagatgaattacaagcaactatttataaaaatcatattgag

SEQ ID NO: 208986 - DNA, 205 bp, Unknown
  Bacterial polypeptide expressing nucleotide sequence isolated from the Sargasso Sea
gatgaatttcaaaaaggtgttttggaaaaaagtataaagcctaacctggaaagtaatgcaattttagcttttgctcatggtttcaatatccatttcaaaaagattgtacctagtgagacaaatactgtaattatgattgcaccaaaggccccaggtcacacagttagaagcacttatttaaatggtggaggagttccatcgctaa

SEQ ID NO: 208987 - DNA, 622 bp, Unknown
  Bacterial polypeptide expressing nucleotide sequence isolated from the Sargasso Sea
cttggtggctcccaaaggacctggcccaacgctccgcaaccgctttgtcaaaggccaaggcattcccgccttggtgggcgtccatcaaactggtgaggccaacgccgaagaacacctgcaacgctggggaactgggattggctgcgctcgagccgcgttgatcccttcctcatttgccgaggaatgcgagacggatctctttggtgaacaagccattctgtgtggcggcgtcttggccttgatgcaggcgtcattcgagaccttgcaagatgcgggctactccgatgaagtcgcctacatcgagtgcatccacgaactgaagcaggtggtggaccttttgtacacccaaggcccagccgccatgcacaaagccatcagcaacacggcagaattcggtgccttcgtggccgcggaacgattggactcaaaagaacttcgaggtcaactccaagccctcctccaagacatccaaagcggcgctttcgcccaacgctttgccgaagacgccgaagccgggcacccttggttcaacgccaagaggtcagcccacgaagaccatgccattgaagccgcgagcgagaaagttcgccaaaccatgccttggttgaaggacgacgcatga

SEQ ID NO: 208988 - DNA, 133 bp, Unknown
  Bacterial polypeptide expressing nucleotide sequence isolated from the Sargasso Sea
aaaaatggctatgaaactttagttgaagcaggatatgaaccagagatggcatattttgaaacagttcatgaggtaaaattaattgttgatcttatttatgagggtggagttgcaaatatgtattattctattt

SEQ ID NO: 208989 - DNA, 280 bp, Unknown
  Bacterial polypeptide expressing nucleotide sequence isolated from the Sargasso Sea
gcgttattcgatctcgaatacggcggagtatggtgatgtgacccgcggaccccgcgtagtcacacctgaggtgaaggctcaaatgaaaaagattctcagcgagatccaatctggagagtttgcaagggagtggatggaggaaagtcgctccggcggcgccaatttccagggtttgcgtcagagaggccgggagcatcagattgaagcggtaggcgagggcctgcgggcaatgatgccctggattcaaaaaggcaaactggtcgacaagacgcgaaactga

SEQ ID NO: 208990 - DNA, 343 bp, Unknown
  Bacterial polypeptide expressing nucleotide sequence isolated from the Sargasso Sea
aatgttttatgaaaaagatacagatgttaatttaattaaaaataaaaaaatagcgatctttggatatggcagccaaggacatgcacatgctcttaatcttaaagatagtggagttaaagaagtagtggtcgctctaagagatgggtctgccagcaaaactaaagcagagtcaaaaggactgaatgttatgaatttatctgatgcagctgaatgggcagatgttgttatgattttaactccagatgaacttcaagctacaatttataaaaatcatattgaacaaagagttaaagaaggaacctctattgcatttgctcatggtttaacattcattatgatttaa

SEQ ID NO: 208991 - DNA, 379 bp, Unknown
  Bacterial polypeptide expressing nucleotide sequence isolated from the Sargasso Sea
atgttttatgaaaaagatacaaacgtaaatttaataaaaaacaaaaagattgcaatttttggttatggaagccagggacatgctcatgctcttaatcttaaagatagtggtgtaaaagaagtggtagttgctcttagagatggttcagctagtaaagctaaagctgagtcaaaaggattaaaagttatgaatttgtctgatgcagctgaatgggcagatgttgtaatgattttgactcctgacgagcttcaggcaacaatttataaaaatcatattgaacagcgtgtaagagaaggaacttcaatagcctttgcgcatggattaaatattcattatgacttaattaaagcaagaaaagatttagatgtatttatggtcg

SEQ ID NO: 208992 - DNA, 216 bp, Unknown
  Bacterial polypeptide expressing nucleotide sequence isolated from the Sargasso Sea
aatgaaaatgttttatgagaaagatactgatgttaatttaattaaagataaaaaaatagcaatttttggttatggaagccaaggacatgctcatgctttaaatctgagagatagtggagttaaagaagttgttgttgctttaagagaaggttcgtcaagtatagcgaaggctgagtcaaaaggtttaaaagttatgaatttatcagatgccgcaga

SEQ ID NO: 208993 - DNA, 280 bp, Unknown
  Bacterial polypeptide expressing nucleotide sequence isolated from the Sargasso Sea
tactcaatctcaaatactgcagagtatggcgagtatgtttcaggacctagaattataaataaagaagaaactaagaaaagaatgaaagaagtgctagaggacattcaatctggaaagtttacaaaacaatggatggatgaatgtaaaaatggccagaagaattttttaaagaccagagaagaattagcaaaacactctatagaaacagtcggtacaaaactaagagctatgatgccttggattggtaagaagaaattagtggatagtgataagaagtaaa

SEQ ID NO: 208994 - DNA, 121 bp, Unknown
  Bacterial polypeptide expressing nucleotide sequence isolated from the Sargasso Sea
atgcaagtctattacgataaagattgtgatctgagcatcatccagggcaagaaggttgccatcatcggttacggttcgcagggccatgcccacgcctgcaacctgaaagattccggtgtag

SEQ ID NO: 208995 - DNA, 319 bp, Unknown
  Bacterial polypeptide expressing nucleotide sequence isolated from the Sargasso Sea
aatgttttatgaaaaagatacagatgtaaatttaattaaagaaaaaaagatagcaatttttggttatggtagtcaaggacatgcacatgcattaaacttaaaagatagtggcgtaaaagaagtagtagttgctttaagagatggatcggcaagcaaagcaaaagcagagtcaaaaggattaaaagttatgaacttgtcagatgcagcagaatgggctgatgtagttatgattttaactcctgatgaactgcaagctactatttataaaaatcatattgagcaacgtgttagagagggtacatcaatagcttttgcgcat

SEQ ID NO: 208996 - DNA, 397 bp, Unknown
  Bacterial polypeptide expressing nucleotide sequence isolated from the Sargasso Sea
atgagagtttattatgatagagatgcagatattaatttaattaaagataaaaagattgttattgtgggttatggaagccaaggacatgctcatgctatgaatttaagagattctggaattgaagatgttgctattgcgttaagagaaggctctccatcaagaaaaaaagctgagaatgcaggatttaaagtaatgacaccttctgaatctgcttcatgggcagatatcattatgatgttaactcctgatgaattgcattcagagatttataataatgaaattgctgcaaatataaaggatggcacagccttagcttttgctcatggactgaatatacattttgatttaatcaaaccaaatgctaacatagatgtgattatgatggctccaaaaggtc

SEQ ID NO: 208997 - DNA, 763 bp, Unknown
  Bacterial polypeptide expressing nucleotide sequence isolated from the Sargasso Sea
tttgatttataagaaaatgattgagctaggatatgaatcagatttcagtataaaattaattcaaaacggatgggaaacaataactgaggaacttaaacacaatggtattaaaggaatgatgaataggttagatgattcatcaagatatgttgcgcataaactttctgatgaattaaaaaaaataatgacaccattatttgataaacacatgtctgatattttggatggaacattttctaatgatatgatgaaagactggataaataatgaccataaacttttgagatggagggaggatacaggaaaaagcaaatttgaattaaatagtgcaggatcaatgaaaatcaaaaatcaggaatacttcgataaggggattttaatggtttcatttgtaaaatctggtgttgaactcgctttcgaaactatggtgaataatggaattattgatgagtcagcttattatgaatcacttcacgaattaccattaattgctaacctagttgctagaaaaaagctatacgagatgaatagaattatatctgatactgctgaatatggttgttatttgtttaataattcttgtataccgttgctagaaaatttcatgcataaaattaaaaaacatcaaattggatcagtttgttcgattgaatttgataagaacgaattatcatcatttgataaaaaaacttattcccatccaattgaacatattggtgaaacgctcagaaataatatgaaaaacatgaaaaagttaatttaa

SEQ ID NO: 208998 - DNA, 151 bp, Unknown
  Bacterial polypeptide expressing nucleotide sequence isolated from the Sargasso Sea
tatgaaaacatattacgataaagatacaaataaagatttaattaaaaataagaaagttgctatctttggttatggaagccaaggtcatgcccacgctttaaatcttaaagatagtggtgttaaagaagttgtagttgctttgagagaggga

SEQ ID NO: 208999 - DNA, 254 bp, Unknown
  Bacterial polypeptide expressing nucleotide sequence isolated from the Sargasso Sea
aatgttttatgaaaaagatgcagatgtaaatctgattaagagtaaaaaagttgctatttttggctatggaagtcaagggcacgctcacgcattaaatttaaaagatagtggagtaaaagaaattgttgtagcattaagagaaggttcatctagcgcagcaaaagcagagtcaaaaggtttaaaggtaatgaatttatctgatgctgctgagtgggctgatgttgtgatgattcttacaccagatgaactacaag

SEQ ID NO: 209000 - DNA, 145 bp, Unknown
  Bacterial polypeptide expressing nucleotide sequence isolated from the Sargasso Sea
tatgaaagtttattatgaaaaagatgctaaattggatcttattaaatccaaaaaaatagcaatatatggttatggaagccaaggacatgctcatgcacttaatttgaatgactctggtgcatctgatgtagttgttgcgctgaga

SEQ ID NO: 209001 - DNA, 246 bp, Unknown
  Bacterial polypeptide expressing nucleotide sequence isolated from the Sargasso Sea
aatgaaaacattttatgaaaaagacgcaaacgtaaaccttattaaaaataaaaaagttgcaatttttggttatggtagtcaaggacatgctcatgcacttaatttaaaagatagtggtgtgaaagaagtcgtcgttgctttaagagagggatcttcaagcgtaaagaaggcagagagtgaaggtttaaaagtcatgacactatcagatgcagcagcttgggcagatgttgttatgatgttaactcc

SEQ ID NO: 209002 - DNA, 298 bp, Unknown
  Bacterial polypeptide expressing nucleotide sequence isolated from the Sargasso Sea
atgaaaatttattatgatgatgatgctgatatagaaatcattaaaaagctcaatgtaactattataggttatggttctcaaggacatgctcatgcaaataatttaaaagattcaggcgtcaacgtaacagttgctctaagagaaggctcatcttcatggaataaggcagttgaagctggattaaatgttatgccagttgctgaatccatacaaaatgctgatttagtaatgatgttagccccagatgagttccaaaagggtatttatgataaaaacatccagtcaaatttaaaaagtg

SEQ ID NO: 209003 - DNA, 121 bp, Unknown
  Bacterial polypeptide expressing nucleotide sequence isolated from the Sargasso Sea
atgttttatgaaaaagacactgacgttaatttaattaaaaaaaagaaaatagcaatctttggctatggaagccaaggacatgcacatgcattaaatttaagagatagcggagtaaaagaag

SEQ ID NO: 209004 - DNA, 170 bp, Unknown
  Bacterial polypeptide expressing nucleotide sequence isolated from the Sargasso Sea
tatgaaaatgttttatgaaaaagatacagatgtaaatttaattaaagataaaaaaattgcaatatttggctatggtagtcaaggacatgcccacgctttaaatttaaaagacagtggtgtaaaagaagttgtggttgcattaagagatggttcctcaagtatacctaaag

SEQ ID NO: 209005 - DNA, 181 bp, Unknown
  Bacterial polypeptide expressing nucleotide sequence isolated from the Sargasso Sea
tatgaaagtttattacgaaaaagactctgatattgatttaattaaatcgaagaaagttgctatttatggctatggaagtcagggtcatgctcatgcattaaacttgagtgattcaggtgtaaaagaagtagttgttgcacttagagacggatcatccagtgcagttaaagctgaagctgaa

SEQ ID NO: 209006 - DNA, 196 bp, Unknown
  Bacterial polypeptide expressing nucleotide sequence isolated from the Sargasso Sea
gagtgggctgatgtctgtatgatcttaactcctgacgaacttcaggcaacaatatataaaaatcatattgagcagagaattaaagaaggtacaagtttagcttttgcccacggtttaaatattcattatgatttaattaaagcaaggaaagatttagatgtttttatggttgctcctaagggaccaggacatcttg

SEQ ID NO: 209007 - DNA, 181 bp, Unknown
  Bacterial polypeptide expressing nucleotide sequence isolated from the Sargasso Sea
atgaaaatgttttatgaaaaagatacagatgtaaatttgattaaagataaaaaaattgcaatttttggttatggtagccaaggtcacgctcatgctcttaatttaaaagacagcggcgttaaagaagttgttgttgcattaagggatggatcttcaagtaaagccaaagctgatctaaagc

SEQ ID NO: 209008 - DNA, 247 bp, Unknown
  Bacterial polypeptide expressing nucleotide sequence isolated from the Sargasso Sea
aatgttttatgaaaaagatactgatgcaaatttgataaaagataaaaaaattgcgatctttggatatggtagccaaggacacgctcacgctttaaacctaaaagatagcggcgtaaaagaagttgttgtagctcttcgagaagggtcttcaagtattgaaaaagcagaatctaaaggtttaaaagttatgaacctttcggatgccgctgaatgggctgaagttgtgatgattttaacccccagatga

SEQ ID NO: 209009 - DNA, 203 bp, Unknown
  Bacterial polypeptide expressing nucleotide sequence isolated from the Sargasso Sea
aaaagctgaaatgaaaaaagttcttagtgaaatacaagatggtacctttacaaaagaatggatggcagaacataaatcagggcaaattaagtttaaacaaatgagagatcaaggcgcaaagcaccaaatcgaagaggtaggagctaaattaagatcgatgatgccatggatagcatctaataaactagtaaaggacatttaaa

SEQ ID NO: 209010 - DNA, 286 bp, Unknown
  Bacterial polypeptide expressing nucleotide sequence isolated from the Sargasso Sea
aatgagagtatattatgacagagacgctgatattaatttaattaaaaataaaaaaattgctattgtaggttatggaagtcaaggtcatgcacatgctatgaatctaagggattctggagtagaaaatgttacaattgctctacgcgaaggttcagctacaaaagaaaaagcagaaaatgcaaattttcaagtcatgacacccaatgaagcatcttcgtgggcagatataatcatgatgttaactcctgatgaaatgcaatcagatatttatgaaaaagaaatagcg

SEQ ID NO: 209011 - DNA, 430 bp, Unknown
  Bacterial polypeptide expressing nucleotide sequence isolated from the Sargasso Sea
atgtcgacaaaaataatatacgatgaatcaattgatatagagatgattaaatcaaaaaatgtaagtgtaataggatttggtagccaaggacacgcgcatgctcttaatcttcatgattcaggtgttaatgtaacagttggtttaagagaagattcctcatcatttaatagagcgaaagaaatgggtcttaatgtcgataatcttgaaaatgcaacaaaaaatgctgacatagtaatgcttcttcttccagaccaattgatggcggatgtttacgaaaaagacattgcaccatttatgaaagataattcaacattattttttgcacatggtttcaatattcactttggtgaaatcgttcctcgtgaagatatatccatagctatgatcgccccaaagggtccaggccatttattaagaagaacctacgaag

SEQ ID NO: 209012 - DNA, 483 bp, Unknown
  Bacterial polypeptide expressing nucleotide sequence isolated from the Sargasso Sea
ccagggctgactggatcatggtgctgctgcccgacgaatttcagaaagaggtttacgacaaagaaatcgccccgcatctcagcgccgggaaagtactgagctttgcgcacggcttcaacatccgctttgccctgatcaagcctccagctgatgtggatgtggtgatgatcgcccccaagggtcctggccacaccgtgcgctgggataccagaacgcccagggcgtgcctgccctgtttgccatcgagcaagacgccagcggcaaagcccgcggcctggccatggcttatgccaaaggaattggcggcacccgcgccggcatccttgaaaccaacttcaaagaggagaccgaaaccgatctatttggcgagcaagccgtgctctgcggtggcctctctgagctggtcaaagctggttttgaaaccctcgtggaagctggctatcagccggaactggcctacttcgagtgcctccacgaggtgaa

SEQ ID NO: 209013 - DNA, 111 bp, Unknown
  Bacterial polypeptide expressing nucleotide sequence isolated from the Sargasso Sea
aatgttttatgaaaaagatgcagatgtagatttaattaaaaataaaaaaattgctatttttggttatggaagccagggtcacgctcatgcactcaatctgaaagatagcgg

SEQ ID NO: 209014 - DNA, 523 bp, Unknown
  Bacterial polypeptide expressing nucleotide sequence isolated from the Sargasso Sea
agattgggaaaatgatgataaagagcttttaaattggagagaagagacaaatcaaacatcctttgagaaaaccaatccaactaaagatgaaatatctgaacaggagtattttgataacggaatattgatggttgcatttgtaaaagctggggttgaacttgcctatgaaaccatggtagaggctggtatcaaggaagaatctgcttattatgaatccctacacgaacttcctttaattgcaaatttagtatccagaaaaaaactgtacgaaatgaatcatataatttcagatacagcagaatatggttgctatctttttaataatgacgcaattccattattatccagtttcttcaaaaaacttaatagtgatgtaattggttcagatcaaatgtctaatgcttcgaattcaattgataatgaaaaattaattgaaatcaatgaatctattagattccactctattgaaatcattggtgatgaattaagacaacatatgacttcaatgaaaaaagcattataa

SEQ ID NO: 209015 - DNA, 340 bp, Unknown
  Bacterial polypeptide expressing nucleotide sequence isolated from the Sargasso Sea
atgttttatgaaaaagatactgatgcaaacttaattaaaaataaaaagatagcaatatttggttatggaagccaaggtcatgcacatgctcttaatttaaaagatagtggcgtgaaggaagttgtagttgcacttagagatggatcagcaagtaaagcaaaagcagagtctaagggtcttaaagttatgaatttatctgacgctgcagagtgggcagatgttgtaatgattttgacacctgatgaattacaagcaacaatttataaaaaccatatcgagcaaagagttagagaaaaaacatcaattgcattcgctcatgggattaaatattcattatgat

SEQ ID NO: 209016 - DNA, 589 bp, Unknown
  Bacterial polypeptide expressing nucleotide sequence isolated from the Sargasso Sea
agagattttaactccattattcaaacatcacatgaaaaatattctagatggaactttttcaaatgacatgatggaagattgggtaaatgatgatgagaagcttcttaactggagaagagaaactggtctaactgattttgaaaagtcctctgtatcagatattgaaatttctaatcaagattactttgaaaaaggaatattaatggttgcttttgttaagtcaggtgttgaattagcattcgaaacgatgttagataatggaataattgatgagtcggcatattatgaatctcttcatgaacttcctttgattgcaaatcttgttgcaagaaaaaaattatttgaaatgaatagaattatatctgatacagctgaatacggatgttatttatttaacaacgaatgtgtgcctttactaaatgattttatgttaaaaattaataatcatcatattggctcaaaacctaacggtatagaaattgatagcagtaagctatatgaatatgatttaaaaacaaaaaatcataggattgaaaaaattggtattattctaagaaaaaacatgagtaatatgaaaaaattaaaatag

SEQ ID NO: 209017 - DNA, 300 bp, Unknown
  Bacterial polypeptide expressing nucleotide sequence isolated from the Sargasso Sea
aatgacccaactcttttacgacacagatgcagatctaagtcttttaaaaaataaaacaatagctattattggatatggatcacaaggtcatgcacatgccctaaaccttaaagatagcggtatggatgtaatagttggactatataaaggaagtaagtctgaaagcaaagctattagcgatggtctgcaagtatttagcgtttctgaagcttgcgaaaaagcagactggattatgattctactccccgatgagtttcagaaagatgtttaccttaaagaaatagaaccaaacttaaaaaa

SEQ ID NO: 209018 - DNA, 139 bp, Unknown
  Bacterial polypeptide expressing nucleotide sequence isolated from the Sargasso Sea
atgaaaatttattatgatgatgatgctgatatagaaatcattaaaaagcttaatgtgactattgtgggttatggttcccaaggacatgctcatgcaaataatttaaaagattcaggcgttaacgtaacagtaggttaag

SEQ ID NO: 209019 - DNA, 323 bp, Unknown
  Bacterial polypeptide expressing nucleotide sequence isolated from the Sargasso Sea
aatgttttatgaaaaagatacagacgcaaatttaattaaaggaaagaagatagcgatttttggctatggaagtcaaggacatgctcacgctcttaatttaaaagatagtggtgttaatgaagttgtggttgctttaagagatggttcttcaagcaaagctaaagctgaatcaaaaggattaaaagttatgaatttatcagacgctgctgagtgggcagatgtagttatgattttaactccagatgagttacaagcaacaatttataaaaatcatatagagcaaagagttagagaaggaacatcaatcgcttttgcacatggtt

SEQ ID NO: 209020 - DNA, 241 bp, Unknown
  Bacterial polypeptide expressing nucleotide sequence isolated from the Sargasso Sea
aatgagagtatattacgatagagatgctgatcttaatttaattaaagataaaaaaatagtaattataggatatggtagtcaaggtcatgcacatgcgatgaacctaagggattctggtatagaaaatgtagcaatagctcttcgtgatggttctccaacaagagaaaaagctaaaaatgctaattttgatgttatgacaccagctgaagctgccaattgggctgatatcattatgatgtaa

SEQ ID NO: 209021 - DNA, 199 bp, Unknown
  Bacterial polypeptide expressing nucleotide sequence isolated from the Sargasso Sea
atgacgcaactcttttacgacaaagatgcagatctaagtcttttaaatgataaaacaatagcgattattggatatggatcacaaggtcatgcacatgctctaaatctgaaagatagcggtatggatgtaattgttggattatatacaggaagtaagtctgaaagcaaagccattagcgatggtctacaagtctttagcg

SEQ ID NO: 209022 - DNA, 346 bp, Unknown
  Bacterial polypeptide expressing nucleotide sequence isolated from the Sargasso Sea
aatgagagtatattacgatagagatgcagacttaaatttaataaaagataaaaaaatatcaattgtaggttatggtagtcaaggtcatgcacacgcaatgaatttgagagattctggaattgaaaatgtttcaatagctttaagagaaggttcaaactcaagaagtaaagcagaacaagctaattttaaagtaatgacacctgcagaagctgcgagttgggctgatgtgattatgatgttaacacctgatgaacttcaatctgaaatttacaaaaatgatatagctgaaaatattaaagaagggtacaacaatcgcatttgctcacggattaaatattcactttga

SEQ ID NO: 209023 - DNA, 328 bp, Unknown
  Bacterial polypeptide expressing nucleotide sequence isolated from the Sargasso Sea
tatgaaaatgttttatgaaaaggatactgatgtaaatttaattaaagataaaaaaattgcaatttttggatatggtagccaaggtcatgctcatgcacttaatttaagagatagtggggttaaagaagttgtagtagctcttagagaaggttcctctagtattgctaaagcagagtcaaagggattaaaagttatgaatttatctgatgctgcagaatgggcagatgtagttatgatcttaactccagacgaattacaagcagcaatttataaaaatcatattgaacaaagagttaaagaaggaacatcaatagcttttgctcacgga

SEQ ID NO: 209024 - DNA, 310 bp, Unknown
  Bacterial polypeptide expressing nucleotide sequence isolated from the Sargasso Sea
atgcaagtttattatgacaaagatgcagacctagaaataattaaaaacaaaaaagtagttatagttggctacggttctcaaggccatgcccacgctaataatctcaaagattctggtggaaatgtaacggttgctttaagaaaagattcagcatcatgggaaaaggcagaagcagcaggacttcaagttcaagaagtggcagaagcagttaaagatgcagacatggttatgatattaatgcctgatgagctgcaatcagcaacttacaaattgaaattgaacaaaacatcaaagaaggagcagttttagc

SEQ ID NO: 209025 - DNA, 247 bp, Unknown
  Bacterial polypeptide expressing nucleotide sequence isolated from the Sargasso Sea
atgttttacgaaaaagatgcagatgtagatttaattaaaaataaaaaaattgcaatttttggttatggtagtcaaggacatgctcatgcattaaatcttaaagatagtggtgttaaagaaattgtggttgcactaagagatggctcatcgagtgtagcaaaagctgagtcaaaaggattaaaggtcatgaatttatctgatgcagctgcttgggcagatgtagtaatgattttaactcccagatgaa

SEQ ID NO: 209026 - DNA, 364 bp, Unknown
  Bacterial polypeptide expressing nucleotide sequence isolated from the Sargasso Sea
aatgtactctgaacaagatgtaaatccatcaatacttgaagacaaaaaaatagtaattctaggttatggaagtcaaggtcgagcacatgctctaaatcttaaggatagcggtttcaatgttgtcgttggattaaggagaagtggtgctagctgggataaggccatatcggatggtttggatgttaacgaaccaaatgacgcggtcaaagatgcatccatcgtaatgtttctcacacctgatatgactcaagaaaatatatacaataatatagagcaatctatcgaaaaagatgctgcgattgtatttgctcatggattcaatattcactacaaaagaatcaagcccagagatgatcttgatgtt

SEQ ID NO: 209027 - DNA, 715 bp, Unknown
  Bacterial polypeptide expressing nucleotide sequence isolated from the Sargasso Sea
aatgttttatgaaaaagatgcagatgttaatctaattaaaagcaaaaaagttgctatctttggttatggaagccaagggcacgctcacgcattaaatttaaaagatagtggagtaaaagatattgttgtagcattaagagaaggttcatcgagtgcagctaaagcagagtcaaaaggattaaaggtaatgaatttatctgatgctgcagagtgggctgatgtagtaatgattcttacaccagatgaactacaagcggaaatttataaaaatcatattgaacaacgagtaagagagggcacaagtatcgcttttgctcatggtttaaatgttcattacgatttaattaaagctagaaaagatctagatgtttttatggttgctcccaaaggacctggtcacttagttagaagtgaatatgaaaaaggaggtggagtaccttgtttatttgctgttcatcaagatggttcaggaaaggcaagagacttagctttatcttatgcttcagcagttggtggaggaagatcaggaattattgaaactacatttaaagacgaagttgaaacagatttatttggtgaacaaacagtactttgtggaggtttggttgagctaattaaaaatggttatgaaactttagttgaagctggatatgaaccagagatggcatattttgaaacagttcatgaagttaaattgattgttgatttaatttat

SEQ ID NO: 209028 - DNA, 433 bp, Unknown
  Bacterial polypeptide expressing nucleotide sequence isolated from the Sargasso Sea
gaaaccgacctgttcggtgagcaggctgtgctgtgtggcggtctgtccgaactcgtgaaggctggtttcgagaccctagtggaagcgggctaccagcccgaattggcttacttcgaatgcctgcacgaggtgaagctgattgtcgatctgatggtcaaggggggactgacctccatgcgcgattcgatctccaacaccgcggagtacggcgactacgtcagcggcccccgtctgatcacagccgacaccaaggccgagatgaagcgcgttctggcagacatccaggacggcaccttcgccaggaacttcgtggccgaatgcgaagccggcaagccagagatgaaaaaggtgcgtgaccgtgattcccagcatccgatcgagaaagtgggcaaaggcctgcgctcgatgttcagctggctaaaggacgcctgat

SEQ ID NO: 209029 - DNA, 574 bp, Unknown
  Bacterial polypeptide expressing nucleotide sequence isolated from the Sargasso Sea
ttggttgctgttgataaaaatccttcaggaaatgcacttgaaattggaatcgcctatgcatctgcaataggtgggggaagagcaggcatcattgagacaacattcaaagaagaatgtgaaacagatttatttggagagcaatcagttttatgcggaggtttaactcatttaattttagctggatatgaaactcttgtagaagcaggttatgctcctgaaatggcatattttgagtgtttgcatgaagtaaaacttattgttgatcttctttacgaaggtggaatggcaaatatgagatactcaatatctaatactgctgagtatggagattattcaagaggccctagactgataactgatgaaacaaaaaaagaaatgaaaaaaattctttctgaaattcaatctggtcagtttgcaaaagaatggatgcaggaacatcaaagtggtcaaacaaaatttaagattatgagaaaagaacaagctgaacatccaatagaagctgttggtgaaaaactaagaacattaatgccatggattgctgagggcaaaatggttgataaatcaaaaaactaga

SEQ ID NO: 209030 - DNA, 643 bp, Unknown
  Bacterial polypeptide expressing nucleotide sequence isolated from the Sargasso Sea
atgttttatgaaaaagataccaatgtaaatttaataaaagataaaaaaatcgctatatttggatatggtagccaaggtcacgctcatgcattaaaccttaaagatagtggtgttaaagaagttgtagttgcattaagagatggatcctctagtagacagaaagcagaatcaaaaggattaaaagttatgaatctttcagatgcagctgaatgggctgacgttataatgattttaacgcctgatgaattacaagcttcaatatataaaaatcatattgagcaaagagttaaagaaggaacatcaatagcttttgctcatggattaaatattcattatgatttaatcaaagcaagaaaagaccttgatgtttttatggttgctccaaaaggacctgggcatttagttagaagtgagtttgagaaaggtggtggtgtgccttgtttatttgctgtacatcaaaatggatctggtaaagcaagagatattgcaatgtcttatgcatcagctattggcggaggcagatctggaattatagagacaacttttaaagatgaagtcgagacagatttatttggagaacaaacagtactttgtggtggattagttgaattaattaaaaatggttacgaaacattagttgaag

SEQ ID NO: 209031 - DNA, 780 bp, Unknown
  Bacterial polypeptide expressing nucleotide sequence isolated from the Sargasso Sea
gatgttttatgaaaaagatactgatccaaatctaattaagaataagaaaattgctattttcgggtatggtagtcaaggacatgctcatgccttaaatttaaaagatagcggggttaaagaagtcgtcgtagcactaagagatgggtctgctagcaaagcaaaagcagagtccaaggggttaaaagttatgaatttatctgatgccgctgaatgggcagacgtgattatggttttaacacctgatgaacttcaagcatcgatttataaaaatcacattgaacaaagagtaaaagagggaacttcaattgcttttgctcatggtttaaatgttcattatgatctgattaaagctagaaaagatttagatgtttttatggttgcgccaaaaggccctggacatttggtaagaagtgaattcgaaaaagggggaggagttccatgcctctttgcagttcatcaaaatggatcaggtaaagctagagatttagctatgtcatatgcttctgcaattggcggtggtcgatcaggtattattgaaactacatttaaagatgaagtagaaacagatttatttggagaacaaactgttttatgtggtggattagttgaacttataaaaaatggttatgaaactttggttgaagctggctatgaaccagaaatggcatattttgaaactgttcatgaagtaaaattaattgttgatttaatttatgaaggtggaattgccaacatgaattattctatttctaacactgctgagtacggagaatacatgtc

SEQ ID NO: 209032 - DNA, 352 bp, Unknown
  Bacterial polypeptide expressing nucleotide sequence isolated from the Sargasso Sea
cttgtagaggcgggatatcaacctgaacttgcttacttcgaatgcttacatgaagttaaacttattgttgatttaatggtgaagggaggcttatctcaaatgagagattccatttcaaatactgcagaatatggagattatgtaagtggtaaaagactaatcaatagtgatacaaaaaaagaaatgcagaaaattctaaaagatattcaagatggaactttcgctaagaattttgtggaagaatgcgataaaaacaaacccttaatgacaaaattaagagaagagaactcaaaacatgaaattgagaaagtaggtaaaggtttgcgctcgatgttcagttggctgaaataaa

SEQ ID NO: 209033 - DNA, 730 bp, Unknown
  Bacterial polypeptide expressing nucleotide sequence isolated from the Sargasso Sea
ataaaagatggagcagttctggcatttgctcatggatttaatatccactttgaaatgattattcctagagatgatctggatgtaattatggttgcaccgaaaggcccaggccatactgttcgatcgcaatatgaatcaggagcaggagtgccttgcttactcgccgtgcatagaaatgtctccggaaaagcaaaagatgttgggctttcatatgcatctatgattggttctggccgagctggaattattgaaacaaattttaaagatgagactgaaacagatctatttggagaacaagcggtcctttgtggaggtttaacgtcacttattcaaactggttatgaagttctggtagaaaatggttatccaccagaaatggcatattttgaatgtcttcatgaagtaaaattaattgttgacctcatttatgaaggtggtcttcagaatatgagatatagcatttccaatactgcagagtatggagattatgtgacaggaccaaagattgtgaatgaaaatacaaaggaaacgatgcagaagatattgactgagattcagtctggagaattcgcgaaagattttatgaatgactgtaactctggtggtcagaaaatgagcgaatatagaaaaaactcctcagaacattcaatcgagtcagtgggcgaagagcttcgctcaatgatgccctggatatctgccaataaaattgttgataaagccaaaaactaat

SEQ ID NO: 209034 - DNA, 858 bp, Unknown
  Bacterial polypeptide expressing nucleotide sequence isolated from the Sargasso Sea
tatgaaaacttattacgataaagatactaatctaaatttaataaaagataaaaaggtagctatctttggttacggtagtcaaggacacgctcatgcgctaaaccttaaagatagtggtgttaaagaagttgtagtagcattaagagaggggtcttcaagtataaaaaaagctgagagtgcaggactaaaagttatgtcattatcagacgcagctgcatgggcagacgttgtaatgatgttaacccctgatgaacttcaatcagaaatttataaaaatcacattgaacaaagaatgaaagagggaacaagtttagcttttgctcatggattaaatatccattttgatttaattaatgctagaaaagatcttgatgtatttatggttgctcctaaaggcccaggtcatactgtcagaagtgaatatcaaaaaggtggaggggtcccttgtttaatggctgtgcataaagatagttcaggtaaagcaaaagatttggcactatcatacgcttcagcagttggaggaggtaaagctggaattatagaaacaacttttaaagatgaatgtgaaacggatttatttggtgagcaaacagttctttgtggaggcttagtagaactaatcaaaaatggttttgaaactttaactgaagctggttatcctcctcaaatggcgtactttgaaactttgcatgaagtaaagttaatagttgatcttatttatgagggaggaatagcaaatatgaattactcaatttcaaatactgccgagtatggcgaatatgtttctggtaagagaatagtggacgagaaaacaaaagaaaaaatgaaatctgtcttaaaggatataccatcaggaaa

SEQ ID NO: 209035 - DNA, 863 bp, Unknown
  Bacterial polypeptide expressing nucleotide sequence isolated from the Sargasso Sea
tataacagtcattatggttgctccaaagtgtcctggaacagaagttagggaagagtatttaagaggattcggagttccaacacttatagcagttcatccaccaaatgatccaaacgacgatggattagattacgctaaagcttatgcagttgcaactggtggtcatcgagcaggagtgttggaatcatcgtttgttgctgaagttaaatctgatttaatgggagaacaaacaattttgtgtggagtattgcagtcaggatcaattttatgttttaataaaatgattgagcttggttatgatagtggtttttcatcaaagttgattcaattcggttgggaaacaatcactgaagaattaaaacataatggtattaatgggatgttagctagattagatgatgattcaagatatttagtacataccctttctgaagaattaaaagagattttaaccccattattcaaacatcacatgaaaaatattttagatggaactttttcaaaggacatgatggaagattgggtaaatgatgatgtgaagcttcttaactggagaagagaaacaggtttaactgattttgaaaagtcctctgcatcagatattgaaatttctaatcaagattactttgaaaaaggaatattaatgattgcttttgttaagtcaggtgttgaattagcattcgaaacgatgttagacaatgggataatagatgagtcagcatattatgagtctcttcatgaacttcctttaatcgcaaatcttgttgcaagaaaaaaattatttgaaatgaatagaattatttcagatacagctgaatatggatgttatttatttaacaacgaatgtgtgcctttacttaatg

SEQ ID NO: 209036 - DNA, 721 bp, Unknown
  Bacterial polypeptide expressing nucleotide sequence isolated from the Sargasso Sea
gggaacaagcttagcttttgcacatggattaaatattcactttgatttaattaatgcaaggaaagatttagatgtttttatggtggcgccaaaaggacctggtcacacagtcaggagtgaatatcaaaaaggaggaggtgttccttgtttgatggcagtacataaagacagttctggaaaagcaaaagatttagctttgtcttatgcttcagctgttggaggcggcaaggcaggtattattgaaaccacttttaaagatgaatgtgaaacagatttatttggtgaacaaacagttctttgtggtggtctagttgaattaataaaaaatggtttcgaaactttaaccgaagctggctatccaccggaaatggcatactttgaaacccttcatgaagtaaaattaattgtagatcttatttatgaaggtggaattgccaacatgaattattcaatatctaacaccgctgagtatggtgaatacgtttcaggaaaaagaatcgtagatagtaaaactaaagaaaaaatgaaagaagttctcaaagatattcaatctggtaaatttactaagcaatggatggaggagcataaatcaggacaaaagaattttcttaaaatgagaaaagatttggctaatcatcaaatcgaaaaagtcggtaaagagcttagagctatgatgccttggattggaaaaaataaattagtcgacaaagacaagaattag

SEQ ID NO: 209037 - DNA, 376 bp, Unknown
  Bacterial polypeptide expressing nucleotide sequence isolated from the Sargasso Sea
ctggatatgaaccagagatggcatatttttgagacagttcatgaagttaaattgattgttgatttaatttatgaaggtggaattgcgaatatgaattattctatttcgaatactgctgaatatggtgaatatcaatctggaccaagagtagttaacaaagaagaaactaaaaaaagaatgaaagaagttttggctgaaattcaatctggaaaatttactaaagagtggatggatgaatgcaaaaatggtcaaaaaaacttccttgctacgagagcgaaattagccgagcaccccgttgaaaaagttggtgcagaactaagagctatgatgccttggataggtaagaaaaaattagttgatagtgataaaagttaaa

SEQ ID NO: 209038 - DNA, 577 bp, Unknown
  Bacterial polypeptide expressing nucleotide sequence isolated from the Sargasso Sea
atgttttatgaaaaagatgcaaacacaaatttgatcaaagataaaaaagttgcaatttttggatatggtagccagggacatgcacatgcactaaatttaaaagatagtggcgtgaaaaatgttgttgttgcacttcgtgagggatcatcaagtattaaaaaagcagaaagcgaaggacttaaggttatgtctctttcagatgctgcagcttgggctgacgtggttatggttcttactccagacgaacttcaggcatcaatttataaaaatcatattgagcaaagaatgagagaaggaacaagtttagcattcgcccatggtttgaatattcattttaatttaattaattctagaaaagatttagatgtttttatggttgcacccaaaggaccaggacacttagtaagaagcgaataccaaaaaggtggaggagttccttgtcttatggcggttcacaaagatagctcaggtaaagccagagatcttgcaatgtcatatgcgtgcgcagtcggtggaggaagatctgggattatagaaacaaccttcaaagatgaatgtgaaacagatttatttggaa

SEQ ID NO: 209039 - DNA, 837 bp, Unknown
  Bacterial polypeptide expressing nucleotide sequence isolated from the Sargasso Sea
tatgaaaacttattacgataaagatactaataaagatttaattaaaaataaaaaagttgcaatttttggttacggaagccagggacatgctcatgcgttaaatcttaaagacagtggtgtgaaagaagtagtggtagccttacgagaaggatcctcaagtattaaaaaagcagaaagtgcaggattaaaagttatgtctctatcagatgcagctgcttgggctgatgtggtaatgatgttaacacctgatgaacttcaatcagagatttacaaaaatcatattgagcaaaggatgaaagagggaaccagtttagctttcgcccacgggttaaatattcactttgatttaattaatgctagaaaggatcttgatgtttttatggtagctcccaaaggcccaggccatactgtgagaagtgaatatcaaaagggtggaggagtgccttgtttaatggctgttcacaaagacagctcaggcaaagcaaaagatttagctttatcttatgcttccgctgttggaggtggtaaagctggcataatagaaactactttcaaagatgaatgcgaaacagatttgtttggagagcaaacagttttatgtggtggtttggtcgagttaattaagaatggtttcgaaactttaacagaagctggttatccacctgaaatggcatactttgaaactcttcatgaagtaaaattaattgttgatcttatttacgagggtgggatcgcaaatatgaattattcaatttcaaatactgcagaatatggtgaatatgtttcagggaaaagaattgtagataataagactaaagaaaaaatgagagaaattct

SEQ ID NO: 209040 - DNA, 946 bp, Unknown
  Bacterial polypeptide expressing nucleotide sequence isolated from the Sargasso Sea
catattcacatggtttttaatattgtagaggaaggtattaagatacgagaggacataacagttataatggttgctcccaaatgtcctggatctgaggttagggaggagtttaaaagaggatttggagtaccaacacttattgcagttcatccaaataacgacccacaaaaattgggtctaagccaagctaaagcctatgcagtagctactggtggtcataaagcgggtgtcttagagtcttcatttgttgctgaagttaagtctgatttaatgggtgaacaaacaattctttgcggaattcttcaaactggatcaattttatgttttgataaaatggtctctgaaggaatagctccttcatatgcatctaaactaattcaatatggatgggaaaaaatcactgaagcattaaaacatggtggaataacaaatatgatggatagactttcaaatcaatccaaaataaaggcatttgagttgtcagaagaactaaagttaattctaaaaccacttttcacgaaacacatggatgatattatgtctggggatttttctaaaacaatgatgcaggactgggcaaatgatgataaaaatttattggcttggaggtcagctactgctgaaacctcatttgaaaaaacacctccaactaaagataaaattgatgagcaagaatattttgataagggtgttctaatggttgcttttgttcgagccggtgtagagctagcttttgaaatcatggttaattctgggataaaagaagagtctgcttattatgagtcattacatgaaactcctttaattgcgaacactattgctagaaaaaaattatttgaaatgaacagggtgatttctgatactgctgaatatgggtgctatttatttgaccatgctgctaagcctttattagttccatttatgaaaaaaattaaaactgatgtga

SEQ ID NO: 209041 - DNA, 701 bp, Unknown
  Bacterial polypeptide expressing nucleotide sequence isolated from the Sargasso Sea
tggtttaaatgttcattatgatttaattatagctagaaaagatctagatgtttttatggttgctcccaaaggacctggtcacttggttagaagtgaatatgaaaaaggaggtggagtaccttgtttatttgccgttcatcaagatggttcaggaaaggcaagagacttagctttatcttatgcttcagcagttggtggaggaagatcaggaattattgaaaccacattcaaagacgaagttgaaacagatttatttggtgaacaaactgtattatgtggtggtttggttgagctaattaaaaatggttatgaaactttagttgaagcaggatatgaaccagagatggcatattttgagacagttcacgaagttaaattgattgttgatttaatttatgaaggtggaattgcgaacatgaattattctatttcgaatactgctgaatatggcgaatatcaatctggacccagagtagttaataaagaagaaactaaaaaaagaatgaaagaagttttggctgaaattcaatctggaaaattcactaaagagtggatggatgaatgcaaaaatggtcaaaaaaacttccttgctacgagagctaaattagccgagcatcctgttgaaaaagttggtgcagaattaagagctatgatgccttggataggtaagaaaaaattagttgatagcgataaaagttaaa

SEQ ID NO: 209042 - DNA, 767 bp, Unknown
  Bacterial polypeptide expressing nucleotide sequence isolated from the Sargasso Sea
ggcagaaatttataaaaatcatatagagcaaagagttaaagaaggatccagtattgcatttgctcatggattaaatgttcactacgatttaatcaaaacaagaaaagatttagacgtatttatggttgcccctaaagggcctggtcacttagttagaagtgaatttgaaaaaggtggtggagtaccatgtttatttgcagttcatcaaaatggatcgggtaaagcaagagatctagcgttatcatatgcatcagctgttggtggtggaagatctggaattattgagaccactttcaaagacgaagttgaaacagatttatttggtgagcaaacagttctttgtggaggattggtagaattaatgaaaaatggttatgagactttagttgagggcggttacgagcctgagatggcgtattttgaaaccgtgcatgaagttaaattaattgttgatttgatttatgaaggtgggattgcaaacatgaattactcaatttcaaatacagctgagtatggtgaatatcaatctggaccaagaattataaataaagaagaaactaaaaaaagaatgaaggaagtactgtctgatattcaatctggaaaattcacaaaagagtggatggatgaatgtaaaaatggtcaaaaaaactttttagcaactagagctaagctagcagagcattctgtggaaaaagttggtgctgaacttagagctatgatgccatggattggcaagaaaaaactagttgacagtgacaaaagttaga

SEQ ID NO: 209043 - DNA, 643 bp, Unknown
  Bacterial polypeptide expressing nucleotide sequence isolated from the Sargasso Sea
gttgcccctaaagggcctggtcacttagttagaagtgaatttgaaaaaggtggtggagtaccatgtttatttgcagttcatcaaaatggatcgggtaaagcaagagatctagcgttatcatatgcatcagctgttggtggtggaagatctggaattattgagaccactttcaaagacgaagttgaaacagatttatttggcgaacaaacagttctttgtggaggattggtagaattaatgaaaaatggttatgagactttagttgaagctggttacgaacctgagatggcgtattttgaaaccgtgcatgaggttaaattaattgttgatttgatctatgaaggtggaattgcaaatatgaattactcaatatcaaacacagctgagtatggtgaataccaatctggaccaagaattataaataaagaagaaactaaaaaaagaatgaaggaagtattgtctgatattcaatctggaaaattcactaaagagtggatggatgaatgtaaaaacggccagaaaaactttttagcaactagggctaagttagcagagcattctgtggaaaaagttggtgctgaacttagagctatgatgccatggattggtaagaaaaaactagttgacagtgacaaaagttaga

SEQ ID NO: 209044 - DNA, 412 bp, Unknown
  Bacterial polypeptide expressing nucleotide sequence isolated from the Sargasso Sea
agaattaattaaaaatggttatgagactttagttgaagctggttatgaacctgagatggcatattttgaaactgtgcacgaagtaaaactaattgttgatttgatttatgaaggtggaattgcaaatatgaactactcaatatcaaatacagctgagtatggtgaataccaatctggaccaagaattattaataaagaggaaaccaaaaaaagaatgaaggaagtattgtctgatattcaatctggaaaattcactaaagagtggatggatgaatgtaaaaatggccagaaaaactttttagcaactagagctaagttagcagagcattctgtggaaaaagttggtgctgaacttagagctatgatgccatggattggcaagaaaaaactagttgacagtgataaaagttag

SEQ ID NO: 209045 - DNA, 593 bp, Unknown
  Bacterial polypeptide expressing nucleotide sequence isolated from the Sargasso Sea
gggaggaggagttccttgtttgatggcagttcataaagacagctcaggaaaagcaaaagatttagctctttcatatgcatcagctgtaggcggaggtaaggcaggtattatagaaactactttcaaagacgaatgtgaaacagatttatttggcgaacaaacagtattgtgtggtggcttagtagaattaattaaaaatggttttgagacattaacagaagcaggttatccacctgaaatggcatacttcgaaacactccatgaagtaaaattaatcgttgatttaatttacgaaggtggaatagctaatatgaattattctatttcaaacaccgctgagtacggtgaatatgtatcaggaaaaagagttgtagataataaaactaaagagaagatgaaagaagttcttaaagacattcagtcaggcaagtttactaagcaatggatggaagagcataaatcaggtcaaaaaaacttccttaaaatgagacaagacctagcaaaacaccctatcgagaaggtaggcaaagagcttcgagctatgatgccttggattggtaaaaataaactagtcgataaggataaaaattaac

SEQ ID NO: 209046 - DNA, 784 bp, Unknown
  Bacterial polypeptide expressing nucleotide sequence isolated from the Sargasso Sea
aatgttttatgaaaaagatgcagatgtaaatttaatcaaagaaaaaaaagtagctatttttggatatggtagccaggggcatgcccatgcattaaatttaaaagatagtggagttaaagaggtagttgttgctttaagagatggatctgcaagtaaaacaaaagccgagtctaaaggtttaaaggttatgaatttaacggatgcagctgaatgggctgatgtttgtatgatattaacacctgacgaacttcaagcgacaatatataaaaatcatatcgaacaaagaattaaagagggcacaagtcttgcttttgctcatggtttaaatattcattatgatttaattaaagctagaaaagatttagatgtttttatggttgcacctaaaggaccaggtcatcttgtaagaagtgagtttgaaaaaggtggaggtgttccttgtttaatggcagttcatcaagatgggacaggtaaagcaagagatcttgctttatcttatgcatcagcgattggtggtggaagatcaggaattatagaaactacttttaaagatgaatgcgaaacagatttatttggtgaacaaacagttctttgtggaggattagttgagctaattaaaaatgggtatgaaacactagttgaagcagggtatgaacctgagatggcatactttgaatgcttacacgaagttaaattaatcgtagatttaatttacgaaggtggaatagctaatatgaattattcaatttctaatacagcagaatatggagaatatgtttctggt

SEQ ID NO: 209047 - DNA, 943 bp, Unknown
  Bacterial polypeptide expressing nucleotide sequence isolated from the Sargasso Sea
cagggtcatgctcaggcacagaatcttcgtgacagtggcctgaatgtcgttgttgcacaacgtcccggtggacctaatttcgatctcgccaaaagtcatggctttgatccactctctgtggaagaggcagtgaagcaggcagatgttgtaaatattcttttgccagatgagttgcagggtgatgtctacaagacctcaattaagccaaaccttaaggccggtgcggttcttatggcgagtcatggatttaattttcacttcaatcaagttgaacctcctcccggccatgatattctgctggttgcgccgaaaggccctggtcatctggtccgaagtgagtatgaaaaaggtggtggtgttccctgtcttattgcactcggtgaaggggcttcagaagagacaaaaaagattgggctggcctatgcgaaaggcgttggcggcactcgtggtggtgttatagagacgaccatcgcggaagaaactgaaaccgatctgttcggtgaacaggctgttctctgtggaggtgtatcagaactgattaaagctggctttgatacattggtagaagcaggctatcagcctgagatggcgtattttgagtgtcttcacgagatgaaattaatcgtcgatcttctttatcagggtggtttggaatacatgagatacagtgtttccaatacagcagaatacggtgactacactcgaggaaatcgtgtgattactgatgaaacacgagctgaaatgaagaagattcttgaagagattcaagctggtgaattcgcaagagactggattcttgaaaatcgagccggagccgccatgttcaaggcaacgcgtcgtcgtgaacgggaacataagttgactgaaacgggtcgccatttgaggaagatgatgaaatggattgattcaaaagaaagtttgattcaattcggtagattctgat

SEQ ID NO: 209048 - DNA, 895 bp, Unknown
  Bacterial polypeptide expressing nucleotide sequence isolated from the Sargasso Sea
atgttttatgaaaaagatactaatcctaatttaattaaagacaaaaaaattgcaatttttggatatggcagtcagggacatgcacatgctcttaatcttaaagatagtggagttaaggaagttgttgttgcattaagagatggctcttcaagtaaggcaaaagcagaatctaagggtttaaaagtaatgaatttgtcagatgcagcagaatgggctgatgttgtaatggttttaacacctgacgaacttcaagctacaatttacaaaaatcatattgagcaaagagtcagagaaggtacatcaatagcatttgctcatggtttaaatattcattacgatttgattaaagcaagaaaagatttagatgtttttatggttgcacccaaaggaccgggtcatttagtaagaagtgaatttgaaaaaggaggaggtgtaccttgtttatttgcagttcatcaaaatggatctggaaaggcgagagatatagctatgtcctatgcttcagcgataggtggaggaagatcgggtattatagaaactacttttaaagatgaagtagaaacagatttatttggagaacaaactgttttatgtggtggactcgttgaacttattaaaaatggttacgaaactttagtagaagcaggttatgagcctgaaatggcttattttgaaactgttcacgaagttaaattaattgttgatttaatttatgaaggtggaattgcaaatatgaattattcaatttctaatactgcagagtatggtgaatacgtgtcaggtccgagaataattaataaagaagagacaaaaaaaagaatgaaagaagttttgtcagatatccaatctgggaaatttacaaaagaatggatggatgaatgcaaaaatggacaaa

SEQ ID NO: 209049 - DNA, 973 bp, Unknown
  Bacterial polypeptide expressing nucleotide sequence isolated from the Sargasso Sea
aaagtagcaatttttggttatggaagtcaaggtcatgcacatgcacttaatttaagagatagtggtgtaaaagaagttgtggtggctttacgagaaggttcatcaagtattgaaaaagctgagtccaaaggtttaaaagtaatgaatttatcagatgctgcagaatgggcagatgttgttatgatcttaacgccagacgaattacaagcatcaatatataaaaatcatattgagcagcgtgttaaagaaggaacatcaattgcgtttgctcatggtttaaatgttcactatgatcttattaaagctagaaaagatttagacgtatttatggttgcaccaaagggacctggacatttggtaagaagtgaatatgaaaaaggtggtggtgtgccatgtttatttgctgttcaccaagatggttctggtaaagcaagagatttagcaatgtcatatgcgtcagctgttggtggaggtagatctggaataattgaaactacatttaaagatgaggtagaaactgatctatttggagagcaaacagtattatgtggcggtcttgttgaattaattaaaaatggatacgaaactttagtagaagctggatatgaacccgaaatggcttattttgaaactgttcacgaagtgaaactgattgtagatttaatatatgaaggtggaattgctaatatgaattattcaatttcaaatacagcagagtatggcgagtatcagtcaggtccaagaataattaaaaaagacgaaactaagcgaagaatgaaagaggttttagcagaaattcaatctggtaaatttacaaaagaatggatggaagaatgcaaaaatggtcaaaaaaactttcttgcaactagagctaaattagcagaacactctgttgaaaaagtaggcgctgaacttcgggctatgatgccttggatttcaaaaaagaaacttgttgatagcgataagaagtaga

SEQ ID NO: 209050 - DNA, 415 bp, Unknown
  Bacterial polypeptide expressing nucleotide sequence isolated from the Sargasso Sea
atgaaaacatattatgaaaaagatactaatgtcgatctaataaaaaataaaaagattgcaatttttggttacggtagccaaggtcacgctcatgctttaaacttaaaagatagcggaattaaagaagttgttgtagctttaagagaaggctcatctagcaaaaaaaaagctgaaagtgaggggttaaaagttatgtctttgtctgatgcagctgcatgggcagatatagttatgatgttgacgcctgatgaacttcaatcagaaatatataaaaatcatattgagcaaagaatgaaagaaggaacgagtttagcttttgcacacggtctaaatattcattttgatttaattaatgctagaaaagatctagatgtttttatggttgctcctaaaggacctggtcacactgtaagaa

SEQ ID NO: 209051 - DNA, 903 bp, Unknown
  Bacterial polypeptide expressing nucleotide sequence isolated from the Sargasso Sea
aatgttttatgaaaaagatactgatgtaaatctcattaaagataaaaagattgcaatttttggatatggaagtcaaggacacgctcatgcattaaatctaaaagatagtggagttaaagaagttgttgtagctttaagagaaggttcttcgagtatcacaaaagctgagtctaaaggtttaaaagtgatgaatttatcagatgctgcagagtgggcagatgttgtaatgattttaactcctgatgaattacaagcatctatatataaaaatcatattgagcaaagggttaaagaaggaacttcaatagcttttgcccatggtttaaatattcattatgatttaatcagtgctagaaaagatttagatgtatttatggttgcgcctaaaggaccaggacatttagtaagaagtgaatttgaaaaaggtggaggagttccatgtttatttgcagttcatcaaaatggatcaggaaaggcaagagatcttgctatgtcttatgcttcggctgtagggggtggtagatctggaataattgaaacaacttttaaagatgaagtagaaacagatttatttggcgagcagactgttctttgtgggggtttagttgaattaattaaaaatggatacgaaactttagttgaagcaggatatgaaccagaaatggcttattttgaaacagttcatgaagtaaaactgatcgtcgatttaatttatgaaggtggaatagctaacatgaactactctatttcaaatactgcagaatacggtgaatatcagtcaggaccaaggattataaataaagaagaaacaaaaaaaagaatgaaagaagttctagatgacattccatctggcaaatttactaaggaatggatgcaagagtgcaaaagtggtcaaaaaaactt

SEQ ID NO: 209052 - DNA, 623 bp, Unknown
  Bacterial polypeptide expressing nucleotide sequence isolated from the Sargasso Sea
tcatttagtaagaagtgaatatgaaaaaggtggtggtgtaccttgtttatttgctgttcatcaagatggttctggtaaagcaagagatttggcaatgtcatatgcatcagctgttggtggaggtagatctggaataattgaaactacatttaaagatgaggtagaaaccgatttatttggagagcaaacagtattatgtggtggacttgttgaattaattaagaatggatatgaaactttagttgaagctggatatgaaccagaaatggcttattttgaaactgttcacgaagtgaaactgattgtagatttaatatatgaaggtggaattgctaatatgaattattcaatttcaaataccgcagagtatggtgagtatcagtcaggtccaagaataattaaaaaagatgaaaccaagcaaagaatgaaagaagttttagcagaaattcaatctggtaaatttacaaaagaatggatggaagaatgcaaaaatggtcaaaaaaactttcttgcaacaagagctaaattagcagaacactctgttgaaaaagtaggtgctgaacttcgggctatgatgccttggatttcaaaaaagaaacttgttgatagcgataagaagtaga

SEQ ID NO: 209053 - DNA, 328 bp, Unknown
  Bacterial polypeptide expressing nucleotide sequence isolated from the Sargasso Sea
caaattaattgtagatttaatttatgaaggtggaattgctaacatgaattactctatttcaaatacagctgaatatggagaatatcaatccggtccgagggtcataaaaaaagaagaaaccaaacaaagaatgaaagaaattttaaccgaaattcaatctggtaaattcactaaagagtggatggaagaatgtaaaaatggtcaaaaaaattttcttgcaacaagagcaaaattagcagagcattctgtagaaaaagttggggctgagttaagagcaatgatgccatggatctctaagaagaagttagtagatagcgacaagaaatag

SEQ ID NO: 209054 - DNA, 604 bp, Unknown
  Bacterial polypeptide expressing nucleotide sequence isolated from the Sargasso Sea
aatgacccaactcttttacgacacagatgcagatctaagtcttttaaataataaaacaatagcgattattggatatggatcacaaggtcatgcacatgccttaaatcttaaagatagcggtatggatgtaattgttggattatataaaggaagtaagtctgaaagcaaagctattagcgatggtctacaagtctttagcgtttctgaagcttgcgaaaaagcagactggattatgattctccttccagatgagtttcagaaagatgtttatcttaaagaaatagaaccaaacttaaaagaaggaaagatattaagttttgctcatggctttaatataagattcggacttatcaaacctcctagttttgtggatgttgtaatgattgctccaaaaggacccggacacactgttcgttgggaatatcagaatggtcaaggagttccagcattgtttgcagtagagcaagattcatctgggagtgcaagatcattggctatggcttacgccaaagggattgggggaacgagagcaggaattcttgaaacaaacttcaaagaagaaacagaaactgatttatttggcgaacaagctgtcttgtgcgga

SEQ ID NO: 209055 - DNA, 928 bp, Unknown
  Bacterial polypeptide expressing nucleotide sequence isolated from the Sargasso Sea
gaaaatgatcctgaaaataaaggttgggcttatgctaaagcctatgctgtgggaactggtggccatagagcgggatgtttaaaatcttcctttgttgctgaggttaagtcggacttaatgggagagcaaacaattctttgcggattattacaaactggatctattttatgttttgataaaatggttgaaggaggaattgatgctggatatgcttcaaaattaattcagtatggatgggaagccattacagaaggtttaaagcaaggtggaattaccaatatgatggatagattatccaatccttcaaaaattaaagcctttgaattagcggaagagttaaaagaaattatgaagccattgtttgataagcatatggatgacatttttactggggttttctccagtaccatgatggaagattgggcgaacgatgataaaaacttattgggatggagagcagcaacaggagaaactaactttgaaaaaactccagcgggtgatgttgagatatctgagcaagaattttatgacaatggagttttaatggttgcaatggttaaagctggtgttgaattggcttttgaagcaatggttaatgcaggaattattgatgaatctgcttattatgaatctttacatgaaacacctttaattgcaaatacaattgcgagaaagaaattatacgaaatgaattctgtaatttctgatacggcagaatatggctgttatttatttgatcatgcttgtaaacctttattagaagattttatggctaagattgatttaaatgtaattggtaagaaatacgacgaaggattatcgaatgctgttgataaccgaactttggttgcggttaacgatgcgattagaaatcactcagttgaagaaattggtgtttatttgagagctgaaatggcagatatgaaag

SEQ ID NO: 209056 - DNA, 456 bp, Unknown
  Bacterial polypeptide expressing nucleotide sequence isolated from the Sargasso Sea
cagatttgtttggagaacaaacagttctttgtggaggtcttgtggaattaattaagaatggttacgagacattagtagaggccgggtatgaaccagaaatggcatattttgagtgcttacatgaggtaaaattaatcgttgatcttatctatgagggcgggattgcaaatatgaattactcaatttcaaatactgcagagtatggtgagtatgtttcaggacctagaattatcaataaagaggaaactaagaaaagaatgaaagaagtacttgcagacattcaatctggaaagtttactaaacaatggatggatgagtgtaaaaatggtcagaaaaattttttaaagaccagagaggaattagcaaaacattctatagaaacagttggtacgaaactaagagctatgatgccttggattggtaaaaagaaactagttgatagtgataagaaataat

SEQ ID NO: 209057 - DNA, 469 bp, Unknown
  Bacterial polypeptide expressing nucleotide sequence isolated from the Sargasso Sea
gatgaggttgaaacagatttattttggtgaacagactgttctttgtggtggtttagttgaactaataaagaatggttatgagaccttggtggaagctggatatgaacctgagatggcatattttgagactgttcatgaagtaaaacttattgttgatcttatttatgaaggtggaattgcaaatatgaattactctatctcaaacactgccgaatatggagaatatcaatctggacctagagtgattaataaagaggaaactaaaaaaagaatgaaagaggttttggctgatattcaatctggtaaatttacgaaagaatggatggatgagtgcaaaagtggccaaaaaaacttccttactacaagggcaaaactagctgaacatccagttgaaaaggtcggggcaaatttaagatctatgatgccatggattggcaagaagaaattagttgatagtgataagaagtaa

SEQ ID NO: 209058 - DNA, 491 bp, Unknown
  Bacterial polypeptide expressing nucleotide sequence isolated from the Sargasso Sea
aattattgaaactacatttaaagatgaagtagaaacagatttatttggagagcaaactgttttatgtgggggattagttgaactaataaaaaatggttatgaaactctggttgaagctggctatgaacctgagatggcatactttgaaactgttcacgaagtaaaattgattgtagatttaatttatgaaggtggaattgcaaatatgaattattcaatttctaataccgctgagtatggagaatatatgtcgggccctagaataataaataaagaagaaacaaaaaaaagaatgaaagaagttcttgaagatatccagtcaggcaaatttactaagcagtggatggatgagtgcaaaaatggccagaaaaattttcttaaaacaagagagaaactagctgaacatccagtcgaaaaagtaggtgccaaattaagagctatgatgccttggatttcaaaaaagaaactagttgatagcgataagaattaat

SEQ ID NO: 209059 - DNA, 850 bp, Unknown
  Bacterial polypeptide expressing nucleotide sequence isolated from the Sargasso Sea
atgcgtgtgtattacgaccgcgacgcggacatcaatctgatcaagggcaagaaagttgtcgtggtcggatacggcagccagggccatgctcatgcgctcaacctgaaggactccggcgtcaaggacgtggccattgcgctgcgcaagggctcggcttcggctaagaaggcggaagccgccggcttcaaggtgctcgaggtcgctgaagctgccaagtggggcgacgtcatcatgatgctgaccccggacgagctgcaggccgacatctatcgcgatcatctgcacgacaacatgaagaacggcgcggcgctcttgttcgcccacggcctcaacgtgcacttcaacctgatcgagccgcgcgccgacatcgacgtgctgatggtcgccccgaagggccccggccacaccgtgcgttcggaataccagcgcggcggcggcgtgccctgcctgatcgcgatccacaaggatgcttcgggcaatgctcatgacctcggcctgtcgtatgcctccgccatcggcggcggccgcgccggcatcatcgagacctcgttccgtgaagagtgcgaaaccgatctgttcggtgagcaggtcgtgctctgcggcggcctggtcgagctgatcaagggcggcttcgagacgctggtggaagccggctacgcgccggagatggcctacttcgagtgcctgcacgaagtgaagctgatcgtcgacctgatctatgaaggcggcatcgccaacatgaactactcgatctccaacaccgccgaatacggcgagtacgtcaccggcccgcgcatcgtgacgccggagaccaaggccgagatgaagcgcgtgctggccgacatccaga

SEQ ID NO: 209060 - DNA, 844 bp, Unknown
  Bacterial polypeptide expressing nucleotide sequence isolated from the Sargasso Sea
atgttttatgaaaaagatacaaatgtagatttaataaaagacaaaaaagtagcaatttttggctatggaagccaaggacatgcacatgctcttaatctaagagatagtggtgtcaaagaagttgtagtagctttaagagaaggttcgtcaagtattggaaaagctgaatctaaaggattaaaagttatgaatttatctgatgctgcagaatgggcagatgtagttatgattctaactccagatgaattacaagcatcaatatataaaaatcatatagagcaacgtgttaaagaaggaacatcaattgcgtttgctcatggtttaaatgttcactatgatctaataaaagctagaaaagatttagatgtatttatggttgcaccaaagggacctggtcatttagtaagaagtgaatatgaaaaaggtggtggagttccttgtttatttgctgttcatcaagatggttctggtaaagcaagagatttggcaatgtcatatgcatcagctgttggtggaggtagatctggaataattgaaactacatttaaagatgaagtagaaacagatctatttggagaacaaacagttttatgtggtgggcttgttgaattaattaaaaatggatatgaaactttagttgaagctggatatgaaccagaaatggcttatttcgaaactgttcacgaagttaaactgattgtggatttgatatatgaaggtggaattgctaatatgaattattcaatttcaaatacagcagagtatggtgagtatcagtcaggtccaagaataattaaaaaagaaaaaaccaagcaaagaatgaaagaagttttagcagaaattc

SEQ ID NO: 209061 - DNA, 445 bp, Unknown
  Bacterial polypeptide expressing nucleotide sequence isolated from the Sargasso Sea
atgttttatgaaaaagatacagacgttaatttaatcaaagataaaaaaattgcaatttttggttatggtagtcaaggacacgcgcatgcactaaatttaaaagatagtggtgtaaaagaagttgcagttgctttaagagaaggatctttaagtaaagccaaagcagaatcaaaaggtttaaaagttatgaatttatcagatgcagctgaatgggcagatgtagtaatgatattaactccagatgaattgcaggcttcaatttataaaaatcatattgaacaacgtgtaaaagaaggaacatcaatagcttttgctcatggattgaatattcattatgatttaattaaagctagaaaagacttagatgtttttatggttgctccaaaaggtcctggacatttagtaagaagtgaatatgaaaaaggtggaggagttccgtgcttat

SEQ ID NO: 209062 - DNA, 338 bp, Unknown
  Bacterial polypeptide expressing nucleotide sequence isolated from the Sargasso Sea
aaaaggtggtggagttccttgtttatttgctgttcaccaagatggttctggtaaagcaagagatttagcaatgtcatatgcgtcagctgttggtggaggtagatctggaataattgaaactacatttaaagatgaagtagaaactgatctatttggagaacaaactgtattatgtggtgggcttgttgaattaattaaaaatggataccaaactttagttgaagctggatatgaaccagaaatggcttattttgaaactgttcacgaactgaaactgattgtggatttaatatatgaaggtggaattgctaatatgaattattcaatttcaaatacag

SEQ ID NO: 209063 - DNA, 861 bp, Unknown
  Bacterial polypeptide expressing nucleotide sequence isolated from the Sargasso Sea
aagaaaaagcagagtctcagggacttagagttatgtctctttcagatgcagcagaatgggcagacatattaatgatgctgactccagacgaattacaatctcaaatttataaaaatcacattgagcaaagaatgagacaaggaacaagtttagcttttgctcatggattaaatattcattttaatcttattaaagctagaaaagatttggatatttttatgattgccccgaaaggaccaggtcacttagtaagaagtgaatatcaaaaaggtggtggagtaccctgtttaatggcaatccaccaagatagctcaggtaaagcaaaagatttagctctttcatacgcaagtgctattggaggaggaaaatctggagtcattgaaacaacatttaaagatgaatgtgaaacagatttatttggcgaacaaagtgttttatgcggtggtttagttgaattaattaaaaacggatacgaagttttagttgaagcaggatatccacctgaaatggcatactttgaatgcttacatgaagttaaattaattgtggatttaatttatgaaggtggtattgcaaatatgaattattctatttcgaacacggctgagtatggtgagtatgttacaggcaaaagaatagtagatacaaaaacaaaagagagaatgaaggaagttttgaaagatatccagtcaggaaaatttgcaaaacagtggatggaagaaaacaagaatggacaaaaaaattttttgaaaatgagaaaagaattagccgaacatccaattgaaaaagttggcaagaaacttagagatatgatgccttggattggaaaaaataaattagttgataaggaaaaaaattagc

SEQ ID NO: 209064 - DNA, 538 bp, Unknown
  Bacterial polypeptide expressing nucleotide sequence isolated from the Sargasso Sea
atgttttatgaaaaagatacagatgtaaatttgatcaaaaataaaaaaattgcaatttttggttatggaagccaaggtcatgctcatgcccttaatcttaaagatagtggagttaaagaagttgtagtcgcattaagagatggctcagccagtaaagcaaaagctgaatcaaaaggattaaaagttatgaatttatctgatgcagctgaatgggctgatgtagtaatggttttaactccagatgaacttcaagcaacaatttataaaaatcacattgaacaaagagttagagaaggaacttcaattgcttttgctcacggtttaaatattcactatgatttgataaaagcaagaaaagatctagatgtatttatggttgcacctaaaggtcctggacaccttgtaagaagtgaatatgagaagggtggaggagttccttgtttatttgcagtacatcaaaatggatctggtaaagctagagagttagcgatgtcttatgcttctgcagttggaggaggaaggtctggaattatagaaa

SEQ ID NO: 209065 - DNA, 778 bp, Unknown
  Bacterial polypeptide expressing nucleotide sequence isolated from the Sargasso Sea
gcagatgtagtaatgattttaactccagatgaattacaggcagaaatttataaaaatcatatagagcaaagggtaaaagaaggaaccagtattgcatttgcgcatggattaaatgttcactatgatttaatcaaagcaagaaaagatttagatgtatttatggttgctcctaaaggacctggtcatttagttagaagtgaatatgaaaaaggtggaggagtaccatgtttatttgcggtacatcaaaatggatcaggtaaagcaagagatctagcgttatcatatgcgtcagctgttggtggtggaagatctggaattattgaaaccactttcaaagacgaagttgaaacagatttatttggtgagcaaacagttctttgtggaggattggtagaattaattaaaaatggttatgagactttagttgagggtggttacgagcctgagatggcatattttgaaactgtgcacgaagtaaaactaattgttgatttgatttatgaagggggaattgcaaatatgaactactcaatatcaaatacagctgagtatggtgaatatcaatctggaccaagaattataaataaagaggaaaccaaaaaaagaatgaaggaagtattgtctgatattcaatctggaaaattcactaaagagtggatggatgaatgtaaaaatggccagaaaaactttttagcaactagagctaagttagcagagcattctgtggaaaaagttggtgctgaacttagagcaatgatgccatggattggcaagaaaa

SEQ ID NO: 209066 - DNA, 397 bp, Unknown
  Bacterial polypeptide expressing nucleotide sequence isolated from the Sargasso Sea
atgagagtatattatgatagagatgcagatctgaatttaattaaaaataaaaaaatagccattgtaggctatggcagtcaaggtcatgctcatgcaatgaacctcagagattctggtattgaaaacgtagctattgcacttcgaaaagactcagcaacaagagacaaagctaaaaatgcaagttttaatgttatgacgcctactgaagctgctgattgggctgatataattatgatgttaacccctgatgaacttcaatcagatatttataataatgaaattgctccaaatattaaggaaggtacagcacttgcttttgcacatggtttaaacattcattttgatttgatacagccatcagaaggtattgatgtaattatgattgcaccaaaaggac

SEQ ID NO: 209067 - DNA, 545 bp, Unknown
  Bacterial polypeptide expressing nucleotide sequence isolated from the Sargasso Sea
aatgttttatgaaaaagatgcgaatgtaaatttaataaaggataaaaaggttgccatttttggatatggaagccaaggacacgcacatgctttaaatttaaaggatagcggagttaaaaatgttgttgttgcccttagagaaggctcttctagtattaaaaaagcagagagcgaaggtctcaaggttatgtcattatcagatgctgcagcttgggcagacgtagtaatggtattaacacccgatgaacttcaagcatcgatttataaaaatcatattgaacaaagaatgagacaaggtacgagtttagcatttgcccacggactaaatatccattttaatttgattaattcaagaaaagatttagatgtttttatggttgcaccaaaaggaccaggacatttagttagaagcgaatatcaaagaggaggaggtgttccttgtttaatggcagtgcataaagatagttctggtaaagcaagagatcttgcaatgtcatacgcatgcgcagtaggtggtggaagatcgggaattattgaaacaactt

SEQ ID NO: 209068 - DNA, 766 bp, Unknown
  Bacterial polypeptide expressing nucleotide sequence isolated from the Sargasso Sea
ttatgtattccagatccttcaatgaaaaaagtttacaacgaagatataaaagataatttagaagaaaatgatattcttttgttcgctcatggttttgcaattctatatgaagaagtaaaacctccagataacgttgacgtaattatgattgcaccaaaagctcctggccatagagttcgagcggtttttgaaagagatttaggtgttccatgcttgatagctgttgataaagacttttcaggttctgcacatgaaataggccttgcatatggaaaaggaataggtggaggaagagctggaattttagaaacaactttcaaagaagaaacagaaacggacttatttggtgaacaagcagtcctatgtggaggtgttacagctttgatcaaggcaggttttgaagtattaactgaagctggttatcaacctgaatcggcttattttgaagttttgcatgaattgaaacttattgttgatttgatttatcaaggtgggcttgaaggcatgagatattctgtttctacaactgccgaatatggagattacacagtaggaccaagaataattgatgattcagtaaagaaagaaatgaaaaaagttttagatgatatccaaagtggaagatttgcaagagaatggatagcagaaaatgatgaaggtcttcataaatatgatgatctcagagaagcagatctaactcatcctgtagaaaaaattggtaaagagttaagggcaatgatgccatggctggaatcgacaacataat

SEQ ID NO: 209069 - DNA, 672 bp, Unknown
  Bacterial polypeptide expressing nucleotide sequence isolated from the Sargasso Sea
aatgttttatgaaaaagacactgatgtaaacctgattaaagataaaaagatcgcaatttttggttatggtagccaaggtcatgcacatgcacttaatctaaaagatagtggagtaaaggaagtggtagttgcgttaagagaaggctcagctagcaaaataaaagctgaatctaaaggactaaaagttatgaatttgtctgatgcagctgaatgggctgatgtagttatggttttaactcctgatgaacttcaagcaacaatttataaaaaccacatagagcaaagagttagagaaggaacatctattgcattcgcacatggtttaaatatccattatgacttaattaaagcaagaaaagatttagatgtatttatggtagccccaaagggtcctggacatttagttagaagcgaatatgaaaaaggaggaggagttccttgtttatttgcagtccatcaaaatggatcgggcaaggcaagagaattagcaatgtcgtatgcttcagcagttggcggtggaagatcaggaattattgaaactacatttaaagatgaagttgaaactgatctattcggggaacagactgtcctttgtggaggtttagtagaattaattaaaaatggatatgaaactttagtcgaagctggttatgagccagagatggcttattt

SEQ ID NO: 209070 - DNA, 490 bp, Unknown
  Bacterial polypeptide expressing nucleotide sequence isolated from the Sargasso Sea
aatgaagatttattatgatgatgatgccaacatagacattatcaaaacttttaaagtaactattgtaggttatggttcgcaaggacatgcacatgcaaataatcttaaagattctggtgttaatgtaactgttgctcttcgtgaaggttctgattcttggactaaggcaactgaagctggattaaatgtaatgccagttgctgattctattaaagatgctgatttagtaatgatcttggctccagatgagtttcaaaaaggcatttatgaaaaaaatattcaaccaaatttaaaaagtgatgcaattttagcttttgcgcatggctttaatattcactttaaaaagattatcccagaggctggaaatagcgtaattatgattgctcccaaaggcccaggccatactgtaagaagtacatatttaaaagatggtggggttccctccttaatagcggtatatcaagatgctatttctaataatacattctct

SEQ ID NO: 209071 - DNA, 433 bp, Unknown
  Bacterial polypeptide expressing nucleotide sequence isolated from the Sargasso Sea
atgttttatgaaaaagatactgatgtaaatttaattaaaagtaaaaaaatagcaatttttggttatggtagtcaaggacatgctcacgcacttaatttgaaagacagtggtgttaaagaagttgtagttgcgctaagagatggatcgtcaagcaaggcaaaagcagagtctaaaggacttaaagttatgaatttgtcagatgccgcagagtgggcggatgttgtaatgattttaacaccagatgaattacaagctacaatttacaaaaatcatattgagcaaagagtcagagaaggaacttcaatcgcattcgcacatggattaaatattcattacgatcttattaaagctagaaaagatttagatgtatttatggttgccccaaaaggaccaggccatttggtaagaagtgagttgaaaaaggggaggtgtt

SEQ ID NO: 209072 - DNA, 487 bp, Unknown
  Bacterial polypeptide expressing nucleotide sequence isolated from the Sargasso Sea
tataattgaaacaacttttaaagatgagtgcgaaacggacttatttggcgaacaaacagttttatgtggcggcttagttgaattaatcaaaaatggttttgaaactttgactgaagcaggctatccacctgaaatggcatactttgaaactcttcacgaagtaaaactaattgtagatttaatttatgaaggtggaatagctaatatgaattattcaatttctaacacagctgaatatggggagtatgtttctggaaaaagaatagtagattcaaaaactaaagaaaaaatgaaagaagtattaaaagacatccaatctggtaaatttacaaaacaatggatggaggagcataaatctggtcaaaagaattttcttaaaatgagaaaagatttagccgatcatccgatagaaaaagttggtaaggaccttagagccatgatgccatggatcggaaaaaacaaattggtcgacaaagacaaaaattaa

SEQ ID NO: 209073 - DNA, 590 bp, Unknown
  Bacterial polypeptide expressing nucleotide sequence isolated from the Sargasso Sea
tagtcaaggacatgctcatgcattaaatcttaaagatagtggtgttaaagaaattgtggttgcactaagagatggctcatcaagtgtagcaaaagctgagtcaaaaggattaaaggtcatgaatttatctgatgctgctgcttgggcagatgtagtaatgattttaactccagatgaattacaggcagaaatttataaaaatcatatagagcaaagagttaaagaaggatccagtattgcatttgctcatggattaaatgttcactacgatttaatcaaaacaagaaaagatttagacgtgtttatggttgcccctaaagggcctggtcacttagttagaagtgaatttgaaaaaggtggtggagtaccatgtttatttgcagttcatcaaaatggatcgggtaaagcaagagatctagcgttatcatatgcatcagctgttggtggtggaagatctggaattattgagaccactttcaaagaccaagttgaaacagatttatttggcgaacaaacagttctttgtggaggattggtagaattaatgaaaaatggttatgagactttatttgaagctggttacaaacctg

SEQ ID NO: 209074 - DNA, 493 bp, Unknown
  Bacterial polypeptide expressing nucleotide sequence isolated from the Sargasso Sea
tatgaaaacttattacgataaggacacaaacaaagatttaattaaagataaaaaggtagccatatttggatatggaagccaagggcacgctcatgcattaaacttaaaagatagcggtgttaaagaagttgtagttgccttaagagagggatcttcaagtattaaaaaagctgaaagtgccggattaaaagtaatgtcattatcagatgctgctgcctgggcagatgtagtaatgatgttaacgcctgatgaacttcaatctgagatttacaaaaatcatattgagcaaagaatgaaagagggaacaagtttagcctttgcacatggtttgaacattcattttaatttaattaatgctagaaaagatttagatgtctttatggttgcgccaaaaggaccaggacacactgtaagaagtgaataccaaaaaggtggtggagttccatgtttaatggctgttcacaaagatagttcaggaaaagcaaaagattta

SEQ ID NO: 209075 - DNA, 806 bp, Unknown
  Bacterial polypeptide expressing nucleotide sequence isolated from the Sargasso Sea
tatgaatttatcagatgcagctgaatgggcagatattgtaatgatattgactcctgatgaattacaagcatcaatttataaaaatcatattgagcaaagagttaaagagggatcttcaatagcttttgcacatggtttaaatgttcattatgacttaataaaagcaagaaaagatttagacgtattcatggtcgctcccaaaggacctggtcatttagtaagaagtgaatatgaaaaaggtggtggtgtaccatgtttatttgcagtacatcaaaatggatcaggtaaagcgcgagatcttgcgatgtcttatgcttcagcaattggtggaggtagatctggcattattgaaacaacttttaaagatgaagtggaaacagatttatttggtgaacaaactgttttatgtggaggattagttgaacttataaaaaatggatatgaaacattagttgaagctggttatgaacctgaaatggcatattttgaaactgttcatgaagtgaaattaattgtagatcttatttacgagggtggaattgctaatatgaattattcaatttcaaatacagctgaatatggtgaatatcaaacagggccaaaaataataaataaagaggaaacaaaaaaaagaatgaaagaggcactggctgatattcaatcaggaaaatttaccaaagcgtggatggatgaatgtaaaaatggtcaaaaaaatttcttagctactagagcaaaattagctgagcacccagtagaaaaagttggagctaatttaagagcaatgatgccatggattggcaagaaaa

SEQ ID NO: 209076 - DNA, 819 bp, Unknown
  Bacterial polypeptide expressing nucleotide sequence isolated from the Sargasso Sea
aatgagagtatattacgatagagatgcagatttaaacttaataaaagataaaaaaatatctattgtaggatatggaagtcaaggtcatgcgcatgcaatgaatctgagagattctggaatagaaaatgtttcaattgctttaagagaaggttcaaattcaagaagtaaagcagaacaagctaatttcaaagtaatgacacctgcagaagctgcaagttgggctgatataattatgatgttgacacctgatgaacttcaatctgaaatttacaaaaatgatatatctgaaaatattaaagaagggacaacgattgcatttgctcacggattaaatattcactttgatttaattaaacctaaagaaggtatagatgtaataatggttgcgcctaaaggtcctggtcatacagtaagagcagaatatgtaagaggtgctggtgtaccatgtttagttgctgtagataaaaatccttcaggcaatgctcttgaaataggaattgcctatgcatcagcaataggtggaggacgtgctggaattattgaaacaacttttaaagaagaatgtgaaacagatctatttggagaacaatctgttttatgtggaggtttaactcatttaatattggcaggttatgaaactcttgttgaagcaggatatgctcctgaaatggcatattttgagtgtcttcatgaggtcaaacttattgtcgatcttttatatgaaggtggaatggcaaacatgagatattcaatctcaaatacagctgagtatggagattattcaagaggtccaagactttatactgatgaaacaaaaaa

SEQ ID NO: 209077 - DNA, 807 bp, Unknown
  Bacterial polypeptide expressing nucleotide sequence isolated from the Sargasso Sea
agatggttcagcgagtaaaataaaagcagagtcaaaaggattaaaagttatgaacttatctgatgcagctgaatgggctgatgtagttatggttttaactcctgatgaacttcaggcaacaatttataaaaatcatatagagcaaagagtccgagaaggaacttcgatagcttttgctcatggtttaaatattcattatgatttaattaaagcaagaaaagatctagatgtatttatggtagcgccaaaaggtccaggacatttggtaagaagcgaatacgaaaaaggtggaggagttccttgcctatttgctgttcatcaaaatggatcaggtaaggcaagagaattagctatgtcatatgcttctgcagtaggtggaggtagatcaggaattattgaaactacatttaaagatgaagttgaaactgatttatttggggaacagactgttctttgtggtggactggttgagctaattaaaaatggatatgaaactttagtagaggctggatatgagccagaaatggcatattttgaaacagttcatgaagtaaaattaattgttgatttaatttatgaaggtggaattgctaatatgaattattcaatttcaaatacagcagaatatggggaatacgttacaggcccaaaaattataaataaagaagaaaccaaaaaaagaatgaaagaagttttggcagatattcaatcaggtaaatttaccaaagattggatgaacgaatgtaaaaatggccaaaagaattttttaaagaccagagaaaaattggctgaacaccctgtagaaaa

SEQ ID NO: 209078 - DNA, 754 bp, Unknown
  Bacterial polypeptide expressing nucleotide sequence isolated from the Sargasso Sea
agacctatacaaagagagtattgagcccaatctaaagccgtccgcagcagtagctttcgcacatggttttaatattcattataaacaaattgttccagctgattcccatgacgtattcatgattgcacccaagagtccaggacatttagtaagatctacttttgtcaatggtaaaggcgtacctactttaatagctatacataataacacatctggcaaagctaaggatattgctctggcatatgcctccgctattggtggcggtagagctggaataattgaaacagacttcaaagaagagacagagacagacttatttggagagcaagctgtcctttgtggcggtgtgacagcacttatactggctggttttgaaacactagtggatgctggttatgctcctgagatggcatacttcgagtgtctaaatgagctaaaactaattgttgatttaatgtacgaaggaggtatgacagatatgagatattctatatctaatactgcagagtacggtgatttaacaaaaggtcctttcttaattgatgatcatgtcaaggctaaaatgaaattagtattagctgatgttcaaaatgggaaatttgcaaatgatttcgtctctgaaattaagtctggttcaccagaattcaatagattgagaaaagagggatctgagcatttaatagaaagcactggaaaaaaacttcgtagcatgatgtcatggatggataaggaaaaattggtaggtaacaaataa

SEQ ID NO: 209079 - DNA, 828 bp, Unknown
  Bacterial polypeptide expressing nucleotide sequence isolated from the Sargasso Sea
acgctcatgcccttaatttaaaagatagtggtgtaaaggaagttgttgttgcacttagagatggttctgcaagtaaagcaaaagcagagtcaaaagggcttaaggttatgaatttatcagatgctgcagagtgggcagacgttgtaatgatattaactccagatgaactacaagcaacaatttataaaaatcatattgaacaaagagttagagaagggacatcgattgcattcgcgcatggattaaacattcactatgatcttattaaagcaagaaaagatttagatgtatttatggtagcacctaaaggaccagggcatttagttagaagtgaataccaaaaaggcggaggagtaccatgcttatttgcagttcatcaaaacggatcaggaaaagccagagaacttgcgatgtcatatgcatcagcggtaggtggtggaagatctggaattattgaaacaacatttaaagatgaagttgagacagatttatttggagaacaaacagtgctttgtggtggcttagttgaattaattaaaaatggttatgaaactttagttgaagcagggtatgaacctgaaatggcatattttgaaactgttcatgaagtaaaattaatcgtagatctaatttatgaaggcggaatagctaatatgaattattcaatttcaaacacagctgaatatggagaatatacctctggaccaaaaataattaataaagaagaaacaaaaaaaaggatgaaagaagttttagctaatattcaatctggaaaatttacgaaagaatggatggatgagtgtaaaaatggccaaaaaaatttttaaa

SEQ ID NO: 209080 - DNA, 889 bp, Unknown
  Bacterial polypeptide expressing nucleotide sequence isolated from the Sargasso Sea
gattcgggtggaaatgtaaccgttgcactcagaaaagaatctgcatcttggtcaaaagctgaaactgctgggctgaatgttcaagaagttgctgaggctgtaacagatgctgatatggtaatgattttaatgcctgacgaattgcaatctgctacttataagagcgagatagaaaacaacataaaacaaggagctgttttggcttttgcacatggatttaacatccattttgacatgatagagccaagggaagaccttgatgtaataatggttgctccaaaagggcctggccatactgttagatctcaatatgaaataggtgctggagttccttgccttattgccgttcataaagatatctcagggaatgcgaaagaaatagggctatcatatgcttcagctataggttctgggagagctggtattattgaaactaactttaaggatgaaacagaaactgatttatttggagaacaggcagttctttgtggtgggcttacacaattaatccaaaatggttacgaggtattagttgaagatggttatcctcctgaaatggcttatttcgaatgcttgcatgaagtgaaacttatagtagatcttatatacgagggtggattagaaaatatgagatacagtatttctaatacagcagagtttggtgattatcttagtggaccaaaagttgttaattcagatgtcaaagaagagatgagagctgtattaaaaagaattcaatcaggtgaatttgctcaagaatttatgagtgatgctagagagagcaatgatggtaagggcggaccaagaatgaaggaatatcgtcagcaaacttcagaacactcgatagaaaaagtaggatctgaacttagagctatgatgccttggatag

SEQ ID NO: 209081 - DNA, 707 bp, Unknown
  Bacterial polypeptide expressing nucleotide sequence isolated from the Sargasso Sea
aatgttttatgaaaaagatacaaatgtaaatttaattaaagataaaaaaattgcaatatttggttatggtagtcaaggacatgctcatgctttaaatttaaaagatagtggtgttaaagaagttgtagttgctttaagagaaggttcttctagcattcctaaagcagagtcaaaaggattaaaagtgatgaatttatctgatgctgctgagtgggcggatgttgtaatgattttaaccccagatgaattacaagcttcaatctataaaaatcacatagagcaaagagtaaaagaaggtaaatcaatagcatttgctcatgggttaaatgttcattacgatttgataaaagctagaaaagatttagatgtatttatggttgctccaaaaggaccaggacatctagtaagaagtgagtatgaaaaaggcggtggagtaccatgtttatttgcagtgcatcaaaacggttcaggtaaagcaagagatttagcaatgtcatatgcatcagcagtcggtggtggtagatcaggaattattgaaacaacatttaaagatgaggttgaaacagatttatttggtgaacagactgttctttgtggtggcttggttgagcttataaagaatggttatgaaactttggtggaagctggatatgaaccagagatggcatattttgagaccgttcatgaagtaaaacttattgttgatc

SEQ ID NO: 209082 - DNA, 479 bp, Unknown
  Bacterial polypeptide expressing nucleotide sequence isolated from the Sargasso Sea
aactacctttaaggaggaatgcgaaacggacttatttggtgaacaaacagtcttatgtggaggtttagtagaattaattagagctggatatgaaactctaactgaagctggttacgcaccagaaatggcttactttgagtgtctacacgaagtgaaattaattgttgatcttatttatgagggtggtattgcaaatatgaattattcaataagtaatacagctgagtatggagaatatgtcactggaccaaggctaattacatctgagacgaaagctgagatgaaaagaatactacgggatattcagtctggaaaatttactagagattggatgcttgaaaataaagttaatcagacaagttttaaagcaaccagaagaaaagcctctgatcatccaatcgaagcagttggaaaagagctgagagcaatgatgccttggataactgcaaatagattagttgataaagataaaaattaat

SEQ ID NO: 209083 - DNA, 613 bp, Unknown
  Bacterial polypeptide expressing nucleotide sequence isolated from the Sargasso Sea
gcagctcaagaccctgatgcgcccgctgttcgagaagcacatggacgacatcatcgccggtgagttctcccgcggcatgatggccgactgggccgaagacgatgccaagctgttcggctggcgcgaagagaccggcaagtccgccttcgaaaacgcgccggcgtttgcaggcaagattgccgagcaggagtacttcgacaatggcgtggtgatggtggccatggtcaaggcgggtgtcgagctggcgttcgagaccatggtggcctccggcatctatgaggagtctgcctactacgaatccctgcacgagctgccgctgatcgccaacacagttgctcgcaagcgtctgtacgagatgaacgtggtcatctccgacaccgccgaatacggcaactacctgttcgccaacgccgccgtgcccttgctgcgcgagcacttcatgccgactctgaaagcgggcgacctgggtgccagcaaggcggaagggcagagcgtcgacaacctggcgctgctggcggccaacgaagcgacccgcaaccaccccatcgaagcgatcggtcaggtactgcgtggttacatgaaggacatgaaacgcatcgccgtcggcggttaa

SEQ ID NO: 209084 - DNA, 561 bp, Unknown
  Bacterial polypeptide expressing nucleotide sequence isolated from the Sargasso Sea
aatggttacaaaaattatatatgatgattcgatagaccaagatttaattaagtcaaaaaaagttactgtaattggattcggtagccaaggtcatgcccacgcacttaatctacatgaatcaggtgtggatgttactgttggattaagagagtcttctgaatcctttaaaagagcatctgatatgggattaaaagttgagaatgtagtagatgcgacttctggggcagatgtagttatgcttctattgcccgatcagctcatggcagatatatataacagtgatattgcaccacatatgaaagatggttctacattgttgtttgcacatggatttaatattcattttggtgaaataattcctcgtgaagatatatctataggtatggtggcccctaaagggcctggtcacttacttagaaggacttatgaagaggattctggaatgccttgtttagtggcagtagaaaaagatgtaagtggtaatacatttgaattatcactctcctactcttcagctattggtggaggtaaagcaggaattttaaagacaacattcaaaga

SEQ ID NO: 209085 - DNA, 536 bp, Unknown
  Bacterial polypeptide expressing nucleotide sequence isolated from the Sargasso Sea
aatgttttatgaaaaagatgcaaatataggtttgattaaagacaaaaaagttgcaatttttggttatggaagtcaaggacatgcacatgcgcttaatttaaaagatagtggagtgaagaatgttgttgtcgctttgagggaaggatcatctagtatcaaaaaagctgaaagtgagggcctcaaagttatgtctttatcagacgctgcagagtgggctgatgttgttatgttgttaaccccagacgaacttcaagcttctatttataaaaatcatattgaacaaagaatgagagaaggaacaagtttagcttttgctcacggtttaaatattcattttaatttaatcaactccagaaaagatttagatgtttttatggttgcgcctaaaggaccaggacatctagtaagaagcgaataccaaagaggtggtggagtcccttgtcttatggctgttcacaaagatagctctggtaaggccagagatctcgcaatgtcatatgcatgtgctgttggcggtggaagatcaggaattatag

SEQ ID NO: 209086 - DNA, 523 bp, Unknown
  Bacterial polypeptide expressing nucleotide sequence isolated from the Sargasso Sea
tacgcttctgcagttggtggcggaagatcaggaataattgagacaacatttaaagatgaagttgaaaccgatctgtttggtgaacaaacagttctttgtggaggtttagttgaattaatcaaaaatggttatgaaactttagttgaagcaggttatgaacctgaaatggcatatttcgaaacagttcatgaagttaaattaattgttgatctaatctatgaaggtggaatagcgaatatgaactattctatttctaataccgctgaatatggagaatatgaatctggacctagaataattaataaagcagaaactaaaaaaagaatgaaagaagtattagatgatattcagtcaggcaagttcactaaagaatggatggacgagtgtaaaaatggccagaaaaaattccttgcaacaagagctaaattagctgagcatccagtagaaaaagtaggagcgagcctgagagcaatgatgccatggatagctaaaaagaagttagttgacagcgataagaagtaga

SEQ ID NO: 209087 - DNA, 681 bp, Unknown
  Bacterial polypeptide expressing nucleotide sequence isolated from the Sargasso Sea
ctagagaagatcttgatgtcatcatggttgcaccaaaaggccctggtcatactgttagatctcaatacgagatcggtgctggcgtcccttgtctaattgcaattcataaggatgcttcaggtaaagctaaagaaattggcttatcttatgcctcagctataggttctggcagggctgggataatcgaaactaattttaaggatgaaacagagacagatttatttggagagcaggcagttctttgtggtggtttatctcaattaattcaaaatggttatgaggttctagttgaggatggatatccacctgagatggcatactttgaatgcttgcacgaagtgaagctaattgttgatcttatttatgaaggtggattagaaaatatgagatacagtatctctaatactgctgagtttggtgattatgtcagtggacccaaagtagttaattcagatgctaaagaagaaatgagagccgtgctcaaaagaatacaatcaggtgaatttgctaaagaatttatgaatgattgcagagagagtaatgatggtaagggcggaccaagaatgaaagagtaccgtaaacagacttctgaacattctattgagaaagtaggttctgaactcagagccatgatgccttggatcgcacaaaataagattgtcgataaggccaaaaactaaa

SEQ ID NO: 209088 - DNA, 772 bp, Unknown
  Bacterial polypeptide expressing nucleotide sequence isolated from the Sargasso Sea
aaaaatagaacccaacctcaagcagggcgccatcttagcttttgcgcatggatttaatatacattttggtaagatcaaacctactgatgatattagcgtggtgatgattgcaccaaaaggtcctggacatactgtgcgcagcacatttatttctggaggaggagtcccatcattaattgcaatacacaaagattctatttccgaaagagactttaatgctaaggatgttgctctgtcttatgcaaaagcaaatggcggaactagagcaggtgttttagagacttcattcaaagaggaaacagaaactgatttatttggagagcaggcagttctgtgcggaggaatgacggcactaattaaagctggttatgagacattagtagaagcgggatatagtcctgagatggcatattttgaatgtttgcatgaaacaaaactaattgttgatcttctgcatgagggcggaatttctaatatgcattattcaatatcaaatactgcagagtttggtgattatttaacagggccaagaatcataactgaagacacaaaaaaagaaatgaagaaagttcttgaagatattcaatctggtaattttgctgacaagtttcttgatgattgtcgacaaagtaatgatggcagcggaggcccttttttaaaaaacaatcgtgaaaagacaaaggaacactctatagaatctgttggaaaagaacttcgttcaaagatgaagtttttgagtgaaaaaaagcttgtggataaagataaaaattaa

SEQ ID NO: 209089 - DNA, 850 bp, Unknown
  Bacterial polypeptide expressing nucleotide sequence isolated from the Sargasso Sea
cttgaaagatagtggagtaaaagaagttgttgttgctcttagagaaaattctccaagtgcaaagaaggctaaaagtgaagggttaaaagtaatgtctttatcagacgccgctgcctgggcagacgttgtaatgcttttaacacccgatgaactacagtcaaaaatttataaaaatcatatagaacaaaggatgagagaaggaacaagtttagcatttgctcatggtctaaatattcattttaatttaattaattccagaaaagatttagatgtttttatggttgcaccaaaaggacctggacatttagttagaagtgagtatcaaaaaggaggaggagttccttgtttaatggcagttcataaagatagttcaggtaaagctagaaatctagcaatgtcatatgcttcagctattggaggaggtaagtctggaattattgaaacaacttttaaggatgaatgcgaaacagatttatttggtgaacagactgttttgtgcggtggattggttgaacttataaaaaatggttatgaaacattaacagaagctggttacccacctgagatggcatactttgaatgtttacatgaagtgaaactgattgttgatcttatttacgagggtggaattgcaaatatgaattattcaatatctaatactgcagaatatggggaatacgtatcaggtaaaaaaattgtagacaataagaccaaggaaagaatgaaggaagtcttaaaggatattcaatctggaaaattcactaaagaatggatgaaagaatgtgagtcagggcagaaaaattttttaaaaatgagagaagacttagctaatcactcaatagagaaggtg

SEQ ID NO: 209090 - DNA, 749 bp, Unknown
  Bacterial polypeptide expressing nucleotide sequence isolated from the Sargasso Sea
aatgttttatgaaaaagatacagacgtcaacttaatcaaagacaaaaaaattgcaatttttggttacggcagtcaaggacatgcgcatgcactaaatttaaaagatagtggtgtaaaagaagttgtggttgctttgagagaaggatcttcaagtaaagctaaagcagaatctaaaggtttaaaagttatgaatttatcagacgcagcagaatgggcagatgtagtaatgatattaactccagatgaattacaggcctcaatttataaaaatcatattgaacaacgtgtaaaagaaggaacttcaatagcttttgctcatggattgaatattcattatgatttgattaaagctagaaaagatttagatatttttatggttgctccaaaaggtcctggacatttagttaggagcgaatacgaaaaaggtggaggagttccatgcttatttgctgtacatcaaaatggttctggtaaagctagagatttagcaatgtcttatgcttcagctgttggaggtggaagatctgggataattgaaacaacttttaaagatgaagttgaaactgatttatttggtgaacaaacagttttatgtggtggattagtagaacttattaaaaatggttatgaaactttagttgaagcaggatatgaacctgagatggcatattttgaaacagttcatgaagtaaaattaattgtagatttaatttatgagggtggaattgcaaatatgaattattcgattt

SEQ ID NO: 209091 - DNA, 466 bp, Unknown
  Bacterial polypeptide expressing nucleotide sequence isolated from the Sargasso Sea
aggtcgaaactgatttattttggagagcaaacagttctatgtggtggattagttgagttaattaaaaatggttatgaaactttagttgaggctggctatgaacctgaaatggcttattttgaaactgttcatgaagttaaattaatagttgatcttatctatgaaggtggaattgctaatatgaactattctatttccaatacagcagaatatggagaatataaatcaggtcctagaattattaataaagaagaaacaaaaaaaagaatgaaagaagttttagatgatattcagtctggtaaatttactaaagagtggatggatgaatgtaaaaatggacaaaaaaatttcctcgctacaagagccaagctagccgagcatcctgttgaaaaagtgggagcaaatttaagagcaatgatgccctggatagctaaaaagaaattagttgatagtgataagaagtaga

SEQ ID NO: 209092 - DNA, 520 bp, Unknown
  Bacterial polypeptide expressing nucleotide sequence isolated from the Sargasso Sea
atgcttctgcattggaggtggacgatcaggtattattgaaacaacttttaaagatgaagtagagactgatttatttggtgaacaaactgttttatgtggtggtttagtagaattaattaaaaatggttacgaaacattagttgaagcaggttatgagcctgagatggcatactttgagactgtacatgaagtaaaattgattgttgatcttatttacgaaggtggaattgcaaacatgaattattcaatttcaaatacagctgagtatggagaatacgtttcaggaccaaaaataatcaacaaggaagaaactaaaaaaagaatgaaagaagttttggaaaaaattcaatcaggaaagttcactaaagaatggatggaggaatgtaaaaatggtcaaaaaaatttccttaaaactagagaaaaattagcagaacatccaattgaaaaagttggagctgatcttcgagccatgatgccttggattaccaagaagaaattggtcgacagcgataaaaattaa

SEQ ID NO: 209093 - DNA, 821 bp, Unknown
  Bacterial polypeptide expressing nucleotide sequence isolated from the Sargasso Sea
atcaaaaggtttaaaagttatgaatttatctgatgctgcagaatgggcagatgtagttatgatattaacaccagatgaattgcaagcagctatttataaaaatcatatcgagcaaagagttaaagaaggaacttcaattgcttttgcacatggattaaatattcattatgatttaattaaagcaagaaaagatcttgatgtttttatggttgctcccaaaggtcctgggcatttagttagaagtgaatttgaaaaaggtggaggggtcccttgtctatttgctgttcatcaaaatggatctggtaaagctagagagcttgcaatgtcttatgcttcagctgtaggaggtggaagatcaggaattattgaaacaacatttaaagatgaagtcgaaactgatttatttggagagcaaacagttttatgtggtggattggttgaactaatcaaaaatggttatgaaactttagttgaagcaggttacgaacctgaaatggcatattttgaaactgtacatgaagttaaattaattgttgatttaatttatgaaggtggaattgccaatatgaattattctatttctaatacagctgagtatggagaatatcaatctggacctagaataattaataaagaagaaacaaaaaaaagaatgaaagaagttttaaatgatattcagtctggtaaatttactaaagactggatggatgaatgtaaaaatggtcaaaaaaacttcctagcaactagagcaaaattgtccgagcatccagttgagaaagtgggtgcaagtttaagagccaatgatgccttggatagctaaa

SEQ ID NO: 209094 - DNA, 867 bp, Unknown
  Bacterial polypeptide expressing nucleotide sequence isolated from the Sargasso Sea
tatgaaagttttttatgaccaagatgcagatttaaatttaattaaaaataaaaaagttctaatcgttggttatggtagtcagggtcacgctcatgcagcaaaccttagagacagtggcgttaaaaatgtatgtattgctttacgagaagattctaattcagttgctaaagcaaaaaatgctggtttcgatgttaagacagttaatgaaggttctaaatgggctgaagtagtaatgatattaactcctgacgaattacagggagaaatatatacaaatgaaatcaaaaacaatataaggtctggttctgcaattgcttttgcacacggtttgaatattcattttaatttgattgaacctagagatgacattgatgtttttatggtagctccaaaaggtccagggcatacagttagatctgaatatcaaaagggtggtggtgttccatgcttactagctgttcatttagatagctcagggaatacacatgaaataggtctttcatatgcttgtgctgtaggaggtggaagatctggaatcattgaaactacttttaaggaagaatgtgaaactgatttatttggtgaacaagttgtattatgtggtggattggttgaattaatcaaggctggatatgagactttagttgaagcaggttatgcgcctgagatggcttattttgagtgcttgcatgaagtaaaactaattgtagacttaatttatgagggtggaatttctaatatgaattattctatttcaaatacagctgaatatggtgaatatgtatctggaccaagactaattacaagtgaaacaaaaaaaacaatgaagaacattctgagtgatattcaaactggaaaatttacaag

SEQ ID NO: 209095 - DNA, 869 bp, Unknown
  Bacterial polypeptide expressing nucleotide sequence isolated from the Sargasso Sea
ggaggttcatctagtgtggctaaagcagaatctaaaggattaaaggtaatgaatttatctgacgcagctgcctgggcagatgttgtcatgatattaaccccagatgaactacaagcagaaatttataaaaatcatatagagcaaagagtaagggaaggcacaagtatagcttttgcacatggtttaaatgttcattatgatttaataaaagcaagaaaagatttagatgtatttatggttgctccaaaaggacctggtcacttagtaagaagtgagtatgaaaaaggtggtggagttccatgtttgtttgcagttcatcaagatggatctggtaaagcaagagatttggctctttcctatgcttcagcagtaggtggaggaagatctggtattattgaaacaactttcaaagatgaggttgaaacagatttatttggagaacaaactgtattatgtggtggtttagttgagctaattaaaaatggatacgaaactttagttgaagctgggtatgaaccagagatggcatatttcgaaacagttcatgaagtaaaattaattgttgatttgatttatgaaggtggaattgcaaatatgaattattctatttctaatacagctgagtatggcgaatatcaatctggtccaagaattgttaataaagaagaaaccaagaagagaatgaaagaagttttagctgatatccaatcaggtaaatttacaaaagaatggatggatgaatgtaaaactggtcaaaaaaatttcttagcaaccagagcaaaattagctgaacattcagtagaaaaagttggtgcagaattaagagccatgatgccttggattagtaagaaaaaattggttgatagcga

SEQ ID NO: 209096 - DNA, 798 bp, Unknown
  Bacterial polypeptide expressing nucleotide sequence isolated from the Sargasso Sea
aatgttttatgaaaaagatactaacgtaaatttaataaaagataaaaaagtagcaatttttggttatggaagtcaaggtcatgcacatgcacttaatttaagagatagtggtgttaaagaagttgtggtagctttaagagaaggttcatcaagtattgaaaaagctgagtctaaaaaattaaaagttatgaatttgtctgatgcagcagaatgggcagatgtagttatgatattgactccagatgaattacaagcatcaatatacaaaaaccatatagagcaacgagttaaagagggtacatcaattgcgtttgctcatggtttaaatgttcactatgatcttatcaaagcgagaaaagatttagatgtatttatggttgcacccaagggacctggacatttagtaagaagcgaatatgaaaaaggtggtggtgtgccttgtttatttgctgttcatcaagatggctctggtaaagcaagagatttagcaatgtcatatgcgtcagctgttggtggaggtagatctggaataattgaaactacatttaaagatgaagtagaaaccgatctatttggagaacaaacagttttatgtggtgggcttgttgaattaattaaaaatggatacgaaactttagttgaagctggatatgaaccagaaatggcttattttgaaactgttcacgaagtgaaactgattgtggatttaatatatgaaggaggaattgctaatatgaattattcaatttcaaatactgcagagtatggtgagtatcagtcaggtccaagaataattaa

SEQ ID NO: 209097 - DNA, 393 bp, Unknown
  Bacterial polypeptide expressing nucleotide sequence isolated from the Sargasso Sea
tatggcagatgtttattatgataaagatgcagattttaatatcttaaatggtgaaaccgtaggaataataggctatggaagccaaggacatgctcacgccctaaatcttaaagatagcggagctaacgtgatagttggtctttacaaagggagcccctcttgggaaaaagcagagtccgatggattgaaagttgcaaccgtcgaagaagtcgctgaacaagcttctatcatcatgatgcttatcccagatacaaaacaaaaagaagtctacgaaaactccgtaaaaccacatttatcacctggcaaaactttaatgttcgcccatggatttaacattcattacaatcaaataagcccaccatctgacatagatgtgacaatggtcgctccaaa

SEQ ID NO: 209098 - DNA, 767 bp, Unknown
  Bacterial polypeptide expressing nucleotide sequence isolated from the Sargasso Sea
agcaactatttataaaaaccatatagacaaaagagcgagaaaaggcacatcgattgcttttgcgcatggtttaaatattcattatgatttaattaaagccagaaaagatttagacgtttttatggttgctcccaaagggccgggccacttagtaagaagtgagtttgaaaaaggtggtggtgtaccatgtttatttgctgttcatcaaaacggctctggtaatgcaagagatattgcaatgtcttatgcttcagcaattggaggcggaagatcaggtataattgaaacaacatttaaagatgaagtagaaacagatttatttggagaacaaacagttctttgtgggggcttagttgaattaattaaaaatggatatgaaacattagttgaagctggttatgatccagaaatggcatatttcgaaactgttcatgaagttaaattaattgttgatttaatttatgagggtggaattgcaaatatgaattattctatttctaataccgcagagtatggtgaatacatgtctggacctagaattattaataaagaagaaactaaaaaaagaatgaaggaagttttaaatgatattcaatccggcaagtttactaaacaatggatggatgaatgcaaaaatggtcaaaaagaattcttaaaaattcgagcaaaattagctgagcatccagtagaaaaagttggagctgaattaagaggtatgatgccttggatagggaagaaaaaacttatcgatagcgataagaagtaaa

SEQ ID NO: 209099 - DNA, 769 bp, Unknown
  Bacterial polypeptide expressing nucleotide sequence isolated from the Sargasso Sea
caagcaactatatataaaaatcatatagagcaaagagtcaaagagggaacatctatagcttttgcgcatggcttaaatattcattacgatttaattaaagcaagaaaagacttagatgtttttatggttgccccaaaaggacctgggcatttagttagaagtgaatttgaaaagggtggaggagttccttgtttattcgcagtccatcaaaacggttctggaaaagctagagatatcgcaatgtcttatgcatcagcaattggcggaggaagatcaggtattatagaaacaacttttaaagatgaagtggaaactgatctttttggagagcaaacagttctttgtggtggattagtagaattaataaaaaacggatatgaaactttagtcgaagcaggatatgagcccgagatggcatactttgaaactgttcacgaggtaaaactaattgtagatttaatctatgaagggggcattgcaaacatgaactattctatttccaatacagcagagtatggagaatatatgtcaggtccaagaattattaataaagaagaaactaaaaaaagaatgaaagaggttttagcagatattcagtctggaaaatttacaaaagaatggatggatgagtgtaaaaatggtcaaaagaattttcttaaaataagagaaaaacttgctgaacatccagtagaaaaagtaggggcaaatttgagagctatgatgccttggatatctaaaaagaaacttgttgatagcgataaaaattagg

SEQ ID NO: 209100 - DNA, 727 bp, Unknown
  Bacterial polypeptide expressing nucleotide sequence isolated from the Sargasso Sea
catggatttaatattcattttaaaaaaattattcctgatgaaaccaacagcgttatcatgattgcaccaaaaggaccaggccatacagtaagaagtacttatttaaaaggcggaggcgttccatctttaattgctatatatcaagattcaacaaatacaagtgactctagcgccaaggaagttgctctttcttatgctaaagctaatggaggcacaagggctggagttttagaaacaacatttaaagaagaaacagaaacagatctttttggagagcaagctgtgctatgtggaggcatgacagccctaataaaagctggatatgaaacattggttgaggcaggctacagtcctgaaatggcttattttgagtgtcttcatgaaacaaaattaattacagatttgattcaagaaggtgggattgcgaatatgcattattctatttcaaatacagctgagtatggcgattatttgagcgggccaaaaattattactgagaaaaccaaggaagcaatgaaagaggttttggagaatatacaatctggaaattttgcagacgaattcttggatgattgcaggcaaagtaatgatggctctggaggaccttttatgaaatcaaaaagagaatctaccaaaaatcaccctatagaaaaagttggaaaagagctcagatctaagatgaaatttttaaattctgagaaactcgttgataaagaaaaaaattagt

SEQ ID NO: 209101 - DNA, 740 bp, Unknown
  Bacterial polypeptide expressing nucleotide sequence isolated from the Sargasso Sea
aatgagagtctattatgatagagatgcagattttaatttaattaaaaataaaaaaattgttattgtaggatatggtagccaagggcatgcccatgctatgaatttaagagattcaggtgttgagaatgtagctattgcacttcgagaaggatctttaacaagagataaagcaaaaaatgcaaattttgatgtaatgacaccttctgaggcagcttcatggggtgatataataatgatgctaacgccagatgagctgcagtcagatatttataataatgaaattgcaccaaatatcaaagaaggatctgctgttgcatttgctcatgggttaaatatacattttgatttgattcaaccagctaatggaattgacgttataatgattgctcctaaaggtcctggacatactgttagagctgaatatgaaagaggagcaggagttccatgtttagttgcagtagataaaaatccttctggaaatgctttagaaatagcaattgcatatgcttcgggagtcggaggaggtagagcaggtattattgaaactacctttaaagaagaatgtgaaacagatctatttggagaacagtcagttttatgtggtggactgacgcatctaatactagctgggtatgaaactttagttgaggctggatatgctccagaaatggcatattttgaatgtttgcatgaagttaaattaattgttgatttgttgtatgaaggaggaatggcaaata

SEQ ID NO: 209102 - DNA, 365 bp, Unknown
  Bacterial polypeptide expressing nucleotide sequence isolated from the Sargasso Sea
cccgccagaaatggcgtattttgaaactctgcatgaagtaaaattaattgtagatctaatttatgaaggtgggatagctaatatgaattattcaatttcaaacactgctgagtatggagaatatgtatcaggaaaaaggattgtagataacaataccaaagcaaagatgaaagaagttcttaaagatattcaatctggaaaatttactaagcaatggatggatgagcacaaatcgggtcaaaaaaatttcctaaaaatgaggcaagatttagcaaaacaccccatcgaaaaggttggaaaagagctacgtgcaatgatgccgtggattggcaaaaataaactagtcgataaagataaaaattaac

SEQ ID NO: 209103 - DNA, 487 bp, Unknown
  Bacterial polypeptide expressing nucleotide sequence isolated from the Sargasso Sea
ttttaaagaagaaaccgagactgatctttttggagaacaatctgtgttatgcggaggaatcactgctctaataaaagcaggatatgaaaccttggttgaagcaggatatagtccagaaatggcatattttgagtgcttacacgaaacaaaattaattgttgatcttattcatgaaggtggaatctcaaacatgcattattcgatttcaaatacagcagaatttggtgattatctgagtggaccaaaagttataactgatgatacaaaggatagtatgaaaaagattcttatgaaaatacaatcaggtgaatttgccgatgagtttctcaatgattgcagatcaagcaatgatggtaaaggcggtccatttatgagacaaaatagaaaaaatactcaaaaccactcgattgagatggttggaaaagaacttagatccaagatgaaattccttcaaactgaaaagcttgtcgataaagaaaaaaattaa

SEQ ID NO: 209104 - DNA, 604 bp, Unknown
  Bacterial polypeptide expressing nucleotide sequence isolated from the Sargasso Sea
aatggaagtattttacgaaaaagattcaaatcctgaattattaaaagataaaactatagcgatcataggctacggttctcaaggtcatgcacatgctaataatttgaaagactctggttttaacgtaattctcggattaagggatggatcatcttcagctgcaaaggcatctgaagcaggttttgaagttgctagtaatgtcgaagcagcatctaaagctgatgtattgatgatgttaattcccgatgagtttcaaggaattgcttataaagaagagatagaacctaatcttaagcaaggtgctactttggcatttgcacatggatttaatattcattacgaacagattgttccaagagaagacttagacgtaatcatgatagctcctaaaggacctggtcatacagtgcgaggtcaatacttagatggagctggggtaccttgtttagttgcaattcatcaagatgcctcctctaatgcattggatacctcaattgcttatgcttcagctataggtgggggaagagcaggtatcatcaaaacaactttcaaagatgaaaccgagacagatttgtttggtgaacagtctgtactgtgcggaggt

SEQ ID NO: 209105 - DNA, 391 bp, Unknown
  Bacterial polypeptide expressing nucleotide sequence isolated from the Sargasso Sea
aatgcgagtttattacgatagagattgcgatgttaatttaattaaggataagaaagtggcaatcttgggatatgggtcccaaggtcatgctcatgccctaaacctaagagactcaggtgcaaagaatttggttgttgccctgagagaaggatcaccatcagcaaaaaaagctgaagttgaaggtctaaatgttatgggcatttcggaggccgcggcttggtgtgacttaataatgtttacaatgcctgatgagcttcaagccgacacgtacaaaaagtatgtgcacgacaacattaaagaaggcgctgcgattgcttttgcacatggccttaatgttcactttggattaattgaacctaaaaaaggtatcgacgtactgatgatggctcca

SEQ ID NO: 209106 - DNA, 743 bp, Unknown
  Bacterial polypeptide expressing nucleotide sequence isolated from the Sargasso Sea
tatgaaagtttattacgaaaaagattctgatattgatttaattaaatcaaagaaagttgcaatttatggttatgggagtcagggccatgcccatgcgctgaatttaagtgactcaggagtaagtgaagtagttgttgctctgagagaaggttcatctagtgcagccaaggctgaggctgaaggtctaaaagtcatgtcaatgtctgatgctgcagaatgggcagacattttaatgatgttaattcctgatgaattacaagccgacgtttataaaaatcatattgaacaacgcgctaaaaaaggtgcggctcttgcttttgctcatggattaaacgtacattttgaccttatcaatgcaagagatgatatggatgtttttatgatagctcccaaaggaccggggcatacggtccgatcagagtataagaaaggtggaggagttccatgtttagtttcagttgatagtgacaaaacaggaaacgctttgaagatagctttatcatatgcttcagctataggtgggggaaaagctggaattatagaaacgacttttaaagatgaatgtgaaacagatttatttggagagcaaacagttttatgcgggggcgtagttgaacttattagaaatggttttgaaacgcttgttgaagctggttatccacctgaaatggcctacttcgaatgtttgcatgaagtgaaattaattgttgacttaatttatgaaggcggaattgcaaatatga

SEQ ID NO: 209107 - DNA, 427 bp, Unknown
  Bacterial polypeptide expressing nucleotide sequence isolated from the Sargasso Sea
ttgtgcggaggtttagtagaactcataaaaaatggttttgaaactttaactgaagcaggatatccacctgaaatggcatattttgaaactcttcatgaggtaaagttaattgttgatttgatttatgaaggcgggatagcaaatatgaattactcaatttctaatacagctgagtatggagaatatatttctggaaagaaaattgtggattctaaaacaaaagagagaatgaaagaggtattaaaagatattcagtcaggcaaatttacgaagcaatggatggatgagtgtaaaggtggacagaaaaactttttaaaaatgagagaagatttagccaaacatcctattgaaaaggttggaaaaaaactcagagatttgatgccttggattggtaagaataaattagtcgataaatccaagaattaac

SEQ ID NO: 209108 - DNA, 777 bp, Unknown
  Bacterial polypeptide expressing nucleotide sequence isolated from the Sargasso Sea
atgaattgcaggcaactatttataaaaatcatattgagcaacgtgtaaaagaagggacatctatcgcttttgctcatggattaaatgttcattatgatttgattaaagcaagaaaagatttagatgtatttatggtagcaccaaaaggaccaggtcacttagttagaagtgaatatgaaaaaggtggaggagttccatgtttatttgctgttcatcaaaatggatcaggaaaagctagagacttagcaatgtcatacgcttcagcaattggtggaggaaggtcaggtataattgagacaacattcaaagatgaagtagaaacagatttatttggtgagcaaacagttttatgtggaggtcttgttgaattgattaaaaatggatatgaaaccttagttgaagcaggttatgaacccgaaatggcatattttgaaacagttcatgaagttaaacttattgtagatttaatttacgaaggcggaatagctaatatgaattattctatatctaatactgcagaatatggagaatacgtgtctggtcctaggatcataaataaagaagaaacaaaaaaaagaatgaaagaagttttagctgatatccagtctggtaaatttactaaacaatggatggatgaatgtaaaaatggccagaaaaatttcttagctacaagagcaaagctagcagagcatccagttgaaaaagttggagcaactttaagagaaatgatgccttggatcgccaagaagaagcttgtcgatagtgataaaaaataat

SEQ ID NO: 209109 - DNA, 484 bp, Unknown
  Bacterial polypeptide expressing nucleotide sequence isolated from the Sargasso Sea
tgaaactacttttaaagatgaagttgaaacagatttatttggtgaacaaactgttctttgtggtggattagtagaattaataaaaaatggctatgaaactttagttgaagctggatatgaaccagagatggcatattttgaaaccgttcatgaagttaagttgattgtagacttaatatacgaaggtggaattgctaatatgaattattcaatctcaaatactgctgagtatggcgaatatatttctggaccaaaaattataaataaagaagaaacaaagaaaagaatgaaggaggttctaagcgatatccaatctgggaagtttactaaacaatggatggatgaatgtaaaaatgggcaaaaaaacttcttaaaaactagagaaaaactagcagagcatccagtcgaaaaagttggagccgggctcagagctcttatgccttggataagcaaaaagaagcttattgatagcgataaaaattaa

SEQ ID NO: 209110 - DNA, 432 bp, Unknown
  Bacterial polypeptide expressing nucleotide sequence isolated from the Sargasso Sea
aatgttttatgaaaaagatgccaacgtaaatttaatcaaggaaaaaaaagttgctatttttggatatggaagccaaggccatgcacacgccttaaatttaaaagaaagtggagtcaaaaacgttgttgttgcacttagagaaggctcttcaagcataaaaaaagctgagagtgaaggccttaaagttatgtcattgtctgatgctgccgcatgggcagatgtggtgatggtactaacgccagacgaacttcaagcatcaatttacaaaaatcatattgaacaaagaatgagagaaggtaccagcttagcatttgctcatggcttaaatattcattttaagttaatcaactcaagaaaagatttagatgtttttatggtagcgccaaaaggaccggggcatttagttagaagtgaatatcaaagaggaggagg

SEQ ID NO: 209111 - DNA, 598 bp, Unknown
  Bacterial polypeptide expressing nucleotide sequence isolated from the Sargasso Sea
gaaaggtggaggtgttccttgtttatttgcagtccatcaaaatggctcaggtaaagcaagagatctcgcaatgtcatatgcatcagcagttggtggaggtagatcaggaattattgaaacaacttttaaagatgaggtagaaacagatttatttggagagcaaactgttttatgtggaggattagtagaattaattaagaatggctatgaaacattagttgaagctgggtacgagccagagatggcatattttgaaactgttcatgaagtaaagttaatagttgatcttatttatgaaggtggaattgctaatatgaattattctatttcaaatactgcggaatacggagaatatgtttcgggaccaaagataataaataaagaagaaacaaagaaaagaatgaaagaagttttagataaaattcagtctggtaagtttactaaagagtggatagatgagtgtaaaaatggtcaaaaaaacttcttaaaaactagagaaaaattggcagagcacccaattgaaaaagttggggcaggattaagagctatgatgccatggatcactaagaaaaaattggtagatagcgataaaaattag

SEQ ID NO: 209112 - DNA, 781 bp, Unknown
  Bacterial polypeptide expressing nucleotide sequence isolated from the Sargasso Sea
aatgtattatgaaaaagacactgatgtaaatttaattaaaaataagaaagttgcaatttttggttatggcagtcaagggcacgcacatgcattaaatttaagagatagtggagttaaggaagtcgttgtggcacttagagaaggatcttcaagcatcgcaaaagctgagtcaaaagatttaaaagttatgaatttatcagatgctgcagagtgggcagatgttgttatgattttaaccccagatgagttgcaagcggccatctataaaaatcatattgagcaaagagttaaagaaggaacatcaattgcttttgctcacggattaaatattcattacgatttaattaatgctagaaaagatctagatgtttttatggttgcaccaaaaggacctggtcatttagttagaagcgaatatgaaaaaggaggaggagttccttgtctatttgcagtacatcaaaatggatcaggaaaagctagagagctagcaatgtcgtatgcttctgcagttggaggtggaagatcaggaattattgaaacaacatttaaagatgaagtagaaaccgatttatttggagaacaaactgttctttgtggcggtttagtagagttaattaaaaatggttatgagactttagttgaagctggttacgaacctgagatggcatattttgaaactgttcacgaagttaaattaatcgtcgatttaatttatgaaggtggaataggtaacatgaattattctatttctaatactgctgaatatggagagtaccagtca

SEQ ID NO: 209113 - DNA, 242 bp, Unknown
  Bacterial polypeptide expressing nucleotide sequence isolated from the Sargasso Sea
tcttgttgctgtgcataaagatgcttcagggactactgaaaatttagctatgtcttatgcatcagcaattggtggaggtagggctggaattttaagaactacttttaaagaagaaaccgaaactgatttgtttggtgagcaagttgttttgtgtggagggttaacagagcttattagaaatggatttgaaactttagtagaagctggttaccagccagaaagtgcttactttgaaacacttc

SEQ ID NO: 209114 - DNA, 467 bp, Unknown
  Bacterial polypeptide expressing nucleotide sequence isolated from the Sargasso Sea
aatgttttatgaaaaagatgctaatccaaatttaataaaagacaaaaaagttgcaatttttggttacggtagccagggacatgctcatgcactaaacctaaaagatagtggtgtaaaaaatgtagtagttgctttgagagaaggttcttcaagcaaaaaaaaagctgaaagcgaaggattaaaagtaatgtctctttcagatgctgctgcttgggcagatgttgttatggttttaactccagacgaacttcaagcatcaatttataaaaatcacattgagcaaagaatgagagaaggtacaagtctagcatttgctcatggtttgaatattcattttgatttaatcaaagcaagaaaagatttagacgtttttatggttgcgcctaaaggtccaggacatttagttagaagtgaataccaacgaggtggcggagttccgtgtctaatggcagttcacaaagacagct

SEQ ID NO: 209115 - DNA, 786 bp, Unknown
  Bacterial polypeptide expressing nucleotide sequence isolated from the Sargasso Sea
ggatcatgggcaaaagctgaagctgctggttttgatgtcaaagaggtaggcgaagctgtacccaatgcagatcttgtcatgatgcttattccagatgagaaacaatcagctatgtatgagaatcatttaaaagacaatataaaagatggagcagttctggcatttgctcatggatttaatatccactttgaaatgattattcctagagatgatctggatgtaattatggttgcgccgaaaggcccaggccatactgttcggtcgcaatatgaatcaggagcgggagtaccatgcttattggctgtgcatagaaatgtctccggaaaagcaaaagatgttgggctttcatatgcgtctatgattggttctggccgagctggaattattgaaacaaattttaaagatgaaactgaaacagatctatttggagaacaagcggttctttgtggaggtttaacgtcacttattcaaactggttatgatgttctggtagaaaatggttatccaccagaaatggcatattttgaatgtcttcatgaagtaaaattaattgttgacctcatttatgaaggtggtcttcagaatatgagatatagcatttccaatactgcagagtatggagattatgtgacaggaccaaagattgtgaatgaaaatacaaaggaaacgatgcagaagatattgactgagattcagtctggagaattcgcgaaagattttatgaatgactgtaactctggtggtcagaaaatgagcgaatatagaaaaaactcctcagaacattca

SEQ ID NO: 209116 - DNA, 815 bp, Unknown
  Bacterial polypeptide expressing nucleotide sequence isolated from the Sargasso Sea
aatgttttatgaaaaagatacagatcccaatttaattaaaggtaaaaaaatagcaatttttggctatggaagccaagggcatgctcatgctcttaacttaaaagatagcggagtaaaagaagtagtagttgctttaagagatggatcctcaagtaaggcaaaagcagaatctaaaggattaaaagttatgaatttatctgatgcagcagaatgggccgatgtagttatggttttaactcctgatgaattacaagctacaatttataaaaatcatattgaacaaagagtaagagaaggaacttcaatagcttttgcccatggtttaaatattcactacgatttaataaaagcaagaaaagatttagatgtttttatggtagctcctaaaggaccaggacatttagttagaagcgagtttgaaaaaggtggtggagtaccatgtttgtttgccgttcaccaaaatggttcaggaaaagcaagagatcttgctatgtcctacgcatcggcgattggtggaggaagatctggaattatagagacaacatttaaagatgaagttgaaactgatttatttggagaacaaactgttctttgtggtggattagtagaattaataaaaaatggttatgaaactttagtagaagcaggatatgaaccagagatggcatattttgaaactgttcatgaagttaaattaattgttgatttgatctatgaaggtggaatcgcgaatatgaattactctatttcaaatactgcagagtacggagagtacgttacaggtccaaaaattatcaataaagaagaaacaaaaa

SEQ ID NO: 209117 - DNA, 880 bp, Unknown
  Bacterial polypeptide expressing nucleotide sequence isolated from the Sargasso Sea
tgctttaaacctaaaagatagtggagtaaaagaagttgttgtagctcttagagatgggtcatcaagtattgaaaaagcagagtctaaaggattaaaagttatgaacctttcagatgctgctgaatgggctgatgttgtgatgattttaactccagatgaattacaagcaactatttataaaaatcatattgagcaacgtgtgaaagaagggacatctatagcttttgctcatggattaaatgttcattatgatttgataaaagctagaaaagatttagatgtatttatggtagcaccaaaaggaccaggtcacttagttagaagtgaatatgaaaaaggtggtggagttccatgtttatttgctgttcatcaaaatggatcaggcaaagctagagatctagccatgtcatatgcttcagcgattggtggtggaagatcaggtataattgagacaacatttaaagatgaagtagagacagatttatttggtgaacaaacagtcttatgtggaggtcttgttgaattaattaaaaatggatatgaaactttagtggaggcaggatacgaacctgaaatggcttattttgaaacagttcatgaagttaaacttattgtagatttaatttacgaaggtggaatagcaaatatgaattattctatatctaatactgcagaatatggagaatacgagtcaggtcctagaataattaataaagaagaaacaaaaaaaagaatgaaagaagtcttagcagacatccagtccggtaaatttactaaacaatggatggatgagtgcaaaaatggtcagaaaaatttcttagcaacaagagcaaagctagcagagcatccagtgaaaaagttggtgctacttaagagaaat

SEQ ID NO: 209118 - DNA, 744 bp, Unknown
  Bacterial polypeptide expressing nucleotide sequence isolated from the Sargasso Sea
tatgaaaacttattacgataaagatactaataaagatttaattaaaaacaaaaaagttgcaatctttggttacggaagccaaggacatgctcacgcattaaatcttaaagatagtggtgtgaaagaagttgtggtagccttgcgagaaggatccttaagtgtaaaaaaagcggaaagcgcaggattaaaagtaatgtctctatcagatgcagctgcatgggctgatgtggtaatgatgttaacacctgacgaacttcaatcagagatttacaaaaatcatattgaacaaagaatgaaagagggaacaagtttagctttcgctcacgggttaaatattcactttgatttaattaatgctagaaaggatcttgatgtttttatggtagctcccaaaggcccaggtcatactgtgagaagtgagtatcaaaagggtggaggagttccttgtttaatggccgttcataaagatagttcaggtaaagcaaaagatttagctttatcatatgcatcagcagtaggcggcgggaaagccggtataatagaaacaacatttaaagatgaatgcgagacagatttgttcggtgagcagacagttttgtgtggaggtttagtcgaactaattaaaaatggttttgaaactttaacagaggcaggttatccacctgaaatggcgtacttcgaaactcttcatgaagtaaaattaattgtcgatttaatttacgaaggtggaatagctaatatgaa

SEQ ID NO: 209119 - DNA, 415 bp, Unknown
  Bacterial polypeptide expressing nucleotide sequence isolated from the Sargasso Sea
cttgttgaactaataaaaaatggttttgaaactctaactgaagctggttatccacttgaaatggcttactttgaaactctacatgaagtgaagttaatagtggatctaatctatgaaggtggaattgctaatatgaattattccatatctaatactgccgagtacggcgagtatgtttctggtaaaaaaattgttgatagtaagaccaaagagaaaatgaaggaagttttgaaggatattcagtcaggtaaatttactaagaaatggatggaagaacatagatctggacaaaaaaacttcctcaaaatgagaaaagatttagcaaatcatccaattgaaaaagtcggtaaagagcttagagctatgatgccatggataggcaagaacaagttggtagataaagataagaattaac

SEQ ID NO: 209120 - DNA, 520 bp, Unknown
  Bacterial polypeptide expressing nucleotide sequence isolated from the Sargasso Sea
tggcggaactagagcaggtgttctagagacttcttttagagaagaaaccgaaacagatttatttggagagcaagctgtcctatgtggaggaatgacagcattaattaaagctggatatgaaacattagtagaagctggctatagccctgagatggcatattttgaatgtttgcatgaaacaaaacttatcgttgatcttctgcatgagggaggaatctctaatatgcattattcaatatcaaatactgcagagtttggtgattacttaacaggcccaagaattattactgaagaaacaaaaaaagaaatgaaaaaagtcctgcatgacattcaatcagggaattttgctgataagtttcttgacgattgccgtcaaagtaacgatggaagcggcggcccctttttaaaaaataatagagaaaaaacaaaggagcattctatagaatccgtcggaaaagaacttcgatctaagatgaaatttttaagtgaaaaaaagcttgttgataaagataaaaattaa

SEQ ID NO: 209121 - DNA, 750 bp, Unknown
  Bacterial polypeptide expressing nucleotide sequence isolated from the Sargasso Sea
atgcacttaatctaagagatagtggtgttaaagaagttgtggtggctttaagagaaggttcatcaagtattgaaaaagctgagtctaaaggtttaaaagttatgaatttatccgatgctgcagaatgggcagatgtagtaatgattctaactccagacgaattacaagcatccatatataaaaatcatatagaacaacgtgttaaagagggaacttcaattgcgtttgctcatggtttaaatgttcactatgatcttataaaagctagaaaagatttagatgtatttatggttgcaccaaagggacctggtcatttagtaagaagtgaatatgaaaaaggtggtggagttccttgtttatttgctgttcaccaagatggttctggtaaagcaagagatttggcaatgtcatatgcatcagctgttggtggaggcaggtctggaataatagaaactacatttaaagatgaggtagaaactgatttatttggagaacaaacagtattatgtggtggacttgttgaattaattaaaaatgggtatgaaactttagttgaagctggatacgaacctgaaatggcttactttgaaactgtacatgaagttaaattaatagtggatttaatatatgaaggtggaattgctaatatgaattattcaatttcaaacacagcagagtatggtgagtatcagtcaggtccaagaataattaaaaaagatgaaactaagcaaagaatgaaagaagtttagc

SEQ ID NO: 209122 - DNA, 753 bp, Unknown
  Bacterial polypeptide expressing nucleotide sequence isolated from the Sargasso Sea
ataaaaatcatatagaacaaagaatgagagagggaactagtttagcttttgctcacggacttaatattcattttaatttaataaattctagaaaagatttagatgtttttatggttgcacctaaaggacccggacatttggttagaagcgaatatcaacgtggaggtggagtaccttgtttaatggcagttcataaagatagttcaggaaaagcgagagatcttgctatgtcttatgcatgtgcggtaggcggtggaagatcaggaataattgaaacaacttttaaagatgaatgtgaaactgatttatttggagaacaaactgttttatgcggaggtttggttgaacttataaaaaatggttttgaaactttaacagaagcaggttatccgcctgagatggcatattttgaaactcttcatgaagtaaaattaattgttgatttaatctatgaaggtggaattgcaaatatgaattactcaatctctaatacagcagaatatggagaatatgtatcaggaagaaaaatagttgatccaaaaaccaaagaaagaatgaaagaggttttaaaggatattcagtctgggaaattcacaaaacagtggattgatgagtgcaaaggcggacaaaaaaattttctaaaaatgagggaagaattagccaaacaccctattgagaaagttggaaaaaaacttagagacctaatgccctggattagaaagaacaaactagtagataaatctaaaaattaac

SEQ ID NO: 209123 - DNA, 811 bp, Unknown
  Bacterial polypeptide expressing nucleotide sequence isolated from the Sargasso Sea
ttatgaaaaagatacagatgtaaatctaattaaggataaaaagatagctatttttggttatggcagtcaaggacatgcccatgcactaaatttaaaagacagtggtgttaaagaagtagttgttgctttaagagaaggatcatcaagtaaaccaaaagcagagtcgaagggtttaaaagtaatgaatctttctgatgcagctgagtgggcagatgtagtaatgattttaacacctgacgaattgcaggcatctatatacaaaaatcatattgaacaaagagtaagaaagggaacttcacttgcttttgctcatggactgaatgtgcattacgacttaattaaagctagagaagatttggacgtatttatggttgctccaaaaggtccaggtcacttagtgagaagcgagtatgtaaaaggtggcggtgtcccttgtttatttgctgttcatcaaaatggctctggtaaggctagagatcttgcaatgtcttatgcttcagcagtgggtggtggaagatctggaattatagaaacaacttttaaagatgaagtagaaacagatttatttggtgaacaaacagttttatgtggtggtcttgttgaattgataaaaaatggatatgaaacattagttgaagctggttatgaaccagaaatggcatattttgaaactgttcatgaagtaaaactaatagtagatttaatttatgaaggtggaatagctaacatgaattattcaatctctaatactgcagagtatggagagtatgagtctggtccaagagttattaaaaaagatgaaactaaaaaa

SEQ ID NO: 209124 - DNA, 828 bp, Unknown
  Bacterial polypeptide expressing nucleotide sequence isolated from the Sargasso Sea
gatagagcacatatagataataaaactgtggcagtaatagggtatggaagccaaggacatgcccatgcacgtaatcttcatgatagtggtgtgaatgtgatagtgggcctaagagaaaattcgtcttcatgggaaacagttaaaaatgatggattaaacgttgcaacccccattgaggccacgaaagaagcagacataattatgatgctagttccggatactgctgcttcgtcggtttataaagaaatagagccagcaatagaagaggggaatacgctgatgttcgcccatgggtttaatattcattatagtcaggtggaacctccaggtaatattgatgtgtcgatgattgcacccaagagtccaggtaatcttgttaggaggaattacgtgaaagatcaaggtactcctgcacttttggcaatatatcaagattatacggggaaggcaaaagaagtggctttagcttatgcagaaggtattggatgtgccagagcaggagtggttgaaacgtcgttccaagaagaagtggaatcggatttatttggagagcaagtcatattatgcggaggggtgactagtcttatgaggatgagttttgagacactagtagaaaatggatattcccccgagatggcatattttgaatgtcttaatgagttaaaattaattgtagatttgatatatgaaggtggtttgatgaagatgtggactgatgtttcagacacggcagaatatggtggtttaacaagagggcctagagttgttgacgagcgtgtgaaagagaatatggcagtagtactaaaagaaatcaagatggaacatttg

SEQ ID NO: 209125 - DNA, 495 bp, Unknown
  Bacterial polypeptide expressing nucleotide sequence isolated from the Sargasso Sea
agggaattatagaaactacatttaaagatgaagtgaaaactgatttatttggagaacaaacggtattatgtggaggacttgtcgaactaattaagaatggctatgaaactttagttgaagcaggatatgaaccagaaatggcatactttgaaactgttcatgaagttaaattaattgttgatttaatttatgaaggcggaatcgcaaatatgaattattctatttcaaatacagcagaatatggagaatatgtttctggaccaaaaattataaataaagaagaaacaaagaaaagaatgaaagaagtattgaaagatatccaatctggtaaatttacaaaacaatggatggatgagtgtaaaaatggtcaaaaaaatttcttgaaaacacgagaaaaattagctgagcatccagttgaaaaagttggggctgtacttagagctatgatgccttggattgctaagaagaaactagttgatagtgataagaaatagt

SEQ ID NO: 209126 - DNA, 478 bp, Unknown
  Bacterial polypeptide expressing nucleotide sequence isolated from the Sargasso Sea
acaacttttaaagacgaatgcgagacagatctatttggtgaacaaactgttttgtgcggcgggttagtagaacttattaaaaatggttttgaaactttaaccgaagcaggttatccacctgaaatggcttattttgaaactcttcacgaagtaaaattaatcgtagatttaatttatgagggtggaatagccaatatgaattactctatttcaaatacagcagaatatggtgaatatgtttctgggaaaagagtagttgatagtaaaactaaagaaaaaatgaaagaagttctcaaagatattcagtcaggtaaatttaccaaagagtggatgcaagaacacaaatcagggcaaaaaaatttcttgagaatgcgtgatgaacttgccaaacatcaaatcgagaaagtggggaaagaattaagagctatgatgccttggattggcaaaaataaattagtcgacaaagacaaaaattagc

SEQ ID NO: 209127 - DNA, 343 bp, Unknown
  Bacterial polypeptide expressing nucleotide sequence isolated from the Sargasso Sea
atgtttacacgaagtaaaattaattgttgatttgatttatgaaggtggaattgcaaacatgaattactcaatttcaaatactgcagagtacggtgagtatgtttcaggacctagaattataaataaagatgaaactaagaaaagaatgaaagaagtattagaggacattcaatctggaaagtttacaaaacaatggatggacgagtgtaaaaatggtcagaagaattttctaaagactagagaggaattagcgaaacactcaatagaaacagtcggtacaaaactaagagctatgatgccttggattggtaagaagaaattagtagatagcgataagaagtaa

SEQ ID NO: 209128 - DNA, 661 bp, Unknown
  Bacterial polypeptide expressing nucleotide sequence isolated from the Sargasso Sea
gacgatcttgatgtatttatgatagcacctaaaggacccggacatacagttaggtctgaatataaaagaggtggaggagttccatgtttagttgctattgatagcgataaatcaggtgatgcactttcaattgctctttcatatgcctcagcaattggtggaggaaaagcaggcacaattgagaccacatttaaagatgaatgtgaaacagatctatttggtgagcaggcggtattatgtggaggtgttgttgagctaattagaaatggcttcgaaactttaacagaagcaggttatccacctgagatggcttactttgaatgtttgcatgaagttaaattgattgtcgatttaatttatgaaggtggtattgcaaatatgaactactctatttcaaacacggcagagtatggtgagtatgtatctggaccaatagtagtcgatggcaatacaaaagcgaaaatgaaaggtgtcttagataagattcagtctggagacttcactagagaatggattgaggaatataagaatggcgcaaaaaattttcatgcaatgcgggctaaaatagatggtcatcagatagaagaagttggtcaaaaactaagatcaatgatgccatggattgccaaaaataagctggtagataaagaaaagaactaaa

SEQ ID NO: 209129 - DNA, 931 bp, Unknown
  Bacterial polypeptide expressing nucleotide sequence isolated from the Sargasso Sea
atgagagtatattacgatagagatgcagatcttaatttaataaaaataaaaaaaatagtcatagtaggctatggcagtcaaggtcatgctcatgcaatgaatctcagagattccggtatagaaaacgtagctattgcacttcgagaagactcagcaacaagagaaaaagctaaaaaagcaagttttgatgttatgacacctactgaagcagctgattgggctgatataatcatgatgttaactcctgatgaactgcaatcagatatttataataatgaaattgcaccaaatattaaggaaggtacagcacttgcttttgctcatggtttaaacattcattttgatttgatacaaccaggagaaggtattgatgtaattatgattgcaccaaaaggacctggtcatactgttcgtgctgaatatgagagaggagcaggagtaccctgtcttgttgctgttgataaaaatccatcaggaaatgcattagatatcgctattgcttacgcttcaggtgttggaggtggaagagctggtataattgaaacaactttcaaagaagagtgtgaaactgatttatttggcgaacaatctgtattgtgcggagggttgactcatttaattacagcaggttatgaaactcttgttgaagcaggatatgcacctgaaatggcatattttgaatgccttcatgaagttaaattaatcgttgatcttttatatgaaggtggaatggctaacatgcgttattcaatttctaatactgctgaatatggagattactctagaggtccacgactgattacggatgaaacaaaaaaagaaatgaaaaaaattcttgcagaaattcaatcaggtcaatttaccaaggagtggatgaatgagcataaaagtggtcagacaaaatttaaactaatgagaaagcaacaagctg

SEQ ID NO: 209130 - DNA, 214 bp, Unknown
  Bacterial polypeptide expressing nucleotide sequence isolated from the Sargasso Sea
agtattatgtggtgggcttgttgaattaattaaaaatggatatgaaactttagttgaagctggatatgaaccagaaatggcttatttcgaaactgttcacgaagtgaaactgattgtggatttaatatatgaaggtggaattgctaatatgaattattcaatttcaaatacagcacagtatggtgagtatcagtcagcgtccaagaataattaa

SEQ ID NO: 209131 - DNA, 634 bp, Unknown
  Bacterial polypeptide expressing nucleotide sequence isolated from the Sargasso Sea
atgttctatgaaaaagatgctgacgtaaacttaattaaagataaaaaagttgctatttttgggtatggaagtcaagggcatgctcatgctcttaatttaaaagatagtggggtaaaagaggtagtcgttgctttaagagatggttcagcaagtaaagcaaaagctgagtcaaaaggtttgaaggtaatgaacttgtccgatgcagcagaatgggctgacgtttgtatgattttaactcctgatgaacttcaagcaaccatatataaaaatcatatcgaacaaagaataaaagagggtacaagtttagcttttgctcacggtttaaacattcattatgatttaatcaaagcaagaaaagatttagatgtgtttatggttgctcctaaggggcctggacaccttgtaagaagtgaatttgaaaaagggggtggagttccctgtttgatggcggtacatcaagacggcacaggtaaagcaagagatttagctctatcttatgcatcagcgattggaggtggaagatctgggattattgaaaccactttcaaagatgaatgtgaaacagatttatttggtgaacaaacagttctttgtggaggtctcgtagagctgattaaaaatggttatgaaacat

SEQ ID NO: 209132 - DNA, 565 bp, Unknown
  Bacterial polypeptide expressing nucleotide sequence isolated from the Sargasso Sea
tcatcaaaatggttctggcaatgcaagagatcttgcaatgtcatacgcatcagctattggaggtggcagatcaggaataatagaaacaacattcaaagatgaggttgaaaccgatctatttggagagcaaaccgtattatgtggaggactagttgaactaattaaaaatggttatgaaactttaattgaagctggttacgaaccagaaatggcatattttgaaaccgttcatgaagtaaaacttattgttgatttaatttatgaaggaggaatcgcaaatatgaattattctatttcaaatacagctgagtatggagagtatgtaactggtccaagaattattaacaaagaagaaacaaaaaagagaatgaaagaagttttagcagatattcagtcaggtaaattcacaaaagaatggatggatgagtgtaaaaatggccaaaaaaacttcttaaaaaccagagaaaaattggctgagcatccagtggaaaaagtaggagcagaacttagagctctaatgccatggattgccaaaaagaaactaatagatagcgacaagaaatag

SEQ ID NO: 209133 - DNA, 445 bp, Unknown
  Bacterial polypeptide expressing nucleotide sequence isolated from the Sargasso Sea
aatgttttatgaaaaagatgctaacgtaaatttaataaaggataaaaaagttgccatttttggttacggaagccaaggacatgctcatgctttaaacttgaaggatagcggggttaaaaatgttgtggttgctttaagggaaggttcttcaagtataaaaaaagcagagagcgagggtcttaaagtaatgtcattatcagatgctgctgcgtgggcagatgtagtaatggttttaactcctgatgaacttcaagcatcgatttataaaaatcatatcgaacaaagaatgaaacaaggaacgagtttggcgtttgctcacggtctaaatattcattttaatttaattaactcaagaaaagatttagatgttttcatggtcgcaccaaagggtccaggacatttagttagaagcgaatatcaaagaggaggaggagttccttgttta

SEQ ID NO: 209134 - DNA, 657 bp, Unknown
  Bacterial polypeptide expressing nucleotide sequence isolated from the Sargasso Sea
catgaaagtttattacgacaaagattgtgacctctcgatcatccagggtaagaaagttgccatcattggttacggttcccagggccacgctcaagcatgcaacctgaaagattccggcgttgatgtaactgttggcctgcgcaaaggctcggctactgttgccaaggctgaagcccatggcctgaaagtgactgacgttgcttctgctgttgctgctgccgatctggtcatgatcctgaccccggacgagttccagtcttccctgtacaaaaacgaaatcgagccgaacatcaagaagggcgctaccttggccttctcccacggtttcgcgattcactacaaccaggttgtgccgcgtgctgacctcgacgtgatcatgatcgcgccgaaggctccgggccacaccgtacgttccgagttcgtcaagggcggcggtatccctgatctgatcgctatctatcaggacgcttccggcaatgccaagaatgttgctctgtcctacgctgctggcgtgggtggcggccgtaccggcatcatcgaaaccaccttcaaagacgaaaccgaaaccgacctgttcggcgagcaggccgttctgtgtggcggtaccgttgagctggttaaagccggctttgaaactctggttgaagccggttatgc

SEQ ID NO: 209135 - DNA, 745 bp, Unknown
  Bacterial polypeptide expressing nucleotide sequence isolated from the Sargasso Sea
atgagtttcagaaaaaatgtttacattaaagaaatagaaccaaacttaaaagaaggaaagatattaagttttgctcatggcttcaatataagattcggacttatcaaacctcctagttttgttgatattgtaatgattgccccaaaagggcctgggcacactgttcgttgggaatatcaaaatggtcaaggagttccagcactgtttgcagttgagcaggattcttccggaagtgcaagatcattggcaatggcttacgctaaagggattggcggaacgagagctgggattcttgaaacgaactttaaagaagaaacagaaactgatttatttggagaacaagcggttttatgcggaggattatcagaactcgtgaaatcaggcttcgaaacgcttgtagaggcaggatatcagcccgagcttgcttacttcgaatgcttacatgaagttaaacttatcgttgatttaatggtgaagggaggcttatctcaaatgagagattccatctcaaatactgcagaatatggagattatgtaagtggtaaaagacttatcaatagtgatacaaagaaagaaatgcagaaaattctaaaagatattcaagatggaactttcgctaagaattttgtggaagaatgtgataaaaacaaacccctaatgacaagattaagagaagagaactcaaaacatgaaattgagaaagtaggtaaaggtctacgctcgatgttcagttggctgaaataaa

SEQ ID NO: 209136 - DNA, 649 bp, Unknown
  Bacterial polypeptide expressing nucleotide sequence isolated from the Sargasso Sea
atgaaaacatattacgataaagatacaaataaagacttaatcaaaaataaaaaagtagcaatttttggttatggcagtcaaggtcatgcacatgcattaaatcttaaagatagtggagtgaaagaggttgttgttgcactacgagagggttcatcaagtattaaaaaagcggaaagcgctggactaaaggtgatgtcgctttcagacgctgcagcttgggccgatgtagtaatgatgttaaccccagatgaattacaatcagaaatatataaaaatcatattgaacaaagaatgagggaaggaacaagtttagcttttgctcatggtttaaatattcacttcgatttaattaaagctagaaaagatctggatgtttttatggtcgctccaaagggaccaggacatacagtgagaagcgaatatcaaaaaggtggaggagtgccttgtttaatggcagtacataaagatagttcaggaaaagcgaaaaatttagctttatcttatgcttctgctgttggtggtggtaaagctggaataatagagacaacttttaaagatgaatgtgaaacagatttatttggtgaacaaacagttttatgtggtggcttagttgaattaataaaaaatggctttgaaactttaactgaag

SEQ ID NO: 209137 - DNA, 553 bp, Unknown
  Bacterial polypeptide expressing nucleotide sequence isolated from the Sargasso Sea
tatggccgccgaaattttttacgacgccgacgctgatcaagcgctgctagagaacaaaaaaattgcgattctcgggtacggttcccaggggcatgcccacgcacagaatctgcgggacagtggttgtcacgtgattgtgggcacgcggggaaaaggtccgagtcatgagctggcggagagccatggttttcaaccgatgtctatccagcaagccgccgaggaggcggatatcgtgaatttgctgctacccgatgagaggcagggcgatgtctacgagcaagaggtgctgcccgtattatccccgggcaacattctgatgtgctcgcatggattcaatttgcatttcggatatgtcaccgcgccggatggagttgccacattacttgtcgcgccgaagggaccgggtcatctggtgcgcagcgaatatttggcgggagggggcgttccatgtttggtagctgtgggaaatccggatgatgaaacaaccttttcgatcggtctggcctatgcgagtgctattggcggaggccgcgcaggtatcatccgtacgacg

SEQ ID NO: 209138 - DNA, 531 bp, Unknown
  Bacterial polypeptide expressing nucleotide sequence isolated from the Sargasso Sea
tatgaaaacttattacgataaagatacgaataaaaatttaattaaagacaaaaaggtagcaatatttggatatgggagccaaggacatgctcatgcattaaacttgaaagatagtggtgttaaagaggttgtagttgctttaagagagggatcctcaagtattaaaaaagcagaaagtgctggattaaaagtaatgtcattatctgatgctgccgcttgggcagatgttgtaatgatgttaacgcctgatgaacttcagtctgagatttacaaaaatcatattgagcaaagaatgaaagagggaacaagtttagcttttgcccatggtttgaatatccattttaatttaattaatgctagaaaagatttagatgtttttatggtcgcgccaaagggaccagggcatactgtaagaagcgagtatcaaaaaggtggtggagttccttgtttaatggctgttcacaaagatagttcaggaaaagcaaaagatttagctttatcgtatgcatctgctgtaggtggaggcaaagc

SEQ ID NO: 209139 - DNA, 322 bp, Unknown
  Bacterial polypeptide expressing nucleotide sequence isolated from the Sargasso Sea
gattgttgatttaatctatgagggtgggattgctaacatgaattattcgatttcaaataccgcagaatatggagagtatgtttcaggtcctaggattataaataaagaagaaaccaagaaaagaatgaaagaagtattagaggacattcaatctggaaaatttacaaagcaatggatggaagaatgtaaaaatggtcaaaagaattttcttaagactagagacgaacttgcaaaacattctattgaaactgttggtactaaactaagagccatgatgccttggattggtaaaaagaaattagttgatagcgacaagaagtaa

SEQ ID NO: 209140 - DNA, 655 bp, Unknown
  Bacterial polypeptide expressing nucleotide sequence isolated from the Sargasso Sea
gatgtatttatggttgcaccaaaaggaccaggtcatttggttagaagtgaatttgaaaaaggtggaggtgttccatgtttatttgccgttcatcaaaatggatctggaaaggcaagagatcttgctatgtcatatgcatctgctgttggcggaggtagatctggaataattgaaactacatttaaagacgaagttgaaacagatttatttggagaacaaactgttttatgcggaggattggtagaactaattaaaaatggttatgaaactttagtcgaagcaggttatgagccagaaatggcatattttgaaactgttcacgaagttaaattaattgttgatttaatttatgaaggtggaattgctaatatgaattactccatttcaaatacagctgagtatggagaatatacttctggaccaagaattattaataaagaagaaacaaagaaaagaatgaatgaagttttgaaagatattcaatcaggaaagtttactaaagaatggatggaagaatgtaaaaatggccagaaaaacttcttaaaaattagggagaagctagctgatcatccggtagaaaaagttggtgcgggccttagagcaatgatgccttggatagcaaagaaaaagcttatcgatagcgataaaaagtaat

SEQ ID NO: 209141 - DNA, 862 bp, Unknown
  Bacterial polypeptide expressing nucleotide sequence isolated from the Sargasso Sea
agtagcagttttcggttatggcagccagggtcatgcacacgcattaaaccttaaagatagtggtgtgaaagaagttgttgttgcactacgtgaaggttcatcgagtataaaaaaagcagaaagcgccggactaaaggtaatgtcgctttcagatgccgcggcatgggcagacgtagtgatgatgttaactcctgatgaacttcaatctgagatttataaaaatcatattgaacaaagaatgagagaaggaacaagtttagcctttgcacatggtttaaatgttcattttgatttaattaaagcaagaaaagatttagacgtttttatggtcgctccaaagggtccaggacatacagttagaagcgaatatcaaaaaggtggaggcgtaccttgtttgatggctgtacataaagatagctcaggaaaagcaaaggatttagctttatcttacgcatctgctgtaggtggaggtaaagccggaattatagaaacaacttttaaagatgaatgtgaaacagatttatttggagaacaaactgttttatgtggtggattagttgaattaattaaaaatggttttgaaactttaacagaagcaggttacccacccgaaatggcatatttcgaaacccttcatgaagtaaaattaattgtagacttaatttacgaaggaggtattgcaaacatgaattattctatttcaaacactgcagaatacggtgagtatgtttctggtaaaagaatagtagatactaagactaaagaaaaaatgaaggaagtgttaaaggatattcaatcaggtaaatttacaaaacagtggatggaagaacataaatccggtcaaaaaaactttctaaaaatg

SEQ ID NO: 209142 - DNA, 415 bp, Unknown
  Bacterial polypeptide expressing nucleotide sequence isolated from the Sargasso Sea
atgttttatgaaaaagatactgatgtaaatttaattaaagataaaaaaatagctatttttggttatggaagccaaggtcatgcgcatgcattaaatttaaaagatagtggagttaaagaagttgttgtagcattgagagagggctcttcaagcaaacctaaagcagtgtcgaaaggccttaaggtaatgaatttatcggatgctgcagagtgggcagatgttgtaatgattttaacaccagatgagctacaagcatctatttataaaaatcacattgaacaaagagtcagaaaaggaacctccttagcttttgctcatggattaaatgttcactatgatttaatcaaaaatagagaagacttggatgttttcatggttgcacctaaaggtcctggtcatttagtaagaagtgaat

SEQ ID NO: 209143 - DNA, 511 bp, Unknown
  Bacterial polypeptide expressing nucleotide sequence isolated from the Sargasso Sea
atgttttatgaaaaagatgcagacgtagatttaattaaaaataaaaaaattgctatttttggctatggcagtcaaggacacgcccatgctttaaatcttaaggatagtggagttaaagaaatcgttgtagcactaagagatggttcatcaagtgtagcaaaagcggaatcaaaaggattaaaggtcatgaatttatctgatgctgctgcttgggcagatgtggtaatgattttaactccagatgaattacaagcagaaatttataaaaatcatatagaacaaagagtaaaagaaggaaccagtattgcatttgctcatggattaaatgttcactatgatttaattaaagctagaaaagatttagacgttttcatggttgctcctaaagggcctggtcatttagttagaagtgaatacgaaaaaggtggtggagtgccatgcttgtttgctgtacatcaaaatggctcaggtaaagcaagagatttggcattatcatatgcttcagccagtt

SEQ ID NO: 209144 - DNA, 190 bp, Unknown
  Bacterial polypeptide expressing nucleotide sequence isolated from the Sargasso Sea
gtgcggaggattatcagaactcgtcaaatcaggcttcgaaactcttgtagaggcgggatatcagcccgaactcgcttacttcgaatgcttacatgaagtcaaacttattgttgatttaatggtgaagggaggcttatctcaaatgagagattccatttcaaatactgtcagaatatcggagattatgtaa

SEQ ID NO: 209145 - DNA, 309 bp, Unknown
  Bacterial polypeptide expressing nucleotide sequence isolated from the Sargasso Sea
tttatgaaggtgggattgcaaatatgaattactctatttcaaatactgcagaatatggagaatatcaatctggacctagagtaattaacaaagaggaaactaaaaaaagaatgaaagaagttttggctgatattcagtctggtaaatttactaaagaatggatggctgagtgcaaaagtggccaaaaaaactttcttgctacaagggcaaaattagctgaacatccagttgaaaaagttggggctaatttaagagccatgatgccatggattggtaagaagaaattagttgatagtgataagaagtaaa

SEQ ID NO: 209146 - DNA, 442 bp, Unknown
  Bacterial polypeptide expressing nucleotide sequence isolated from the Sargasso Sea
atggcaaatatctactatgaagcagacgctgataggtcatatatcgatgggaaaaaagttgccgtcctcggttatggatcgcaggggcacgcccacgcactaaacctaaaagaatctggagtggaggtctgtgtcggccttcggccagaatcttcttctgtggctaaagcagaagaagcagggctaacagtcatgaacatagctgacgcttccgcctgggcaaatgctgtgatgattcttctaccagacactgaacaagccgatatctatgatgcccacattggcccaaacttagaagccggagacattgtgatgttctctcatggatttaacattcgatttgatctcattcaacctcccagcaatgttgacgtagtcatggtcgcccccaaaggaccaggccatcttgtgcgaaggacatatgtcgaaggcggaggagttc

SEQ ID NO: 209147 - DNA, 524 bp, Unknown
  Bacterial polypeptide expressing nucleotide sequence isolated from the Sargasso Sea
tatgaaagtttattacgaaaaagattcagaactagatttagttaaatcaaaaaaagttgcaatttatggatatgggagtcaaggtcatgctcatgcgctgaatttaagagatgcaggagtaaaagaagtagttgttgctctaagagaaggctcatcaagtgtagctaaagctgaagcggaaggcttaaaagtcatgtcaatgtcagatgctgcagagtgggcagatattttgatgatgctaattcccgatgaattacaagcagatgtttataagaatcatatcgaacaaagagctaaacaaggggcagctcttgcattcgcacatggattaaatgttcattttaatttaattaatgcgagagatgatttagatgttttcatgattgctccaaaaggaccaggacatacggttcgttctgaatttaaaaaaggaggaggtgttccttgcttagttgctgttgatagcgacaaaacagggaaatgccctaaaatagctttatcatatgcatcagctataggtgggg

SEQ ID NO: 209148 - DNA, 730 bp, Unknown
  Bacterial polypeptide expressing nucleotide sequence isolated from the Sargasso Sea
aaggaagctgacgtgatgatgatggccttgcctgacaccgagcaagcggctatctactcggaacaaattgctcctaacttgtccgcgggcaacgccttggctttctcgcatgggtttaacattcattttgatcaaatccagcctcctgacgatgtcgatgtttggatgatcgctcccaagggaccaggccataacgtgcggcgcacttatgctgaaggtggcggcgttcctgctctagtagctattcatcaagacgcaactggaaatgcccttaacgatgcgctcgcatacgcaaagggaattggaggtacacgtgggggcgtcctaaccactaccttcgccgaggaaactgagaccgacttgttcggggagcaagttgtgttgtgcggtggcctcactgaactgattcgtgcaggctatgacactcttgtggaagctggttaccagccggaatccgcgtatttcgaaactcttcatgaagtgaagctcattgtggatttcatatacgaagctggaatcgctggaatgcggtattcaatttcgacgacagcagaatatggagacctcactcgagggcctcgcatcattaccgacgaaacgagagccgaaatgaaacgtattctcggtgaaattcaagatggaacttttgcgaacgagtggatcgaggaaaaccggagtggtcttgcgaactataagcgcctggtagaagaggggaaggaacatcccattg

SEQ ID NO: 209149 - DNA, 397 bp, Unknown
  Bacterial polypeptide expressing nucleotide sequence isolated from the Sargasso Sea
ggttatgaaactctagtagaagcaggatatgatcctgagatggcatattttgaaactgtacatgaagtaaaattaattgttgatttaatttatgagggtggaattgcaaatatgaattactcaatatctaacacagctgaatatggagagtatatgtctggcccaaggatagttaacaaagatgaaactaaaaaaagaatgaaggaagtcttaaatgatattcagtctggcaaattcacaaaacaatggatcgatgagtgtaaaaatggccaaaaagaatttttaaaaattagagcaaaattatctgagcatccggtagaaaaagttggcgcagaactaagagccatgatgccttggattggtaagaaaaaactaatcgatagtgataagaagtaat

SEQ ID NO: 209150 - DNA, 605 bp, Unknown
  Bacterial polypeptide expressing nucleotide sequence isolated from the Sargasso Sea
tatgaaaaagggtgtgggagtaccatgtttgtttgctgttcatcaaaacggatcagtaaaagcaagagacttagcattatcatatgcatcagctgtaggtggtggaagatcaggaattattgaaactacttttaaagacgaagttgaaacagatttatttggtgaacaaacagttctttgtggaggattagtagaattaattaaaaatggttatgaaactttagttgaagcaggttatgagccagagatggcttattttgaaactgtgcatgaggtaaaattgattgttgatctgatttatgaaggtggaattgcaaatatgaattattcaatatcaaatacagccgagtacggtgaataccaatctggaccaagaattattaataaggaggaaactaaaaaaagaatgaaggaagtgctgtctgaaattcaatctggaaaatttacaaaagagtggatggatgaatgtaaaaatggtcagaaaaactttttagcaactagagctaagttggcagagcattcagtggaaaaagttggtgctgagcttagagctatgatgccatggataagtaagaaaaaactagttgacagcgacaaaagttaaa

SEQ ID NO: 209151 - DNA, 579 bp, Unknown
  Bacterial polypeptide expressing nucleotide sequence isolated from the Sargasso Sea
cttgtcttatggctgtacacaaagatagttccggcaaagcaaaagaattagccttgtcctatgcatcagctgtaggtggtggaaaagcaggcattattgaaacaacttttaaagatgagtgcgaaacagatttatttggtgagcaaacagttctttgcggaggtttggttgaactaattaaaaatggttttgaaactttaactgaagctggctatccgcctgagatggcttactttgaaactcttcatgaagtaaaattaattgtagatctaatttatgaaggtggtattgcaaacatgaactattctatatctaatacagcagagtacggagaatatgtttccggtaaacgaattgttgatagtaaaacaaaagaaaaaatgaaagaagttctcaaagatattcaatctggtaaatttactaaacaatggatggacgagcataagtcaggacaaaaaaatttccttaaaatgagaaaagatttagctgatcatcctattgaaaaagtgggcaaagaactaagagctatgatgccgtggattggcaaaaataaattggtcgacaaagacaagaattagc

SEQ ID NO: 209152 - DNA, 838 bp, Unknown
  Bacterial polypeptide expressing nucleotide sequence isolated from the Sargasso Sea
agctagcaaagcaaaatctgatggattggaagttttaagcgtcgcggaggcttcagaaagggcagattggatcatgatacttttgcctgatgaatttcaaaaagatgtttactccaaagagatagcacctcatttaaaagctggaaagatactaagttttgctcatggtttcaatattcgctttgaattaataaaacctcctgaatttgtcgatgtagtaatgattgccccaaagggaccaggtcacactgtcagatgggagtatcaaaatggccaaggtgttcctgctttatttgcaattgagcaagatgcctcaggcaatgcaagagcacttgcgatggcatatgcaaaaggtattggcggaacacgcgctggaattttagaaaccaatttcaaagaagaaactgaaactgatctttttggagaacaagcagttttgtgtggaggcctttcagagttggtcaaagctggttttgagactcttgttgaagctggttatcaacctgaattggcatactttgaatgcttgcacgaagtcaagctaatagttgacctcatggttaaaggaggtctaactgcaatgagggattcgatttcaaatacagctgagtatggagattacgtaagcggtccaagattaataaccaaagagacaaaagaagaaatgaaaaatattcttgccgatattcaagatggtacttttgctaaaaactttgtaaaagaatgcgatgcaggcaaacctgaaatgaagagaattcgccaaaaagactcagaacttccaatagaaaaagtaggcaaaacacttcgctcgatgtttagttggcttaaatcagactaa

SEQ ID NO: 209153 - DNA, 466 bp, Unknown
  Bacterial polypeptide expressing nucleotide sequence isolated from the Sargasso Sea
gggattttagaaactaatttcaaggaagaaaccgaaactgatctttttggagaacaagcagttttgtgtgggggcctatcagagttagtcaaagctggttttgaaactcttgtagaagcaggctatcaacctgaattggcctacttcgaatgcttgcatgaagtcaaactaatagtcgacctcatggttaaaggaggtctaactgcaatgagagattcgatttcaaatacggctgaatacggagattacgtgagtggtccaaggttaataaccaaagaaacaaaagaagaaatgaaaaatattcttgccgatattcaagatggtacttttgctaataactttgtaaaagaatgcgatgcaggtaaacctgaaatgaagagaattcgccaaagagactcagaacttcccatagaaaaagtcggcaaaacacttcgctcaatgtttagttggcttaagtcagactaaa

SEQ ID NO: 209154 - DNA, 718 bp, Unknown
  Bacterial polypeptide expressing nucleotide sequence isolated from the Sargasso Sea
aaatatctggcttttggtcacggatttaatatccactataatcaaatagttcctgatagtgatattaatgtttttatggtagctccaaaggctccgggtcatactgtcagaggaacatatgaagagggtgcaggagttccagggttaatagcagttaaccaagaccctggcggcaatactaaaaagatagccttagcatatgcagccggaattggctcggcaagagttggaattatagagacaacatttaaagatgaaacagaaacagatttatttggtgagcaatcagttctttgtggcggtctttcaagcctaattcttgcgggatttgaaacattaattgaagcaggctatccaccagagatggcttattttgagtgtttacatgaagtaaaactcattgtcgatttagtttatcaaggtggaatatctaatatgagatactcaattagtgatactgctaaatatggggatataacaagaggaccacgactgattgatgactctgttaaaaaaagaatgaaaaatattttagatgaaattcaaagtgggcaattcgcggatgaatggatcaaagagaataagtcaggtagaccaaattacaataaacttcttaaagacggcgagactcacccaattgaagacataggtcaaacacttagatcaatgatgacacctttattcaagaaaaaacttgtagataaagataaaaattaac

SEQ ID NO: 209155 - DNA, 828 bp, Unknown
  Bacterial polypeptide expressing nucleotide sequence isolated from the Sargasso Sea
tcacaaggacatgcacacgcgaataatctgaatgattcaggggtagatattacagttggtttgagagaaggttcctcatcatggaaaaaagctgaagatgcaggtttaaaagttaaatctgtttctaactcagttattgatgcagatatggttatgatcttagcgcctgatgagtttcaaaaaggaatttatgagaatcaaattaaacctaatttaaaaccaaatgccattcttggttttgctcatggatttaatatacacttcaaaaaaatcatacctgaaaaaggaaatagtgtaattatgattgcaccaaaaggtccaggccatactgtaagaagtacttatataaatggagggggagtaccatcacttatagcaatcttcgaagatgctacaactgataaattttctgcaaaagaaattgctttatcttatgcaaaagcaaatggtggaaccagagccggtgtacttgaaacatcctttaaagaggaaacagaaactgatttatttggagagcaggctgtattatgtggaggaatgactgctttaataaaagctgggtatgagacgcttgtagaagcaggttatagtccagagatggcatatttcgaatgcttacatgaaacaaaattaattacagatttaattcaagaaggtggtatcgcaaatatgcattattctatttcaaatactgctgaatacggcgattatttaagtgggcctaaggttattaccgataagaccaaagaagcaatgaaagagattcttaataatatacaatctggaaattttgcagatgaatttctggatgattgcaggcaaagtata

SEQ ID NO: 209156 - DNA, 388 bp, Unknown
  Bacterial polypeptide expressing nucleotide sequence isolated from the Sargasso Sea
aatggaagtattttacgaaaaagattcaaatcctgaattattaaaagataaaactatagcgatcataggctacggttctcaaggtcatgcacatgctaataatttgaaagactctggtttcaaagtgattcttggattaagagatggatcatcttcggctgtaaaggcatctgaagcgggttttgaagttgctagtaatgtcgatgccgcgtctaaagccgatctattgatgatgttaatccccgatgaatttcaaggaattacttataaagaagagatagaacctaatcttaagaaaggcgctactttagcatttgcgcatggatttaatattcattacgaacagattgttccaagagaagacttagacgtaatcatgatagctccc

SEQ ID NO: 209157 - DNA, 808 bp, Unknown
  Bacterial polypeptide expressing nucleotide sequence isolated from the Sargasso Sea
tcttgggcagatataataatgatgttaacaccagatgaattacaatcagatatttataacaaagaaatttcagaaaacattaaagatggaactgcattagcttttgcacatggtttaaatattcattttgatttaataaaacctaaagaaaatattgatgttatcatgatggccccgaaaggtcctgggcacacagttagagctgaatatgtaagaggtgcgggtgtcccttgtttagttgcagtagataaaaatccatctggcaatgcacttgaaatagctatagcatattcatcagctattggaggtggaagagctggtataattgagacaagtttcaaggaagaatgcgaaactgatttatttggagaacagtctgttttatgcggtggcttaactcatttaattattgcaggttatgaaactttagttgaagctggatatgcccctgaaatggcttattttgaatgtttgcatgaggtaaaattaattgtagatcttttgtatgaaggtggaatggcaaatatgagatattctatatctaatactgctgagtatggagattactcaagaggacctcgtttgataacagatgagactaaaaaagaaatgaagaaaatcttatcagagatacaatcaggtcaatttgctaaagaatggatggaagaacatagaagtggacaaacaaagtttaaaactatgagaaaaaaacaagcagaacattcaattgaacaagttggggaaaaattaagaacattaatgccatggattgccgaagggaaaatggttgataaaagtaagaattaat

SEQ ID NO: 209158 - DNA, 883 bp, Unknown
  Bacterial polypeptide expressing nucleotide sequence isolated from the Sargasso Sea
agatattaataaggactttgtagatggcaaaaaaattgctgtattaggttatggaagccaagggcatgcacatgcaagaaacttaaatgattcaggcatggacgtcgtagttggattgtatgaagggagtaaaagtaaacaggttgctgaaaaagatgggctaaaagtcctttctaattctgaggctgtgaaacaatcagatattatcatgttctgtctacctgatactattcaaggaaaagtatataaagaagatgttgaagagaacttaactgaaggtaaaatgttaatgttttgccacggatttagtattttttatgaacaaataaaaccacctgaatttgttgatgttgctatgattgcccctaaaggacctggtcatattgtccgaagagtttttgaatcgggtcaaggtgtgccttgcttagttgctgtatatcaagattattctggtaaagcccaagaagttgctcttggatatgggcttggaattggtggcgccagagctggaattcttgaaacaacattcaaagaggagacagaaactgatttattcggagagcaagcagtattgtgtgggggagtaacttctcttgtgcaaagtgcatttgaagtcttggttgaagcaggatatcaacctgaatcagcatattttgaagttttgcacgaactaaaacttatagttgacttaatgtatcaaggcggcttaggcgaaatgagattttctatttctgatacagctgaatacggtgattatacaagaggtccagtagtagttgatccatcagtgaaagaaaatatgaagaaagttcttgaacaaattcagtctggccaatttgcaaaagaatggattgctgaaaatgacgaaggattacataagttt

SEQ ID NO: 209159 - DNA, 739 bp, Unknown
  Bacterial polypeptide expressing nucleotide sequence isolated from the Sargasso Sea
caaagggttagagaaggaacatccattgcattcgcacatggattaaatattcattatgatcttattaatgcaagaaaagacttagatgtatttatggtagcaccaaaaggaccaggtcatttagttcgaagcgaataccaaaaaggtggaggagttccatgtttatttgccgttcatcaaaatggatctggaaaagcaagagaacttgcgatgtcttatgcatcagcagtaggtggtggtagatctggaattatagaaacaacttttaaagatgaggtagagacagatttatttggagagcaaacagtactttgcggtggtttagttgagttgattaaaaatggttatgaaactttagttgaagccgggtatgaacctgagatggcatatttcgaaactgttcatgaagtaaaattaattgtagatctaatttatgaaggtggaattgcaaatatgaattattcaatttcaaatacagctgaatacggagagtatacttctggaccaaaaataattaataaagaagaaacgaaaaaaagaatgaaagaagttttagatgatatccaatccggaaagtttacaaaacaatggatggatgaatgtaaaaatggacaaaagaatttcttaaaaacgagagaaaaattagccgaacatcctgttgaaaaagttggagccagtcttagagctatgatgccttggatatctaagaagaaattggtagatagcgataagaattaga

SEQ ID NO: 209160 - DNA, 399 bp, Unknown
  Bacterial polypeptide expressing nucleotide sequence isolated from the Sargasso Sea
ttttgatggtcgctatggttaaagcaggtgttgaacttgcgttcgaaactatgacagcggcaggcattattgaagagtcagcatactacgagtcgcttcacgaaacaccgctgattgctaataccattgcacgtaaaaagttatttgaaatgaatcgtactatttcagacactgctgaatatgggtgttacttatataaccatgcttgcttaccattacttgctgactttatgaaaaatattgacacagatgtaattggtaaaggcttaggtgagcaaagtaaccaggtagacaacaaagcgttaattgaaattaatacagcgctgcgtgagcacccggttgaaatagtaggcgctaaattacgtggctacatgtcagcaatgaaaaaaattgtttaac

SEQ ID NO: 209161 - DNA, 784 bp, Unknown
  Bacterial polypeptide expressing nucleotide sequence isolated from the Sargasso Sea
aatgttttatgaaaaagatacagatgtaaatttaatcaaagataaaaaaattgctatttttggctatggtagtcaaggacatgctcatgctttaaatttaaaagatagtggtgttaaagaagttgtagttgcattgagggaaggttcctcaagtatacctaaggcagagtcaaaaggattaaaggtaatgaatttatctgatgctgctgagtgggcagatgttgtaatgattttaacaccagatgaattacaagcatcaatttataaaaatcatatagagcaaagagtaaaagaagggaaatcgattgcttttgctcacggattaaatgttcattacgatttaataaaagctagaaaagatttagatgtttttatggttgctcctaaaggaccaggtcatttggtaagaagtgagtatgaaaaaggtgggggagtgccatgtttatttgcagtacatcaaaacggctctggtaaggcaagagatcttgccatgtcatatgcctcagctgttggtggtggaagatcaggtattattgaaacaacatttaaagacgaagttgaaacagatttatttggggaacagactgttctttgtggtggtttagttgaattgataaaaaatggttatgagactttggtggaagctggatatgaacctgagatggcatattttgagactgttcatgaagtaaaacttattgttgatcttatttatgaaggtggaattgcaaatatgaattactctatttcaaacactgcagaatatggagaatatcaatctgga

SEQ ID NO: 209162 - DNA, 596 bp, Unknown
  Bacterial polypeptide expressing nucleotide sequence isolated from the Sargasso Sea
gatctggatgtaattatggttgcaccgaaaggcccaggacatactgttcgatcacaatatgaatcaggagcaggagtgccttgcttactcgctgtgtatagaaatatttccggaaaagcaaaagatgttgggctttcatatgcatctatgattggttctggccgagctggaattattgaaacaaattttaaagatgagactgaaacagatctatttggagaacaagcggtcctttgtgggggtttaacgtcacttattcaaactggttatgaagttctggtagaaaatggttatccaccagaaatggcatattttgaatgtcttcatgaagtaaaactaattgttgacctcatttatgaaggtggtcttcagaatatgagatatagcatttccaatactgcagagtatggagattatgtgacaggaccaaagattgtgaatgaaaatacaaaggaaacaatgcagaagatattgactgagatccagtctggagaattcgcgaaagattttatgaatgactgtaactctggtggtcagaaaatgagcgaatatagaaaaaactcctcagaacattcaatcgagtcagtgggcgaaga

SEQ ID NO: 209163 - DNA, 872 bp, Unknown
  Bacterial polypeptide expressing nucleotide sequence isolated from the Sargasso Sea
agttgttgtagctcttcgagaggggtcttcaagtattgaaaaagcagaatctaaaggattaaaagttatgaacctttcggatgctgctgaatgggctgatgttgtgatgattttaactccagatgaattgcaagcaactatttataaaaatcatattgagcaacgtgtaaaagaaggaacatccatagcttttgctcatggattaaatgttcattatgatttgataaaagctagaaaagatctagatgtatttatggtagcaccaaaaggaccgggacacttagttagaagtgaatatgaaaaaggtggtggagttccatgtttatttgctgtccatcaaaatggatcaggtaaagctagagatctagctatgtcatatgcttcagctattggtggaggaagatcaggtataattgagacaacatttaaagacgaagtagagacagatttatttggcgaacaaactgttttatgtggaggtcttgttgaattaattaaaaatggatatgaaactttagttgaagcgggatatgaaccagaaatggcttattttgaaacagttcatgaagttaaacttattgtagatttaatttatgaaggtggaatagcaaacatgaattattctatatccaatactgcagaatatggagaatacgaatctggccctagaataataaataaagaagaaacaaaaaaaagaatgaaagaagttttagcagacattcagtcaggtaaatttactaaacaatggatggatgagtgtaaaaatggtcagaaaaatttcttagcgacaagagcaaagctagcagagcatccagttgaaaaagttggagcaactttaagagaaatgatgccttggattgccaagaaga

SEQ ID NO: 209164 - DNA, 391 bp, Unknown
  Bacterial polypeptide expressing nucleotide sequence isolated from the Sargasso Sea
tatgaaacattaactgaggctggttatgcaccagagatggcttattttgaatgtttacacgaagtcaaacttatagtggatttaatttatgaaggtggaattgctaacatgaattattcaattagtaatacagccgaatatggagaatatgtaactggaccgagattaataacatctgaaactaaagcagagatgaaaagaatacttaatgatattcaatcaggaaagtttacaagagattggatgcttgaaaacaaagttaatcagactagttttaaagcgactagaaggaaagttgctgatcatcctatagaagctataggtaatgaacttagagcaatgatgccatggattactgccaatagattagttgacaaagataaaaattaat

SEQ ID NO: 209165 - DNA, 847 bp, Unknown
  Bacterial polypeptide expressing nucleotide sequence isolated from the Sargasso Sea
caaaggtttgaaggtaatgaacttgtccgatgcagcagaatgggctgatgtttgtatgattttaactccagatgaacttcaagcaaccatatataaaaatcatatcgaacaaagaataaaagaaggtacaagtttagcttttgctcacggtttaaatattcattatgatttaatcaaagcaagaaaagatttagatgtatttatggttgctcctaaagggcccggacatcttgtaagaagtgaatttgaaaaagggggcggggttccttgtttgatggcagtacatcaagatggcacaggtaaagcaagagatctagctctatcctatgcatcagctattggaggtggaagatctggaattattgaaactactttcaaagatgaatgtgaaacagatttatttggtgaacaaacagttctttgtggaggtcttgtagagttgattaaaaatggttatgagacattagttgaggctggatacgaaccagagatggcatattttgaatgcttacacgaggtaaaattaattgttgatcttatttatgaaggtgggattgctaacatgaattactcaatttcaaataccgcagagtatggtgagtatgtttcaggacctagaattataaataaagaggaaactaaaaaaagaatgaaagaagttctagaggatattcaatctggaaagtttaccaaacaatggatggatgagtgtaaaaacggtcaaaagaattttcttaaaaccagagaggaattagcaaaacactctattgaaacagttggtactaaactaagagctatgatgccgtggattggtaagaagaaattagtagatagcgataagaagtaa

SEQ ID NO: 209166 - DNA, 822 bp, Unknown
  Bacterial polypeptide expressing nucleotide sequence isolated from the Sargasso Sea
aatgagagtatactatgacagagatgcagatttaaatttaataaaagataaaaaaatttcaattgtaggttatggaagtcaagggcatgcgcatgcaatgaatttgagagattctggcatagaaaatgtttcaattgctttaagagaaggttcaaattcaagaagtaaagcagaacaggctaattttaaagtaatgacacctgcagaagctgcaagttgggctgatgtgattatgatgttaacacctgatgaacttcaatctgaaatttacaaaaatgatatagctgaaaatattaaagaagggacaacaatcgcgtttgctcacggattaaatattcattttgatctaattaaacctaaggaaggtatagatgtaatcatggttgcaccgaaaggtcctggtcatacagtaagagcagaatatgtaaggggtgctggtgtaccttgtttagtagctgtagataaaaatccttcaggtaatgcacttgaaataggaattgcatatgcatcagcaattggtggaggaagagccggaattatagaaacaacttttaaagaagaatgtgaaacagatctttttggggaacaatccgttttatgtggaggtttaacacatttaattttagcaggttatgaaactcttgttgaagctggatatgcacctgagatggcttattttgaatgcctccatgaagttaagcttattgttgatcttctatatgaaggtggaatggcaaatatgagatactcaatttcaaatactgctgagtatggagattattcaagaggcccaagacttattactgatgaaacaaaaaaaga

SEQ ID NO: 209167 - DNA, 589 bp, Unknown
  Bacterial polypeptide expressing nucleotide sequence isolated from the Sargasso Sea
aatgtattacgaaaaagatgctgatgtaagtcttataaaaaacaaaaaaatagcaatctttggttatggtagccaaggtcatgcacacgcattaaatcttaaagatagtggtgtaaaagaagttgttgttgcgcttagagaaaattctcaaagtaagaaaaaggcagaaagcgaaggtctaaaagttatgtcgttatccgatgctgctgcttgggcagatgttgtcatggtattaactcccgacgaacttcaatctcaaatctataaaaatcatatagaacaaagaatgaaagctgggtcaagtttggcttttgcacatggtttaaatattcattttaatttaattaatgctagaaaagatttagatgtttttatggtagcgccaaaaggtcctggtcatttagttagaagtgaatttcaaaaaggaggcggagtaccttgtttgatggcagttcacaaagatagttctggaaaggctagagatcttgcaatgtcatatgcttcagctattggtggaggtaagtcaggtataatagaaaccacttttaaagatgaatgtgagacagatttattggagagcagacagttt

SEQ ID NO: 209168 - DNA, 512 bp, Unknown
  Bacterial polypeptide expressing nucleotide sequence isolated from the Sargasso Sea
aataggtggaggtagatctggaattattgaaacaacttttaaagacgaagttgaaactgatttatttggagaacagtcagtattgtgtggtggtttagtcgaactaatgaaaaatggttatgaaactttagtagaagcgggttacgaacctgaaatggcatattttgaaacagttcatgaagttaaattaattgtagatttaatttatgaaggtgggatcgctaatatgaattactcaatttctaatacagctgagtacggtgaatatcagtctggaccgagaataataaacaaagaagaaaccaaaaaaagaatgaaagaggttcttagtgaaattcaatctggtaaatttactaaagactggatggatgaatgtaaaaatggccaaaaaaactttcttgcaacaagagcgaaattagctgaacatccagtagaaaaagttggagctggattacgagctatgatgccttggattggtaaaaagaaattagtagatagtgataagaagtaaa

SEQ ID NO: 209169 - DNA, 412 bp, Unknown
  Bacterial polypeptide expressing nucleotide sequence isolated from the Sargasso Sea
tggattaacagaactaattagaaatggttttgaaacactagtagaagctggttatcagccagaaagtgcttactttgaaacacttcatgaagttaaattgattgtagatttaatgtacgaaggtggatttgaatggatgaggcattcaatttctgatactgcagaatatggagatttttctagaggttcgagaataataacttctgaaacaaaagaagagatgaaaaaagtactcgaagagattcaatcaggagcatttgctaaagaatggatgtcgcaggctagagaaggttctcctttccttaatgaaaaaagagcagaagcttccaaacatcagcttgaagaagtcggaaaaggtttaagagagatgatgccgtttctaaatgctaaagatgtaaaaaaagataaatga

SEQ ID NO: 209170 - DNA, 406 bp, Unknown
  Bacterial polypeptide expressing nucleotide sequence isolated from the Sargasso Sea
ttaattaaaaatggattcgaaactttaacagaagcaggttatccacctgaaatggcatactttgaaacacttcatgaggttaaattaatagttgatttaatttatgaaggtggaatcgctaacatgaattattcaatttcaaatactgcagagtacggtgaatacgtttcaggcaaaagaattgtagacagcaagactaaagaaaaaatgagagaagttcttaaagatattcaatctggaaaattcactaaacaatggatggatgagcataaatcaggccaaaaaaacttcttaaaaatgaggcaggatctagcgaaacacccgatcgaaaaagtgggtaaagaccttcgtgcaatgatgccatggattggtaaaaataaactagtagataaagataaaaattaac

SEQ ID NO: 209171 - DNA, 817 bp, Unknown
  Bacterial polypeptide expressing nucleotide sequence isolated from the Sargasso Sea
atgttttatgaaaaagatgctgatgtaaacttaataaaagataaaaagatagctatttttggttatggaagccaaggacatgctcatgctctaaatttaaaggatagcggtgtaaaagaagttgttgttgctttaagagaaggatcttcaagtaaagcaaaagcagaatcaaaaggacttaaagttatgaatttatctgatgcagcagaatgggctgatgtagttatgattttaactcctgacgaattacaagctacgatttataaaaatcatattgaacaaagagtcagagaaggaacttcaatagcctttgcgcatggattaaatattcattatgatttaattaaagcaagaaaagatcttgatgtatttatggttgcaccaaaaggaccaggacacctggtaagaagtgaatttgaaaaaggcggaggtgtcccatgcttatttgcagttcatcaaaatggatcaggaaaagcaagagatcttgcaatgtcttatgcatcagctattggaggaggaagatcgggaattattgaaacaacatttaaagatgaagtagaaactgatttatttggagaacaaacggtactatgtggtggtttagtagaattaataaaaaatggatatgagactttagttgaggctggatatgaacctgaaatggcatattttgaaacggtacatgaagttaaattaattgttgatttaatttatgagggtggaatagcaaatatgaattactcaatttctaatactgcagaatatggagagtatgttactggcccgaaaattataaataaagaagaaacaaaaaaaa

SEQ ID NO: 209172 - DNA, 905 bp, Unknown
  Bacterial polypeptide expressing nucleotide sequence isolated from the Sargasso Sea
gttttatgaaaaagatacagatgtaaatttaatcaagaataagaaaatagcaatctttggatacggaagccaagggcatgcgcatgcacttaatcttaaagacagtggtgttaaagaggtagtggttgctttaagagatggatcagcaagcaaggtaaaagcagagtcaaaaggattgaaagttatgaatttatctgatgcagcagagtgggcggatgtagtaatgattttaacaccagatgaacttcaggcaactatttacaaaaatcacatagagcaaagagtaagagaaggaacatctatcgcttttgctcatggcttaaacattcattatgatttaataaaagctagaaaagatttggatgtatttatggttgcacctaagggccccggtcatttagtaagaagtgaatttcaaaaaggtggaggagtcccttgtttatttgcagtacatcaaaatggctcaggcaaagcaagagatttagcaatgtcatacgcttcggctgttggtggtggaagatcaggaattattgaaacaacatttaaagatgaagtagaaacagatttatttggtgaacaaactgttctttgtggtggattagtagaattaattaaaaatggatacgaaactttagttgaagcaggatatgaaccagaaatggcatattttgaaacagttcatgaagttaaattaattgttgatttaatttatgagggaggtattgccaacatgaattattcaatttcaaatactgctgaatatggagaatacgtcactggtccaaaaattataaacaaagaagaaactaaaaaaagaatgaaagaagttttggcagatattcaatcaggtaaatttaccgaagattggatgaatgaatgcaaaaatggtcaaaagaacttttaaa

SEQ ID NO: 209173 - DNA, 673 bp, Unknown
  Bacterial polypeptide expressing nucleotide sequence isolated from the Sargasso Sea
atgttttacgaaaaagatacggatgtaaatttaatcaaagataaaaaaattgctatatttggctatggaagtcaaggtcatgcacacgcattaaatttaaaagatagtggagtaaaagaggttgttgttgctttaagagacggctcttctagcattccgaaagctgagtcaaagggattaaaagtaatgaatttatcagacgctgcggcgtgggctgatattgttatgattttaacaccagatgaattacaagcatctatttacaaaaatcatattgaacaaagggtgagaaaaggaacttcattagcttttgcccatggattaaatgtccattatgaattgattaaagcaagagaagatttagatgtttttatggtagcccctaaaggccccggccatttagtaagaagtgaatacgtcaaaggtgggggtgttccttgtttatttgctgttcatcaaaatggttctggaaaagcaagagaccttgctatgtcttatgcatcagcagtaggcggtggaagatcaggaattatagaaactacttttaaagatgaagttgagacagatttatttggtgaacaaactgttctttgtggagggttagttgaacttataaaaaaaggatatgaaactttagttgaagcaggatatgaacctgaaatggcttatttga

SEQ ID NO: 209174 - DNA, 568 bp, Unknown
  Bacterial polypeptide expressing nucleotide sequence isolated from the Sargasso Sea
tcagaatggtcaaggtgtacctgcattgttcgcagttgagcaggattcttctggaagtgcaagatcattggcgatggcttacgctaaagggattggaggaacgcgagctgggatacttgaaacaaatttcaaagaagaaacagaaactgatttatttggcgaacaagcggttttatgcggaggcttatcagaactcgttaaatcgggcttcgaaactcttgtagaggcaggatatcaaccagaacttgcatacttcgaatgtttacatgaagttaaactaattgttgatctaatggtgaagggaggcttatctcaaatgagagattccatttccaatactgcagaatatggagattatgtaagtggcaaaagacttattaataatgatacaaagaaagaaatgcagaaaattttaaaagatattcaagatggaactttcgctaagaattttgtagaagaatgtgataaaaataaaccattaatgacaaaattaagagaagagaactcaaaacatgaaattgaaaaagtaggaaaaggtctgcgctcgatgttcagttggctgaaataa

SEQ ID NO: 209175 - DNA, 460 bp, Unknown
  Bacterial polypeptide expressing nucleotide sequence isolated from the Sargasso Sea
atgttttatgaaaaagataccgacccaaatctaattaaaaataaaaaaattgctatttttgggtatggtagccaaggacacgcacatgccttaaacttaaaagatagtggagttaaagaggttgttgtagctttaagagatggatcagctagtaaagcaaaagctgaatctaaaggtttaaaagttatgaatttgtctgatgctgctgaatgggcagatgtaattatggttttaacacctgatgaattacaagcatcgatttataaaaatcacatagaacaaagggtaaaagaagggacttcaattgcatttgcacatggattaaatgttcattatgatttaattaaagccagaaaagatttagatgtttttatggttgcaccaaaaggcccaggacatatagtaagaagtgaattcgaaaaaggaggtggagttaccatgtctttgtgcagttcatcaa

SEQ ID NO: 209176 - DNA, 680 bp, Unknown
  Bacterial polypeptide expressing nucleotide sequence isolated from the Sargasso Sea
tagcgttatgatgattgcaccaaaaggtcctggacatactgtaaggagtacatatatgtctggtggaggagtcccatcattaattgcaatatatagagatgcgcttaacggcaaagattttaatgctaaagacgttgctctatcctatgccaaagcaaatggtggaaccagagcaggcgttctagagactacttttagagaagaaaccgaaacagatttgtttggagagcaagctgttttatgtggaggattgacagcgctaattaaagctggctatgagacattagtggaagcaggatatagtcctgagatggcatattttgagtgtttgcatgaaacaaaactgattattgatctactttatgagggcggtatttctaatatgcattattcaatatcaaatactgcagagtttggagattacttaataggcccaagaatcattactgaagaaacaaaaaaagaaatgaaaaaagttcttgaagatattcaatcaggcgattttgccgataaatatctcgacgattgtcgtcaaagtaatgatggaagcggcggcccttttctaaagagaaatcgagaaaaaacaaaggaacattccatagaactcgttggaaaagaacttcgatctaaaatgaagtttttaagtgaaaaaaagcttgttgataaagataaaaattaag

SEQ ID NO: 209177 - DNA, 655 bp, Unknown
  Bacterial polypeptide expressing nucleotide sequence isolated from the Sargasso Sea
aagggtccaggccataccgtaagaagtacttatataaatggaggaggagtcccatcacttatagcaatttttgaagatgcaacaactgaaaaattctctgcaaaagaaattgctctatcttatgcaaaggcaaatggtggaactagagcgggagtactcgaaacatcctttaaagaagaaacagaaactgacttatttggagagcaggctgtattatgtggaggaataactgctttaataaaagctggctacgagactcttgtagaagcaggttatagtccagagatggcatattttgagtgcttgcatgaaacaaaattaataacagatttaattcaagaaggtggtattgcaaatatgcattattctatttcaaatactgcagaatatggcgactatttaagtggacccaaggttataactaaaaagaccaaagaagcaatgaaagagattcttgataatattcaatctggaaattttgcagatgaatttcttgatgattgcaggcaaagcaatgatgggtcaggcggaccatttatgaaatctaatagaaaatctactgaagatcatccaattgaaaaagttggaaaagagctaagatctaagatgaaatttttgaattctgaaaagcttgttgataaagaaaaaaattagt

SEQ ID NO: 209178 - DNA, 512 bp, Unknown
  Bacterial polypeptide expressing nucleotide sequence isolated from the Sargasso Sea
tatgaaaacttattacgataaagacacaaacaaagatttaattaaagataaaaaggtagccatatttggatatggaagccaaggacatgctcatgcattaaaccttaaagatagtggagttaaagaagttgtagttgctttaagagagggatcctcaagtattaaaaaagctgaaagtgctggattaaaagtaatgtcattatccgatgccgctgcctgggcagatgtagtaatgatgttaacgcctgatgaacttcaatctgagatttacaaaaatcatattgagcaaagaatgaaagagggaacaagtttagcttttgcacacggtttgaacattcattttaatttaattaatgcaagaaaagatttagatgtttttatggtcgcgccaaagggacctgggcatacagtaagaagcgagtatcaaaaaggtggtggagttccatgtttaatggcagttcacaaagatagttcaggaaaagcaaaagatctagcgttatcgtatgcatctg

SEQ ID NO: 209179 - DNA, 641 bp, Unknown
  Bacterial polypeptide expressing nucleotide sequence isolated from the Sargasso Sea
aatgtattatgagaaagatgctgatgttaatcttataaaagaaaaaaaagttgcaatatttggttatggaagtcaaggtcatgcacatgctttaaacttgaaagacagtggagtgaaagaagttgtggttgctcttagagaaaactctccaagtgcaaagaaggccaaaagtgaaggattgaaagtaatgtctttatcagacgccgctgcctgggcagacgttgtaatgcttttaacacctgatgaactgcagtcacagatttataaaaatcatatagaacaaaggatgagagaaggaacaagtctagcatttgctcatggtctaaatattcattttaatttaattaactcaagaaaagacttagatgtttttatggtcgctccaaagggacctgggcatttagttagaagtgaatatcaaagaggaggaggcgttccttgtttaatggcagttcacaaagatagttcaggaaaagctagaaatcttgcaatgtcatatgcttcagctataggtggaggcaaatcaggaattattgaaacaactttcaaagatgaatgtgaaacagatttatttggtgaacagacagttttatgtggtggattggttgaacttataaaaaatggttatgaaacattgacag

SEQ ID NO: 209180 - DNA, 700 bp, Unknown
  Bacterial polypeptide expressing nucleotide sequence isolated from the Sargasso Sea
acttaaaagaaggaaaaaattaagctttgctcatggcttcaatataagatttggacttatcaaacctcctagttttgtggatgtagtaatgattgctccaaaaggtcctggacacactgttcgttgggaatatcagaatggtcaaggagttccagcattgtttgcagtagagcaggattcttctggaagtgcaagatcattggcgatggcttacgctaaagggattggtggaactagagctgggattcttgaaacaaacttcaaagaagaaacagaaactgacttgtttggagaacaagctgttttgtgcggaggattatcagaactagtcaaatcaggattcgaaactcttgtagatgcaggatatcaacccgaacttgcttacttcgaatgcttgcatgaagtcaaacttattgttgatttaatggtgaagggaggcttatctcaaatgagagattccatttcaaatacagcagaatatggagattatgtaagtggtaaaagacttataaatagtgatacaaagaaagaaatgcagaaaattctaaaggatattcaagacggaacttttgctaagaattttgtagaagaatgcgataaaaacaaaccattaatgacaaaattaagagaagagaactcaaaacatgaaattgagaaagtgggtaaaggtctgcgctcgatgttcagttggctgaaataa

SEQ ID NO: 209181 - DNA, 934 bp, Unknown
  Bacterial polypeptide expressing nucleotide sequence isolated from the Sargasso Sea
aatgagagtttattatgatagggatgctgatataaatttaataaaaaataaaaatattgttatagtaggttatggaagccaaggtcatgctcatgcaatgaacttaagagattctggaattgaaaatgtagtaatagcacttagagaaggctcaccaagtagagctaaggctgaaaatgctggatttaaagttttgactccagcagaagctgcatcttcagctaatatcataatgatgttaactccagatgaattacaatcagatatttacaataatgaaattgcagcaaatattgaagaaggaactgctattgcctttgctcatgggttaaatattcattttgatcttataaaacctaacaaagatatagacgtaattatgatggctccaaaaggccccggtcatactgtgcgcgcagaatatgttagaggagcaggagttccttgccttgtagctgtggatcaaaatccctctggaaatgctctagaaatagcaatagcttactcatcagcaattggtggaggtagagcagggataatagaaactacatttaaagaagagtgcgaaactgatttgtttggagaacagtctgttttatgtggaggtctaacacatttaattttggctggatatgaaacccttgttgatgctggttatgctcccgaaatggcatattttgaatgtttgcatgaagtaaaattaatagttgatcttctttacgaaggtggaatggcgaatatgcgatattctatatctaatacggctgaatacggtgattattctcgaggaccaagattgattacagaagaaaccaaaaaagaaatgaaaaaaattctttcagaaattcaatctggtcaatttgcaaaagaatggatggaagaacataaaagtggtcaaacaaaatttaaaactatgagaaagaagcaagctgaa

SEQ ID NO: 209182 - DNA, 635 bp, Unknown
  Bacterial polypeptide expressing nucleotide sequence isolated from the Sargasso Sea
aatgttttatgaaaaagatgcgaatgtaaatttaatcaaggataaaaaagtagctatctttggatatggtagccaaggacatgcgcatgctttaaacttaaaagatagcggagttaaaaatgtcgtcgttgcacttagagaggggtcttcaagtataaaaaaagcagagaaagaaggtcttaaagttatgtcattatctgatgctgcggcatgggcagatgtagtaatggtgctaactccagatgaacttcaggcatcaatctataaaaatcatattgaacaaagaatgagacaaggcacaagcttagcatttgctcatggtttaaatattcattttaatttaattaattcaagaaaagatctagacgttttcatggtagcaccaaagggaccaggacatttagttagaagcgaatatcaaagaggaggcggagttccttgtttaatggcggtacacaaagatagttcgggaaaagcaagagatcttgctatgtcttatgcatgtgcagtaggaggcggaagatcaggaatcatcgaaacaacttttaaagatgaatgtgaaaccgatttattcggagaacaaacagttctttgtggaggcttagtagaacttatcaaaaatggatttgaaactt

SEQ ID NO: 209183 - DNA, 751 bp, Unknown
  Bacterial polypeptide expressing nucleotide sequence isolated from the Sargasso Sea
ttgaaggttatgaatttatctgatgcagctgaatgggccgatgtagttatggttttaactcctgatgagcttcaagcaacaatttacaaaaatcacatagagcaaagggtaagagaaggaacatctattgcattcgcccacggtttaaatattcattatgatttaattaaagcaagaaaagatttagatgtatttatggtagcaccaaaaggacctgggcatttagtaagaagtgagtatgagaaaggtggaggagttccttgtttatttgctgttcatcaaaatggatcgggtaaagcaagagagttagcaatgtcatacgcatcagcagttggcggaggcagatcaggaataattgaaactacatttaaagatgaagtggaaacagatttatttggagaacagactgttctttgtggaggtttagtagaattaattaaaaatggatatgaaactttagttgaagctggatatgaaccagaaatggcttattttgaaacagttcacgaagtaaaattaattgttgatttaatttatgaaggtggaattgctaatatgaattattcaatttcaaatactgctgaatatggtgagtatgtaactggaccaaaaattattaataaagaagaaacaaagaaaagaatgaaagaagttttggcagatattcaatcaggtaaattcactaaagattggatggacgaatgtaaaaatggtcaaaagaacttcttaaaaactagagaaaaattagcag

SEQ ID NO: 209184 - DNA, 682 bp, Unknown
  Bacterial polypeptide expressing nucleotide sequence isolated from the Sargasso Sea
atgaaaacttattacgacaaagatactaataaagatctaattaaaaataaaaaagtagctatttttggctatggcagtcaaggtcacgctcacgctttaaatcttaaggacagtggagtaaaagaagttgtagtagctttaagagagggatcctctagcattaaaaaagctgagagcgctggattaaaagtaatgacactctcagatgcagctgcttgggcagatgttgttatgatgttaactcctgatgaacttcagtccgagatttataaaaatcatattgaacaaagaatgcgagagggaacaagcttagcttttgctcatggattgaatattcattttgatttgatcaaagcaagaaaagacttagatgttttcatggtagcacctaaaggacctggacataccgtaagaagtgaataccaaaaaggtggaggcgtaccttgtttaatggcagttcataaagatagctcgggaaaagcaaaagatttagctttatcatatgcttcagcagtaggtggaggtaaatctggaataatcgaaaccacttttaaagatgagtgtgaaacagatttatttggtgaacaaacggttttgtgtggtggtttagtagaattaataaaaaacggctttgaaacattaacagaagctggttacccacctagaaatggcatactttgaa

SEQ ID NO: 209185 - DNA, 868 bp, Unknown
  Bacterial polypeptide expressing nucleotide sequence isolated from the Sargasso Sea
aatttaaaagattcaggggcaaaggttgttgttggacttagagagggttcatctagtgcatcaaaagctgaggaagctggtctagaagttaaaaacatatcagatgcagtatctgaagcagatgtggtgatgattcttgcacctgatgagtatcaggctgacttgtacaaagaaagtatagaacaaaaccttaaaccctcagctgcaatagcatttgctcatggatttaatattcattatggacaaattaaaccccaggaaaatcatgatattttcatgattgctccaaaaagccctggccatcttgtccgttctacatatgtcaatgggaaaggcgtgcctacattaattgcaattcataataatgcatctggtaatgcaaaagatattgcgctttcatacgcttctgctattggaggaggtcgtgctggaattattgaaacaaactttaaagaagaaacagaaactgatttatttggtgaacaagccgttttgtgtggcggagttactgcattagttaaagctggttttgaaacacttgtcgatgcaggctatgcacctgaaatggcatattttgaatgtttgaatgaacttaaactcatcgtagatctaatgtatgagggcgggatgacagatatgagatactctatatctaatactgctgaatatggtgacttaacaaaaggaccatttttgattgacgaccatgttaaagaaaaaatgaaattagtcttagcagatgttcaaaatggcaagtttgctaatgactttgtaagtgaaataaaagctggctcaccagaattcaatcgtctaagaaaagagggttctgaacatctcattgaaagtacaggaaaaaaattaagaagta

SEQ ID NO: 209186 - DNA, 432 bp, Unknown
  Bacterial polypeptide expressing nucleotide sequence isolated from the Sargasso Sea
ctgttttgtgcggaggtttaacgcatcttatattagcaggttacgaaacgttagttgatgcaggttatgctccagaaatggcatattttgagtgtttgcatgaggtaaagctaattgttgatttattgtatgaaggcggaatggcaaatatgagatattcaatctccaacacggctgaatatggagattatactagaggtccaagattaataactgatgaaacaaaaaaagaaatgaaaaaaattctttctgaaattcaatcagggcaatttgcaaaagaatggatgagtgagcataaaagtggtcaaactcaatttaaaactatgagaaaaaaccatgctgaacatccaattgaagctattggagaaaaactacgaaccctgatgccttggattgcagaaggcaaaatggttgataaatctaaaaactagt

SEQ ID NO: 209187 - DNA, 502 bp, Unknown
  Bacterial polypeptide expressing nucleotide sequence isolated from the Sargasso Sea
aatgtattatgaaaaagacactgatgtaaatttaattaaagataagaaggtagcaatttttggttacggtagccaaggacatgcacatgctttaaatctcagagatagtggggtaaaagaagttgtagtagctcttagagacggatcatctagtgcagcaaaagcagagtcaaaaggtttaaaagttatgaatttatctgatgccgcagaatgggcagatgtagttatgatattaactccagatgagttgcaagcagcaatttataaaaatcatattgagcaaagagttaaagaaggaacttcaattgcctttgcgcacggactaaatattcattatgatttaattaacgcaagaaaggatctagacgtttttatggtcgctccaaaaggtcctggtcatttagttagaagtgaatatgaaaaaggaggcggagttccctgtttatttgcagttcatcaaaatggatcaggtaaagcaagagagcttgcaatgtcatatgct

SEQ ID NO: 209188 - DNA, 513 bp, Unknown
  Bacterial polypeptide expressing nucleotide sequence isolated from the Sargasso Sea
ctgttggtggaggtagatctggaataattgaaactacatttaaagatgaagtagaaactgatctatttggagaacaaactgtattatgtggtgggcttgttgaattaattaaaaatggatacgaaactttagttgaagctggatatgaaccagaaatggcttattttgaaactgttcacgaagtgaaactgattgtggatttaatatatgaaggtggaattgctaatatgaattattcaatttcaaatacagcagagtatggcgagtatcagtcaggtccaagaataattaaaaaagatgagactaaacaaagaatgaaagaagttttagcagaaattcaatctggtaaatttacaaaagaatggatggaagaatgcaaaaatggtcaaaaaaactttcttgcaactagagctaaattagcagaacactctgttgaaaaagtaggcgctgaacttcgggctatgatgccttggatttcaaaaaagaaacttgttgatagtgataagaagtaga

SEQ ID NO: 209189 - DNA, 575 bp, Unknown
  Bacterial polypeptide expressing nucleotide sequence isolated from the Sargasso Sea
aatgttttatgaaaaagatactaatgtagatttaataaaagataagaaagtagcaatttttggctatggaagccaaggacatgcacatgcgcttaatttaagagatagtggcgttaaagaagttgtggtagctttaagagagggctcatcaagtattgaaaaagctgaatctaaaggtttaaaagttatgaatttatctgatgctgcggaatgggcagatgtagttatgattttaactccagacgaattacaagcatcaatatataaaaaccatatagagcaacgtgttaaagaaggaacatcaattgcgtttgctcatggtttaaatgttcactatgatcttataaaagcaagaaaagatttagatgtatttatggttgccccaaagggacctggtcatttagtaagaagtgaatatgaaaaaggtggtggagttccttgtttatttgctgtacaccaagatggttcaggtaaagcaagagatttggcaatgtcatatgcatcagctgttggtggaggtaggtctggaataattgaaactacgtttaaagatgaagtagaaacagatctatttg

SEQ ID NO: 209190 - DNA, 708 bp, Unknown
  Bacterial polypeptide expressing nucleotide sequence isolated from the Sargasso Sea
aatgttttatgaaaaagatacagatgtaaatttgattaaagataaaaaaattgcaatttttggttatggcagtcaaggtcacgctcatgcccttaatttaaaggatagcggtgtgaaagaggttgttgttgcattaagagatggatctccaagccaaaaaaaagctgaatctaaaggattaaaagttatgaatttgtcagatgccgctgagtgggctgatgtagttatgattttgacaccagatgaattacaggcatcaatttataaaaatcatattgaacaaagagttagagaaggtacttcaattgcttttgctcatggattaaacattcattatgacttgataaaagcaagaaaagatttggatgtatttatggttgctccaaagggaccagggcatcttgtaagaagtgaatttgaaaaaggtggaggagtaccgtgcttatttgctgtccatcaaaatggatcaggtaaagcaagagatcttgcaatgtcatacgcttcagctgtaggtggtggaagatctggaattatcgaaactacatttaaagatgaggtcgaaacagatttatttggcgagcaaactgttctttgcggaggtttagttgaattaataaaaaatggatatgaaactttagtcgaggcaggttatgaacctgaaatggcatattttgaaactgttcacgaagttaaattaattgttgattt

SEQ ID NO: 209191 - DNA, 700 bp, Unknown
  Bacterial polypeptide expressing nucleotide sequence isolated from the Sargasso Sea
cttaaaagaaggaaaaatattaagttttgcgcacggctttaatataagattcggccttatcaaacctcctaattttgtggatgtcgtaatgattgcacccaaaggacctggacacactgttcgttgggaatatcagaatggtcagggggttcctgcattattcgcagtagagcaggattcttctggaagtgcacgatcattggcaatgtcttacgctaaaggaattggtggaacgagagctgggatactagaaacaaatttcaaagaagaaacagaaactgatttatttggcgaacaagcggttttatgtggaggcttatcagaactggtcaaatcaggcttcgaaactcttgtagaagcaggatatcaaccagaacttgcttacttcgaatgcttacatgaagttaagctaattgttgatctaatggtgaagggaggtttatctcaaatgagagattctatttcaaatactgcagaatatggagattatgtaagtggcaaaagacttatcaatagtgatacaaagaaagaaatgcagaaaattctaaaagatattcaagatggaactttcgctaagaattttgtggaagaatgcaataaaaacaaacccttaatgacaaaattaagagaagagaactcaaaacatgaaattgagaaagtaggtaaaggtctgcgctcgatgttcagttggctgaaataa

SEQ ID NO: 209192 - DNA, 748 bp, Unknown
  Bacterial polypeptide expressing nucleotide sequence isolated from the Sargasso Sea
ggacatgcccatgcaatgaatttgagagattctggcttagagaatgtttcaatagcgttaagagaaggatccaattcaagatctaaagcagagcaagcaaattttaatgttatgactccagcagaagctgctagctgggctgatataattatgatgttaactcctgatgaattgcaatctgaaatttatacaaatgacatagctaaaaatattaaagaaggaacaacaattgcatttgctcacggcttgaatattcacttcgatttaattaaacctaaagaaggaattgatgtcattatggttgcccctaaaggccccgggcatactgttagagctgagtatgtaagaggtgcaggtgttccttgtttagttgcagttgataaaaatccttcaggtaatgctctcgaaataggaattgcttatgcatcagcaattggtggtggacgagcagggattatagaaacaacttttaaagaagaatgtgaaacagatctttttggagaacaatctgtcttatgtggaggattaactcatttaattttagctggttatgaaactttagttgaagctggttacgctcctgaaatggcatattttgaatgtcttcacgaagtaaaactgattgttgatcttttatatgaaggtggaatggctaatatgagatactcaatctcaaacacagctgagtatggagattattcaagaggtccaagacttattactgatgaaacaaaaaaagaaatgaaaa

SEQ ID NO: 209193 - DNA, 739 bp, Unknown
  Bacterial polypeptide expressing nucleotide sequence isolated from the Sargasso Sea
cagagagtgaaagaaagaacttcaattgcttttgcgcatggattaaatattcactatgatcttattaaagcaagaaaagatttagatgtttttatggttgctcctaagggaccaggacatttagtgagaagtgagtttgaaaaaggaggtggtgtcccatgtttatttgctgttcatcagaatggctcaggtaaagcaagagacattgccatgtcatatgcttctgcaatcggaggtggacgatctggtattattgaaacgacttttaaagatgaagtagagactgatctatttggtgaacaaactgttttatgtggtggtttagtagaattaataaaaaatgggtatgaaacgttagttgaagcaggttatgaaccagaaatggcatactttgagactgtacatgaagtaaaattgattgttgatcttatttacgaaggtggaattgcaaacatgaattattcaatctcaaatacagctgagtatggagaatacgtttcaggaccaaaaataataaacaaggaagaaactaaaaaaagaatgaaagaagttttggaaaaaattcaatcaggaaagttcactaaagaatggatggaggaatgtaaaaatggtcaaaaaaatttccttaaaactagagaaaaattagcagaacatccaattgaaaaagttggagctgatcttcgagccatgatgccttggattaccaagaagaaattggtcgacagcgataaaaattaaa

SEQ ID NO: 209194 - DNA, 901 bp, Unknown
  Bacterial polypeptide expressing nucleotide sequence isolated from the Sargasso Sea
aatgttttatgagaaagacactgatccaaatttaataaagaataaaaaaatagctatttttgggtacggtagtcaagggcatgctcatgctctaaatttaaaagatagtggtgtaaaggaagttgttgtagctttaagagatggatctgccagcaaagcaaaggcagagtcaaaaggtttaaaagttatgaacttatctgatgctgcagagtgggcagatgtgataatggttttaacacctgatgaacttcaagcatcaatttataaaaatcatattgaacaaagggtaaaagagggaacttcaattgcttttgcacatggattaaatgttcattatgatttaataaaagctagaaaagatttagatgtttttatggtcgcgccaaaaggcccaggacatttagtaagaagtgaattcgaaaaaggtgggggagttccatgtctttttgcagttcatcaaaatggatcgggtaaagcaagagatttggcaatgtcatatgcttcagcgattggtggaggtcgatctggtattattgaaacaacatttaaagatgaagtagaaacagatttattcggagaacaaactgttttatgtgggggattagttgaattaataaaaaatggctatgaaactctagttgaagctggctatgaacctgagatggcatactttgaaactgttcacgaagtaaaattgattgtagatttaatttatgaaggtggaattgctaacatgaattattcaatttctaatactgctgaatatggagaatatatgtcgggccctagaattataaataaagaagaaacaaaaaaaagaatgaaagaagttcttcaagatattcaatcaggtaaatttaccaagcagtggatggatgaatgcaaaaatggtcagaaaaat

SEQ ID NO: 209195 - DNA, 610 bp, Unknown
  Bacterial polypeptide expressing nucleotide sequence isolated from the Sargasso Sea
aatgcgagtgtattatgacagagatgcagacataaatttaattaaaaacaaaaaagttgttatcgtgggatatggaagtcaaggtcatgcgcatgctgctaatttaagggatagtggagtaagagatgttactgtagctttaagatcagactcttcctccatcgataaagcaaagtcagctggttttcaagtaatgaatgttgctgaagcttctaaatgggctgatgtgattatgatgttaacaccagatgagctacagggaaatatttatagatcagatattgagcaaaacatgaaatcaggggctgctatagcctttgcccacggcttgaatgttcattttaatttaattgaacctagaaaagatatagacgtttttatggttgctccaaaaggacctggacatactgtaaggtctgaatatcaaaaaggaggtggtgtaccttgtttaatcgctattgataaagatatctcaggtaatgtccaagacataggtttatcatatgcgtgtgcaattggtggaggccgttcaggcattatagaaacaacatttaaagaagaatgcgaaacagatctttttggcgaacaacagttttatgtggtggtttag

SEQ ID NO: 209196 - DNA, 690 bp, Unknown
  Bacterial polypeptide expressing nucleotide sequence isolated from the Sargasso Sea
aagtaaaagtaaagaggttgctgaaaatgatggcttgaaagttctttcaaattctgaagcagtaaaacagtcagatgtaataatgttttgccttccggatactgttcaaggaaaagtgtacaaacaggatgtagaggaaaatctttctgaaggaaaaactttaatgttttgccacggttttagtatattttatgagcaaataaaaccccctgaatttgtggatgttgcaatgattgctcctaaaggacctgggcatattgttaggagagttttcgagtcagggcagggcgttccatgtctagtagcggtatatcaagattattctggcaaagcccaagaaatagcattgggttacgggttaggtattggtggagcaagggcaggtattctagaaactacttttaaagaagagactgaaactgatttatttggggaacaagcagttttatgtggcggagtaacttcattagttcaaagtgcatttgaagttttagttgaagcgggctatcagccagaatctgcttattttgaagttttgcatgaattaaaattaattgtagacctaatgtatcaaggcggattgggagaaatgagatattctatttcaactacagctgaatatggtgactatactagaggacctgttgttgttgacccttcagttaaagagaatatgaaaaaagtcctaga

SEQ ID NO: 209197 - DNA, 769 bp, Unknown
  Bacterial polypeptide expressing nucleotide sequence isolated from the Sargasso Sea
attacaatctgaaatatattctaatgatattgctgagaatataaaagaaggaacaacaattgcatttgctcacggtttaaatattcattttgatttaattaaaccaaaagagggagttgatgttataatggtggcacctaaagggcctggtcatacggtaagagcagagtatgtgagaggtgctggagttccatgtttagttgctgtagataaaaatccttcaggaaacgctcttgaaattggtatcgcttatgcttcggctattggaggtggaagagcaggtataattgaaacaacttttaaagaagaatgtgaaactgatttatttggtgaacaatctgttttatgtggtggactcactcatctaattctagctggatatgaaactttagttgaagcaggttatgctcctgaaatggcatatttcgaatgtcttcatgaagtaaaacttattgtagatcttctttatgagggtggaatggctaatatgagatattcaatttccaatacagctgaatatggagattattcaagaggtccaagacttattactgatgaaactaaaaaagaaatgaaaaaaattctttctgaaatacagtctggtcagtttgctaaagaatggatgcaagagcacaaaagtggccaaaccaaatttaaagtgatgagaaaagaacaagctgagcactcaatagaagcagtaggtgaaaaattaagaacattgatgccatggattgctgagggaaaaatggttgataaatctaaaaactag

SEQ ID NO: 209198 - DNA, 553 bp, Unknown
  Bacterial polypeptide expressing nucleotide sequence isolated from the Sargasso Sea
gcaaagaattggtctttcatatgcttcagctataggttctgggagagctggtattattgaaactaactttaaggacgaaacagaaactgatttatttggagaacaagcagttctttgtggagggcttacacaattaatccaaaatggttacgaagtcttagtcgaagacggatatccacctgaaatggcctatttcgaatgcttgcatgaagtgaaacttatagtagatcttatatacgaaggtggattagagaatatgagatatagtatttctaatacagcagaatttggtgattacgtgagtgggccaaaagtagttaattctgatgccaaagaggaaatgagagcagtattgaaaagaattcaatctggtgaatttgctcaagaatttatgagcgattgcagagagagtaatgatggaaagggcggaccaaggatgaaggagtatcgtcaacaaacttcagaacactcaatagaaaaagtaggctctgaacttagagctatgatgccttggatagctcaaaacaaaattgtagataaagccaaaaattaa

SEQ ID NO: 209199 - DNA, 624 bp, Unknown
  Bacterial polypeptide expressing nucleotide sequence isolated from the Sargasso Sea
gtcatttagtaagaagtgaatatgaaaaaggtggtggtgtaccatgtttatttgcggttcaccaaaatggatctggaaaggcaagagatctagctatgtcttatgcctccgcgatcggtgggggaagatctggtataattgaaactacttttaaagacgaggttgaaacagatttatttggtgaacaaactgttttatgtggtggattagtggaattaataaaaaatggatatgaaacattagttgaagctggttatgaacctgaaatggcatattttgaaactgttcatgaagtgaaattaattgtagatcttatttacgagggtggaattgctaatatgaactattcaatatcaaatacagctgaatatggtgaatatcaaactggaccaaaaataataaataaagaggaaacaaaaaaaagaatgaaagaggcactggctgatattcaatcaggaaaatttaccaaagcgtggatggacgaatgtaaaaatgggcaaaaaaacttcttagccacaagggcaaaattagccgaacacccagtagaaaaagttggagctaatttgagagcaatgatgccatggattggcaagaaaaaattagttgacagtgataagaagtaaa

SEQ ID NO: 209200 - DNA, 601 bp, Unknown
  Bacterial polypeptide expressing nucleotide sequence isolated from the Sargasso Sea
tatgagagtttattacgatagagatgctgatattggactaattaaatcaaaaaaagtcctgattgtcggttatggtagtcagggtcatgcacatgcagctaacttaaaagatagtggtgttgaagatgtaagtattgctttaagacctgactcaagttcaattaaaaaagcaaaagagggtgggtttgatgttaaaaccgttcaagagggagcaaagtgggctgatgttataatgatgttagcaccagatgagttgcagagtgatatttataatgatcatattaaaaataatatgaaatcaggttcttcaatagcatttgctcatggtcttaatgttcattttaatttaattgatccaagagatgatattgatgtttttatggtagctccaaaaggaccaggacataccgtgcgttcagaatatatacgtggtgcaggggtaccatgtttgattgctattgatagagactttagtggaaatgcgcatgacgtaggattatcttatgcttgtgcgataggtggtggaaggtcaggagtaatagaaacaacttttaaagaagaatgtgaaactgatttgtttggtgaaccaagttgttttatg

SEQ ID NO: 209201 - DNA, 633 bp, Unknown
  Bacterial polypeptide expressing nucleotide sequence isolated from the Sargasso Sea
aaggtccaggtcacactgtccgcggagaatacataaagggcggaggcgtaccttgccttgttgcagttgataaagacgaatctggtaaggctctcgaaataggcttatcttactgctctgcgattggcggaggacgttcaggaataatcgaaacaaattttcgagaagagtgtgaaactgacctatttggagaacaagccgtactgtgtggtgggttaatcgagctaattcgttgtggcttcgaaacacttgttgaggctggatatgctcctgaaatggcctattttgagtgtcttcatgaggttaaattaattgttgatttaatatacgaaggaggcattgccaatatggattactccatttcgaatactgccgaatatggccagtatgttacagggcctcgtattctaccctatgaacaaactaaaaaggtaatgaagggagttctatccgatattcaaaaaggtaactttgttcgcgacttcatgctggagaatgctgtgggtcagcctacaattaaagctgcgcgtcgtgcaaacgatgagcatatgattgaagaagtaggagaaaaactccgtggaatgatgccctggatatctgctggaaagatggtcgataaagataaaaactaat

SEQ ID NO: 209202 - DNA, 258 bp, Unknown
  Bacterial polypeptide expressing nucleotide sequence isolated from the Sargasso Sea
attgcaagtttattatgacaaagatgcagacctttctatcattcagaaaatgaaagtagttattgttgggtatggttcgcaagggcatgctcatgcgaataacctaagagattctggtgttaacaatgtggtagtgggattacgcaaagggtcaggatcttggcgaaaagctgagaatgccggttttgaggtgcaagaggtggctgcagcagtggaaggagctgatttggtcatgatccttgttcctgacgagttaca

SEQ ID NO: 209203 - DNA, 824 bp, Unknown
  Bacterial polypeptide expressing nucleotide sequence isolated from the Sargasso Sea
tttagttatgattttagctccagatgaattccaaaaagatatctttgaaaaagacattcagccaaatttgaaaagtgatgctattttagcttttgcacatggatttaatatccattttaaaaaaattgttcctaacgaaacaaatagcgtaataatgatcgcgccaaaaggtcccggccataccgtgagaagtacatatttaaaaggtggtggagtaccttcattaatagcaatctacaaagattccacaaaagatgaatctgcgagtgcaaaaaacatagcattatcatatgcaaaagcaaatggtggaactcgagccggagttctccaaacaactttcaaagaagaaacagaaacagacctgtttggtgaacaagcagttttgtgtggaggaatgacagcactaattaaagcaggttatgaaacattagttgaagctggttatagtccagaaatggcttattttgaatgtctgcatgagacaaaacttattacagatttaatacaagagggtggtattgcaaatatgcattattcaatatccaatactgcagaatatggagattatttaagtgggccaaaaatcattacggaagagaccaaaaaagcaatgaaagaggtacttgaaaacatacaatcaggaaacttcgctgatgaatttttagatgattgtcggcaaagtaatgatggttcaggaggacctttcatgaaatctaatagagaatctattgaaaaacatcctattgaaaaagttggaaaagaactgagatctaagatgaaatttcttaattctcagaaacttgtagataaagagaaaaattagt

SEQ ID NO: 209204 - DNA, 539 bp, Unknown
  Bacterial polypeptide expressing nucleotide sequence isolated from the Sargasso Sea
agatttagcaatgtcatatgcttcagctgttggtggtggaagatcgggaattattgaaactacatttaaagacgaagttgaaacagatctatttggagaacaaactgttctttgtggtggtttagttgaattaattaaaaatggatatgagactttagtagaggctggatatgaaccagaaatggcttattttgaaacagttcatgaagtaaaattaattgttgatttaatttacgaaggtggaattgctaatatgaattattcaatttcaaataccgctgaatatggtgaatacgttacagggccaaaaattattaataaagaagagacaaagaaaagaatgaaagaagttttggcagatattcagtctggtaaatttactaaagattggatggacgaatgtaaaaatggtcaaaagaacttcttaaaaactagagaaaaattagccgaacatccagttgaaaaagttggagcgggactaagagctcttatgccatggatagcaaagaagaaattgattgatagtgataaaaattaag

SEQ ID NO: 209205 - DNA, 649 bp, Unknown
  Bacterial polypeptide expressing nucleotide sequence isolated from the Sargasso Sea
aggattgtataaaggaagtaagtctgaaagcaaagccatcagcgatggtctacaagtatttagtgtttccgaagcttgcgaaaaagctgactggataatgattctcctccccgatgagtttcaaaaagatgtttacctcaaagaaatagaaccaaacctaaaagaaggaaagatattaagttttgctcatggttttaatataagattcggacttatcaaacctcctaattttgtagatgttgtaatgattgctccaaaagggcctggacacactgttcgttgggaataccagaatggtcaaggcgttcctgcattatttgctgtagagcaggattcttctggaagtgctagatcgttagcgatggcttacgctaaaggtattggtggaacaagagctgggatactcgaaacaaatttcaaagaagaaactgaaactgatttatttggagaacaagccgttttatgtggaggcttatcagaactagtcaaatcaggcttcgaaactcttgtagaagcaggatatcaaccagaacttgcttacttcgaatgcttacatgaagttaaacttattgttgatctaatggtgaagggcggcttatctcaaatgagagattccatttcaaatactgcagaatatggagattatgtt

SEQ ID NO: 209206 - DNA, 853 bp, Unknown
  Bacterial polypeptide expressing nucleotide sequence isolated from the Sargasso Sea
aaagatactgatgttaatttgattaaaaataaaaaaattgcgatctttggttatggaagccaaggacatgctcatgcacttaatttaagagatagtggagtaaaagaagttgtagttgctttaagagacgggtcagcgagcaaagcaaaagcagagtcaaaaggattaaaagttatgaatctctctgatgctgcagaatgggctgatgtagttatgattttaactccagacgaactccaggcaactatttataaaaatcatatagagcaaagagttagagaaggaacctcaattgcttttgctcatggtttgaatattcattatgatttaattaaagcaagaaaagatttagatgtattcatggtagcaccaaaaggaccaggacatttagtaagaagtgaatttgaaaagggaggtggagttccttgtctatttgcggttcatcaaaatggatcaggtaaagcaagagatttagcaatgtcatacgcttcagctgtcggtggaggcaggtcaggaattatcgaaactacatttaaagatgaagttgaaacagatttatttggagagcaaacagttctttgtggaggattagttgaactaattaaaaatggatatgagactttggttgaagcgggttatgaaccagaaatggcatattttgaaacagttcatgaagttaaattaattgtagatttaatttatgaaggaggaattgctaatatgaattattcaatttcaaatactgctgaatatggagaatatgttacagggccaaaaattataaataaagaagaaaccaagaaaagaatgaaggaagttttggcagatattcaatcaggtaaatttactaaag

SEQ ID NO: 209207 - DNA, 445 bp, Unknown
  Bacterial polypeptide expressing nucleotide sequence isolated from the Sargasso Sea
atgttttatgaaaaagatactgatgtaaatttaataaaaaacaaaaaaattgcaatttttggttatggtagtcaaggtcatgcacacgcactaaatttaaaagacagtggagtaaaagaagttgtggttgcacttagagatggttctgcaagtaaagtaaaagcagagtctaaaggactcaaggttatgaatttatcagatgctgcagaatgggcagacgttgtaatgatattaactccagacgaactacaagcaacaatttataaaaatcatatcgaacaaagagttagagaggggacatccattgcatttgcacatggattaaatattcattacgatcttattaaagcaagaaaagatttagatgtatttatggtagcacctaaaggacctggtcatttagtaagaagagaataccagaaaggtggaggagttccatgcttat

SEQ ID NO: 209208 - DNA, 814 bp, Unknown
  Bacterial polypeptide expressing nucleotide sequence isolated from the Sargasso Sea
tagtcaaggacatgcccatgcattaaatttaaaggacagcggggtaaaaaacgtagttgtcgctcttagagatagttctgacagtaaaaagaaagctgagagtgaaggtctaaaggtaatgtcattatccgatgcagctgcatgggcggacgtagtaatggtattaacacctgatgaacttcaagcatcaatctataaaaatcatattgaacaaagaatgagacaaggtacgagtttagcatttgctcacggtctaaatattcattttaatttaatcaattctagaaaagatttagatgttttcatggtagcacctaaaggaccagggcatttggtgagaagtgaatatcaaagaggaggaggagtaccttgtttgatggcagtacataaagacagttcaggtaaggcaagggatctcgctatgtcttatgcttgcgctgttggcggtgggagatctggaataatcgaaacaacttttaaagatgaatgtgaaaccgatttgtttggagagcaaacagtactttgtggaggtttggtagagcttattaaaaatggcttcgaaactttagtcgaagctggctacccaccagaaatggcatactttgagtgtctacatgaagtgaaattaattgttgatttaatctatgaaggcgggattgcaaatatgaactattcaatctctaatactgctgaatatggagaatatgtttctggaaagaaaatagttgactcaaaaacaaaagagagaatgaaagaagttttaaaagatattcaatcaggtaaatttgcaaaacaatggatggatgagtgtaaa

SEQ ID NO: 209209 - DNA, 542 bp, Unknown
  Bacterial polypeptide expressing nucleotide sequence isolated from the Sargasso Sea
aatggcgaattactttaataccttacctttacgcgaacaattagcgcaattagcgcaatgtgaatttatggacgcaagcgaatttacagacggtgttaacgcacttaaaggaaaaaaactagttattgtaggctgtggcgcacaaggtttaaaccaaggccttaacctacgcgattcaggtttagacgtgtcttatacgttacgcgattcagctattactgagcgccgccaatcatttttaaacgcatctgaaaacggctttactgtaggtacttaccaagagctaattccaacagctgacgtagtacttaatttaacgccagataaacaacacacagcagtcgttaacgccatcatgccgttaatgaagcaaggttctacacttgcttactcacatggctttaatattgttgaagaaggcatgcaggttcgcgaagatatcacagtaatcatggttgcacctaaatgcccaggttctgaagtacgtgaagagtacaaacgtggttttggtgtaccaacacttattgccgttcacccagaaa

SEQ ID NO: 209210 - DNA, 625 bp, Unknown
  Bacterial polypeptide expressing nucleotide sequence isolated from the Sargasso Sea
atgaagaattactttaatagtttatcatttagagaaaaattaatgcaattaggtaaatgtagattcatggactcatcagagtttaacaatggagttgattttttgaaagataaaaagattgcaatagttggatgtggtgcacaaggtctgcaccaaggcttgaatatgagggattctggtttagatatatcctatgctcttagacaaacatcaattgattcaaaaaggcaatcatttattaatgcaacttcaaataacttcaatgttggaaattttgatgaaataattccaaattctgatttagtcataaacttaacccccgataagaatcatactcctgtagtagaacagctcatgccaattatgaagaaaaattcaatattatcatactcacatggatttaatattgttgaagagggtattaaagttagagaggatataacagtaattatggtcgctccaaaatcacctggttctgaggtgagagaggaatatctaagaggctttggagttccaactttgatagctgtacaccctgaaaatgacaaaaacaatattggctttgatgctgctaaggcatatgcagtatcccttggatcaaataaggctggtgttcttgattcct

SEQ ID NO: 209211 - DNA, 532 bp, Unknown
  Bacterial polypeptide expressing nucleotide sequence isolated from the Sargasso Sea
agctctgtcgtatgcatctgcagtaggtggtggcagatcaggaattattgaaactacttttaaagatgaagttgaaacagatttatttggtgagcaaactgtattatgcggaggtcttgttgaattaattaaaaatggatatgagactttagttgaagcaggatatgaacctgagatggcttattttgaaactgttcatgaagtaaaattaattgttgatttaatttatgagggtggaattgcaaatatgaattattctatttcaaataccgctgagtatggtgaatatcaatcgggccctagagttgtaaacaaagaagaaacaaaaaaaagaatgaaagaggttttagctgaaattcaatctggcaaattcacaaaagagtggatggatgagtgtaaaaatggtcaaaagaactttcttgcaacaagagcaaaattagcagaacacccggttgaaaaagtcggtgcagagttaagagctatgatgccatggattagcaagaaaaaattagttgatagtgataaaggttaa

SEQ ID NO: 209212 - DNA, 761 bp, Unknown
  Bacterial polypeptide expressing nucleotide sequence isolated from the Sargasso Sea
aatttataaaaatcatatcgaacaaagagtgagaaaaggaacctcaatagcatttgctcacggattaaatgtgcattacgatttaattaaagctagagaagatttagatgtattcatggtagcccccaaaggccctggacacctagtaagaagtgaatatgttaaaggtgcaggtgtaccttgtttatttgcagttcatcaaaacggatctggtaaagcaagagatcttgctatgtcatacgcgtcagcagtaggtggtgggagatctggaattattgaaacaacttttaaagatgaggttgaaacagatttgtttggtgaacaaacagttttatgtggaggtttagttgaacttataaaaaatggatatgaaacattagttgaagctggttacgaacccgaaatggcttattttgaaactgttcatgaagtaaaattgatagtagatttaatttatgagggcggaatcgcaaatatgaactactctatttcaaatactgctgaatatggagaatatgagtcaggaccgagagtagttaataaagaagaaacaaaaaaaaggatgaaggaagttttagcagatattcaatcaggaaaatttacaaaacagtggatggaagaatgtaaaaatggacagaaaaattttcttgcaactcgtgctaaattagcggagcatcctgtagaaaaagttggagctaatttaagagcaatgatgccttggattggtaaaaagaaactagtagatagcgataagagctaat

SEQ ID NO: 209213 - DNA, 545 bp, Unknown
  Bacterial polypeptide expressing nucleotide sequence isolated from the Sargasso Sea
aaaagcaaaagatctagctttgtcttatgcctccgcgtttggtggtgcaaaggcaggtataattgaaactacttttaaagatgaatgtgagacagatttatttggtgaacaaacagttctatgcgggggtttagttgaacttatcaaaaatggttttgaaactttaactgaagctggctatccgccagagatggcttactttgaaacccttcatgaagtaaaattaattgtagatcttatttatgaaggtggaatcgctaatatgaattactcgatatctaatactgctgagtatggggaatatgtttctggtaaacgaattgtagacagcaaaacaaaagaaaaaatgaaagaagttcttaaggatattcagtctggtaaatttactaaacaatggatggaagagcataaatcagggcaaaagaattttcttaaaatgagaaaagatttagctaatcatcaaatcgaaaaagttggtaaagagcttagagctatgatgccttggattggtaaaaataaattagtcgacaaagacaagaattagc

SEQ ID NO: 209214 - DNA, 731 bp, Unknown
  Bacterial polypeptide expressing nucleotide sequence isolated from the Sargasso Sea
aatgagagtttattatgatagagatgcagatttgaatttaattaaagataaaaaaattgcaattgtaggttatggaagtcaaggtcatgcccatgcaatgaacttgagagacactggtgttgaaaatgtttcaattgctttaagagagaactctcaatctcgagcaaaagcagaaaaagctaatttcaaggtcatgactccatcagaagcagcttcttgggctgatgtaattatgatgttaactccagatgagctacaatctgagatttatttaaatgacatatctgaaaacattaaagaaggtaccacaattgcttttgcacatggattaaatattcattttgacttaataaaaccaaaagagggggtggatgttataatggtagctcctaaaggtccaggtcatactgtaagagccgagtatgttagaggcgctggtgttccttgtttggtagcagtagataaaaatccctccggtaatgcattagagattggaattgcttatgcatcagctattggtggtggaagagctggaataatagaaacaacttttaaagaagaatgtgaaacagatctattcggtgaacaatctgttttatgtggaggactaactcatttaattctagccgggtatgaaactttagtagaagctggatatgcacctgaaatggcttatttcgaatgccttcatgaagtaaaacttatcgtagatctactttacgaaggtggaa

SEQ ID NO: 209215 - DNA, 790 bp, Unknown
  Bacterial polypeptide expressing nucleotide sequence isolated from the Sargasso Sea
agaagattctgaatcctttaaaagagctcaagatatgggtctccaggtagcaaatcttgaaaaagcaacagagaatgctgatgtagtcatgttgttgttacctgaccaaattatggcagatatatataacaatcaaattgcaactcatatgaaagaaggtgcaactcttttatttgctcatggctttaatatccatttcaacgaaattgtaccaagagaagatttatctgttgcaatggttgccccaaaggggcctgggcatcttttaagaagaacttattctgaagaaagtggtatgccatgtctagttgctgtgcataatgatgtttcaggaagtactgaagatttagctatgtcatacgcatcagcaattggcggcggaagggctggaattttaagaactactttcaaagaagaaactgaaactgatttatttggggagcaagttgttttatgtggtggattaacagagttaattagaaatgggtttgaaaccttagtagaagctggctatcagccagaaagtgcttactttgaaacacttcatgaagttaaattgatagtagatttaatgtacgaaggtggatttgaatggatgaggcattcaatttctgatactgcagagtatggagatttttcaagaggttcaagaataataacgtctgaaacaaaagaagagatgaaaagagtactcgaagagattcaatcaggagcatttgctaaagaatggatgtcacaggcaagagagggttcaccttttttaaatgagaaaagagtagaagcttcaaaa

SEQ ID NO: 209216 - DNA, 772 bp, Unknown
  Bacterial polypeptide expressing nucleotide sequence isolated from the Sargasso Sea
gaacttcaggcatcaatttataaaaatcacattgaacaaagaatgagagagggtacaagtttggcatttgctcatggtttaaacattcattttaatttaattaattctagaaaagatttagatgtatttatggttgcaccaaaaggccctggccatttagttagaagtgagtatcaacgaggtggtggggttccatgtttaatggcagtgcacaaagatagttctggcaaagctagggatcttgctatgtcatatgcatgtgctgttggaggcggaagatctggaataattgaaacaacttttaaagatgaatgtgaaacagatttattcggtgagcaaactgttttatgtggcggtttagtagaattaataaaaaatggttttgaaactttaaccgaagcgggttacccacctgaaatggcatactttgaaactcttcatgaggtaaaattaattgtagatttaatctatgaaggtggaattgcaaatatgaattactcaatttctaatacagctgagtatggtgaatatatttcaggaagaaaaattgtagattcaaaaacaaaagagagaatgaaagaggtattaaaagatattcagtctggtaaatttacaaaacaatggatggatgagtgcaaaggcggtcaaaaaaactttctgaaaatgagagaagaactagcaaaacatcctattgaaaaagtgggtaaaaaattaagagatttaatgccttggattggtaagaataaactcgtcgataaatcgaagaattaag

SEQ ID NO: 209217 - DNA, 730 bp, Unknown
  Bacterial polypeptide expressing nucleotide sequence isolated from the Sargasso Sea
aatgaaagagggaacaagtttagcatttgcacatggtttaaatattcactttgatttaattaatgctagaaaagatttagatgtttttatggttgcaccaaaaggtccagggcacacggttagaagtgaataccaaaaaggtggcggtgttccatgtttgatggcagttcataaagatagttctggtaaagctagagatcttgctttgtcatacgcttctgcaattggtggaggaaaatccggaattattgaaacaactttcaaagatgagtgtgaaacagatttattcggtgaacaaacagttctttgcgggggattagttgaacttattaaaaatggttttgaaactttaactgaagctggctacccacctgaaatggcttactttgaaactttacacgaagttaaattaattgttgatttaatttatgaaggtggaattgcaaatatgaattactctatttcaaatactgctgaatatggtgaatacgtatcaggtaagagaattgtagacagcaagacaaaagataagatgaaagaggtcttaaaagatatccaatctggtaaatttactaaacagtggatggatgaacacaaatcaggtcaaaaaaacttccttaaaatgagagaagatttggctaaacatcctattgaaaaagtaggtaaagagctccgggcgatgatgccttggattggtaaaaacaaattggttgataaagataaaaattaa

SEQ ID NO: 209218 - DNA, 577 bp, Unknown
  Bacterial polypeptide expressing nucleotide sequence isolated from the Sargasso Sea
ttgtttgcagttcatcaaaatggatcaggtaaggcaagagatctagctttatcctatgcatcagctgtaggtggtggaagatctggaataattgaaacaacttttaaagacgaagtagagacagatttatttggtgaacaaacagttctttgtggaggattagtagaacttattaaaaatggatatgaaactttaacggaggctggttatgaacctgaaatggcatattttgaaacagttcatgaggtcaaattaattgtagatttaatttacgaaggcggaatagcaaatatgaactattctatttctaataccgcagagtatggtgaatatcaatctggaccaaggattattaataaagaagaaacaaagaaaagaatgaaagaagtcttgtctgatattcagtcaggcaaatttacaaaagaatggatggatgagtgtaaaaatgggcaaaaaaatttcctcaaaacaagggctaagttagctgagcactccattgaaaaagtgggtgcggagttaagggcaatgatgccatggattggcaagaaaaaattagtagatagtgacaaaagctaaa

SEQ ID NO: 209219 - DNA, 881 bp, Unknown
  Bacterial polypeptide expressing nucleotide sequence isolated from the Sargasso Sea
gttggaatatgcaaaggcatatgctgttgcgacaggaggacaccgagctggagtattggagtcctcatttgttgccgaggttaaatccgatttgatgggagaacaaacaattctgtgtggggtattacaaactggttctattctgtgttttgataaaatggttgaaaaaggtattgaccctgcctatgcagccaaattgatccaatacggatgggaaacaattactgaagccttaaagcatggtggaatcaccaatatgatggatcgtctctcaaatccagcaaaaattaaagctttcgaactttccgaaacccttaaagaaatccttacgcctttatttcaaaagcatatggatgatattatgtctggatatttttccaaaaccatgatggaggattgggccaatgacgataaaaacctcctcgagtggagagctgccactggacaaactgcttttgaaaaaacaaccattactgatcaagaaattcctgagcaagagtattttgaccacggagttttgatggttgcctttgttcgtgctggagtagaattggcctttgacaccatggtggcttctggaattaaagaagagtctgcttattacgaatcacttcatgaaaccccccttattgctaatactatcgcgcgtaaaaaattatttgaaatgaaccgtgtgatatctgatacggctgagtatggttgttatctttttgatcacgctgccaaaactttactagttgactttatgaatgacattgataccaatgttatagggaaagcatttgcagatagtaaaggtaacagtatagacaatcgtcaattgattgacgttaatgaaatcattcgctttcatcccatcgagattattggttatgattaag

SEQ ID NO: 209220 - DNA, 415 bp, Unknown
  Bacterial polypeptide expressing nucleotide sequence isolated from the Sargasso Sea
aaaagcaggctatgaaacacttgttgaagctggctatagtcctgagatggcatactttgaatgtttacatgaaactaaattaataactgacttaattcaagagggtggaatagcaaacatgcattattcaatttcaaatacagctgaatatggtgactacctaagtggccctaaagtcattacggataaaactaaagaagcaatgaaagaaattcttgaaaatattcaatcaggaaactttgcaaatgagtttctaaatgactgtagacagagcaatgatggctctggcggaccctttatgaaaactaatagagaggcaacaaaatcacaccccatagaagaggttggaaaggaacttagatcgaagatgaaattccttaattctcagaaattagtagacaaagaaattaattaa

SEQ ID NO: 209221 - DNA, 805 bp, Unknown
  Bacterial polypeptide expressing nucleotide sequence isolated from the Sargasso Sea
tgttggattatataaaggaagtaagtctgaaagcaaagccattagcgatggtctacaagtctttagcgtttctgaagcttgcaaaaaagcagactggattatgattctcctccccgatgagtttcagaaagatgtttaccttaaagaaatagaacctaacttaaaagaaggaaagatactaagttttgctcatggcttcaatataagattcgggcttatcaaacctcctagttttgtggatgttgtaatgatagccccaaaaggacctggacacactgttcgttgggaatatcagaacggtcaaggagttccagcacttttcgcagttgagcaggattcttccggaagtgcaagatcattggcaatggcttacgctaaagggattggaggaacgagagctgggattcttgaaacaaactttaaagaagaaacagaaactgatttatttggcgaacaagcggttttatgcggaggattatcagaactggttaagtcaggattcgaaactcttgtagaggcaggttatcaacccgaacttgcttacttcgaatgcttacatgaagttaaacttattgttgatttaatggtgaagggaggcttatctcaaatgagagattccatttcaaatactgcagaatatggagattatgtaagtggtaaaagacttatcaatagtgatacaaagaaagaaatgcagaaaattctaaaagatattcaagatggaactttcgctaagaattttgtagaagaatacgataaaaacaaacccttaatgacaaaattaagagaagagaactcaaaacag

SEQ ID NO: 209222 - DNA, 382 bp, Unknown
  Bacterial polypeptide expressing nucleotide sequence isolated from the Sargasso Sea
agttgaagctggatacgaaccagaaatggcatattttgaaactgtgcatgaagtaaaattaattgttgatctgatttacgaaggtggaattgcaaatatgaattattcaatttcaaatactgctgaatatggagagtatcaatcaggtccaagaataattaaaaaagaagagacaaaacaaaggatgaaagaagtgctagctgaaattcaatcaggtaaatttacaaaagaatggatggatgaatgcaagaatggtcaaaagaattttcttgcaacaagagccaaacttgcagagcactcagttgaaaaggtaggtgcggaacttcgagctatgatgccatggatttctaaaaagaagcttgttgatagcgataagaagtag

SEQ ID NO: 209223 - DNA, 694 bp, Unknown
  Bacterial polypeptide expressing nucleotide sequence isolated from the Sargasso Sea
atgtattatgaaaaagataccgatgtaaatttgattaaagataagaaggtagcaatttttggttacggtagccaagggcatgcccatgctttgaatctacgagatagtggagtaaaagaagttatagtagcgcttagagaaggatcttcaagtgctgcaaaagctgagtcaaaaggtttaaaagttatgaatttatctgatgctgcagagtgggcagatgttgtaatgattttaaccccagatgaattgcaggcatcaatttataaaaatcatattgagcaaagagttaaagagggaacttcaattgcctttgcgcatggacttaacattcattatgatttaattaacgctagaaaagatttagatgtttttatggttgctccaaaaggtcctggtcatttagttagaagtgaatatgaaaaaggaggtggagttccttgtttatttgccgttcatcaaaatggatctggaaaagcaagagatcttgcaatgtcctatgcttcagctgttggtggaggaagatcgggaattattgaaacaacatttaaggatgaagttgaaaccgatttatttggcgagcaaacagtgctctgtggagggcttgttgaattaattaaaaatggatatgaaactttagttgaagcaggctatgaacctgaaatggcatatttgaaactgttcatgaagttaaatt

SEQ ID NO: 209224 - DNA, 572 bp, Unknown
  Bacterial polypeptide expressing nucleotide sequence isolated from the Sargasso Sea
aatgaaaatattttatgagaaagacacaaacacagatttaattaaagacaaaaaaattgcgatttttggatatggcagccaaggacatgctcatgcacttaatttaaaagatagcggtgtgaaagaagtagtagttgctttaagagagggatctgtgagtaaagaaaaagcagagtcaaaaggacttaaagtaatgaatttatcagatgctgctgagtgggctgatgtagttatgattctaacgccagatgaattacaagctacaatttataaaaatcatatagagcaaagagcaaggaaaggaacatccattgcttttgcgcatggattaaatatccattatgacttaattaaagcaagacaagatttagatgtatttatggttgcacctaaaggccctggtcatttagtaagaagtgagtttgaaaaaggtggaggtgtaccatgtttatttgccgttcatcaagatggctcaggtaaggccagagatctagcgatgtcttatgcttctgctgttggaggaggaagatctggaataattgagactacatttaaagatgaagttgaaactg

SEQ ID NO: 209225 - DNA, 754 bp, Unknown
  Bacterial polypeptide expressing nucleotide sequence isolated from the Sargasso Sea
taaaaatcacattgaacagagagtaagaaaaggaacttctttagcttttgctcacggattaaatgttcattatgatttaattaaagcaagagaggatttagatgtttttatggtggctccaaaaggccctggtcatttagtaagaagcgaatatgaaaaaggaggcggtgttccctgtttatttgctgtacatcaaaatggatcaggcaaagctagagatcttgcaatgtcttatgcatcagcagtaggtggtgggagatctggaattatagagactacttttaaagatgaagtagaaacggatttatttggtgaacaaactgttttatgtggtggattagttgaattaataaagaatggatatgagacattggttgaagcaggatacgaacctgaaatggcatattttgaaactgtccatgaggtaaagttgattgtagatttaatttatgaaggtggaatagctaacatgaattattcaatttcaaatacagcagaatatggagagtatgagtctggaccaagagttgtaaataaagaggaaacaaaaaaaagaatgaaggaagtattagctgatattcaatctggtaaatttacaaaacaatggatggaagaatgtaaaaatggacaaaaaaactttcttgcaacacgtgctaaattagcagaacatcctgttgaaaaagttggtgcaaatttaagagctatgatgccttggattggcaaaaagaaactagtagatagcgataagagctag

SEQ ID NO: 209226 - DNA, 445 bp, Unknown
  Bacterial polypeptide expressing nucleotide sequence isolated from the Sargasso Sea
ttggagacaaactgttttatgtggtggattagttgaactaataaaaaatggttatgaaactttggttgaagctggctatgaaccagaaatggcatattttgaaactgttcatgaagtaaaattaattgttgatttaatttacgaaggtggaattgccaacatgaattattctatttctaatactgccgagtacggagaatacatgtcgggtcctagaattataaataaagaagaaacaaaaaaaagaatgaaagaagttcttcaagatattcagtcgggaaaatttactaagcagtggatggatgaatgcaaaaatggtcagaaaaattttctaaaaacaagagaaaaacttgcagaacatccggttgaaaaagtaggagctaaattaagagctatgatgccttggatttcaaaaaagaaactagtagatagcgataagaattaa

SEQ ID NO: 209227 - DNA, 787 bp, Unknown
  Bacterial polypeptide expressing nucleotide sequence isolated from the Sargasso Sea
gatggccaccctgttttacgacaacgacgctgacctgggcctgctcagcggtaatacggtggcgatcatcggctacggctcccagggccatgcccacgccctcaacctcaaggacagcggcgtggatgttgtcgtcggcctctacgacggcagccgttcagcggagaaggccaaggctgacggccttgaggtcctcaacgttgctgatgcctcggccaaggccgactggatcatggtgctgctgcccgatgagtttcagaaaacggtctatgacaaggagattgcaccccacctcagcgccggcaaggtgctgagctttgcacatggcttcaacatccgctttggcttgatccaaccgccagcggacgtcgacgtggtgatgatcgcccccaagggcccaggccacacggtgcgctgggagtaccagaacgcccagggcgtgcctgctctgttcgccattgaacaggacgcctctggtcaggcgcgcggcctggcgatggcctacgccaaaggaatcggcggcacccgcgccggcattctggaaaccaacttcaaagaggaaaccgaaaccgacctcttcggtgagcaggcggtgctctgcggcggcctctccgagctggtcaaagcaggatttgaaacgctggtggaagccggctaccagccggagctggcctatttcgagtgcctccacgaggtgaagctgatcgttgatctgatggtcaaaggcgggctttcggccatgcgcgactcgatctccaacaccgctgaatacggcgactacgtcagc

SEQ ID NO: 209228 - DNA, 947 bp, Unknown
  Bacterial polypeptide expressing nucleotide sequence isolated from the Sargasso Sea
tggtctcaaaggtcatgctcatgcattaaatttaaaagactctggagcatctaatgtagttgttggattaagagaaggttcttcttctatcgaaaaagcaaaaaatgttggtttgaagactcagacacctgctgaagctgttaaggacgctgatattgtaatgtttctggctcctgatgaaaatcaacaagatatttatcaaactcaaattcacgataatattaaaaatggtgctgccttagcttttgctcatggtttgaatatccattttcaactcataacagctagagatgatttagatgtctttatggtggctccaaaaggacctggtcatacagttagaggggaatatttaaaaggtggaggtgttccatgtttactagcagttgataaaaacgtaagtggtaatgcaaaagaaattggtcttgcatatgcttctgctttaggtggcggtaaatcaggtataattgaaactacatttaaagaagaatgtgaaacagacttatttggtgaacaaacagttctttgtgggggtttaatgtctttagttagaaatggatttgaaacacttgttgaggcaggttatgcacctgaaatggcttattttgaatgtttgcatgaagtaaaattaattgttgatttaatgtatgaaggtgggatggctaacatgagatattctatatctaatactgctgaatatggagattatacaagaggtcctagagttgtgccgaatgaggctacaaaagctgagatgaaaaaagtccttactgaaatacaagatggtacttttacaaaagaatggatgtctgagcacaaagcaggccaaataaagtttaaacaaatgagagatcaaggtgcaaagcatcaaattgaagaggtaggagctaaattaagatcgatgatgccatggattgcatctaataaacttgtaaaggatatctaat

SEQ ID NO: 209229 - DNA, 660 bp, Unknown
  Bacterial polypeptide expressing nucleotide sequence isolated from the Sargasso Sea
aagattttagatgtttttatgtggcaccaaagggcccgggacatttagtaagaagtgagtaccaaagaggtggaggagtcccttgtttgatggcagttcacaaagatagttcagggaaagcaagagatcttgccatgtcttatgcatgtgcagtaggaggcggaagatcaggaataattgaaacaacttttaaagatgaatgtgaaactgatttgtttggagaacaaacagttctctgcggaggtttagtagaacttattaaaaatggatttgaaactttggttgaagcaggatatccgcccgagatggcatacttcgaatgccttcatgaagtaaaattaattgtagatttaatttacgaaggtggaatagcaaacatgaattattcaatttctaacacagctgaatatggagagtatgtttctggaaaaaaaatagttgattcaaagacgaaagaaagaatgaaagaggttttaaaggatattcagtctggtaaatttgcaaaacaatggatggatgaatgcaaaggtggacagaaaaactttcttaaaatgagagaagaattagcaaaacatccgatcgaaaaagttggaaaaaaacttagagatcttatgccatggattggaaagaataaattagtcgataaggccaagaattaac

SEQ ID NO: 209230 - DNA, 686 bp, Unknown
  Bacterial polypeptide expressing nucleotide sequence isolated from the Sargasso Sea
tgggcatggcttcaatatccacttcggtcagattgaacctcctaaagatgtcgatgtatttatggttgcgccaaaaggacccggccacttggtacggcgaacttttgagcaaggagctggcgtaccctgtctgatggcgattcaccaaaatgcttccaaaaaagcaaaaaaaattgctttggcttatgctaaaggaattggtggcacccgcgccggtgttttggagacaaattttaaagaagaaacagagaccgacctttttggtgaacaagtcgttttatgcgggggcgttaccgaactgattcgctcaggttatgacactctggtcgatgcaggctacgacccaaatctggcttatttcgaatgtctacatgaactcaaattgattgttgatttaatttatgaagggggaattggtaatatgcgttactccatcagcaccactgccgcttatggcgatgtcacacggggaccgcgcatcatcaccgatgaaacccgcgcagagatgaaaaaaattctcagcgaaattcaaagtggaagttttgccaaagagttcatcctggagaataaggccaatcgacctatgtttaacgcattactgagaaaaggaaaagaacatcgggtcgaacaggttggggaaaaactacgcaagatgatgcctttcgtcggtaaaaaattgcagtaag

SEQ ID NO: 209231 - DNA, 572 bp, Unknown
  Bacterial polypeptide expressing nucleotide sequence isolated from the Sargasso Sea
tgtagcagtggataaaaatccctcgggtaacgcacttgatattgctattgcttatgcctcaggagttggaggtggaagagcaggtattattgaaaccactttcaaggaggagtgtgaaactgatttatttggggaacaatcagttttatgtgggggattaactcatttaattttagctggatatgaaacacttgttgaagcagggtacgctccagaaatggcatattttgaatgtctacatgaagtaaaattaattgttgacttgttatacgagggagggatggcaaatatgagatattcaatatcaaatacagcagaatatggagattattctagaggtcctcgactgatcactgacgaaactaaaaaagaaatgaaaaaaattcttgctgaaattcaatcaggacagttcactaaagagtggatggatgagcacaaaagtggtcaaacaaaatttaagttaatgagaaaacaacaagcagaacattcaattgaagctgtgggtgaaaaactaagaactcttatgccatggattgcagaaggtaaaatggtagataaatctaaaaactaga

SEQ ID NO: 209232 - DNA, 616 bp, Unknown
  Bacterial polypeptide expressing nucleotide sequence isolated from the Sargasso Sea
agtcagaagtgaatatgaaaaaggtggaggagtaccttgtttatttgctgttcatcaagatggatcaggcaaagctagggatcttgctatgtcttatgcatctgcagttggaggtggcagatctggtattattgaaaccacattcaaggacgaagtagaaacagatttattcggtgaacaaactgttttgtgtggtggattagtagaattaattaaaaatggttatgaaactttagttgaagctggttatgaacctgaaatggcatattttgaaacagttcatgaggtaaaattaatcgtagatttaatttacgaaggaggaatagcaaatatgaactactctatttcaaatactgctgaatatggtgaatatcaatcaggtccaagaattatcaaaaaagaagaaaccaagcaaagaatgaaggaagttttggcagagattcagtctggtaaatttacaaaagaatggatggatgaatgtaaaaatggtcaaaaaaatttccttgctacaagagctaagttagcggaacattcagttgaaaaagtaggagccgaattaagagctatgatgccatggatttctaaaaagaaattagttgatagtgataagaagtag

SEQ ID NO: 209233 - DNA, 751 bp, Unknown
  Bacterial polypeptide expressing nucleotide sequence isolated from the Sargasso Sea
taaaaaagccgaaagtgctggattaaaagtaatgtcattatctgatgctgctgcttgggcagatgttgtaatgatgttaacgcctgatgaacttcaatctgagatttataaaaatcatattgaacaaagaatgaaagaaggaacaagtttagcttttgcacatggtttgaacatccattttaatttaattaatgctagaaaagatttagatgtttttatggtcgctccaaagggacctgggcatactgtaagaagtgaatatcaaaaaggtggtggagttccatgtttaatggctgttcacaaagatagttcaggaaaagcaaaagatttagcattatcctatgcatctgctgtcggcggaggcaaagcaggtattatagaaacaacttttaaagatgaatgcgaaactgatttatttggtgaacaaacagttctttgtggaggtttagtagaattaatcaaaaatggttttgaaactttgactgaagctggttatccacctcagatggcctattttgaaactttgcacgaagtaaagttaatagtcgatttaatttatgagggcggcatagcaaatatgaattattctatttctaatactgcagagtatggtgaatatgtttctggaaaaagagttgttgatggaaagactaaggaaaaaatgaaggaagttttaaaagatatacaatctggtaaatttactaaacagtggatggatgagcataagtcaggtcagaaaaatttcctaaaa

SEQ ID NO: 209234 - DNA, 391 bp, Unknown
  Bacterial polypeptide expressing nucleotide sequence isolated from the Sargasso Sea
aatgttttatgaaaaagatgctgatgtaaatcttataaaaagtaaaaaagttgcaatttttggttatggaagtcaaggacatgctcatgcattgaatttaaaagatagtggtgtgaaagatattgttgtggccttaagagaaggctcttctagtgctgcaaaagcggagtcaaaaggtttaaaagtaatgaatttatctgatgctgcagaatgggcagatgtagtaatgattttaactccagatgaattacaagcagaaatttataaaaatcatattgaacaaagagtaagagagggaactagtatcgcctttgcccatggtttaaatgttcattacgatttaattaaagctagaaaagatttagatgtttttatggttgctccaaaagga

SEQ ID NO: 209235 - DNA, 464 bp, Unknown
  Bacterial polypeptide expressing nucleotide sequence isolated from the Sargasso Sea
aatgagagtttattacgatagagatgcagatcttaatttaattaaaaataaaaaaatagttatagtaggttatggcagtcaaggacatgcacatgctatgaacctaagagattctggtataaaaaatgtagcaattgctctgcgtgatggttctccaacaagagaaaaagcaaaaaatgcaaaatttgatgttatgacacctgctgaagctgctgattgggctgatatcattatgatgttaacacctgatgaactccaatcagatatttataataatgaaattgctcctaacataaaagagggaacagctcttgcttttgctcatggtttaaatgtacattttgatttaataaaaccagcagaaggtattgatgtaatcatgattgctcctaaagggccaggtcatacagtacgtgcagaatatgagagaggtgcaggagttccttgtcttgtagcagtggata

SEQ ID NO: 209236 - DNA, 802 bp, Unknown
  Bacterial polypeptide expressing nucleotide sequence isolated from the Sargasso Sea
ttgaaagttatgaatttatctgatgctgctgagtgggcagatgtagttatgattttaactccagatgaattgcaggcagcaatttataaaaatcatattgagcaaagagttaaagaggggacttcaattgcttttgctcatggtttaaatattcattatgatttaattaacgcaagaaaggatctagatgtttttatggttgctccaaaaggacctggacatttagttagaagtgaatatgaaaaaggaggaggtgttccttgtttatttgcagttcatcaaaatgggtcaggaaaagcaagagatcttgcaatgtcttatgcttcagctgtaggtggaggaagatcgggaattattgagacaacatttaaagatgaagttgaaaccgatctatttggtgaacaaacagttctttgtggaggtttggttgaattaattaaaaatggttatgaaactttagtcgaagcaggttacgaacctgaaatggcatatttcgaaacagttcatgaagttaaattaattgttgatctaatctatgaaggtggaattgcaaatatgaattattctatttccaataccgctgaatatggagagtatgaatctggacctagaataattaataaagaagaaactaaaaaaagaatgaaagaagtattagatgatattcagtcaggcaagttcactaaagaatggatggacgagtgtaaaaatggccagaaaaaattccttgcaacaagagctaaattagctgagcatccagttgagaaagtaggagcgagcctaagagcaatgatgccttgga

SEQ ID NO: 209237 - DNA, 502 bp, Unknown
  Bacterial polypeptide expressing nucleotide sequence isolated from the Sargasso Sea
ggaagatctgaatttatagaaacaacatttaaagatgaagtggaaaccgatctttttggtgaacaaactgttttatgtggtggattagttgaattaattaaaaatggatacgaaactttagtagaggcgggttacgaacctgaaatggcatactttgaaactgttcatgaggtcaaacttatcgttgatttaatttacgaaggtggaatagcaaatatgaattattctatttcaaacactgctgaatatggagagtatatgtcaggtcctcgaattataaataaagatgaaactaaaaaaagaatgaaagaagttttggatgatatacagtctggaaaattcactaaacagtggatggatgagtgtaaaaatggtcaaaaaaactttctaaagatcagagaaaaattagccgatcatccggttgaaaaagttggaaaaagtcttagagcaatgatgccatggatttctaaaaagaaattggttgatagtgataagagttaaa

SEQ ID NO: 209238 - DNA, 565 bp, Unknown
  Bacterial polypeptide expressing nucleotide sequence isolated from the Sargasso Sea
gatgtattatgaaaaagacactgatgtaaatttaattaaagataagaaagtagcaatttttggttatggcagccaaggacacgcgcatgctttaaatctaagagatagtggagttaaagaagtagtagtagcacttagagatggatcatctagtgcagcaaaagcagagtcaaaaggattaaaagttatgaacttatctgatgcagcagagtgggcagatgtagttatgattttaactccggatgaattgcaagccgcaatttataaaaatcatattgagcaaagagttaaagaaggaacctcaattgcttttgctcatggattgaatattcattacgatttaattgaagcaagaaaagacttagatgtttttatggttgctccaaagggtcccggacatttagtaagaagcgaatatgaaaaaggagggggagtcccatgtttatttgcagttcatcaaaatgggtcaggaaaagcaagagaacttgcaatgtcttacgcttctgcagttggcggtggaagatcaggaataattgagacaacatttaaagatgaagtgaaaccg

SEQ ID NO: 209239 - DNA, 646 bp, Unknown
  Bacterial polypeptide expressing nucleotide sequence isolated from the Sargasso Sea
atggtcgcgccaaaaggcccaggacatttagtaagaagtgaattcgaaaaaggcgggggagtcccatgtctttttgcagttcatcaaaatggatcgggtaaagcaagagatttagcaatgtcatatgcttcagcgattggtggcggtcgatctggtattattgaaacaacatttaaagatgaagtagaaacagatttatttggagagcaaactgttttatgtgggggattagttgaacttataaaaaatggttatgaaactctggttgaagctggctatgaacctgagatggcgtattttgaaaccgttcacgaagtaaaattgattgtagatctaatttatgaaggtggaattgcaaatatgaattattcaatttctaatactgctgaatatggagaatatatgtcgggccctagaattataaacaaagaagaaacaaaaaaaagaatgaaagaagttctccaagatattcaatcaggtaaatttaccaagcagtggatggatgaatgtaaaagtggccagaaaaattttcttaaaacaagagagaaactagctgaacatccagttgaaaaagtaggtgctaaattaagagctatgatgccttggatttcaaaaaagaaactagtagatagcgataagaattaat

SEQ ID NO: 209240 - DNA, 860 bp, Unknown
  Bacterial polypeptide expressing nucleotide sequence isolated from the Sargasso Sea
tagaagtaaagcagaaaaagcaggattcaaagtaattactccttctgagtcggattgggctgacatcatcatgatgttaacaccagatgaacttcaatcagaaatttacaataatgaaattgcgccaaatattaaagatggtactgctttagcattcgcccatggactcaatattcattttaatcttattgagccgaaagaggggatagacgtaataatgatggctccaaaaggtcctggtcatacggttagagcagaatatgttagaggtgcaggagtgccttgcttagtagcggttcaaaaaaatccttcaggaaatgctcttgaaatagccatagcatattcttcagcaataggtggaggcagagctggaattattgaaactacatttaaagaagagtgtgaaactgatctttttggagaacaatcggtactttgtggaggtttaactcatttaattttagctggatatgaaactctagttgatgctggatatgccccagaaatggcttattttgagtgtttgcacgaagtaaaattaatagttgatttgttatatgaaggtggaatggctaatatgagatattctatatctaacactgctgaatatggagattattcaagaggacctagattaataactgatgaaacaaaaaaagaaatgaaaaaaatattaaatgaaattcaatcaggtgaatttgctaaagaatggatgattgagcacaaaagtggccaaggtaaatttaaaaatatgagaagaatgcaagctgagcatcctattgaaaaagtgggtgagaagttaagaacccttatgccatggatagctgaaggaaaaatggttgataaatctaaaaactaat

SEQ ID NO: 209241 - DNA, 526 bp, Unknown
  Bacterial polypeptide expressing nucleotide sequence isolated from the Sargasso Sea
gtcttatgcatctgcagttggtggaggaagatcaggaattatcgaaacaacatttattgatgaagttgaaacagacttgtttggtgaacaaaccgtattgtgcggagggcttgttgaattaattaaaaatggctatgaaactttagttgaagcaggatatgaaccagagatggcatattttgagacagttcatgaggttaaattgattgttgatttaatttatgaaggtggaattgctaatatgaattattctatttcgaatactgctgaatatggcgaatatcaatctggaccaagggtagttaataaagaggaaactaaaaaaagaatgaaagaagttttggctgaaattcaatctggaaaattcactaaagagtggatggatgaatgcaaaaatggtcaaaaaaacttccttgctactagagctaaattagcggagcatcctgttgaaaaagttggtgcagaactaagagctatgatgccttggataggtaagaaaaaattggttgatagcgataaaagttaa

SEQ ID NO: 209242 - DNA, 416 bp, Unknown
  Bacterial polypeptide expressing nucleotide sequence isolated from the Sargasso Sea
agttctttgtggaggaatttctgaattaatcagagttgcatttgagactcttgttgaagcgggatatcaacctgcatgtgcttattttgaatgtctccatgaagtgaaattaattacagatcttatctatcaaggtggaataactatgatgagatattctgtttctgatacagcggaatatggagacatcactcgtggaaaaagagtaattgacgattctacgcgtgagaggatgagagatattcttaaggatattcaaacaggaaaatttgcgagtgaatggattaatgaaaatatggttggaaggccaactttcagtacggttgttagaaaagaaaaagatcatccaatcgaagtagtaggtgctcgtttaagaggaatgatgccatggatggaagatcgtgaagtaaagtaat

SEQ ID NO: 209243 - DNA, 895 bp, Unknown
  Bacterial polypeptide expressing nucleotide sequence isolated from the Sargasso Sea
ggagccaggtcatgctcatgcgttaaatttgaaagatagcggagttaaggaggtggttgttgcattaagagacggatcatcaagtaaaaaaaaagctgaatcacaagggcttaaagttatgtcgttatcggatgcagcagcatgggcagatgttctgatggttttaacacctgatgaacttcagtcacaaatttacaaaaatcatatagagcaaagaatgagacaaggaacaagtttagcatttgctcatggattaaatatacatttcaatctaattaatgcacgaaaagatcttgatgtttttatgatagctccaaaaggacctggccatttagtaagaagcgaatatcaaaagggaggtggagttccctgcttaatggcaattcaccaagacagctcaggtaaagcaaaagatttagcgttatcatatgcatgtgcaataggcggaggaaaagcaggtgtaatagaaaccaattttaaagaggaatgtgaaaccgatttgtttggagaacaatcagttttatgcggaggtcttgttgaattaattaaaaatggatatgagacacttgtcgaagcaggatattcacccgagatggcatattttgagtgtgttcatgaagttaagctaattgttgaccttatttatgaaggtggaatagcaaacatgaattattctatttctaacactgcagaatatggagaatatatgactggcaaaagaattatagataaaaaaatgacaaaagaaaaaatgaaagaagtattaaaagatatacaatctggaaagtttgctaaacaatggatggaagaaaacaagaatgggcaaaaaaactttctcaaaatgagaaaagaacttgccgaccatcctatagaaaaggtaggaaagaagctaaga

SEQ ID NO: 209244 - DNA, 561 bp, Unknown
  Bacterial polypeptide expressing nucleotide sequence isolated from the Sargasso Sea
aatgacacaactcttttatgacactgatgctgacttaagtttattaaataataaaactatagcaataataggttacggttcccaaggtcatgcacatgctttaaatcttaaagatagtggaatggatgtgattgtaggtttatacaaagggagtaaatctgagagcaaagctattaatgatggtttacaagtattcactgtttctgaggcttgcaaaaaagctgattggattatgattttacttcctgatgagttccaaaaaaatgtttatgttcaggaaatagagccaaatttaaaagagggaaagatattaagttttgcacacggatttaatataagattcggtcttgtaaagccacctagttttgttgatgttgtaatgattgctccaaaaggccctggacacactgttcgatgggaatatcagaatggccagggtgtaccggcactatttgctgtagaacaagatttctctgggaatgcaagatcattagccatggcttatgcaaaggggattggaggtacaagagcagggattcttgaaacaaatttcaaagaaga

SEQ ID NO: 209245 - DNA, 919 bp, Unknown
  Bacterial polypeptide expressing nucleotide sequence isolated from the Sargasso Sea
aatggaagtttattacgataaagatgcaaagttggatcttataaaagataaaaccatagcagttattggctttggttcccaaggacatgcgcatgcaaacaatctcaaagattccggtatgcaagttattattggtttgcgtgaaggttcaagttcagctgataaagccaaaggtgctggttttgaagttatggataacaaagctgcagctgctgctgctgattttgtgatgatgcttattcctgatgaaaaacaaggaaaaacttatgctgaagaaattgagccaaatctaaaagaaggtgcaactttggctttcgctcatggttttaatattcattatggtcaaataaaacccagagctgacttggatgttgtgatgattgctccaaaaggtcctggacatactgttcgaggtcaatatcaaataggagcaggggttccttgtttagtagctatacatcaagatgcatctggcaatgcgctagataattccgtggcttatgcttctgctatcggcggaggtagggctgggatcatcaaaaccacttttaaagatgagacagaaaccgatttgttcggtgagcaagcagttctttgtggcggattaacttcactcattcaagctggttatgaaactttggttgaagcgggatatccacctgagatggcatactttgagtgtgttcacgaagtgaaacttatcgtcgatttgatttatgaaggcggcttagcaaacatgcgttacagcatctcaaatactgcagagtatggtgactatacctctggtcctaaagttgtgaccgatgaagccaagcaagcgatgaaaaaaattctagaccgaattcaaaacggtgagtttgccgatgagtttgtcaccgatgcgagaaagagtaatggtcctgaaggcgggacagaaatg

SEQ ID NO: 209246 - DNA, 386 bp, Unknown
  Bacterial polypeptide expressing nucleotide sequence isolated from the Sargasso Sea
aactcttacagaagccggctatccacctgagatggcttactttgaaactcttcacgaggtaaagttaattgttgatttaatttacgaaggtggaatagcaaatatgaattattcaatttctaatacagcagaatacggagaatatatttctggaaagaaaattgttgactcaaaaacaaaagaaagaatgaaagaagtccttaaagatattcagtcaggtaaatttacaaaacagtggatggatgagtgcaaaggtggtcaaaaaaactttttaaaaatgagagaagaattatccaaacacccaattgaaaaagtaggtaaaaaattaagggatcttatgccttggattggcaagaataaattagtagataaatctaagaattaac

SEQ ID NO: 209247 - DNA, 687 bp, Unknown
  Bacterial polypeptide expressing nucleotide sequence isolated from the Sargasso Sea
attatgatttaattaaagcaagaaaagatctagatgtatttatggttgctcctaaagggcctggacaccttgtaagaagtgaatttgaaaaagggggtggagttccgtgtttgatggcagttcaccaagacggcacaggtaaagctagagatttagctctgtcttatgcatcagctattggaggtggaagatctgggattatagaaaccactttcaaagatgaatgtgaaacagatttatttggtgaacaaacagttctttgtggaggtcttgtagaactaattaaaaatggttatgagacattagttgaagctggatatgaacccgagatggcatattttgaatgcttgcatgaggtaaaactaatcgttgatcttatctatgaaggtggaattgcaaatatgaattactcaatttcaaatactgcagagtatggtgagtatgtttcaggacccagaattataaataaagatgaaactaagaaaagaatgaaagaagtgctagatgacatccaatctggaaagtttaccaaacaatggatggatgagtgtaaaaacggtcaaaagaattttctcaagactagagaggaattagcaaaacattctattgaaacagttggtacaaaactaagagctatgatgccttggattggcaagaagaaattagtagatagcgataagaagtaaa

SEQ ID NO: 209248 - DNA, 371 bp, Unknown
  Bacterial polypeptide expressing nucleotide sequence isolated from the Sargasso Sea
aatgttttatgaaaaagatactaatgttgatttaataaaagaaaagaaagttgcaatttttggctatggaagccaaggacatgcgcatgcacttaatctaagagatagtggtgttaaagaagttgtggtagctttaagagagggctcatcaagtattgaaaaagctgagtctaaaggtctaaaagttatgaatttatctgatgctgcagaatgggcagatgtagttatgattttaactccagacgaattacaagcatcaatatataaaaaccatatagagcaacgtgtaaaagaaggaacatcaattgcgttcgctcatggtttaaatgttcactatgatcttataaaagctagaaaagatttagatgtat

SEQ ID NO: 209249 - DNA, 682 bp, Unknown
  Bacterial polypeptide expressing nucleotide sequence isolated from the Sargasso Sea
atgacgcaactcttttacgacacagatgcagatctaagtcttttaaatgataaaacaatagcgattattggatatggatcacaaggtcatgcacatgctctaaatctgaaagatagcggtatggatgtaattgttggattatataaaggaagtaagtctgaaagcaaagccattagcgatggtctacaagtctttagcgtttctgaagcttgcgaaaaagcagactggattatgattctcctccccgatgagtttcagaaagatgtttaccttaaggaaatagaacctaatttaaaagaaggaaagatactaagttttgctcatggcttcaatataagattcggacttatcaaacctcctagttttgttgatgttgtaatgattgccccaaaaggacctggacacactgttcgttgggagtatcagaacggtcaaggagttccagcgctgtttgctgtagagcaggattcttccggaagtgcaagatcattggcaatggcttacgctaaagggattggaggaacgagagctgggattcttgaaacaaactttaaagaagaaacagaaactgatttatttggcgaacaagcggttttgtgcggaggattatcagaactggtcaagtcaggattcgaaactcttgtagaggccaggttatcaaccgggaacttgcttacttcga

SEQ ID NO: 209250 - DNA, 559 bp, Unknown
  Bacterial polypeptide expressing nucleotide sequence isolated from the Sargasso Sea
atgttttatgaacaagatactgatgtgaacttaattaaagataaaaaaattgcaatttttggatatggaagtcaaggacatgctcatgctcttaatttaagagatagtggagttaaagaagttgttgttgctttaagagaaggatcttcaagtattgaaaaagcagagtccaaaggtttaaaagttatgaatttatctgatgcagcagaatgggcagacgttgtaatgatcttaactccagatgaattacaggcatcaatatataaaaatcatatagagcaacgtgtcaaggaaggaacatcaattgcatttgctcatggactaaatgttcattatgatcttataaaagctagaaaagatctagatgtatttatggtggcaccaaaaggtccgggccacttagtaagaagcgaatatgaaaaaggaggaggagtgccttgtttatttgctgttcatcaagatggttctggaaaagcaagagatttggcaatgtcgtatgcatctgctgttggaggaggaagatctggaattattgaaaccacttttaaagagaagtaga

SEQ ID NO: 209251 - DNA, 674 bp, Unknown
  Bacterial polypeptide expressing nucleotide sequence isolated from the Sargasso Sea
tatgaaggtttattacgaacaagatgctgattttagcataattaaagacaaaaaaattgtaataataggatttggatcgcaaggtcatgctcatgcattaaatctaaaagactctggggcttctaatgtagttgttggattgagagaaggttcttcatcaattgaaaaagcaaaaaatgtgggcttaaaaacccaaacacctgcagacgcagtaaaggacgcagatattgtaatgttcttagctcctgatgaaaatcaacaagaaatttatcaaacccaaatccacgaaaatataaaaaaaggtgctgctttagctttcgctcatggtttaaatattcattttcaacttataacagcgagagatgatttagatgtttttatggttgctccaaaaggcccaggccatacagtaagaggagagtatcttaaaggtggtggagtaccatgtttactcgcagtagataaaaatgtaagtggtaatgcaaaagaaattggtcttgcctatgcttctgctttgggtggtggtaaatcaggtattattgaaacgacatttaaagaggaatgcgaaacagatttatttggtgagcaaacagttctttgtggagggttaatgtctcttgttagaaacggttttgaaactcttgttgaggctggttatgctcctgaaatggcct

SEQ ID NO: 209252 - DNA, 803 bp, Unknown
  Bacterial polypeptide expressing nucleotide sequence isolated from the Sargasso Sea
aatgttttatgaaaaagataccaatgtaaatttaataaaggataaaaaaatcgctatatttggatatggtagccaaggtcacgctcatgcactaaaccttaaagatagtggtgttaaagaagttgtagttgcactaagagatggatcctcgagtagatcgaaagcagagtcaaaaggattaaaagttatgaatctttcagatgcagctgaatgggctgacgttataatgattttaactccagatgaattgcaagcttcaatatataaaaatcatattgaacaaagagttaaagagggtacatcaatcgcttttgcccatggattaaatattcattatgatttaattaaagcaagaaaagaccttgacgtttttatggttgctccaaaaggtccaggacatttagtaagaagtgaatttgaaaaaggcggtggagttccttgtttatttgctgtacatcaaaatggctctggtaaagcaagagatattgcaatgtcttatgcatctgcaattggcggaggtagatctggaattattgagacaacttttaaagatgaggtagaaacagatttatttggagaacaaacagttctttgtggtggacttgttgaattaattaaaaatggttatgaaacattagtagaagcaggatatgagcctgagatggcatattttgaaactgtacatgaagtaaaattgatagttgatttaatttatgaaggtggaattgctaatatgaactattctatctcaaatactgctgagtatggtgaatatgtaactggaccaaaaattattaataaag

SEQ ID NO: 209253 - DNA, 706 bp, Unknown
  Bacterial polypeptide expressing nucleotide sequence isolated from the Sargasso Sea
tgctcatggattaaatgttcactatgatttaatcaaagcaagaaaagatttagatgtatttatggttgctcctaaaggacctggtcatttagttagaagtgaatatgaaaaagggggaggagtaccatgtttatttgcagtacaccaaaacggatcaggtaaagcaagagatctagcgttatcatatgcatcagctgttggtggtggaagatctggaattattgaaactactttcaaagacgaagttgaaacagatttatttggtgagcaaacagttctttgtggaggattagtagaattaattaaaaatggttatgagactttagttgagggcggttacgagcctgagatggcatattttgaaactgtgcacgaggtaaaactaattgttgatttgatttatgaaggtggaattgcaaatatgaactactcaatatcaaatacagctgagtatggtgaataccaatctggaccaagaattataaataaagaagaaactaagaaaagaatgaaggaagtattggctgatattcaatctggaaaattcactaaagagtggatggatgaatgcaaaaatggtcagaaaaactttttagcaactagagctaatttagcagagcattctgtggaaaaagttggtgctgaacttagagctatgatgccatggattggcaagaaaaaactagttgacagtgacaaaagttag

SEQ ID NO: 209254 - DNA, 430 bp, Unknown
  Bacterial polypeptide expressing nucleotide sequence isolated from the Sargasso Sea
ttgtgtggtggacttggttgaactaattaaaaatggttatgaaactttagttgaagcaggatacgagccagaaatggcttactttgaaacagtgcatgaagtaaaactgattgtagatttaatttatgaaggtggaatagctaacatgaattattcaatttctaatacagcagaatatggagaatacgtttcaggtccaaaaattattaataaagaagaaacaaaaaaaagaatgaaagaagttttaacagatattcaatctggtaaatttactaagcaatggatggatgaatgtaaaaatggccaaaagaactttttaaaaacaagagaaaaattagccgaacaccaagttgaaaaagttggagcagtccttagagcaatgatgccttggataaataagaaaaaattggttgatagcgataagaaataa

SEQ ID NO: 209255 - DNA, 532 bp, Unknown
  Bacterial polypeptide expressing nucleotide sequence isolated from the Sargasso Sea
gctttgtcatatgcctcagcagttggaggaggaagatcaggaattattgaaactacatttaaagatgaagttgaaacagatttatttggtgaacagactgtattgtgtggtggtcttgttgaattgattaaaaatggttatgaaactttagttgaagcaggttatgaacctgaaatggcatattttgaaacagttcatgaagttaaattgattgttgatttaatttatgaaggcggaattgcaaacatgaattattctatctcaaatactgcagaatatggtgaatatcaatcaggccctagagtggttaataaagaagaaactaaaaaaagaatgaaagaagttttggctgaaatacaatcaggaaaattcacaaaagagtggatggatgagtgtaaaaatggtcaaaagaactttcttgctacaagagctaaattagctgagcatccagttgaaaaagttggtgctgaattaagagctatgatgccttggattggtaagaaaaaattagttgatagcgataaaagttaaa

SEQ ID NO: 209256 - DNA, 784 bp, Unknown
  Bacterial polypeptide expressing nucleotide sequence isolated from the Sargasso Sea
ttaaaagattcaggggcaaaggttgttgttggacttagagagggttcatctagtacatcaaaagctgaggaagctggtctagaagttaaaaacatatcagatgcagtatctggagcagatgtagtgatgatacttgcacctgatgagtatcaggctgacttgtataaagagagtatagaacaaaacctcaaaccctcagctgcaatagcatttgctcatggatttaatattcattatggacaaattaaaccccaagataaccatgatatttttatgattgctccaaaaagccctggtcatcttgtacgttctacatacgtcaatgggaaaggcgtgcctacattaatagcaattcataatgatgcatcaggtaatgcaaaagatatcgcgctttcatacgcttctgctattggaggaggtcgtgctggaattattgaaacaaactttaaagaagaaacagaaactgatttatttggtgaacaagctgttttgtgtggtggagttactgcattagttaaagccggttttgaaacacttgtcgacgcgggctatgcacctgaaatggcatattttgaatgtttgaatgaacttaaacttatcgtagatttaatgtatgagggcgggatgacagatatgagatactctatatctaatactgctgagtatggtgacctaacaaaaggaccatttttgattgacgaccatgttaaagaaaaaatgaaattagtcttagcagatgttcaaaacggtaagtttgctaatgactttgtaagtgaaataaaag

SEQ ID NO: 209257 - DNA, 811 bp, Unknown
  Bacterial polypeptide expressing nucleotide sequence isolated from the Sargasso Sea
tttgaagttatgacaccttctgagtcagcatcctggggagatattataatgatgctaaccccagatgaattgcaatctgatatttataataatgaaattgcgaataatatcaaagaaggttcagctatagctttcgcacatggattaaatatacattttgaattaattaaacctaaggacggtgttgatgtaatgatgatggcacctaaaggtccaggacatactgttagagcagagtatgtaagaggtgcaggtgttccttgtttagttgcagttcataaaaattcttcaggtaatgcacttgaaattgctatagcctatgcttctgctattggtggaggtagagctggtattatagagaccacatttaaagaagagtgtgaaacagatctttttggagaacaatcagttttatgtggaggtttaactcacttaattttagcaggatacgaaacactggttgaggctgggtattctcctgaaatggcttattttgaatgtctgcatgaggtaaaattaatagtagatcttctttatgagggtggtatggcaaatatgcgttattctatttctaatacagctgaatacggagattattcaagggggccaagattgataactgatgatactaaaaaagaaatgaaaaagatattgtctgaaattcaatcaggggaatttgcaaaagagtggatgattgaacatcgaagcggacagacaaaattcaaaactatgagaaaaaaacatgcagatcacccaatagaagaaataggggagaaactaagaaaacttatgccttggatagctgaacaaa

SEQ ID NO: 209258 - DNA, 760 bp, Unknown
  Bacterial polypeptide expressing nucleotide sequence isolated from the Sargasso Sea
atgttctatgaaaaagatgctgacgtaaacttaattaaagataaaaaagttgctatttttgggtatggaagtcaagggcatgctcatgctcttaatttaaaagacagtggggtaaaagaggtagttgttgctttaagagatggttcagcaagtaaagcaaaagctgagtcaaaaggtttgaaggtaatgaacttgtccgatgcagcagaatgggctgacgtttgtatgattttaactcctgatgaacttcaagcaacaatatataaaaaccatatcgaacaaagaataaaagagggcacaagtttagcttttgctcatggcttaaacattcattatgatttaatcaaagcaagaaaagatttagatgtatttatggttgctcctaaggggcccggacatcttgtaagaagtgaatttgaaaaagggggtggagttccttgtttgatggcggtacatcaagacggcacaggtaaagcaagagatttagctctatcttatgcatcagcgattggaggtggaagatctgggattattgaaaccactttcaaagatgaatgtgaaacagatttatttggtgaacaaacagttctttgtggaggtcttgtagagctgattaaaaatggttatgaaacattagttgaggctggatatgaaccagagatggcatatttcgagtgcctacatgaggtaaaattaattgttgatcttatctatgagggtgggattgcaaatatgaattactcaatttcaaatactgcag

SEQ ID NO: 209259 - DNA, 469 bp, Unknown
  Bacterial polypeptide expressing nucleotide sequence isolated from the Sargasso Sea
gatgaagtctaaacagatttatttaggggagcaaactgtattgtgtgggggtttggttgaactaattaaaaatggttatgaaaccttagttgaagcaggatatgaacctgagatggcatactttgaaactgtccatgaagttaaattaattgttgatttaatttatgaaggtggaattgcaaacatgaattattctatatcaaatactgcagaatatggtgaatatcaatcaggaccaagagtagttaataaagaagaaacaaaaaaaagaatgaaagaagttttggcagaaattcaatctggaaaatttacaaaagagtggatggatgaatgcaaaaatggtcaaaagaattttcttgctacaagagctaaattagcagaacatcctgttgaaaaagttggtgcagaactaagagccatgatgccctggataggtaagaaaaaattagttgatagcgataaaagttaa

SEQ ID NO: 209260 - DNA, 622 bp, Unknown
  Bacterial polypeptide expressing nucleotide sequence isolated from the Sargasso Sea
tcatttagtaagaagtgaatatgaaaaaggtggtggagttccttgtttatttgctgttcaccaagatggttctggtaaagcaagagatttggcaatgtcatatgcatctgctgttggtggaggtaggtctggaataattgaaactacatttaaagatgaagtagaaaccgatctatttggagaacaaacagtattatgtggtgggcttgttgaattaattaaaaatggatacgaaactttagttgaagctggatatgaaccagaaatggcttatttcgaaactgttcacgaagtgaaactgattgtggatttaatatatgaaggtggaattgctaatatgaattattcaatttcaaatacagcagagtatggtgagtatcagtcaggtccaagaattattaaaaaagatgaaactaagcaaagaatgaaagaagttttagcagaaattcaatctggtaaatttacaaaagaatggatggatgaatgcaaaaatggtcaaaaaaattttcttgcaactagggccaaattagcagaacactcggttgaaaaagttggtgctgaacttcgggctatgatgccttggatttcaaaaaagaaacttgttgatagcgataagaagtag

SEQ ID NO: 209261 - DNA, 439 bp, Unknown
  Bacterial polypeptide expressing nucleotide sequence isolated from the Sargasso Sea
caaactgttctttgtggtggattagttgaactaattaaaaatggttatgaaacattagtcgaagctggatatgaaccagaaatggcttattttgaaacagttcatgaagttaaactaattgttgatttaatttacgaaggtggaattgctaacatgaattattcaatttctaatacagcagaatatggagagtatgttacaggtccaaaaattattaataaagaagaaacaaagaaaagaatgaaagaagttttgacagatattcaatcgggtaagtttacaaaagactggatggatgaatgcaaaaatggtcaaaaaaacttcttaaaaaccagagaaagacttgctgaacacccagttgaaaaagttggagcaggacttagagctcttatgccatggatatctaagaagaaattaatagatagcgataaaaattagt

SEQ ID NO: 209262 - DNA, 391 bp, Unknown
  Bacterial polypeptide expressing nucleotide sequence isolated from the Sargasso Sea
atgtattatgaaaaagatgctgatattagtctgattaaaaataaaaaaattgctatatttggatacggcagtcaaggccatgctcatgctttaaacttaaaagatagtggagttaaagaggtagtggtcgctttaagagaaaattctcctagtgcaaaaaaagctcagagtgaaggactaaaagtgatgtccttatcagatgcagccgcttgggcagatgtagtaatgatgttaaccccagatgaactccagtcacaaatatatttgaatcatattgaacagcgcatgagagagggaacaagtttagcctttgcacatgggcttaatattcattttaatttaataaatgccagaaaagatttggatgtatttatggttgcaccaaaaggac

SEQ ID NO: 209263 - DNA, 768 bp, Unknown
  Bacterial polypeptide expressing nucleotide sequence isolated from the Sargasso Sea
aatgtattatgaaaaagacactgacgtaaacttaattaaaaataagaaagttgcaatttttggttatggcagccaaggacatgcacatgcactaaatttgagagacagtggtgttaaagaagttgtggtagctcttagagaagggtcatctagtgccgcaaaagcagagtcaaaaggtttgaaagttatgaatctatccgatgctgcagagtgggcagatatagttatgatgttaactccagatgaattgcaagctgctatatataaaaatcatatcgagcaaagagttaaagaaggaacttcaattgcctttgcacatggattaaatattcattacgatttaattaatgcaagaaaggacctagatgtttttatggttgcgcctaagggacctggacatttagttagaagcgaatacgaaaaagggggaggagtcccttgtctgtttgctgttcatcaaaatggatcaggaaaagccagagaacttgcaatgtcttatgcttcagctgtaggtggtggaagatctggaattattgaaacaacttttaaagatgaagttgaaacagatttatttggcgaacaaacagtactttgtggtggattagttgagctaattaaaaatggatatgaaactcttgttgaagcaggttacgaacctgaaatggcatattttgaaactgttcatgaagtaaaattaattgtagatctaatctatgaaggtggaattgctaacatgaattattctatttcaaatactgctgaatatgg

SEQ ID NO: 209264 - DNA, 796 bp, Unknown
  Bacterial polypeptide expressing nucleotide sequence isolated from the Sargasso Sea
aatgttttacgaaaaagatgcagatacaaatttaatcaaaggaaaaaaaatagcaatatttggttacgggagccaaggtcatgcacatgctcttaatttaaaagacagcggcgttagtgaagttgttgttgcattaagagaaggatcgccaagtaaatataaagctgagtcaaaaggtttaaaggtaatgaatttatccgatgcagcagagtgggctgatgtagtaatgatattaactccagacgaactacaagctacaatatacaaaaaccatattgagcagagggttaaagagggaacatctattgcttttgctcatggattaaatattcattacgatttaattcaagccagaaaagatctagatgtttttatggttgctcctaaaggaccaggtcatttggtgcgaagtgaatttgaaaaaggaggtggagtcccttgcttgtttgcggtacaccaaaatggatctggtaaagccagagacattgcgatgtcttatgcatccgcaatcggtggaggaagatcaggtataattgaaacaacttttaaagatgaggttgaaacagatctttttggagaacaaacagttctttgcggtggtttagttgaattaataaagaatggatatgaaactttagtagaagctggatatgaacctgagatggcatactttgaaacagttcatgaggtaaaattgattgttgatttaatttatgaaggtggaattgccaatatgaattactcgatttcaaacacagccgagtacggagaatatatgtcgggcccaagaattata

SEQ ID NO: 209265 - DNA, 425 bp, Unknown
  Bacterial polypeptide expressing nucleotide sequence isolated from the Sargasso Sea
tggaggtcttgtagaactaattaaaaatggttatgagacattagttgaagctggatatgaacccgagatggcatattttgaatgcttgcatgaagtaaaactaatcgttgatcttatctatgaaggtggaattgcaaatatgaattactcaatttcaaatactgcagagtatggtgagtatgtttcaggacctagaattataaataaagatgaaactaagaaaagaatgaaagaagtgctagaggacattcaatctggaaagtttaccaaacaatggatggatgagtgtaaaaacggtcaaaagaattttctcaagaccagagaggaattagcaaaacattctattgaaacagttggtgcaaaactaagagctatgatgccttggattggcaagaagaaattagtagatagcgataagaagtaaa

SEQ ID NO: 209266 - DNA, 265 bp, Unknown
  Bacterial polypeptide expressing nucleotide sequence isolated from the Sargasso Sea
gatgaaagtttattacgaaaaagatgctgacttggatttaattaagactaaaaaaatagctgtctatggttatggcagtcagggccatgcccatgcattaaatctaaaagattctggcgccagtgaggttgtagtggctcttagagaaggttcttctagcgcaaaaaaagcagaagctgaaggattgaaagtaatgtccatgtctgatgcggctgaatgggctgatataatgatgatgctaatacctgatgagcttcaggcagat

SEQ ID NO: 209267 - DNA, 395 bp, Unknown
  Bacterial polypeptide expressing nucleotide sequence isolated from the Sargasso Sea
aggatatgaaacacttacagatgctggatatgcacctgaaatggcttactttgaatgtttgcacgaagtaaagttgatagtagaccttttatatgaaggaggaattgccaatatgagatattctatatctaatacagcagagtatggtgattatgtatcaggtaaaagaataattacagatgcaaccaggttagagatgaaaaaagttttgagggatatacagactggaaagtttgtaagagattggatgttagaaaataaatctaataagccaaactttaaagctatgagaagagaggcacaatctcataacatagaagaagtaggcaagagactaagagctatgatgccttggattaaaaaaaataaattagtagacaccaataaaaattaaa

SEQ ID NO: 209268 - DNA, 412 bp, Unknown
  Bacterial polypeptide expressing nucleotide sequence isolated from the Sargasso Sea
atgaaaatattttatgagaaagatacaaattctagtttaattaaagataaaaaaatagctatatttggttatggtagccaaggacatgcacatgcactgaacttaaaagatagcggtgttaaagaagtagttgtagctttaagggacggatcttctagtaaagataaagcagagtcaaaaggacttaaagttatgaatttatcagatgctgctgaatgggctgatgtagttatgattttaactcctgatgaattacaagcagcaatatataaaaatcatattgagcaaagagcaagagaaggtacatcaattgcttttgcccatggtttaaatatccattatgatttaattaaagcaagaaaagatttagatgtatttatggttgctcctaaaggaccaggtcatttagtaa

SEQ ID NO: 209269 - DNA, 598 bp, Unknown
  Bacterial polypeptide expressing nucleotide sequence isolated from the Sargasso Sea
tgaaaaaggtggaggagttccatgcttaatggcagtgcacaaagatagttctggaaaagcgagagatcttgctatgtcttatgcatgtgcagtaggaggaggcaggtcaggaattattgaaacaacttttaaagacgaatgtgaaactgatttattcggcgaacaaactgttttatgtggaggattagttgaattaattaaaaatggttttgaaactttgaccgaagcgggctatccacccgaaatggcatattttgaaactcttcatgaggttaagctaatcgtagacttaatctatgaaggcggaatagcaaacatgaattattcaatttctaacaccgcagaatatggagaatatatttctggaaagaaaatagtcgattcaaaaacaaaagaaagaatgaaagaagtcttaaaggatattcagtcaggcaaatttacaaaacaatggatagatgagtgtaaaggtggacagaaaaactttttaaaaatgcgagaagatttagccaaacatccaatcgaaaaggttggtaaaaaactgagagatttgatgccatggattggtaagaataaattagtcgataaatctaagaattaa

SEQ ID NO: 209270 - DNA, 553 bp, Unknown
  Bacterial polypeptide expressing nucleotide sequence isolated from the Sargasso Sea
ttcaggaaaggctagagatttagctatgtcatatgcatcagccgttggtggtggtagatcaggaattattgaaacaacttttaaagatgaagtagaaacagatttatttggagagcaaacagttttatgtggaggattagtagaactaattaaaaatggctatgagacattggttgaagctggatatgaaccagaaatggcatattttgaaactgttcatgaagtaaaactaattgttgatcttatttatgaaggtggaattgctaatatgaattattctatttcaaatacagctgaatatggagagtatgtttcaggtccaaaaattataaataaagaagaaacaaaaaaaagaatgaaggaagttttagataaaattcaatctggtaagtttactaaagagtggatggatgaatgtaaaaatggtcaaaaaaacttcttaaaaactagagaaaaattggcagagcacccaattgaaaaagtcggtgcaggattaagagctatgatgccatggatcactaagaaaaaattggtagatagcgataaaaattag

SEQ ID NO: 209271 - DNA, 642 bp, Unknown
  Bacterial polypeptide expressing nucleotide sequence isolated from the Sargasso Sea
tttgataaaaagtaaaaaagttgcaatttttggttatggaagccaaggacatgctcatgcattaaacttaaaggatagtggagtaaaagatattgttgtagcattaagagaaggctcctctagtgcagcaaaggcagaatcaaaaggattgaaagtaatgaatttatctgatgctgcagagtgggcagatgtagtaatgattttaactcctgacgaattacaagcagaaatttataaaaatcatattgaacaaagagttagagagggaactagtattgcatttgctcacggattaaatgttcattacgacttaataaaagcaagaaaagatctagatgtttttatggttgctcctaaaggacctggtcatttagttagaagtgaatatgaaaaaggaggtggagtaccttgtttgtttgctgtacatcaaaatggttcaggaaaggcaagagatttagctttatcatatgcttcagcagttggcggtggaagatcaggaattatcgaaacaacattcaaagatgaagttgagacagatttatttggtgagcaaactgtgttatgtggaggtttggttgaattaattaaaaatggttatgagacattagtcgaagcaggatatgagcccgagatggcttattt

SEQ ID NO: 209272 - DNA, 523 bp, Unknown
  Bacterial polypeptide expressing nucleotide sequence isolated from the Sargasso Sea
tatgaaaacctattatgataaagacacaaataaaaatttaataaaaaataaaaaagtagctatttttggttacggtagccaaggtcatgctcacgcactaaatttaaaagatagtggtgtaaaaaacgttgttgtagccttacgagaaggttcctctagtattaaaaaagctgaaggagcaggtttaaaagttatgtcactttcagatgcagcagcttgggcagatgttgtaatgatgttaactccagacgaactccaatcagaaatttataaaaatcatattgagcaaagaatgagagaggggacaagtttagcttttgctcacggtttgaatattcactttgatttgattaaagcaagaaaagacttagatgtctttatggtcgctccgaaaggtcctggtcacactgttagaagtgaatatcaaaaaggaggaggggttccttgtttgatggcagtccacaaagatagctcaggtaaagctaaagatttagcattgtcttatgcttcagcctgttggggg

SEQ ID NO: 209273 - DNA, 609 bp, Unknown
  Bacterial polypeptide expressing nucleotide sequence isolated from the Sargasso Sea
aatgagcttaaatattttctatgataaagatgcagatcttaacgaaatttctgataaaaaaattgtaattattggctatggtagtcagggtcatgcccacgcattaaaccttaaagatagtggtgtagaaaacatcaccattgcgttgagaaatggatcaagcagcgtattacgtgcacaacaagccgggtttactgttgaagaacccacagacgctgtcaaagacgcagacattataatgttacttgccccagacgagcatcaagcagagatctacaatgatattaaagacaagataaaacaaggtgcggccttagcctttgcacatggacttaatatacacttcaaacttatcaatgcacgtcctgatttagatgtttttatgaccgctcctaaaggacccggacacaccgttcgtagtgaatacctaaaaggtgcaggagttccctgtttaattgccgtggctcaaaacgcaacaggaaaagccaaaaaccttgctcttgcctgggcatccggtgtaggtggtggacgatctggaattatcgaaacaaccttcaaagacgaatgcgaaacggatctttttggagaacaagccgtattgtgtggtgg

SEQ ID NO: 209274 - DNA, 557 bp, Unknown
  Bacterial polypeptide expressing nucleotide sequence isolated from the Sargasso Sea
aatgttttatgaaaaagatgcagacgcaaatttaattaaaaataaaaaagttgcaatttttggatacggtagccaaggacatgcacatgctcttaatttaaaagatagcggtgtaaaaaatgttgttgttgcacttcgtgaaggatcgtcaagtattaaaaaagcagaaagtgagggtctcaaagttatgtctctttcagatgctgcagcatgggctgatgtagttatggttcttactcctgacgaacttcaggcatcaatttataaaaatcatattgaacaaagaatgagagaggggacaagtttggcatttgctcacggtttgaatattcattttaatttaattaattctagaaaagatttagatgttttcatggtagcaccaaaaggaccaggacacttagtaagaagcgaatatcaaagaggaggaggagttccttgtcttatggcggttcacaaagatagttcaggtaaagctagagatcttgcaatgtcatatgcctgtgcagttggtggaggaagatctggaattatagaaacaacttttaaagatgaat

SEQ ID NO: 209275 - DNA, 640 bp, Unknown
  Bacterial polypeptide expressing nucleotide sequence isolated from the Sargasso Sea
atgcgcgtttattatgatcgcgatgcagatataaatttgatcaagtctaggaatgtggtgattattggctacgggagccagggacatgctcatgcctcaaatttgagagatagtggtgcgacaaacgtgaagatcgctcttcgtgaaggatcagccagtgcggctaaggctgaatcagccgggtttgaagtccttacagtaacggcggctgctcaatgggctgatgttatgatgatggctactcctgatgagttgcaggcctcgatctataaagagcatcttcacccacacatgaaggagggagccgccctagcgtttgctcacggcctcagcattcactttggtttgattgatcctcggaaggatttggatatctttatggtggcgccaaagggtccgggacacactgtgcggagcgagtttgagcgtggtggcggtgtgccatgccttttagcggttcataaaaatatttcagggaacgcaagtgaaataggcttatcgtatgcatccgccatcggtggtggtcgggcaggcataattgaaaccagttttaaggaagaatgtgaaacggatctttttggtgagcaggtagttttatgtggtggtttgacagccattgattacagcggggttttgaaac

SEQ ID NO: 209276 - DNA, 335 bp, Unknown
  Bacterial polypeptide expressing nucleotide sequence isolated from the Sargasso Sea
aatgttttatgaaaaagatactaatgtagatttaataaaagataagaaagtagcaatttttggctacggaagccaaggacatgcacatgcacttaatctaagagatagcggtgttaaagaagttgttgtagctttaagagagggctcatcaagtattgaaaaagctgagtctaaaggtttaaaagtaatgaatttatctgatgctgctgaatgggcagatgtagttatgattctaactccagacgaattacaagcatcaatatataaaaaacatatagagcaacgtgtaaaagaaggaacatcaatcgccttcgctcatggtttaaacgttcact

SEQ ID NO: 209277 - DNA, 433 bp, Unknown
  Bacterial polypeptide expressing nucleotide sequence isolated from the Sargasso Sea
atgttttatgaaaaagatactaatgtagatttaataaaagataaaaaagtagcaatttttggctatggaagccaaggacatgcacatgcgcttaatcttagagatagtggtgttaaagaagttgtggtagctttaagagaaggctcatcaagtattgaaaaagctgagtctaaaggtttaaaagtcatgaatttatctgatgctgcagaatgggcagatgttgttatgattttaaccccagacgaattacaagcttcaatatataaaaatcatatagaacaacgtgttaaacaaggaacatcaatcgcgtttgctcatggtttaaatgttcactatgatcttataaaagccagaaaagatttagatgtatttatggttgcaccaaagggaccagggcatttagtaagaagtgaatatgaaaaaggggaggagt

SEQ ID NO: 209278 - DNA, 865 bp, Unknown
  Bacterial polypeptide expressing nucleotide sequence isolated from the Sargasso Sea
atgagagtttattatgatagggacgctgatattggtttaattaaatcaaaaaaagttcttgtgattggatatggaagtcaagggcatgcacatgctgccaatttaagagatagtggtgttaaggatatcgctatagctttaaaaaaagggtctcaatctattgaaaaagcaaaaaaagctggctttgatgtaaaagatgtgtctaatggtgccaaatgggctgatgtaataatgatggccactcctgacgaactccagtctgatatttataatgtaagtttaaaagaaaatatgagggctggatcagctattgcatttgctcatggtttaaatgttcattttaatttgattgaacctagagacgatatagatgtatttatggttgcacctaaaggtcctgggcatactgttaggtctgaatatttacgtggtgccggagtaccctgtttaattgcaattaacaaaaattcaacaggaaatgctcatgatattggattatcatatgcatgtgcaatcggtggaggtagatctggtgttattgagaccacattcaaagaagagtgtgaaacagacttatttggtgaacaagttgttctttgtggtggattagttgaattgattagatctggatttgagacattagttgaagcaggttatgcacctgaaatggcatattttgaatgtctacacgaggttaagcttattgtagaccttatatatgaaggtggaatagctaatatgaattattctattagtaatactgctgaatatggagaatatgtaactggaccaagaattatcaactctgatactaaaaaagaaatgaaaaaagtattagatgacattcaatctgggaaattactag

SEQ ID NO: 209279 - DNA, 799 bp, Unknown
  Bacterial polypeptide expressing nucleotide sequence isolated from the Sargasso Sea
atgaaagttttttatgataaagacgctgattttaatataattaagaataaagtaattactattgtaggatatggtagtcagggacatgcacacgttgccaatctcaaagatagtggggtcaataatattaatgttgctctgaaagaaaattctctatcagtaaataaagcaaaatctgcaggatttaatgtaataagtattgaagaagcttcaaaagagtctgatgtattaatgttagcaacgccagatgaaatccagggaaaattatataaagaaaagatacacgaaaatatgaaacctggagcagccttggcgtttgctcatggattaaatattcattatggtttaatagaacctagagatgatatagatgtttttatgattgctcctaaaggaccaggccatacagtaagatctgaatacaaacgaggaggaggtgtcccatcactaatatcagtttttcaagataagtcaggcaatgcttttgaggtagctttagcttacggctctggtttaggagctggtagatctggaatgatagaaactacattcaaagaggaatgcgaaacagatttatttggagaacaggttgtgttgtgtggaggattaacagagctgattaccgcaggctatgaaacattggtggatgcaggatatgctccggagatggcttattttgaatgtttgcatgaagtaaagttaatagtagatctattatatgaaggcggaatagcaaacatgagatattctatttcaaatacagcagaatacggtgattacgtatcaggaaaaaggatta

SEQ ID NO: 209280 - DNA, 612 bp, Unknown
  Bacterial polypeptide expressing nucleotide sequence isolated from the Sargasso Sea
aatgttatacgaaaaagattctaatgtagatttaataaagtcaaaaaaaattgcaatttttggattcggaagtcagggacacgctcacgcactaaacttaaaagacagtggagtaaaagaggttgttgttgcattaagagacggttcttccagtaagaaaaaagctgaagcccaaggactgaaagttatgtctttgtcagatgcagcagaatgggcagatgttttaatgatgttaactcctgacgaaatgcaatcacaaatttataagaatcatatagaacaaagaatgagacaaggaacgactttagcttttgctcacggtttaaatattcactttaatttaattaccgccagaaaggatctagatatatttatgatagccccaaaaggtccaggacatttagtaaggagtgagtatcaaagaggagcaggggtgccttgtctgatggcgatccagcaagacagttctggaaaagcaaaagatttagctctttcatatgcttgtgcgattggtggaggcaagtctggaataatagaaactacttttaaagatgaatgcgaaacagatttgtttggagaacaaacagttttatgtggagggttagttgaact

SEQ ID NO: 209281 - DNA, 643 bp, Unknown
  Bacterial polypeptide expressing nucleotide sequence isolated from the Sargasso Sea
tcccgaattcgttgatgtcgcaatgattgcaccaaaaggacctggacacattgtcaggagagtttttgaatcaggtcagggtgttccttgtttagttgcagtatatcaaaattattcaagtaaagctcaggaaattgctcttggatacggacttggtattggtggagctcgtgctgggatccttgaaacaacttttaaagaggaaaccgaaacagatttatttggagagcaagcagttttatgtggaggtgtaacttctttagttcaaagtgcgtttgaagtattagttgaagctggctatcagcctgaatcggcatattttgaagttctacacgaattaaagttaattgttgacttaatgtaccaaggtggtcttggagaaatgagatattcgatttctgacacagctgaatatggtgattatactagagggccagtggttgttgatccatctgtaaaggaaaatatgaagaaagtgcttgagcaaattcaatctggtcaatttgcgaaagaatggattgctgaaaatgacgagggattacataagtttaatagcctaagagatgaaaacgctggacaccctattgaagaagttggaaaaaaattgagaaatatgatgcctttcttgaaaaatcaaagttaa

SEQ ID NO: 209282 - DNA, 868 bp, Unknown
  Bacterial polypeptide expressing nucleotide sequence isolated from the Sargasso Sea
atgttttatgaaaaagatactgatccaaatctaattaagaataaaaaaattgctattttcgggtatggtagtcaagggcatgctcatgccttaaatctaaaagatagcggggttaaagaggtcgtcgtagcactaagagatgggtctgctagcaaagcaaaagctgagtcaaaagggttaaaagttatgaatttatctgatgctgctgaatgggcagatgtgattatggttttaacaccagacgaattacaagcatcgatttataaaaatcacattgaacaaagagtaaaagagggaacttcaattgcttttgctcatggtttaaatgttcactatgatctaattaaagctagaaaagatttagatgtttttatggttgcaccaaaaggcccaggacatttggtgagaagtgaattcgaaaaaggaggtggagttccatgtctttttgcagttcatcaaaatggatcaggtaaagcaagagatttagcgatgtcatatgcttcagcgattggtggaggtcgatctggtattattgaaacaacatttaaagatgaagtagaaacagatttatttggagagcaaactgttttatgtgggggattagttgaactaataaaaaatggttatgaaactttggttgaagctggctatgaaccagaaatggcgtattttgaaactgttcacgaagtaaaattaattgttgatttaatttatgaaggtggaattgccaatatgaattattctatttctaatactgctgagtacggagaatatatgtcgggtcctagaattataaataaagaagaaacaaaaaaaagaatgaaagaagttcttcaagatattcagtcaggaaaatttactaagcagg

SEQ ID NO: 209283 - DNA, 379 bp, Unknown
  Bacterial polypeptide expressing nucleotide sequence isolated from the Sargasso Sea
aatgttttatgaaaaagatactgatgttaatttaatcaaagataaaaaaattgctatatttggatacggaagccaaggtcatgcacatgcgttaaatttaaaagatagtggtgttaaagaggtagttgtggcattaagagaaggatcttcaagtattgctaaagcagaatcaaaaggtttaaaagtgatgagtttgtcagatgctgcagagtgggcggatgttgtcatgatcctgaccccagatgaattacaagcatctatatataaaaatcatatagaacaaagagttagaaaaggaacctcattagcttttgcacatggattaaatgttcattacgatttaataaaggcaagagaggatttagatgtttttatggta

SEQ ID NO: 209284 - DNA, 583 bp, Unknown
  Bacterial polypeptide expressing nucleotide sequence isolated from the Sargasso Sea
atgttttatgaaaaagatactgatgtaaatttaattaaaaagaagaaaatagcgatatttggctacggaagccaaggacatgcacatgcattaaatttaagagatagcggagtaaaagaagtagtagttgctcttagagatggatccacaagtaaagcaaaagcagaatcaaaaggattaaaagtaatgaatttgtctgatgctgccgagtgggctgatgttgtaatggttttaactccagatgaattacaagctacaatttataaaaatcatatagaacaaagagtaagagaaggaacatcaatagcttttgctcacggtttaaatattcattatgatttaattaaagcaagaaaagatctagatgtttttatggtagcacccaaaggtccagggcatttagtaagaagcgaatatgaaaagggcggtggagttccatgcttatttgctgtacatcaaaatggttctggcaaagcaagagagcttgctatgtcgtacgcttctgcagttggtggtggaagatcaggaattattgaaactacatttaaagatgaagttgaaacagatttatttggtgaacaaa

SEQ ID NO: 209285 - DNA, 622 bp, Unknown
  Bacterial polypeptide expressing nucleotide sequence isolated from the Sargasso Sea
aatgtactatgaaaaagatactaataaaaatttgatcaaagataaaaaaatagcaatttttggttatggaagccaaggacatgctcatgcactgaatttgaaagatagtggtgtaaaagaggttgtggttgctttaagagatggatcttcaagtaaagcaaaagctgagtcaaaaggtttaaaggtaatgaacttatcagatgctgcagagtgggcagatgttgtaatgatacttacacctgacgaacttcaagcaacaatttataaaaatcatattgagcagagagtaaaagaaggaacttcaattgcttttgcacatggattaaatattcactatgatctcattaaagcaagaaaagatttagatgtttttatggttgcccctaagggaccaggacatttagtaagaagtgagtttgaaaaaggtggtggtgttccatgtttatttgccgttcatcagaatggctcgggtaaagcaagagacattgctatgtcatatgcttctgcaatcggaggtggacgatctggtattattgaaacgacttttaaagatgaagtagagactgatctatttggtgaacaaactgttttatgtggtggtttagtagaattaataaaaaat

SEQ ID NO: 209286 - DNA, 880 bp, Unknown
  Bacterial polypeptide expressing nucleotide sequence isolated from the Sargasso Sea
aatgtcatcgtagggttacacgagggtagtaatagcaggacgaaagtcaaagaggatggattagaggttgcttcggtggacgaagctgcaaagcaatctgatgtcattatggttttatgccccgatactacacagcccgacgtttataaagattcaatagagcccaacttacttccaggtaaaactttaatgtttgctcatggattcaatattcattacaaaacgatcattccacctaatactgttgacgtctcaatggttgcccctaaagcgccgggtcatcgaatgcgagaagtgtttacaaaaggatctggggttccagggttattggctattcatcaagatgcttctggtaaagctcatgaactggggcttgcatatgcaaaaggcattggttgcagcagagcaggagtattagcgacaacatttgaagaagaaaccgaaacagatttattcggagaacaggcggtgctgtgtggaggggtttcagccttggtaaaagcggcgtttgaagttttaactgaagatgggggatatgctccggaatctgcgtactttgaagtaatgcacgagcttaagcttattgtagacctgttttataaaggcggcatggagtatatgcgttattcggtaagtgatacagctgaatttggcgattacaccagagggcctaaggtaatcgatgaaaacgtgaaatctaatatgcgtgatgtcctcgcccaaatcaaagacgggacttttgctagggagtggataactgaaaatgatgagggaagaccaacattcaatcgattgcgtaaagaaaatgcaggccatccaattgaaaaagtaggaaaagagctgaggggcatgatgtcatttttagatgactctgactaaa

SEQ ID NO: 209287 - DNA, 508 bp, Unknown
  Bacterial polypeptide expressing nucleotide sequence isolated from the Sargasso Sea
aatgaaaatctattatgatgaagatgccaatctagaaattatcaagaaccttaaagtagcgataattggctatggctcacaaggacatgcgcatgcaaataacttacatgattccggagtagatattacagttggtctcagagaaggatcagcttcttgggaaaaagcagaatctgctggtcttaaagtttcaagtgtagaagactcagttaaagactctgattttgtaatgattctggcgccagatgagtttcaaagtgatttatatacaaaaaaaatagagccaaacctaaagcagggagtcattttggcttttgcacatggatttaatattcattttggtaagatcaaacctactaatgatattagtgtagtgatgattgctccaaaaggccctggacatactgtcagaagtacatatatttctggaggaggagtaccatcattaattgcaatatacagagattctatttctgcaaaagactataatgctaaagatgtttgctct

SEQ ID NO: 209288 - DNA, 349 bp, Unknown
  Bacterial polypeptide expressing nucleotide sequence isolated from the Sargasso Sea
ttttgaaactgtacatgaggtaaaattaattgttgatttaatctatgaaggtggaatcgccaatatgaattattctatctccaatactgctgagtatggtgaatatgtaactggtcctaaaattattaataaagaggaaacaaaaaaaaggatgaaggaagttttagaaaatattcaatctggtaattttactaaacaatggatggatgaatgtaaaaatggtcaaaaaaacttccttaaaacgagagaaaaacttgcagatcatccagtagaaaaagtaggtgctacattaagagcgatgatgccctggattagtaagaaaaagctagttgatagtgataaaaagtaa

SEQ ID NO: 209289 - DNA, 733 bp, Unknown
  Bacterial polypeptide expressing nucleotide sequence isolated from the Sargasso Sea
agtaagagaaggaacgagtattgcgtttgctcatggattaaatgttcattacgatttaattaaagcaagaaaagatctagatgtatttatggttgcaccaaaaggaccaggacatttagttagaagtgaatatgaaaaaggtggtggagttccatgtttatttgcagttcatcaaaatggttcaggaaaggcaagagatcttgctttatcttatgcatcagctgtaggtggtggaagatctggaattattgagacaacatttaaagatgaagttgaaaccgatttatttggtgaacaaacggttttatgtggtggtttggtagaattaattaaaaacggttatgaaactttgaccgaagcaggttatgaacctgagatggcatattttgaaacagttcatgaggttaaattaattgtagatttaatttatgaaggggggattgctaatatgaattattctatttcaaatactgctgagtatggtgaataccaatcaggacccagaataataaataaagaagaaactaagaaaagaatgaaagaagttttggcagatatacagtcaggtaaattcacaaaagagtggatggatgaatgtaaaaatggtcaaaagaattttcttgcaactagagctaaattagcagagcattcagtagaaaaagttggagctgaacttagagcaatgatgccttggattgcaaagaaaaaattagtagatagcgataaaagttaa

SEQ ID NO: 209290 - DNA, 694 bp, Unknown
  Bacterial polypeptide expressing nucleotide sequence isolated from the Sargasso Sea
aatgttttatgaaaaagatactgatgtaaatttgattaaagataaaaaaatagcaatatttggttatggaagccaaggtcatgcccacgcattaaatttaaaagatagtggagtgaaagaagtagttgttgctttgagagatggatcttcaagtattcctaaagcagaatcaaaaggattaaaagtaatgaatttatccgatgcagctgagtgggcagatgttgttatggttttaacacctgatgagttacaagcgtctatttataaaaatcatattgaacaaagagtaagggaaggttcatcaatagccttcgcacatggtttaaatattcattatgatttgattaaagctagaaaagatttggatgtttttatggttgcacctaaaggacctggtcatttagtaagaagtgaatatgaaaaaggtggtggagtaccatgtttatttgctgtacaccaaaatggttctggtaaagcaagagatttagctatgtcttatgcttcagcagttggaggtggtagatcaggaattattgaaactacatttaaagatgaagttgaaactgatttatttggtgaacaaactgttctttgtggtggattagtagaattaattaaaaatggatacgaaacattagttgaagctggctatgagcctgaaatggcttactttgaaactgttcatgaagtaaaa

SEQ ID NO: 209291 - DNA, 697 bp, Unknown
  Bacterial polypeptide expressing nucleotide sequence isolated from the Sargasso Sea
atgagagtatattacgatagagatgcagacttaaacttaataaaagataaaaaaatatcaattgtaggatatggaagtcaaggtcatgcacatgcaatgaacttgagagattctggaatagaaaatgtttcaattgcattaagagaaggttcaaattcaagaagtaaagcagaacaagctaatttcaaagtaatgacccctgcagaggctgcaagctgggctgatgtaattatgatgcttacacctgatgaacttcaatctgaaatctacaaaaatgacatagctgaaaatattaaagaggggacaacaattgcatttgctcatggattaaatattcactttgatttaattaaacctaaggaaggtatagatgtaataatggttgcacctaaaggtcctggtcatacagtaagagctgaatatgcaagaggagctggagtaccttgcttagttgctgttgataaaaatccttcaggtaatgctcttgaaataggtattgcttacgcatctgcaattgggggcggacgtgctggaattatagaaactacatttaaagaagaatgtgaaacagatctttttggagaacaatctgttttatgtggaggcttaacacatttaattttagcaggttatgaaactcttgttgaagcaggatatgctcctgaaatggcatattttgaatgtcttcatgaagtta

SEQ ID NO: 209292 - DNA, 744 bp, Unknown
  Bacterial polypeptide expressing nucleotide sequence isolated from the Sargasso Sea
gcaacaaaagatgcagaccttgtgatgattcttgctcctgatgagtttcagaaaggaatttatgagaagagtatcaaacctaatttaaaaaacgactcaattttagcctttgctcatggatttaatattcattttaaaaaaattattcctgatgaaaccaacagcgttatcatgattgcaccaaaaggaccaggccatactgtaagaagtacttatttaaaaggcggaggtgttccatctttaattgctatatatcaagattcaaccaatacaagtgactctagcgccaaggaagttgctctttcttatgctaaagctaacggaggcactagggctggagttttagaaacaacatttaaagaagaaacagaaacagatctttttggagagcaagctgtattatgtggaggtatgacagccctaataaaagctggatatgaaacattggttgaggcaggctacagtcctgaaatggcttattttgagtgtcttcatgaaacaaaattaatcacagatttgattcaagaaggtgggattgcaaatatgcattattctatttcaaatacagctgagtatggcgattatttgagtgggccaaaaattattactgagaaaactaaggaagcaatgaaagaggttttggacaatatacaatctggaaattttgcagatgaattcttggatgattgcaggcaaagtaatgatggatctggaggaccttttatgaaatcaaaaagagaatct

SEQ ID NO: 209293 - DNA, 868 bp, Unknown
  Bacterial polypeptide expressing nucleotide sequence isolated from the Sargasso Sea
atataagcgcgcaaccagtaacggatttaccgttggtacttaccaacaactcattccagaagcagacgtagtatataacttaacacctgataagcagcacgctagcgtagtcgaagccgttatgccgcttatgaaagaaggtgcaacgctaggttactctcacggtttcaatatcgttgaagaagggcagcaaattcgtagcgatatcacagtaatcatgtgtgcgccgaaaagcccgggttctgaagtacgtgaagaatataagcgtggcttcggtgtaccaactctgattgctgtacacccagaaaacgaccctgaaggtaaaggttgggatcaggccaaagcacttgcaagtgcaacgggcggtgaccgcgcaggtgtacttgagtcatcatttgtggctgaagttaaatctgacctcatgggcgagcaaaccattttgtgtggtatgcaacaagttgcagcggtacttgcgtttgaaaaaatggttgatgacggtatcgagccaggatacgcaggtgcacttattcagtacggcctagaagctataactgaagcacttaagattggcggtgtgactaacatgatggaccgtctttcaaaccctgcgaaagtgaaagcgtttgagctttctgagcagttaactgatttacttcgtccgctatttgaaaagcaccaagacgacatcatcagcggtgagttctctcgcaccatgatggaagactgggcgaatggcgatgcgaacctgcttaagtggcgtgaagaaaccggtgaaaccgcgtttgaaaacgcaccggcttatgaaggtgaaattagtgaacaagaattctttgaccacggcatcttactggttgccatgatcaagtgc

SEQ ID NO: 209294 - DNA, 580 bp, Unknown
  Bacterial polypeptide expressing nucleotide sequence isolated from the Sargasso Sea
atgaaaatctattatgatgaagatgccaatctagaaattatcaagaaccttaaagtagcgataattggctatggctctcaaggacatgcgcatgcaaataacttacatgattccggagtagatattacagttggtctcagagaaggatcagcttcttgggaaaaagcagaatctgctggtctaaaagtttcaagtgtagaagactcagtcaaagactctgattttgtaatgattctggcaccagatgagtttcaaagtgatttgtatacaaaaaaaatagagccaaacctaaagcagggagccattttggcttttgcacatggatttaatattcattttggtaagatcaaacctactgatgatattagcgtagtgatgattgctccaaaaggccctggacatactgttagaagtacatatatgtctggaggaggagtaccatcattaattgcaatatacagagattctatttctgcaaaagactttaatgctaaagatgttgctctttcttatgcaaaagcaaatggcggaactagggcaggtgttctagagacttcttttagagaagaaaccgaaacag

SEQ ID NO: 209295 - DNA, 487 bp, Unknown
  Bacterial polypeptide expressing nucleotide sequence isolated from the Sargasso Sea
gatgtattatgaaaaagacactgatgtgaatttaattaaagataagaaagtagcaatttttggttatggtagccaaggacatgcgcatgctttgaatctaagagatagtggggttaaagaagtagtagtagcactaagagaagggtcttcaagtgctgcaaaagctgaatcaaaaggtttaaaagttatgaatttgtctgatgctgctgaatgggcggatgtagttatgatattaaccccagatgaattgcaagcagcaatttacaaaaaccatattgatcaaagagttagaccaggaacttcaattgcttttgcgcacggtctaaatattcattatgatttaattaatgcaagaaaggatctagatgtttttatggttgcccccaaaggtcctgggcatttagttagaagtgaatttgaaaaaggtggaggggtaccttgtttatttgctgttcatcaaaatggatctggaaaagctagagaactt

SEQ ID NO: 209296 - DNA, 456 bp, Unknown
  Bacterial polypeptide expressing nucleotide sequence isolated from the Sargasso Sea
aatggttacaaaaattatatatgatgattcgatagaccaagatttaattaagtcaaaaaaagttactgtaattggatttggcagccaaggtcatgcccacgcacttaatctacatgaatcaggtgtggatgttactgttggattaagagagtcttctgaatcctttaaaagagcatctgatatgggattaaaagttaagaatgtagaagatgcgacttctggagcagatgtagttatgcttctattgcccgatcagctcatggcagatatatataacagtgatattgcaccgcatatgaaagatggctctacattgttgtttgcacatggatttaatatacattttggtgaaataattcctcgtgaagatatatctataggtatggtggcccctaaagggcctggtcacttacttagaaggacttatgaagaaaattctggaatgccttgtctagt

SEQ ID NO: 209297 - DNA, 830 bp, Unknown
  Bacterial polypeptide expressing nucleotide sequence isolated from the Sargasso Sea
tgatttatcagacgcagctgctggggcagatgttgtaatgattttaactccagatgaattacaagcagaaatttacaaaaatcatatagagcaaagagttagagaaggcacgagtgttgcttttgctcatggtttaaatgttcactatgatttaattaaagcaagaaaagatttagatgtatttatggttgctccaaaaggacctggccacttagtaagaagtgagtatgaaaaaggtggtggagttccatgtttgtttgcagttcatcaagatggatctggtaaagcaagagatctagctttatcttatgcttcagctgtaggtggaggaagatcaggtatcattgaaactacttttaaagacgaagttgaaacagatttatttggtgagcaaactgttttatgtggtggtttagttgaactaattaaaaatggatatgaaactttagttgaagcagggtatgaaccagaaatggcatattttgaaacagttcatgaagttaaattaattgttgatttgatttatgaaggtggaattgcaaatatgaactattcaatttcaaatacagccgaatatggcgagtatcaatctggtccaagaattatcaataaggaagaaactaagaaaagaatgaaagaagttttagccgatatccaatcaggtaaatttacaaaagaatggatgaatgaatgcaaaactggtcaaaaaaatttcttagcaaccagggcaaaattagccgaacactcagtagaaaaagttggtgcagaactaagagcaatgatgccctggattagtaagaaaaaattagttgatagcgataaaagttaat

SEQ ID NO: 209298 - DNA, 359 bp, Unknown
  Bacterial polypeptide expressing nucleotide sequence isolated from the Sargasso Sea
attgcaagtttattacgacaaagatgcagacctttctattattcagaaaatgaaagtggttattgttgggtatggttcacaaggacatgctcatgcgaataacttaagagattctggtgttaacaatgtggtagtgggattacgcaaagggtcaggatcttggagaaaagctgagaatgccggctttgaggtacaagaagtcgcttcggcggtagaaggagctgatttggtcatgatcctcgtacctgacgagttgcagcccgctctttatcgggatgatatcgagcccaatattaagcaaggtgcagcaatcgcgtttgctcatggttttaatatccattttgagctaatcgaaccaa

SEQ ID NO: 209299 - DNA, 706 bp, Unknown
  Bacterial polypeptide expressing nucleotide sequence isolated from the Sargasso Sea
aatgttttatgaaaaagatacagacgtaaacttaattaaaagtaagaaaattgcaatttttggttatggaagccaaggccacgcgcatgctcttaatcttaaagatagtggtgtaaaagaagtagtagttgctttaagagaaggttcgtctagcaaaacaaaagctgagtcaaaaggattaaaagttatgaatttatctgatgctgctgaatgggcagatgttgttatgatattaactccggatgaactccaggcaacaatttataaaaatcatatagaacaaagagttaaagaaggaacttctatcgcttttgcgcatggtttaaatattcattatgacttaattaatgctagaaaagatttagatgtttttatggttgctccaaaaggtcctggacatttagttagaagtgaatttgaaaaaggtggtggagtaccatgtttgtttgctgtacaccaaaatggatctggtaaggcaagagatttagcaatgtcttatgcatcagcagttggtggtggaagatctgggattatagaaactacatttaaggatgaagttgaaacagatttatttggtgagcaaactgtactttgtggaggattagttgaactaattaaaaatggatatgaaactttggttgaagcaggctacgaacctgaaatggcatattttgaaacagtccatgaagtaaaattaattgtttga

SEQ ID NO: 209300 - DNA, 958 bp, Unknown
  Bacterial polypeptide expressing nucleotide sequence isolated from the Sargasso Sea
gatgttttatgaaaaagatactgatccaaatctaattaagaataagaaaattgctattttcgggtatggtagtcaaggacatgctcatgccttaaatttaaaagatagcggggttaaagaagtcgtcgtagcactaagagatgggtctactagtaaagcaaaagctgagtcaaaaggtttaaaagttatgaatttatctgatgccgctgaatgggcagacgtgattatggttttaacacctgatgaacttcaagcatcaatttataaaaatcatattgaacaaagggtaaaagagggaacttcaattgcttttgcacatggattaaatgttcattatgatttaattaaagctagaaaagatttagatgtttttatggttgcgccaaaaggcccaggacatttagtaagaagtgaattcgaaaaaggtgggggagttccatgtctttttgcagttcatcaaaacggatcgggtaaagcaagagatttagcaatgtcatatgcttcagcgattggtggaggtcgatctggtattattgaaacaacatttaaagatgaagtagaaacagatttatttggagagcaaactgttttatgtgggggattagttgaactaataaaaaatggttatgaaactctggttgaggctggctatgaacctgagatggcgtactttgaaactgttcacgaagtaaaattgattgtagatttaatttatgaaggtggaattgcaaatatgaattattcaatttctaatactgctgaatatggagaatatatgtctggccctagaattataaacaaagaagaaacaaaaaaaagaatgaaagaagttcttcaagatattcaatcaggtaaatttaccaagcagtggatggatgaatgcaaaaatggccagaaaaattttcttaaaacaagagagaaacttgctgaacatccagttgaaaaagtaggtgctaaa

SEQ ID NO: 209301 - DNA, 646 bp, Unknown
  Bacterial polypeptide expressing nucleotide sequence isolated from the Sargasso Sea
ttatggttgctccaaaggacctggtcacttagttagaagtgaatatgaaaaaggaggtggagtgccttgtttatttgctgttcatcaaaatggttcaggaaaggcaagagacttagctttatcttatgcttcagcagttggtggaggaagatcaggaattattgaaaccacattcaaagacgaagttgaaacagatttattcggtgaacaaacagtactttgtggaggtttagttgaattaattaaaaatggttatgaaactttagttgaagctggatatgaaccagagatggcatattttgagacagttcatgaagttaaattgattgttgatttaatttatgaaggcggaattgcgaatatgaattattctatttcgaatactgctgaatatggtgaatatcaatctggaccaagagtagttaacaaagaagaaactaaaaaaagaatgaaagaagttttggctgaaattcaatctggaaaattcactaaagagtggatggatgaatgcaaaaatggtcaaaaaaacttccttgctacgagagcgaaattagccgagcaccctgttgaaaaagttggtgcagaactaagagctatgatgccttggataggtaagaaaaaattagttgatagcgataaaagttaa

SEQ ID NO: 209302 - DNA, 634 bp, Unknown
  Bacterial polypeptide expressing nucleotide sequence isolated from the Sargasso Sea
aagggcccaggacatttggtaagaagtgaatttgaaaaaggtggaggagttccttgtttattcgcagtacatcaaaatggatcaggtaaagcaagagagttagctatgtcatatgcttctgctgtaggagggggaagatcaggaattatcgaaactacatttaaagatgaagtagaaactgatttgtttggtgaacaaactgttctttgtggaggtttagttgagctaattaaaaatggatatgagactttggttgaagcgggatatgaaccagaaatggcatattttgaaacagttcacgaagttaaattgattgttgatttaatttatgaaggtggaattgcaaacatgaattattcaatttctaatactgctgaatatggtgagtatgtaacaggaccaaaaattataaaaaaagaagaaactaaaaaaagaatgaaggaagtattggcagatattcaatcaggtaaatttaccaaagattggatggatgaatgcaaaaatggtcaaaagaattttttaaaaactagagaaaaattggccgaacatccagttgaaaaagtaggagcaggacttagagctcttatgccatggattgctaaaaagaagttaatagatagcgataaaaattagt

SEQ ID NO: 209303 - DNA, 526 bp, Unknown
  Bacterial polypeptide expressing nucleotide sequence isolated from the Sargasso Sea
aatgagagtttattatgatagagatgcagatattaatttaattaaagataaaaaaattgttattgtaggttatggcagtcaaggacatgctcatgctatgaatttaagagactctggaattgaagatgttgctattgctttgagagaaggttctccatcgagaaaaaaagctgagaatgctggatttaaagtaatgacaccttccgaatctgcttcatgggcagatgttattatgatgttaactccagatgaattacaatcagagatttataataatgaaattgcagcaaatataaaagatggtacagcattagcttttgctcacggattaaatatacattttgatttaataaaaccaaatgcaaatatagatgtgattatgatggctccaaaaggccctggtcatacagttagagcagaatatgttagaggtgctggagttccatgtcttgttgcagtcaatcagaatccatctggaaatgctctagaaattgctatagcttattcttcagctataggtggtggt

SEQ ID NO: 209304 - DNA, 550 bp, Unknown
  Bacterial polypeptide expressing nucleotide sequence isolated from the Sargasso Sea
ccagcattgtttgcagtagagcaggattcttctggaagtgcaagatcattggcgatggcttacgctaaagggatggcgggaacgagagctgggattcttgaaacaaacttcaaagaagaaacagaaactgatttatttggcgaacaagctgttttatgcggaggattatcagaactcgtcaaatcaggcttcgaaactcttgtagaggcgggatatcagcccgaacttgcttacttcgaatgcctacatgaagttaaacttattgttgatttaatggtgaaaggaggcttatcacaaatgagagattccatttcaaatactgctgaatatggagattatgtaagtggtaaaagacttatcaatagtgatacaaagaaagaaatgcagaaaattctaaaagatattcaagatggaactttcgctaagaattttgtggaagaatgcgataaaaataaacccttaatgacaaaattaagagaagagaactcaaaacatgaaattgagaaagtaggtaaaggtctacgctcgatgttcagttggctgaaataaa

SEQ ID NO: 209305 - DNA, 526 bp, Unknown
  Bacterial polypeptide expressing nucleotide sequence isolated from the Sargasso Sea
ttactgctctgcgattggcggaggacgctcaggaataattgaaacaaattttcgagaagagtgtgaaactgacctatttggagaacaagccgtactttgtggtgggctaattgagttaattcgctgtggcttcgaaacacttgttgaggctggatatgctcctgaaatggcctattgggagtgtcttcatgaggtcaaattaattgttgaactaatatacgagggaggcatggccaatatggataactccatacctaatacagcggaatatggccagtatgtaacaggccctcgtatactacctaatgaacagacaaaaaagggaatgaagggagtcctctccgaaatacaaaaagggaacttcgtccgcgactccatgctagagaatgccgtaggtcagccgacaataaaagctgcgcgtcgggcaaacgaagagcataagatagaagcagtgggagaaaaactgcggggaatgatgccctggataccggctgggaaaatggtcgacaaagacaaaaacaaataa

SEQ ID NO: 209306 - DNA, 772 bp, Unknown
  Bacterial polypeptide expressing nucleotide sequence isolated from the Sargasso Sea
tgaacttcaatcagaaatttacaaaaatcatattgaacaaagaatgaaagaaggaacaagtttagcgtttgctcatggtttaaatattcattttgatttaataaatgctaggaaagacttagatgtttttatggtagcccctaaaggaccaggtcatacagttagaagcgaatatcaaaaaggtggtggagttccttgtttgatggctgttcataaagatagttcagggaaagcaaaagatttagctttatcatatgcttcagccgttggtggaggaaaggctggcattatagaaactacttttaaagatgaatgcgaaacagatttatttggtgagcaaactgttttgtgtggtggattagtggaactaattaaaaatggtttcgaaactttaactgaagcagggtatcctcctgaaatggcatactttgaaactcttcatgaggtaaaattaattgttgaccttatttacgagggcggaattgcgaatatgaactattctatctcgaatactgctgagtatggtgaatacgtctctggaaaaagaattgtagataataagactaaagaaaagatgagagaggttcttaaagacattcaatctggaaaattcaccaaacaatggatggatgagcacaaatcaggtcaaaaaaacttcctaaaaatgaggcaagatttggcaaaacatcctattgaaaaggttggaaaagagcttcgcgcaatgatgccgtggattggcaaaaataagctagtcgataaagataaaaattaa

SEQ ID NO: 209307 - DNA, 881 bp, Unknown
  Bacterial polypeptide expressing nucleotide sequence isolated from the Sargasso Sea
agatagtggtgttaaagaagttgtggtagccttgagagaaggttcatcaagtattaaaaaagctgagtctaaaggtttaaaagtaatgaatttatcagatgctgcagaatgggcagatgttgttatgatcttaacgccagacgaattacaagcatcaatatataaaaatcatatagagcaacgcgttaaagaaggaacatctattgcatttgctcacggtttaaatgttcactatgatcttattaaagcaagaaaagatttagatgtatttatggttgcaccaaagggacctggacatttagtaagaagtgaatatgaaaaaggtggtggtgtaccttgtttatttgctgttcaccaagatggctctggtaaagcaagagatttagcaatgtcatatgcgtcagctgttggtggaggtagatctggaataattgaaactacatttaaagatgaagtagaaactgatctatttggagaacaaactgtattatgtggtgggcttgttgaattaattaaaaatggatacgaaactttagttgaagctggatatgaaccagaaatggcttattttgaaactgttcacgaagtgaaactgattgtggatttaatatatgaaggtggaattgctaatatgaattattcaatttcaaatacagcagagtatggcgagtatcagtcaggtccaagaataattaaaaaagatgagactaaacaaagaatgaaagaagtcttagcagaaattcaatctggtaaatttacaaaagaatggatggaagaatgcaaaaatggtcaaaaaaactttcttgcaactagagctaaattagcagaacactctgttgaaaaagtaggcgctgaacttcgggctatgatgccttggattt

SEQ ID NO: 209308 - DNA, 515 bp, Unknown
  Bacterial polypeptide expressing nucleotide sequence isolated from the Sargasso Sea
aatgacacaactcttttacgacacagatgcagatctaagtcttttaaataataaaacaatagcgattattggatatggatcacaaggtcatgcacatgccttaaatcttaaagatagcggtatggatgtaattgttggattatataaaggaagtaagtctgaaagcaaagccattagcgatggtctacaagtctttagcgtttctgaagcttgcgaaaaagcagactggattatgattctactccccgatgagtttcagaaagatgtttaccttaaggaaatagaaccaaacttaaaagaaggaaagatactaagttttgctcacggcttcaatataagattcggacttattaaacctcctagttttgtggatgttgtaatgattgccccaaaaggaccaggacacactgttcgttgggaatatcagaacggtcaaggagttcctgcactctttgcagttgagcaggattcatccggaagtgcaagatcattggcaatggcttacgccaaaggaa

SEQ ID NO: 209309 - DNA, 687 bp, Unknown
  Bacterial polypeptide expressing nucleotide sequence isolated from the Sargasso Sea
cattcattttgattataaaaagcaagaaaagatttagatgtgttatggttgctcctaaaggacccggccatacagtgagaagtgaatatcaaaaaggtggaggtgttccttgcttaatggcaatacataaagacagctcaggcaaagcaaaagatttagctctttcttatgcagctgcagtagggggaggcaaagctggcataatagaaacaacttttaaggatgagtgcgaaacagatttatttggcgaacagactgttttatgtggtggtttagttgagttaatcaaaaatggtttcgaaactttgactgaggcaggttatccacctgaaatggcttacttcgaaactcttcacgaagtaaaacttattgtagatttaatttatgagggtggaattgctaatatgaattactctatatctaacacagctgaatatggagagtatgtatcaggaaaaagagtggtagatagtacaactaaagaaaaaatgaaagccgttttaaaagatattcaatctggtaaatttaccaaagaatggatgaaagagtgtgaaaacggacaaaaaaattttactaaaatgagagaaaatttatctaaacatcctattgaaaaagttggtaaggacctaagagctatgatgccgtggatcgcgaagaataaactggtcgataaagataagaattaac

SEQ ID NO: 209310 - DNA, 742 bp, Unknown
  Bacterial polypeptide expressing nucleotide sequence isolated from the Sargasso Sea
atgagagtttattatgatagagatgctgatttaaatctaattaaagataaaaaaatagcgattgtgggttatggtagtcaaggacatgctcatgcaatgaatttgagggatactggtctaacaaatgttgcaatagctttaagagaaggatctcaatctagaactaaagccgaacaagcaaattttaaagttatgactccaagtgaagcagcatcatgggctgatatattgatgatgttaactcctgatgaattacaatctgaaatttattcaaatgatattgcaagtaatattaaagaaggaacaacaatagcttttgcgcatgggttaaatattcactttgatttaattaaacctgctgaaggaatagatgttataatggttgctccaaaaggccctggtcatactgtgagagctgaatatgcaagaggagctggagtcccttgtttagttgcagtggataaaaatccatctggaaacgcacttgaaattggaattgcttatgcttctgcaataggtggcggtagagctggtattattgaaactacttttaaggaagagtgtgaaactgatttatttggtgaacaatctgttttatgtggtggattaactcatttgattctagctggatatgagactctagtcgaagcaggatatgcccctgagatggcatattttgaatgtttgcatgaagtaaagcttatagttgatcttctttacgaaggtggcatggcaaatatga

SEQ ID NO: 209311 - DNA, 322 bp, Unknown
  Bacterial polypeptide expressing nucleotide sequence isolated from the Sargasso Sea
attgtagatttaatttacgaaggtggaattgccaacatgaattattctatttctaacactgctgagtacggggaatacatgtcgggccctaagattataaataaagaagaaacaaaaaaaagaatgaaagaagttcttcaagatattcagtcaggaaaatttactaagcagtggatggatgaatgcaaaaatggtcagaaaaattttctaaaaacaagagagaaacttgcagaacatccggttgaaaaagtaggtgcaaaattaagagctatgatgccttggatttcaaaaaagaaactagtagacagcgataagaattaat

SEQ ID NO: 209312 - DNA, 454 bp, Unknown
  Bacterial polypeptide expressing nucleotide sequence isolated from the Sargasso Sea
aatgttttatgaaaaagatacagatgtaaatctcattaaagataaaaaaattgcaatttttggctatgggagtcaaggccatgcccatgcattaaacctcaaagatagtggtgttaaagaagtcgttgtcgcattgagagaaggctcttcaagtattccaaaagcacaatcaaaaggtctaaaagttatgaatttgtctgacgctgctgagtgggcagatgttgtgatgatacttactccagatgagttacaagcttcaatttataaaaatcatattgaacaaagagtaagagaaggaacttcaattgcttttgcacatggattaaatgttcattatgatttaattaaagcaagaaaagacctagatgtttttatggttgctccaaaaggtcctggtcatttagtaagaagtgaatatgaaaaaggtggtggtgttccatgtttgtttgctgtt

SEQ ID NO: 209313 - DNA, 484 bp, Unknown
  Bacterial polypeptide expressing nucleotide sequence isolated from the Sargasso Sea
aatgtattatgaaaaagacacagatgtaaacttgataaaagaaaagaaagttgcaatttttgggtatggtagtcaaggacatgcgcatgcattaaacttaagagatagtggtgttaaggaagtagttgtggcacttagagaggggtcagctagcgctgcaaaagcagaatcaaaaggactaaaagtaatgaatttatcagatgcttctgagtgggcagatatagttatgattttaactccagatgaattgcaggcaacaatttacaaaaatcatattgaacaaagagtaaaagaaggaacttcaattgcttttgctcatggattaaatattcattacgatttaattaaagcaagaaaagacttagatgtttttatggttgcacctaaaggcccaggtcacttagttagaagtgaatttgaaaaaggaggtggtgtaccttgtctgtttgcagtacaccaaaatggatcaggaaaagctagagag

SEQ ID NO: 209314 - DNA, 532 bp, Unknown
  Bacterial polypeptide expressing nucleotide sequence isolated from the Sargasso Sea
ggaatgatggatgattggaaaaatgatgataaaaaattactcacttggcgagaggcaactgcggaaacatcttttgagaagtctactgccgctgagttatctataagcgagcaggaatactatgataatggaatactcatggtagcgatggttaaagctggtgttgaacttgcgtttgaaaccatgacagccagcggtgtaattgccgaatcagcatactacgaatccctccatgaggtcccgctaatagcaaatttgatagggcgcaaaaagctttacgaaatgaacaaagttatctcagacacagctgaatatggttgctatttattctctcatgaatgtattcctctactagaaggtttcatgagcaatattaacaccgacgtaatcggcaaaggactgcaattaaatgattctggatcagacaatgcggaattaatagcagccaatgaagctattcggtctcatccaattgaggtcgtgggcaaaaaactacgaatgcacatgacctcaatgaaaaaagccatttaac

SEQ ID NO: 209315 - DNA, 652 bp, Unknown
  Bacterial polypeptide expressing nucleotide sequence isolated from the Sargasso Sea
tcccatgatgtgttcatgattgcacctaaaagcccaggacatttagtaagatcaacttttgtcaatggtaaaggagtacccactttaatagctatacataataatacgtctggcaaagctaaggatattgctttggcatatgcatctgcaattggtggagggagagccggaataatcgagacagactttaaagaggagactgagacagacttatttggagaacaagctgttctatgtggcggtgtgacagctcttatacttgctggtttcgagacactagtagatgctggctatgctcctgagatggcatactttgagtgcctaaatgagctaaaactaattgttgatctaatgtacgaaggaggtatgacagatatgagatattctatatctaatactgcagaatatggtgatttaacaaaaggtccttttttaattgatgatcacgttaaggctaagatgaaattagtattagctgatgttcaaaacgggaaatttgcaaatgatttcgtttctgaaataaagtctggttctccagaattcaatagattaagaaaagagggatctgaacatttaatagaaagcactggaaaaaaacttcgtagcatgatgtcatggatggataaggagaaattggtaggtaacaaataag

SEQ ID NO: 209316 - DNA, 427 bp, Unknown
  Bacterial polypeptide expressing nucleotide sequence isolated from the Sargasso Sea
ttgtggaggattagtagaattaattaaaaatggatatgaaactttggttgaggctgggtacgaacctgagatggcatattttgaatgcttacatgaggtaaaattaattgttgatttaatttatgaaggtggaattgcaaatatgaattattctatttctaacactgcagaatacggagagtatgtttcaggccctaggatagtaaataaagaggaaactaaaaaaagaatgaaagaggttcttaacgacattcaatcaggtaaatttacaaaacaatggatggatgagtgtaaaaatggacaaaaaaattttttaaaaacaagagaagatcttgcaaagcattcaatcgagactgttggctctaaactaagagctatgatgccatggattggaaagaaaaaattagttgatagtgacaaaggttaa

SEQ ID NO: 209317 - DNA, 808 bp, Unknown
  Bacterial polypeptide expressing nucleotide sequence isolated from the Sargasso Sea
gaaaaaaacatctaaatctattgataaagcaaagaaggatggatttaaggttttaaatgttgacgaagcgtcgaaatgggctgatgtttgtatggtactcgtaccagacgagttacaggcagatttatatgaggattttcttgataaaaatttaaaaaaaggcgcatgtcttttatttgctcatggtctttccattcactttcaattaataaaggctagatctgatttagatgtgtttatgattgctccaaaaggtcctggacacactgttagaggacaatatgtatctggcggaggtgttccttgtttacttgctatccatcaagatgcttcaaaaaatgcacttgaacttggattatcttatgcatctgctatcggaggaggtagatctggaataatacaaacaactttcaaagaggaatgcgaaacagatttatttggagaacagtcagttttatgcggtggtttaactgcattaattcaagcagggtttgaaacacttgtagaggcaggatattcacctgagatggcttattttgaatgtcttcatgaagtcaagcttatcgtagatttaatttatgagggaggaattgcaaatatgagatattcaatctctaatacagctgaatacggagatttaactcgtggacctcgaattattgatgagaacgttaaaaaagaaatgaaaaaagtattaaatgagattcaatctggaaagttcgtaagagactggatacttgaatgtaaatcaggacaattaaattttaaagcagaaaaaaggattcaaaatcaaaaacaaattgaagtt

SEQ ID NO: 209318 - DNA, 844 bp, Unknown
  Bacterial polypeptide expressing nucleotide sequence isolated from the Sargasso Sea
aatgagcacagcaactgcgcaagcggcgaatagtgacgcaacaaaaacgccacttagcgtttactacgataaggattgtaatatcgaactgatcaagggcaaaaatgttgccatcatcggttacggttcacaaggtcacgcgcatgcgctgaacctaaaagacagcggcgttgctaacgtaacaatcggtctgcgtgaaggatcatcttctgcgcctaaggctgaagcagctggttttgacgtaaaaacacccgctgatgcaacggctgaggcagatgttgttatgatcttggttcctgacgagcttcaggctgatctttaccgcgatcacatcgaaccacaaatcaaacaaggcgctgcgcttatgttcgcacacggtttgaacgtacatttcggtttgatcaaaccacgcgctgacttggatgtattcatggttgcgccaaaaggcccaggccacactgtacgcggcgaatttgaaaaaggcggcggcgttcctgcattgatcgcaatttaccaagacgcaacaggcaacgcgaaagagcttgctttgtcttatgcttctgctgttggcggtggtcgcagtggtatcatcgaaacaacattcaaagacgagtgtgaaactgacctgtttggcgagcaagctgtcctttgcggcggtattgaagagcttatcaaggcaggttacgaaacattggttgaggcaggctacccagaagaaatggcatatttcgaatgcttgcacgaaacaaagttgatcgttgacctaatctacgaagccggcatcagcaacatgaactactctgtttcaaacacagccgaattcggcggttatgtatctgggtcc

SEQ ID NO: 209319 - DNA, 944 bp, Unknown
  Bacterial polypeptide expressing nucleotide sequence isolated from the Sargasso Sea
tcaaggtcatgcccatgctttaaatctcaaagatagtggtgtaaaagatgtggtaattgctttgagagaaaattcttcctctattaaaaaagcagaaaaagatgggttcaaagtccaaagtgtagacgaggcgtcaaaatgggctgacgtttgcatggtattggtaccagatgaattacaagcagatttatataatgattttttggaaaagaatttaaagaaaggtgcctgtttactctttgctcatgggctatcaatacattttcagttaataacacccagaacggatcttgatgtttttatgatagctcctaagggaccaggacacactgtaagaggtcaatacctctcaggcgcaggggttccttgtcttattgcaattcatcaagatgcttccagaaatgcactagaattaggtctctcctatgcatcagcaattggaggagggcgttctggtattatccaaacgacttttaaggaggaatgtgaaacagatttatttggtgaacaatctgttttgtgtggtggtttaacagctttaatccaagctggttttgaaacattagttgaggctggatattcaccagaaatggcatacttcgaatgccttcacgaagtaaaacttatagttgatttaatttatgaaggtggaatatcaaatatgagatattctatttcaaataccgcagagtatggagatttaactagagggccaagaataataaataaaaatgtaaaaaaagagatgaaaaaggtattagacgagattcaaaccggtaagtttgttagagactggatattggaatgtaaatcaggtcaacttaacttcaaagcagaaaagaggattcaagagaacaaagaaattgaaatagttggagaaaaactaaggaaaatgatgccttggattagttcaaataaactggtgaataaaaataaaaattaat

SEQ ID NO: 209320 - DNA, 467 bp, Unknown
  Bacterial polypeptide expressing nucleotide sequence isolated from the Sargasso Sea
agagtgtgaaacagacctatttggagaacaagcagtactgtgtggtgggctaattgagctaattcgttgtggcttcgaaacacttgttgaggctggatatgcccctgaaatggcctattttgagtgtcttcatgaggtcaaattaattgtcgatttaatctacgaaggaggcattgccaatatggattactccatttcgaatactgctgaatatggccagtatgttacaggtcctcgtattctaccctatgaacagaccaaaaaggtaatgaagggagttctctccgatattcaaaaaggcaactttgttcgcgactttatgctagagaatgctgtaggtcagcctacaattaaagctgcgcgtcgtgcaaacgatgagcatatgattgaagaggttggagaaaaacttcgcggaatgatgccctggatatctgctgggaaaatggttgataaagacaaaaactaat

SEQ ID NO: 209321 - DNA, 433 bp, Unknown
  Bacterial polypeptide expressing nucleotide sequence isolated from the Sargasso Sea
agcagtcttatgtggaggcgccgcagctctagttcaggcaggattcgagactttggttgaagctggttatgctccagagatggcatattttgaatgtctccacgaattaaaacttatcgttgattttttctatgagggtggaattagtaatatgtggtataccgtttccaatactgctgaatatggcggtttaactagaggcgaacgcattatcactgaagatacgaaggaggagatgaaaaaaatacttgaagaaatccaaactggcaaattcgctcaggaatttgttagcgaaaatctagcgggagcgcccggcataaaagctatgcgtcgaattagccaacagcatccaatagaggatgtagggctgaaactaagagcgatgatgccatggatagaagaacataaattagtggataaggacgttaattag

SEQ ID NO: 209322 - DNA, 838 bp, Unknown
  Bacterial polypeptide expressing nucleotide sequence isolated from the Sargasso Sea
agtcaaggacacgcacacgcgttaaatttaaaagatagtggagtaaaagaagttgttgtggctttaagagatggctcatcaagcattgctaaagcagagtctaagggattaaaggtaatgaatttgtcagatgctgcagcttgggcagatgttttaatgatattaacaccggatgaattacaagctcaaatttataaaaatcatattgaacaaagagctaaagaaggaacaagtatagcttttgcacatggtcttaatgttcactatgatttaataaaagcaaggaaagatttagatgtatttatggttgctcctaagggtccaggtcatctagttagaagtgaatatgaaaaaggaggaggagttccatgtttgtttgctgttcatcaaaatggatcaggaaaagctagggacttagccttatcttatgcatcagctattggaggaggaagatctggtattattgaaacaacatttaaagatgaagttgaaacagatttatttggcgaacaaactgttttatgtggtggtttagtagaattaatgaaaaatggttatgaaacattagttgaggcaggttatgaaccagagatggcatattttgaaacagttcatgaggtaaaattaattgttgatttaatatatgaaggtggaatagcaaatatgaattattctatttcaaacactgctgaatatggcgaatatcaatctggtccaagaattgttaacaaagaacaaacgaagaagagaatgaaagaagttctctctgaaatacaatctggaaagtttacaaaagattggatggatgaatgtaagaatggtcaaaaaaacttctcgc

SEQ ID NO: 209323 - DNA, 702 bp, Unknown
  Bacterial polypeptide expressing nucleotide sequence isolated from the Sargasso Sea
catgaactactttaataccttacctcttcgtcttcaattagagcaactcggcaaatgccgtttcatggatcattccgaattcagcgatggcgtaaacaagctcaagggcgccaaaattgttatcgtaggctgcggagcacaaggtttaaatcaaggtctgaacatgagagatagtggtcttgatatagctttcaccttgagggatgaagcaatagcagaaaaacgggcatcatggaaaaacgccaccaaaaatggttttgaaacaggcacatatcaagaacttatcccatccgcagatctagtgctcaacttaacccccgacaagcaacactcatcagttgttaatcaagtgatgccattgatgaagcaaggctcttgcctagcctattctcatgggttcaatattgtcgaagaaggtatgcaaatcagagaagatataaccgtcatcatggtagcaccgaaatgtccaggcactgaagtaagggaggaatataagcgtgggttcggtgtgccgacactaatagcggtgcacgcagaaaatgatcctaatggagatggtcttgacatcgccaaagcatacgcagcggccaccggcggacatagagctggcgttttagagtcatcattcattgctgaggttaagtcagacttaatgggtgagcagactattctatgtggcatgttacaaactggatcattatt

SEQ ID NO: 209324 - DNA, 409 bp, Unknown
  Bacterial polypeptide expressing nucleotide sequence isolated from the Sargasso Sea
tggttacgaggtattagttgaagatggttatccacctgaaatggcgtatttcgaatgcttgcatgaagtgaaacttatagtagatcttatatacgaaggtggattagaaaatatgagatatagtatttctaatacagcagagtttggtgattatgtaagtggaccaaaagttgtaaattcagatgccaaagaagagatgagagctgtattgaagagaattcaatcaggtgaatttgctcaagaatttatgagcgattgcagagagagtaatgatggaaagggcggaccaaggatgaaggaatatcgtcaacaaacttcagaacactcgatagaaaaagtaggatctgaacttagagctatgatgccttggatagctcaaaacaaaattgtagataaagccaaaaattaa

SEQ ID NO: 209325 - DNA, 771 bp, Unknown
  Bacterial polypeptide expressing nucleotide sequence isolated from the Sargasso Sea
aatatcaagcatctttatttacagagtctatcgaaccttatcttaaagattctgctatgctggcttttgcacatggtttcaatatacattttggtcaaattaagccggacactaaacatgatgtattcatgattgcacctaaaagtccaggtcatcttgtaaggtcaacttttttgcaaggcaaaggtgttccaactttaatagctattcataatgataattctgggaaagctaaagatattgctcttgcatatgcttctgcaattggtggaggtagagccggcatcattgaaacagatttcaaagaggagactgaaacagatctctttggagaacaagctgtattatgtggtggagtcacagcgcttgttaaggctggttttgagacgcttgtagaggctgggtatgctccagaaatggcttattttgaatgtttaaatgaacttaaattaattgtagacttaatgtatgaaggcggcatgactgaaatgagatactctatatcaaatactgcagaatatggtgacctaacaaaaggaccatttttaatagatgatcatgttaaagagaagatgaagcttgttctagcagatgttcaaaatggaaaatttgctaacgactttgtaaatgagattaaaagtggttcaaaagaatttaacaaacttcgtaaagaaggatctgaacatcaaattgaagaaactggaaaaaaattaagaaatatgatgtcatggatgcaggatagtaaactagtcgatgaaaaaattaaatgat

SEQ ID NO: 209326 - DNA, 892 bp, Unknown
  Bacterial polypeptide expressing nucleotide sequence isolated from the Sargasso Sea
tcgttgctttagagatggttcagcaagtaaagcaaaagctgaatcaaaaggtttaaaggtaatgaacttatcagatgcagcagaatgggcagacgtttgtatgattttaactcctgatgaacttcaagcaacaatatataaaaatcatatcgagcaaagaataaaagaagggactagtttagcttttgcacacggattaaatattcattatgacttaattaaagcaagaaaagatttagatgtatttatggttgctcctaagggacctgggcatcttgtgagaagtgaatttgaaaaaggtggtggagttccttgtttgatggcagttcaccaagacggcacaggtaaagcaagagatttagctttatcgtatgcatctgctattggaggtggaagatctgggattattgaaacaacctttaaagatgaatgtgaaacagatttatttggagaacaaacagttctttgtggaggacttgtagaattaattaaaaatggttacgaaacattagttgaggcaggatatgaaccagagatggcatattttgaatgcttgcacgaggtaaaattaattgttgatcttatttatgaaggtgggattgctaacatgaattactcaatttcaaatacagcagagtatggtgagtatgtttcaggacctagaataataaataaagatgaaacaaagaaaaaaatgaaagaagtacttgcagacattcaatctggaaagtttactaaacaatggatggatgagtgcaaaaatggtcagaaaaattttctaaagaccagagaggaattagcaaaacactctatagaaacagttggtgcgaaactaagagctatgatgccttggattggtaagaagaaattagtggatagcgataagaagtaa

SEQ ID NO: 209327 - DNA, 643 bp, Unknown
  Bacterial polypeptide expressing nucleotide sequence isolated from the Sargasso Sea
aatgttatacgaaaaagatgctgatgtagatttaattaaatcgaaaaaagttgcaatatttggttacggaagccaggggcatgcccatgctttaaatttgaaggatagcggtgttaaagaagtagtagtagcacttagagatggatcaccaagcaaaaagaaagcggaagcacaaggtcttaaggttatgtctctttcagatgcagcagagtgggctgatattttaatgatgctgacacctgatgaattacaatctcaaatttataaaaatcatattgaacaaagaatgagagaaggaacaaccttagcttttgctcatggattaaatattcactttaacttaataaaggctagaaaagatttagatatttttatgatagcaccaaaaggtccggggcatttagtaagaagtgagtttcaaaaaggtggtggcgttccgtgtttgatggctattcaccaagacagttcgggtaaagcaaaagatttagcattatcatatgcaagcgctattggtggaggcaaatcaggaataattgaaacgacctttaaagacgaatgtgaaacagatttatttggagaacagagtgttttatgtggtggtttagttgaattaattaaaaacggttatgagactttagttgaa

SEQ ID NO: 209328 - DNA, 403 bp, Unknown
  Bacterial polypeptide expressing nucleotide sequence isolated from the Sargasso Sea
catgcaagtttattacgataaagatgcaaatttagagatcataaaagataaaaaagtagtgatagttggttatggttcccagggccatgctcatgccaataatctcaaagattctggagggaatgtaacagttgcactgagaaaagactctgcctcttggacaaaggctgaagatgctggactcaatgtgcaagaagtagctgaagctgttaaagatgcagatttggtgatgattttgatgccagatgaacttcagtcagcgacttataaaagtgaaattgagaataatattaaggaaggagctgttcttgcttttgctcatggattcaatattcatttcgatatgatatctccaagggatgaccttgacgtaatcatggtcgcaccaaaaggaccaggtcat

SEQ ID NO: 209329 - DNA, 922 bp, Unknown
  Bacterial polypeptide expressing nucleotide sequence isolated from the Sargasso Sea
gataaaaaagttgctatatttggttacggaagccaaggacatgcccatgcattaaacttaaaagatagtggcgtaaaagaagtagtagtagctttacgagatggttcatcaagtataaaaaaagcagaaagcgctggattgaaagtaatgacattatctgatgcagcagcttgggctgatgtagttatgatgcttactcctgatgaacttcaatctgaaatttataaaaatcacattgagcagagaatgaaagaaggcacaagtttagcttttgcgcatggtttaaatattcacttcgatttaattaacgcaaggaaagatttagatgtttttatggtggcaccaaaaggaccaggccacacagttagaagcgaatatcaaaaaggaggaggggttccttgtttgatggctgtacataaggacagttctggaaaagcaaaagaattagctttgtcatatgcatcagctgttggaggaggaaaagctggtattattgaaacaacttttaaagacgagtgcgaaacagatttattcggggaacaaactgttttatgtggaggattagtcgagctgataaaaaatggatttgaaactttaacagaagctggttatccaccagagatggcatactttgaaacccttcatgaagtaaaattaattgtagatcttatttatgaaggtggaattgcaaacatgaattattcgatatctaatactgctgagtatggggaatatgtttcaggaaaaagaattgtagacagcaaaacaaaagaaaaaatgaaagaagttcttaaagatattcagtctggtaaatttaccaaacaatggatggaagagcacaaatctggacaaaagaattttcttaaaatgagaaaagatttagctaatcatcaaatcgaaaaagtaggtaaagagctagagc

SEQ ID NO: 209330 - DNA, 348 bp, Unknown
  Bacterial polypeptide expressing nucleotide sequence isolated from the Sargasso Sea
attttgaaactttgcatgaagtaaagttaatagttgatttaatttatgagggaggaatagcaaatatgaattattctatttctaatactgcagagtatggtgaatatgtttctggaaaacgtgttgttgatggaaagactaaggaaaaaatgaaggaagttttaaaagatatacaatctggtaaattcaccaaacagtggatggatgaacataaatcaggtcagaaaaatttcctaaaaatgaggcaagatctggctaaacaccctattgaaaaggtaggtaaagaacttcgagctatgatgccatggattggtaaaaataaactagtcgataaagataaaaattaac

SEQ ID NO: 209331 - DNA, 906 bp, Unknown
  Bacterial polypeptide expressing nucleotide sequence isolated from the Sargasso Sea
aaaaagattgttattgtagggtatggcagtcaaggacatgcgcatgctattaatttaagagattctggaattgaagatgttgctattgctttaagagaaggttctccaactagaaaaaaagctgagaatgctggatttaaagtaatgacaccttctgaatctgctttgtgggcagatattattatgatgttaactccagatgaattacaatcagagatttataataatgaaattgcagcaaatataaaagatggtactgccttagcttttgctcatggattaaatatacattttgatttaatcaaaccaaatgctaacatagatgtaattatgatggctccaaaaggccctggtcatacagttagagcagaatatgttagaggcgctggagttccatgtcttgttgcagttaatcagaatccctctggaaatgctcttgaaattgcaatagcttactcttcagcaataggcgggggtagagctggaataatagaaacaacttttaaagaagaatgtgaaactgatctatttggagaacaatcggttttatgtggaggtttaacacatttaattatagcaggttatgaaactttggtagatgcagggtatgcgccagaaatggcatattttgaatgtcttcatgaagttaaattaattgtagatcttctttatgaaggaggaatggcaaacatgcgatattctatttctaatacagctgaatacggtgattattctagaggtccaagattaattactgatgaaactaaaaaagaaatgaaaaaaatcttatcagaaatacagtctggccaatttgctaaagaatggatggaagaacatagagctggtcaaacaaagtttactacaatgagaaaaaagcatgctgaacatcctattgaaaaaattggg

SEQ ID NO: 209332 - DNA, 610 bp, Unknown
  Bacterial polypeptide expressing nucleotide sequence isolated from the Sargasso Sea
atgaaagttttttatgataaagattgtgataaaagtcttataaaaaataagaaagtggcaattataggatttggtagccaaggtcacgcacacgcaatgaatttaaaagattctggagtaaatgatattgtaattggattaaaaaaaaattcatcatcaattactaaagctaaaaaagcaggttttaaggtgttatctccattagaagcaattaagtatggagaagttgtaatgatattaattcctgatgagttacaacctaatttatataaagaaataattaaaaataatattggtaaaaatgcatatttaggttttgctcatggttttagtattcattttaaatttattaaacctagaaaagatttaaatatttttatggtagctccaaaaggaccagggcatttagtaagatcagaatataaaaataaaagaggagttccttgtttattagcaataaataaatcagtaagtaatgatactaaaaatataggattatcatatgcgtctgctgttggaggtggaagaacaggtataattgaaacaacatttaaagaagaatgtgaaactgatttgtttggcgagcaagtcgttttatgtggtggtataa

SEQ ID NO: 209333 - DNA, 373 bp, Unknown
  Bacterial polypeptide expressing nucleotide sequence isolated from the Sargasso Sea
aatgttttatgaaaaagacactaaagtaaatttaataaaagataaaaaagtagcaatttttggttatggaagtcaaggtcatgcacatgcacttaatttaagagatagtggtgttaaagaagttgtggtagccttaagagaaggttcatcaagtattgaaaaagctgagtccaaaggcttaaaagtaatgaatttatctgatgctgcagaatgggcagatgttgttatgatcttgacgccagatgaattacaagcatcaatatataaaaatcatatagagcaacgtgttaaagaaggaacatcaattgcatttgctcatggtttaaatgttcattatgatcttattaaagctagaaaagatttagatgtattt

SEQ ID NO: 209334 - DNA, 487 bp, Unknown
  Bacterial polypeptide expressing nucleotide sequence isolated from the Sargasso Sea
gctaaagggattggtggaacgagagctgggattcttgaaacaaactttaaagaagaaacagaaactgatttatttggcgaacaagctgttttgtgcggaggattatcagaactcgtcaaatcaggctttgaaactcttgtagaggcaggatatcagcccgaacttgcttacttcgaatgcttacatgaagttaaactaattgttgatttaatggtgaagggaggcttatctcaaatgagagattccatttcaaatactgcagaatatggagattatgtaagtggtaaaagacttatcaatagtgatacaaagaaagaaatgcagaaaattctaaaagatattcaagatggaactttcgctaagaattttgtggaagaatgcgataaaaacaaacccttaatgacaaaattaagagaagaaaactcaaaacatgaaattgaaaaagtaggaaaaggattgcgctcaatgttcagttggctgaaataaa

SEQ ID NO: 209335 - DNA, 717 bp, Unknown
  Bacterial polypeptide expressing nucleotide sequence isolated from the Sargasso Sea
aatgttttatgagaaagatactaacgtaaatttaataaaagataaaaaaattgcaatttttggttatggaagtcaaggtcatgcacatgcacttaatttaagagatagtggtgttaaagaagttgtagtagctttaagagaaggttcatcaagtattgaaaaggctgagtctaaaggtttaaaagttatgaatttatctgatgctgcagaatgggcagatgtagttatgattctaactccagacgaattacaagcatcaatatataaaaatcatatagagcaacgtgttaaagaaggaacatcaattgcgtttgctcatggtttaaatgttcactatgatcttataaaagctagaaaagatttagatgtatttatggttgcaccaaagggacctggacatttagtaagaagtgaatatgaaaaaggtggtggagtaccttgtttatttgctgttcaccaagatggttctggtaaagcaagagatttagcaatgtcatatgcatcagctgttggtggtggtagatctggaataattgaaactacatttaaagatgaagtagaaacagatctatttggagaacaaacagtattatgtggtgggcttgttgaactaattaaaaatggatatgaaacattagtcgaagctggatatgaaccagaaatggcttatttcgaaactgttcacgaagtgaaactgattgttgatttgatatatga

SEQ ID NO: 209336 - DNA, 463 bp, Unknown
  Bacterial polypeptide expressing nucleotide sequence isolated from the Sargasso Sea
agttgaacagatctatttgggcgaacagactgtattgtgtggaggacttgttgaattgattaaaaatggttatgaaactttagttgaagcaggttatgaaccagagatggcatattttgaaacagttcatgaagttaaattgattgttgatttaatttatgaaggtggaattgcaaacatgaattattctatctctaatacggctgaatatggcgaatatcaatcaggtcctcgagtggttaataaagaggaaactaaaaaaagaatgaaagaagttttggctgaaattcaatcaggaaaattcacaaaggagtggatggatgagtgtaaaaatggtcaaaagaacttccttgctacaagagctaaattagctgagcatccagtagaaaaagttggtgctgaattaagagctatgatgccatggattagtaagaaaaaattagtcgatagtgataaaagttaa

SEQ ID NO: 209337 - DNA, 623 bp, Unknown
  Bacterial polypeptide expressing nucleotide sequence isolated from the Sargasso Sea
ggtcattacagttagaagtgagtatcaaaaaggtggtggagttccttgtttgatggctgttcacaaagatagttcagggaaagcaaaagatttagctttgtcatatgcttcagccgttggtggaggaaaggctggcattatagaaactactttcaaagatgaatgcgaaacagatttatttggtgagcaaactgttttatgtggtggattagttgaactaattaaaaatggtttcgaaactttaactgaagcagggtatcctcctgaaatggcatactttgaaactcttcatgaagtaaaattaattgttgatttaatttatgaaggtggaatagcaaatatgaattactctatttcaaacaccgcagagtacggggaatatatctctggtaaaagggttgtagataacaagacaaaagaaaaaatgagagaagttcttaaagatattcaatctggaaaatttactaaacaatggatggatgagcataaatcaggtcaaaaaaacttcttaaaaatgaggcaagatttggcaaaacatcctatagaaaaggttggaaaagagcttcgcgcaatgatgccgtggattggtaaaaataagctggtcgataaagataaaaattaac

SEQ ID NO: 209338 - DNA, 561 bp, Unknown
  Bacterial polypeptide expressing nucleotide sequence isolated from the Sargasso Sea
aagatggttctggtaaagcaagagatttggcaatgtcatatgcatcagctgttggtggaggtagatctggaataattgaaactacatttaaagatgaggtagaaaccgatttatttggagagcaaacagtattatgtggtggacttgttgaattaattaagaatggatatgaaactttagttgaagctggatatgaaccagaaatggcttattttgaaactgttcacgaagtgaaactgattgtagatttaatatatgaaggtggaattgctaatatgaattattcaatttcaaataccgcagagtatggtgagtatcagtcaggtccaagaataattaaaaaagatgaaaccaagcaaagaatgaaagaagttttagcagaaattcaatctggtaaatttacaaaagaatggatggaagaatgcaaaaatggtcaaaaaaactttcttgcaacaagagctaaattagcagaacactctgttgaaaaagtaggtgctgaacttcgggctatgatgccttggatttcaaaaaagaaacttgttgatagcgataagaagtaga

SEQ ID NO: 209339 - DNA, 715 bp, Unknown
  Bacterial polypeptide expressing nucleotide sequence isolated from the Sargasso Sea
aatgaaaattttttatgatgatgatgctgacatttcaattattcaaaaactaaaagtgacaatagttggatatggttctcaaggtcatgcacatgcaaataatcttcatgagtccggagtagatgttactgttgccttgcgcgaaggatcttcatcatggtctaaagcagaaattgctgggctgaaagtagcaacggtatcagaggctgtctctgatgcagacctagttatgatattagcaccagatgaatttcaaaaaagcttatacgagtcagaaatcaaatctaatttgaaatctaatgcggttctagcatttgcacatggatttaatattcattttaaaaaaatcatcccaactgatgacacttcagtcattatgattgcacctaaaggacccggtcatactgtaagaagtacctatttaaatggtggaggggttccatctttaattgcaatatatcaagatggcaccaaccccaataaccattccgcaaaagagattgctctttcatacgccatggctaatggggggaccagagctggggttcttgaaactacatttaaagaggaaactgaaacagatttatttggtgagcaagctgttttatgtggaggcatgactgcactaatcaaagcaggctatgaaactttagttgaagctggatatagtccagaaatggcatactttgaatgcttacatgaaacaaagttgatt

SEQ ID NO: 209340 - DNA, 937 bp, Unknown
  Bacterial polypeptide expressing nucleotide sequence isolated from the Sargasso Sea
tcctattctcacggttttaatattgttgaagaagggatggagattagaaaagaccttactgtcattatggtcgcaccaaaatgtcctggttctgaggtgcgtgaagaatacaaacgtggttttggagtaccaacacttattgctgtgcatccagaaaatgaccctgaaggtaaaggattagaacaagctaaagcctacgcctttgggacaggtgggcatcgagcaggtgttttagaatcttcatttgtggcagaagtaaaatcagatttgatgggtgagcaaaccattttatgtggggttttacaaacgggctctattttatgtttcgataaaatgatagaaaaaggaattgaccctggctatgcatcaaaattgattcaatacgggtgggaaaccattacagaagccttaaagcacggaggaataaccaatatgatggatcggctatccaatccggccaaaataaaagcctttgaactttcagaacaattaaaagaaattttaaccccattgtttcaaaagcatatggatgatattatgtctggacacttttcaaaaaccatgatggaagattgggctaatgatgataaaaatctactaacctggcgcgctgctactggtgaaacagcttttgaaaaaacagaaaatacttcacaaaatatcaacgagcaagaatattttgaccatggtgtgttgatgattgcttttgttcgtgcaggggtagaattagcttatgacactatggttgctgctggaataaaagaagaatctgcctattatgagtcgttacatgaaacgcctttgatagccaataccattgctcgaaaaaagttatttgaaatgaatcgagtcatttccgatacggcagaatatggctgttacttgtttgaccatgctgctaagccacttctaaaagattttatgaaaaatggttgag

SEQ ID NO: 209341 - DNA, 568 bp, Unknown
  Bacterial polypeptide expressing nucleotide sequence isolated from the Sargasso Sea
tgcagtgcacaaagatagttcgggtgctgcaaaagatttatcattatcgtatgcttcagcaattggtggaggcaaatcaggaattatagaaactacttttagagacgagtgcgaaacagatttatttggcgaacaggtagttctttgtggtggattggttgaattaataaaaaaaggttttgaaactttagtcgaggcaggatacccacctgaaatggcttactttgaatgtttgcatgaagttaaattaatcgttgatttaatttatgaaggaggaattgcaaatatgaattattcaatttctaatacggctgaatacggagaatatgtatctggtaaaaaaataattgatgataagacaaaagaaagaatgaaggaagttcttaaaaacattcagagtggaaaatttgctaaggaatggatgaaggaaaatgaagctggtcagaaaaactttcttaaaatgagaaaagaactgtcggaacatcaaattgagcaagtaggtgaaaaattaagagccctgatgccttggatatcaaaaaacaaaataatagataagaataaaaactag

SEQ ID NO: 209342 - DNA, 583 bp, Unknown
  Bacterial polypeptide expressing nucleotide sequence isolated from the Sargasso Sea
atgttttatgaaaaagatacagatgtaaatttaataaaaaataaaaagattgcaatttttgggtatggaagccaaggacatgctcatgctcttaatcttaaagatagtggtgtaaaagaagtaattgttgcattaagagatggttcagccagtaaagcaaaagcagagtcgaagggattaaaagttatgaatttatctgatgctgcagagtgggcagacgtagtaatgattttaacaccagacgaacttcaggcatcaatttacaaaaatcatattgaacagagggtgagagaaggaacttcaattgcttttgcacatggattaaatattcattatgatttaataaaagcaagaaaagatttagatgtttttatggtagcaccaaaaggtccaggacatttagtaagaagtgaatttgaaaaaggtggtggagttccatgtttatttgcagtacatcaaaatggatcaggtaaagctagagagttagcaatgtcatatgcatcagcggttggcggtgggagatcaggaattattgaaactacatttaaagatgaagttgaaacagatctattggagaacagac

SEQ ID NO: 209343 - DNA, 742 bp, Unknown
  Bacterial polypeptide expressing nucleotide sequence isolated from the Sargasso Sea
aatgttttatgaaaaagataccaacgtaaatttaataaaagaaaaaaaaatagctatattcggatatggaagtcaaggtcatgctcatgcattaaatttaaaagatagtggtgttaaagaagtagtagtagctttaagagatggttctgctagcaaagaaaaagcagagtcaaagggtttaaaagtaatgaacttatctgatgccgctgagtgggctgatgtcataatgatattaaccccagatgaacttcaagcaaatatttataaaaatcacattgaacaaagagttaaggaaggaacttcaatcgcctttgctcatggtttaaatgttcactacgatttaattaaagctagaaaagatttggatgtttttatggttgctccaaaaggaccaggtcatttagtaagaagtgaatatgaaaaaggtggaggagttccatgtttatttgctgttcaccaaaatggatcgggtaaagctagagatttagcaatgtcctatgcatctgcaataggtggtggaagatctggaataattgaaacaacatttaaagatgaagtggaaaccgatctttttggtgaacaaactgttttatgtggtggattagttgaattaattaaaaatggatacgaaactttagtagaagctggttacgaacctgaaatggcgtattttgaaactgttcacgaggtcaaacttatcgttgatttaatttatgaaggtggaatagcaaatatgaattat

SEQ ID NO: 209344 - DNA, 961 bp, Unknown
  Bacterial polypeptide expressing nucleotide sequence isolated from the Sargasso Sea
atgttttatgaaaaagatactgacgtaaatttaataaaagataaaaaaatagctatttttggttatggtagtcaaggacatgcacatgcactgaatttaaaggacagcggagttaaagaagtagttgtagctttacgagatggttcatctagtaaatcaaaagcagagtcaaaaggtttaaaagttatgaacttgtcagatgcggctgagtgggcagatgtggttatgatactaacaccagatgaactacaagcaactatatataaaaatcatattgagcagagagtaagagaaggaacctctatagcttttgcacatggactaaatattcattatgacttaatcaaagcaagaaaagacttagacgtatttatggttgctccaaaaggtcccggtcacttagttagaagtgaatatgaaaaaggtggaggcgttccatgtttatttgcagttcatcaaaatggatctggaaaagcaagagaacttgcaatgtcatatgcttctgctgttggaggcggaagatcagggattatagaaacaacattcaaagatgaagtcgaaacggatttatttggggagcaaacagttttgtgtgggggattagtagaattaataaaaaatggttatgaaactcttgtagaagctggatacgaaccagaaatggcttatttcgaaacagttcatgaagttaaactaatagttgacttaatttatgaaggaggaattgcaaacatgaattattctatttcaaatactgcagaatatggagaatatacatccggacctagaataatcaataaagaggaaactaaaaaaagaatgaaagaagttttagcagacattcagtcaggtaagttcacaaaagaatggatggatgaatgtaaaaatgggcaaaagaactttttaaaaaccagagaaaaattagccgagcatcctgtgaaaaagtgggtgcaggactaga

SEQ ID NO: 209345 - DNA, 961 bp, Unknown
  Bacterial polypeptide expressing nucleotide sequence isolated from the Sargasso Sea
gatttttggatatggaagccagggacatgcacatgcacttaatcttaaagatagcggagtaaaggatgtagttgtcgctttaagggagggatcttctagtaaagtaaaagcagaatcaaagggattaaaagttatgaacttatctgacgccgcagagtgggctgatgttgttatgattttaactcctgatgaattacaagcaacaatatataaaaatcatattgagcaaagagtaagagaaggaacatctatagcttttgcacacggtttaaatattcattatgatttaattaaagccagaaaagatctagatgtatttatggtagctccaaaaggtcctggacatttagttagaagcgaatttgaaaaaggcggaggagtcccatgtctttttgctgttcatcaaaatggatcaggtaaagcaagagatcttgcgatgtcgtacgcctcagcagtaggagggggaagatcaggtattattgaaacaactttcaaagatgaagtagagactgatttgtttggagaacaaacagttctttgtggaggacttgttgagctaattaagaacggttatgaaacattagttgaggcaggatacgaaccagagatggcatattttgaaactgttcatgaagtaaaattaatagttgatttaatttatgaaggtggaattgcaaatatgaattattctatatctaatactgctgaatatggagaatatgttacaggaccaaaaataattaataaggaagaaacaaaaaaaagaatgaaagaagttttagctgatattcaaacaggcaagtttaccaaggattggatggatgaatgtaaaaatggtcagaaaaatttcttaaaaacaagagaaaagttggcagagcatccagtcgaaaaagtaggcgcaggacttagggcattaatgccatggatttctaagaaaaaattaataaatagtgacaaaaaa

SEQ ID NO: 209346 - DNA, 385 bp, Unknown
  Bacterial polypeptide expressing nucleotide sequence isolated from the Sargasso Sea
aatgacccaactcttttacgacacagatgcagatctaagtcttttaaataataaaacaatagcgattattggatatggatcacaaggtcatgcacatgccctaaatcttaaagatagcggtatggatgtaattgttggattatataaaggaagtaagtctgaaagcaaagccattagcgatggtctagaagtctttagcgtttctgaagcttgcaaaaaagcagactggattatgattctcctccccgatgagtttcagaaagatgtttaccttaaggaaatagaacctaacttaaaagaaggaaagatactaagttttgctcatggcttcaatataagattcggacttatcaaacctcctagttttgtggatgttgtaatgatt

SEQ ID NO: 209347 - DNA, 933 bp, Unknown
  Bacterial polypeptide expressing nucleotide sequence isolated from the Sargasso Sea
aatgttttatgaaaaagatgctgatacaaatttaattaaagacaaaaaagttgcaatttttggttacggaagtcaaggtcacgctcacgcattaaatttaaaagatagtggagttaaaaacgttgttgttgcacttcgcgaaggttcatcaagtattaaaaaagctgaaagcgaaggacttaaagttatgtcactatcagatgccgcagcttgggcagatgtagtaatggtgcttactccagatgaacttcaggcatcaatatacaaaaatcatattgaacaaagaatgagagaaggaactagtcttgcgtttgctcatggattaaatattcattttaatttaatcaactcaagaaaagatttagatgttttcatggttgcgccgaaaggtcctggacatttagtaagaagcgagtatcaacgtggtggaggtgtaccatgtttaatggccgttcacaaagatagctctggtaaagctagagatcttgccatgtcatatgcatgtgctgttggtggaggaagatcaggaataattgaaacaacttttaaggacgagtgcgaaacagatttatttggagagcaaacagttttgtgtggtggtttagtagagctaattaaaaatggttttgaaactttgactgaagcaggctacccacccgagatggcttattttgaaactcttcatgaagtgaaattaattgtggacttaatatacgaaggtggaattgccaatatgaattattcaatttccaatacagctgagtatggagaatatatctcaggaaggaaaatagttgatccaaaaacaaaagaaagaatgaaagaagttttaaaagatatacaaacaggcaaatttactaaacaatggatggatgaatgcaaaaatggtcaaaaaaattttttaaaaatgagagaagaacttgcaaaacaccc

SEQ ID NO: 209348 - DNA, 637 bp, Unknown
  Bacterial polypeptide expressing nucleotide sequence isolated from the Sargasso Sea
atggttgccccaaaaggacctggccatcttttaagaagaacttattctgaaggaagtggtatgccatgtcttgttgctgtacataaagatgcttcgggaattactgaagatttagctatgtcatatgcatcagcgattggtggtggaagggctggaatactgaaaactactttcaaagaagaaactgaaactgatttatttggagagcaagttgttttatgtggtggattaacagagttaattagaaatgggtttgaaactttagtagaagctggttatcagccagagagtgcttactttgaaacacttcatgaagttaaattgattgttgatttaatgtacgaaggtggatttgaatggatgaggcattcaatatctgatactgcagagtatggagatttttcaagaggttcaagaataataacttctgaaacaaaagaagagatgaaaaaagtacttgatgagattcaatcaggtgcatttgctaaagaatggatgtcacaggccagagagggttctcctttcttaaataagaaaagagctgaagcttcaaaacaccaacttgaagaagttggaaaaggtttaagagagatgatgccgtttctaaatgctaaggatgtaaaaaaagataaatgag

SEQ ID NO: 209349 - DNA, 531 bp, Unknown
  Bacterial polypeptide expressing nucleotide sequence isolated from the Sargasso Sea
ataaagatagctcaggaaaagcaaaagatttattctttatcgtacgcctctgcagttggtggaggcaaagctggtattattgaaacaacttttaaagatgaatgcgaaacagatttatttggagagcaaacagttctttgtggaggtttagtagaattaataaaaaatggtttcgaaactttgactgaagctggttacccgcctcaaatggcttacttcgaaactttacatgaggtaaagctaattgttgatctaatttatgaaggcggaatagcaaatatgaattattctatctctaacactgcagagtatggagagtatgtatctggaaaaagagttgttgatggaaagacaaaagaaaaaatgaaggaagttttaaaagatatacaatctggcaaatttactaaacagtggatggatgagcataaatctggtcaaaaaaatttcttaaaaatgaggcaagacctggctaaacaccctatagaaaaggtaggtaaagaacttcgagctatgatgccatggattggtaaa

SEQ ID NO: 209350 - DNA, 553 bp, Unknown
  Bacterial polypeptide expressing nucleotide sequence isolated from the Sargasso Sea
atctggtaaagctagggatttagctatgtcatatgcttctgcaattggtggtggtcgatctggtattattgaaacaacatttaaagatgaagtagaaacagatttatttggagagcaaactgttttatgtgggggattagttgaactgataaaaaatggttatgaaactctggttgaagctggttacgaaccagagatggcttattttgaaacagttcacgaagtaaaattaatcgtagacctaatttatgaaggtggaatcgcaaatatgaattattcaatttctaacactgcagaatatggagaatatatgtcgggccctagaattataaacaaagaagaaacaaaaaaaagaatgaaagaagttcttcaagatattcagtcaggaaaatttactaagcagtggatggatgaatgcaaaaatggccagaaaaattttcttaaaacaagagagaaacttgccgaacatccagttgaaaaagtaggtgctaaattaagagctatgatgccttggatttcaaaaaaaaaactagtggatagcgataagagttaa

SEQ ID NO: 209351 - DNA, 523 bp, Unknown
  Bacterial polypeptide expressing nucleotide sequence isolated from the Sargasso Sea
atgcaaatttattatgacagtgatgctgatcagaatatcgctaaagggatggaaatagtcatcattggttatggatcgcaaggacatgctcatgcaaacaatcttaaagattcaggtgccaatgttacggttgctcttagaaaagaatctggatcatgggcaaaagctgaagctgctggttttgatgtcaaagaggtaggcgaagctgtacccaatgcagatcttgtcatgatgcttattccagatgagaaacaatcagctatgtatgagaatcatttaaaagacaatataaaagatggagcagttctggcatttgctcatggatttaatatccactttgaaatgattattcctagagatgatctggatgtaattatggttgcaccgaaaggcccaggccatactgttcgatcgcaatatgaatcaggagcaggagtaccatgcttattggctgtgcatagaaatgtctccggaaaagcaaaagatgttgggctttcatatgcatctatgattggttctggcc

SEQ ID NO: 209352 - DNA, 604 bp, Unknown
  Bacterial polypeptide expressing nucleotide sequence isolated from the Sargasso Sea
gaatatgtaagaggtgcaggcgtaccttgtttagtggctgtagataaaaatccctcaggcaatgctctagaaataggaattgcctacgcatcagcaattggtggtggtcgtgctggaataattgaaactacttttaaagaagaatgtgagactgatctatttggggaacaatctgttttatgtggaggtctaacacatttaattttagcaggttatgaaactcttgttgaagcaggatatgctccagaaatggcatattttgaatgtctgcatgaagttaaacttattgttgaccttttatatgaaggtggaatggcaaatatgagatattcaatctcaaacacagctgagtatggtgattattcaagaggcccaagacttattactgatgaaacaaaaaaagaaatgaaaaaaattctttcagaaattcaatctggccaatttgctaaagaatggatgcaagaacatcagagtggtcaaactaaatttaaagtaatgcgaaaagaacaagctgaacatccaattgaggctgtaggagaaaagttacgaactttaatgccatggattgctgaaggaaaaatggttgataaatcaaaaaactaga

SEQ ID NO: 209353 - DNA, 624 bp, Unknown
  Bacterial polypeptide expressing nucleotide sequence isolated from the Sargasso Sea
gtcatttagtaagaagtgaatatgaaaaaggaggtggagttccatgcttatttgctgttcaccagaatggatctgggaaagcaagagatttagcaatgtcctatgcatctgcaataggtggtggaagatctggaataattgaaacaacatttaaagatgaagtagaaaccgatctttttggcgaacaaactgttttatgtggaggattagttgaattaattaaaaatggatacgaaactttagtagaagctggctatgaacctgaaatggcctattttgaaactgttcacgaagtcaaacttatcgttgatttaatatatgaaggcggaatagcaaacatgaattattccatctcaaacactgctgagtatggagagtacatgtcagggcctagaattattaataaagaagaaactaaaaaaagaatgaaagaagttttagacgatattcagtctggcaagtttactaaacaatggatggatgagtgtaaaaatgggcagaaaaacttccttaaaattagagaaaagttagctgagcatccagttgaaaaagttggaaaaaatcttagagcaatgatgccatggatttctaaaaagaaattagttgatagcgataagagttaaa

SEQ ID NO: 209354 - DNA, 826 bp, Unknown
  Bacterial polypeptide expressing nucleotide sequence isolated from the Sargasso Sea
atgttttatgaaaaagatactaacgtaaatttaataaaagaaaaaaaaatagctatatttggatatggaagccaaggtcatgctcacgctttaaacttaaaagatagtggagtcaaagaggtagttgtggctttaagagaagggtcctctagcaaagaaaaggcagagtcaaaaggtttaaaagtaatgaacttatctgatgcagcagagtgggctgatgttataatgatactaactccagatgaacttcaagcaataatatataaaaatcatattgaacaaagagttaaagagggaacctctattgcatttgcacatggcttaaatgttcactacaatttaattaaagctagaaaagatttggatgtttttatggttgctcctaaagggccaggtcatttagtaagaagtgaatatgaaaaaggcggtggagttccgtgtttatttgctgttcaccaaaatggatctggtaaagctagagatttagcaatgtcctacgcatctgcgataggaggtggaagatctggaattattgaaacaacatttaaagatgaagtagaaactgatctttttggtgaacaaactgttttatgtggtggtttagtcgaattaattaaaaacggttacgaaactttagtagaagcaggttatgaacctgaaatggcatattttgaaactgttcacgaggtcaaacttatcgttgatttaatttatgaaggtggaatagcaaatatgaattattcaatttcaaatactgctgaatatggagaatacatgtcgggtcctcgaattataaataaagatgaaactaagaaaagaagaaaga

SEQ ID NO: 209355 - DNA, 943 bp, Unknown
  Bacterial polypeptide expressing nucleotide sequence isolated from the Sargasso Sea
cgctgacgttaatctgatcaaggacaagcacgtggccatcgcgggctacggcagccagggccatgctcacgcgctaaacctacgcgactcaggtgttaagaacatcactgttgtgctgcgagaaggatccggctccgctgtgaaggcgaaaaatgatggtttcaccgtgaagactgccgcggatgccgccaaggatgctgacgtgttcatgatcctgacgcctgatgagggacaagcggatctctacaatgatcacgttcatactaatctaaaggagggtgcggctctggccttcgctcacggcctaaatatccacttcggtctgatcgaaccgcgctctgacatcgatgtgttcatgatcgcgccaaagggcccaggccatacggtgcgttccgaatatgataggggcgcaggcgtgccgaccttggtcgctgtttctcaggacgcgtctggtaacaccatggacgtggcactttcctacgcctccggcattggcggtggtcgcgcgggcattgtcgagactacctttaaagaagagtgcgaaactgacctttttggcgagcaggtggtgctatgcggcggcctgacagccctgatcatggctggctacgagaccctggtggaagccggttatgcgccagagatggcctatttcgagtgctgccacgaggtgaagctaatcgttgatctcatttacgaaggtggcatcgccaatatgcgctactcggtctctaacacggccgaatacggcgactacattaccggcccgaaaattatcaccgatgacacgagggcacgcatgaaggaagtcttggctgatatacaaagcggtaccttcactcgtgattggatgacggaaaacaaagtcggccaacccaactttaaggctatgcgacgcataggtgccgagcacgatattgaacaggtggcgagcgactgcgcg

SEQ ID NO: 209356 - DNA, 779 bp, Unknown
  Bacterial polypeptide expressing nucleotide sequence isolated from the Sargasso Sea
aattatgatgttaactcttgatgaattacaatcagaaatttataataatgaaatagcaaataatattaaacctggttcagctgtagctttcgcacatggtctaaatattcatttcgaattaataaaaccaagtaatgacatagatgtgataatgatggcccctaaagggcctggtcacacagtacgagcggaatacgttaggggagcaggtgtcccttgtttagtagctgttaatcaaaatccatcaggtaatgcccttgaaattgccatagcttattcatcagcaataggtggaggaagagctggaattattgaaacaacttttaaagaagaatgtgaaacagatttatttggagaacagtctgttttgtgtggtggattaactcatttaattatagcaggttacgagacattagttgatgcaggttatgctcctgagatggcttattttgaatgtttacatgaagtaaaattaatagttgatttattgtatgaaggtggaatggccaatatgagatactctatttctaatactgcagaatatggagattattcaagaggtccacgtttaattacagaagataccaaaaaagaaatgaagaaaatcttatctgaaattcaatcaggtcaatttgctaaagaatggatggaagaacacagaagtggtcaattaaaatttaaaacaatgagaaaaaaggaagctgaacatcctattgaaaaagttggtgaaaaattgagaactttaatgccttggattgctgaaagcgaaaatggttgat

SEQ ID NO: 209357 - DNA, 646 bp, Unknown
  Bacterial polypeptide expressing nucleotide sequence isolated from the Sargasso Sea
atggttgctccaaagggtccaggacatttagttagaagtgaatttgaaaaaggtggaggagtaccatgcttatttgctgtacatcaaaatggatcaggtaaagcaagagaacttgcaatgtcatatgcttcagctgtaggtggtggaagatctggaattattgaaactacatttaaagatgaagttgaaacagatttatttggtgaacaaacagttctttgtggaggtttagtagaattaataaaaaatggatatgaaactttagtggaagcaggctatgaacctgaaatggcatattttgaaactgtacacgaagttaaattaattgttgatttaatatatgagggtggaattgcaaatatgaattactcaatttcaaatacagcagagtatggagaatatacttctggtcctaaaattataaaaaaagaggaaactaagaaaagaatgaaagaagtattaaacgacattcagtctggaaagtttactaaagaatggatggatgagtgtaaaaatggtcaaaagaactttttaaaaactagagaaaaacttgcagaacatccagttgaaaaagttggcactagattaagagcaatgatgccatggattgctaaaaagaaactagtcgatagcgataaaaagtagt

SEQ ID NO: 209358 - DNA, 640 bp, Unknown
  Bacterial polypeptide expressing nucleotide sequence isolated from the Sargasso Sea
aatgagagtatattacgatagagatgcagacttaaacttaataaaagataaaaaaatatcaattgtaggatatggaagtcaaggtcatgcacatgcaatgaacttgagagattctggaatagaaaatgtttcaattgcattaagagaaggttcaaattcaagaagtaaagcggaacaagctaatttcaaagtaatgacccctgcagaagctgcaagttgggctgatgttattatgatgttaacacctgatgagcttcaatctgaaatttataaaaatgatatttctgaaaatattaaagagggcacaacaattgcatttgctcatggattaaatattcactttgacttaattaaacctaaagaaggtattgatgtaataatggttgcacctaaaggccctggtcatacagtaagagccgaatacgtaaggggtgcaggcgtaccttgtttggttgctgtagataaaaatccctcaggaaatgctcttgaaataggaattgcttacgcatctgcaattggtggtggacgtgccggaattatagaaactacatttaaagaagaatgtgaaacagatctttttggagaacaatctgttttatgtggaggtttaacacatttaattttagctggttacgaaact

SEQ ID NO: 209359 - DNA, 772 bp, Unknown
  Bacterial polypeptide expressing nucleotide sequence isolated from the Sargasso Sea
aatgaacttgtccgatgcagcagaatgggctgatgtttgtatgattttaactcctgatgaacttcaagcaacaatatataaaaatcatatcgaacaaagaataaaagagggtacaagtttagcttttgctcacggtttaaatattcattatgatttaatcaaagcaagaaaagatttagatgtatttatggttgctcctaaagggcctggacatcttgttagaagtgaatttgaaaaagggggtggggttccttgtttaatggcagtacatcaagatggcacaggtaaagcaagagatttagctctatcgtatgcatcagcgattggaggaggaagatcaggaattattgaaaccactttcaaagatgaatgtgaaacagatttatttggtgaacaaacagttctttgtggaggtcttgtagagctaattaaaaatggatatgagactttagttgaggctggatatgaacctgagatggcatatttcgagtgcttacatgaggtaaaattaattgttgatcttatctatgagggtgggattgcaaatatgaattactcaatttcgaatactgcagagtatggtgagtatgtttcaggtcctagaattataaataaagaggaaaccaagaaaagaatgaaagaagtacttgcagacattcaatctggaaagtttaccaaacaatggatggatgagtgtaaaaatggtcaaaagaattttctaaaaactagagaggaattagcaaaacattctatagaaaccagttggtacaaa

SEQ ID NO: 209360 - DNA, 436 bp, Unknown
  Bacterial polypeptide expressing nucleotide sequence isolated from the Sargasso Sea
aatgttttatgaaaaagatactaacgttaatttaataaaagataaaaaaatcgcaatttttggatatggtagccaaggacacgcacatgctctcaatttaaaagatagtggagtaaaaaatgttgtagttgctttaagagatggatcttcaagtaaatctaaagcagagtccaaaggattaaaagttatgaatctttcagatgcagcagaatgggctgatgtagtcatgattttaactccagatgaattacaagcctcaatttataaaaatcacattgagcaaagagttagggaaggaacttctatagcttttgcccacggattaaatattcattatgatttaattaaagcgaggaaagatcttgatgtctttatggtcgcaccaaaaggaccaggacacttagttagaagtgagtttgaaaaaggtggaggtgtg

SEQ ID NO: 209361 - DNA, 417 bp, Unknown
  Bacterial polypeptide expressing nucleotide sequence isolated from the Sargasso Sea
aatgagagtttattatgatagagatgcagatattaatttaattaaagataaaaagattgttattgtaggttatggcagtcaaggacatgctcatgctatgaatttaagagattctggaattgaagatgttgctatagccttaagagaaggttcgccatctagaaaaaaagctgagaatgctggatttaaagtaatgacaccttctgaatctgcttcatgggcagatatcattatgatgttaactccagatgaattgcaatcagaaatttataataatgaaattgccgcaagtataaaagatggcacagccttagcttttgctcatggattaaatattcattttgatttaataaaaccaaatgaaaatatagatgtgattatgatggctccaaaaggccctggtcatacagttagagc

SEQ ID NO: 209362 - DNA, 832 bp, Unknown
  Bacterial polypeptide expressing nucleotide sequence isolated from the Sargasso Sea
tgaaagcaaagccattagcgatggtctacaagtctttagcgtttctgtagcttgcgaaaaagcagactggattatgattctcctccccgatgagtttcagaaagatgtttaccttaaggaaatagaacctaatttaaaagaaggaaagatactaagttttgctcatggcttcaatataagattcggacttatcaaacctcctagttttgttgatgttgtaatgattgccccaaaaggacctggacacactgttcgttgggagtatcagaacggtcaaggagttccagcgctgtttgctgtagagcaggattcttccggaagtgcaagatcattggcaatggcttacgctaaagggattggaggaacgagagctgggattcttgaaacaaactttaaagaagaaacagaaactgatttatttggcgaacaagcggttttgtgcggaggattatcagaactggtcaagtcaggattcgaaactcttgtagaggcaggttatcaaccggaacttgcttacttcgaatgcttacatgaagtcaaacttattgttgatttaatggtgaagggaggcttatctcaaatgagagattccatttcaaataccgcagaatatggagattatgtaagtggtaaaagactaatcaatagtgatacaaaaaaagaaatgcagaaaattctaaaagatattcaagatgggactttcgctaagaattttgtagaagaatgcgataaaaacaaacccttaatgacaaaattaagagaagagaactcaaaacatgaaattgagaaagtaggtaaaggtttgcgctcgatgttcagttggctgaagtaa

SEQ ID NO: 209363 - DNA, 779 bp, Unknown
  Bacterial polypeptide expressing nucleotide sequence isolated from the Sargasso Sea
ccagatgagaaacaatcgggctatgtatgaaaatcatttaaaagacaatataaaagatggagcagttctggcatttgctcatggatttaatatccactttgaaatgattattcctagagatgatctggatgtaattatggttgcaccgaaaggcccaggacatactgttcgatcacaatatgaatcaggagcaggagtgccttgtttactcgctgtgcatagaaatgtttccggaaaagcaaaagatgttgggctttcatatgcatctatgattggttctggccgagctggaattattgaaacaaattttaaagatgagactgaaacagatctatttggagaacaagcggtcctttgtgggggtttaacgtcacttattcaaactggttatgaagttctggtagaaaatggttatccaccagaaatggcatattttgaatgtcttcatgaagtaaaactaattgttgacctcatttatgaaggtggtcttcagaatatgagatatagcatttccaatactgcagagtatggagattatgtgacaggaccaaagattgtgaatgaaaatacaaaggaaacgatgcagaagatattgactgagattcagtctggagaattcgcgaaagattttatgaatgactgtaactctggtggtcagaaaatgagcgaatatagaaaaaactcctcagaacattcaatcgagtcagtgggcgaagagcttcgctcaatgatgccctggatatctgccaataaaattgttgataaagccaaaaactaat

SEQ ID NO: 209364 - DNA, 835 bp, Unknown
  Bacterial polypeptide expressing nucleotide sequence isolated from the Sargasso Sea
gaatgtagttgttgccctacgctcgggttctagctccgcacctaaggcggaggctgccggattcaaggtggtgtcgccttcggaagctgccgcgtggtgtgatttagctatggtgttgacgcccgatgaagggcaggcggatttgtgggaatatgatttacacaataatatgaaggaaggcacggcaattgccttcgcgcacggcctgtctattcattttaatttgatcgaggcccgagaagatatggatgtgtttatgattgctccaaaggggcccggacatactgtacgttctgagtatgtgcgcggtgctggggtaccatgccttgttgcagtagagcaaaatgcttcgggaaacgcgctcgaaattgcactcagttattcctctgccattggtggtggtcgtgcagggaccatcgaaacaacatttcgagaagaatgtgaaacagatttgtttggcgagcagacggttctgtgcggtggcgtctgtgaattaatgcgagccggatttgaaattttagtagaagcaggctatgcgccggagatggcttatttcgaatgtatgcacgagatgaagctgattgttgacctaatttatgagggtggaattgcaaatatgaactattccgtctcaaatacggcagaatatggagaatatgttactggtcctaaggttattgacgatcatgtaaagaagaatatgcgtaaggcactagagagtatccagtccggcgactttgcggctaactggatgttggaaaataaggtcaatcaggctagctttaaagcaatgcgccgccgttcttccgaacatcaatctgaagaaattggcgaa

SEQ ID NO: 209365 - DNA, 452 bp, Unknown
  Bacterial polypeptide expressing nucleotide sequence isolated from the Sargasso Sea
tatgagagtttattatgatagagatgctgacattggtttaattaaatcaaaaaaagttcttgttattggttatggaagtcaaggtcatgcacatgctgctaacttaaaagatagtggtgtaaaaaatgttgcaattgcattaaaaaaaaaatcacaatctattgaaaaagcaaaaaaagctggatttgatgtaaaagaagtgcatgacggtgctaaatgggctgatgttataatgatggcaactcctgacgaacttcaggctgatatatatcatgaaagtttaaaggaaaatatgagggctggatcagctattgcatttgctcacggactaaatattcattttaatttgattgaaccaagaaatgatattgatgtatttatggttgcaccaaaaggaccaggtcatacggttaggtctgaatatttgcgtggtggtggagtaccctgtttaa

SEQ ID NO: 209366 - DNA, 604 bp, Unknown
  Bacterial polypeptide expressing nucleotide sequence isolated from the Sargasso Sea
aatgttttatgaaaaagatgcagatgtaaatttaattaaaagtaaaaaagttgcaatttttggatatggtagtcaaggtcatgcccatgcattaaatttaaaagacagtggagtaaaagatattgttgtagcattaagagaaggctcatctagtgcagctaaagcagaatcaaaaggactaaaagtaatgaatttatctgatgctgctgaatgggcagatgtagtaatgattttaacaccagatgaactacaagcagaaatttataagaatcatatcgaacagagagtaagagaagggacaagtattgcatttgctcatggtttaaatgttcattatgatttaattaaagccagaaaagatttagatgtttttatggttgctccaaaagggccaggtcatttggtaagaagcgaatatgaaaaaggaggtggagtgccttgtttatttgcagtacatcaaaatggttcaggaaaagctagagacctagctttgtcttatgcttcagcagttggtggaggaagatcaggaattattgaaactacatttaaagacgaagtcgaaacagatttattcggtgacaaactgtattgtgtggaggtttag

SEQ ID NO: 209367 - DNA, 490 bp, Unknown
  Bacterial polypeptide expressing nucleotide sequence isolated from the Sargasso Sea
atgagagtatattacgatagagatgcagatttaaatttaattaaagaaaaaaaaatatcaattgtaggatatggaagtcaaggacatgcgcatgcaatgaatttgagagattctggaatagaaaatgtatcaattgctctaagagaaggttcaaattcaagaagtaaagcagaacaagctaatttcaaagtaatgactcctgcagaggctgcaagttgggctgatgtgattatgatgttaacacctgatgaacttcaatctgaaatttataaaaatgatatagctgaaaatattaaagaagggacaacaatcgcgtttgctcacggattaaatattcactttgatttaattaagcctaaagaaggtatagatgtaataatggttgcacctaaaggtcccggacatacagtaagagcggaatatgcaagaggtgctggcgtaccatgtttagttgctgtagataaaaatccttcaggtaatgctctgaaat

SEQ ID NO: 209368 - DNA, 670 bp, Unknown
  Bacterial polypeptide expressing nucleotide sequence isolated from the Sargasso Sea
atgaaaatttattatgatgatgatgctgatatagaaatcattagaaagctcaatgtaactattgtaggttatggttcccaaggacatgctcatgcaaataatttaaaagattcaggcgtcaacgtaacagttgctctaagagaaggctcatcttcatggaataaggcagttgaagctggattaaatgttatgccagttgctgaatccatacaagatgctgatttagtaatgatgctagccccagatgagttccaaaagggtatttatgataaaaacatccagtcaaatttaaaaagtgatgcaatcttagcttttgctcatgggtttaatattcattttaagaaaattattccagaaaaaggaaatagtgtaattatgattgctccaaaaggaccaggacataccgtcagaagcacttatttaaaaggtggtggtgttccttctttagtggcaatttatcaagacgctatttctaataattcattttctgcaaaggatgtagctttatcatatgcgaaagccaatggaggcactagggctggggttctagagacaagctttaaagaagaaactgaaacagatttatttggtgagcaagcagttttgtgtggaggcatgacagctttaataaaagctggttacgaaactttagtagaagccaggatatagc

SEQ ID NO: 209369 - DNA, 538 bp, Unknown
  Bacterial polypeptide expressing nucleotide sequence isolated from the Sargasso Sea
ttcatatgcttcagctataggttctgggagagctggtattattgaaaccaactttaaggacgaaacagagactgatttatttggagaacaggcagttctctgtggcgggcttactcaattaatccaaaatggttacgaggtattagttgaagatggttatccacctgaaatggcgtatttcgaatgcttgcatgaagtgaaacttatagtagatcttatatacgaaggtggattagaaaatatgagatatagtatttctaatacagcagagtttggtgattatgtaagtggaccaaaagttgtaaattcagatgccaaagaagagatgagagctgtattgaagagaattcaatcaggtgaatttgctcaagaatttatgagcgattgcagagagagtaatgatggaaagggcggaccaaggatgaaggaatatcgtcaacaaacttcagaacactcgatagaaaaagtaggatctgaacttagagctatgatgccttggatagctcaaaacaaaattgtagataaagccaaaaattaa

SEQ ID NO: 209370 - DNA, 724 bp, Unknown
  Bacterial polypeptide expressing nucleotide sequence isolated from the Sargasso Sea
gatgagagtttattatgatagagatgcagatattaatttaatcaaagataaaaagattgttatagtgggttatggtagtcaaggacatgctcatgctatgaatttaagagactcaggaatacagaatgttgctatagcattaagagaaggttctgctactcgagtaaaagctgaaaaagcaaattttaaagttatgagtccttcagaggcttctaaatgggctgatataataatgatgttaactccagatgaacttcaatcagaaatttataataatgaaattggaccaaacatcaaagaaggaacttctattgcttttgcacatggtttaaatattcattttgatttgattcaaccagaagaagggattgatgtaataatgattgctccaaaaggacctggacatactgttagagcagaatatgtaaggggtgctggagtaccgtgcttggttgcagttgataaaaatccatcaggtaatgctctcgaaattggtatagcatatgcttcagcaattggaggtggtagagcaggaattattgaaactacatttaaagaagaatgcgaaactgatctatttggggaacaatcagttttatgtggaggattaactcatctaatcctagcaggttatgaaacacttgttgaagctggttacgctccagaaatggcatattttgagtgtcttcatgaggttaaattaatcgtagatttattgtatgaa

SEQ ID NO: 209371 - DNA, 715 bp, Unknown
  Bacterial polypeptide expressing nucleotide sequence isolated from the Sargasso Sea
gcacttgcatttgcacacggtttaaatgttcattttgaccttattaacgctaggccagatatggatgtatttatggttgcgccaaaaggacctggtcatactgttagatcagaatttaaaaaaggtggtggtgttccatgtttggtcgcagtagatagcgataaaacaggaaaagcacttgatattgcattgtcatatgcgtcagctattgggggaggtaaagctggaattattgaaacaacatttaaagatgaatgtgaaacagatttgtttggtgaacaaactgttttatgtggtggtgtagttgaattgattagaaatggatttgaaactttagttgaagcaggttacccgcctgaaatggcatactttgaatgtttacacgaagtaaaacttattgttgatttaatttatgaaggtgggattgcaaacatgaactactcaatatctaatactgctgaatatggtgagtacgtttctggtcctaagatagttgatggagaaacaaaatcaaaaatgaaaaaggttttggaaaaaatacagtctggagaatttactagagagtggattgaagaatataagagtggtgcaaaaaattttgaagccatgagaagtaaaattgataatcatcaaatcgagaaagttggcaaagatttaagagcaatgatgccttggatttcaaaaaataaactggttgataaggaaaaaaactagt

SEQ ID NO: 209372 - DNA, 571 bp, Unknown
  Bacterial polypeptide expressing nucleotide sequence isolated from the Sargasso Sea
ttgctgttctcaaaatggatcaggtaatgcaagagatattgctatgtcctatgcttcagcaattggcgggggtaggtcaggaattattgaaacaacttttaaagatgaggttgaaacagatttatttggagaacaaactgttttgtgtggaggtttagttgagctaattaaaaatggttatgagacacttgttgaagcaggatatgaacctgaaatggcatacttcgaaactgtccatgaagtaaaattaattgttgatttgatttatgaaggtggaattgcaaatatgaactactcaatttctaatacagcagagtatggagaatatgtttctgggccaaaaataattaataaagaggagacaaaaaagaggatgaaagaggttttagagaaaatccagtctggaaaatttacaaaagaatggattgatgaatgtaagaatggtcaaaaaaactttcttaaaactcgagaaaaattagctgaacatcctattgagaaagttggagcagatcttagagctatgatgccttggattactaagaagaaattggtcgatagcgataagaattaa

SEQ ID NO: 209373 - DNA, 491 bp, Unknown
  Bacterial polypeptide expressing nucleotide sequence isolated from the Sargasso Sea
aggaattattgaaacaacttttaaagacgaatgtgaaacagacttgttcggagaacaaacagttttatgtggtggtttagtagaattaattaaaaatggttttgagactttaacagaagcaggctacccacccgaaatggcatatttcgaaactcttcatgaagttaaattaattgtagatttaatctacgaaggtggaatcgcaaacatgaattactcaatttctaatacagctgagtatggtgaatatatatctggtagaaaaattgtagattcaaaaacaaaagagagaatgaaagaggttttaaaagacattcaatctggcaaatttacaaaacaatggatggatgagtgtaaaggtggtcaaaaaaactttctgaaaatgagagaagaacttgcaaaacatcctattgaaaaagtgggtaaaaaattaagggatttaatgccttggattggcaagaataaactcgtcgataaatcgaagaattaac

SEQ ID NO: 209374 - DNA, 397 bp, Unknown
  Bacterial polypeptide expressing nucleotide sequence isolated from the Sargasso Sea
atgaaaacttattatgataaagatacaaatccaagtttaataaaggataagaaagttgctatctttggttacggcagtcaaggccatgctcatgctttaaatttaaaagacagtggtgttaaagaggttgtagtcgctttaagagaaggttcatccagtataaagaaagcagaaagtgccggattaaaggtaatgacattatctgatgctgcagcttgggctgatgtagttatgatgttaacaccagatgaacttcaatctgaaatttataaaaatcatattgaacaacgaatgaaagaaggaaccagcttagcttttgctcacggattaaatattcattttgatctaattaatgcaagaaaagatttagatgtttttatggtagcgccaaaaggtc

SEQ ID NO: 209375 - DNA, 854 bp, Unknown
  Bacterial polypeptide expressing nucleotide sequence isolated from the Sargasso Sea
agagtcaaagggtttaaaggtaatgaatttatcagatgcagcagaatgggctgacgttgtaatggttttaacaccagatgaattacaagcatctatttataaaaatcatattgaacaaagagttagagaaggtacgtcgattgcttttgcgcatggtttgaatattcattatgatttaattaaagcaagaaaagatcttgatgtgtttatggttgcaccgaaaggaccaggtcatttagttagaagtgaattcgtaaaaggtggcggtgtgccatgtttatttgctgttcaccaaaatggttctggtaaagctagagatcttgcgatgtcttatgcatctgcagttggtggaggaagatccggtattattgaaactacttttaaagatgaagttgagactgatttatttggtgaacaaactgttttatgcggtggattagtagaattaattaaaaatggatatgaaacattagttgaagctggttatgaacctgaaatggcttattttgaaactgttcatgaagtgaagttaatcgttgatttaatttatgagggtggaatagctaacatgaattactctatttcaaatactgcagagtatggtgaatatcaatcgggaccaagagttgtaaataaagaagaaacaaaaaaaagaatgaaagaggttttggatgatattcagtcagggaagttcacaaaacagtggatggaagaatgtaaaaatggtcaaaaaaactttctagcaacaagagctaaactggcagaacaccctgttgaaaaagttggtgcaaatttaagagctatgatgccttggattggcaaaaagaaacttgtagatagcgataagagttaat

SEQ ID NO: 209376 - DNA, 529 bp, Unknown
  Bacterial polypeptide expressing nucleotide sequence isolated from the Sargasso Sea
aatgcgagtgtactatgacagagatgcagatataaatttaattaagaacaaaaaagttgtaattgtaggttatggaagtcagggacatgcgcatgctgctaatttaagagatagtggagtaaaagatgttgcagtcgctttgcgatcagattctacttcagttgagaaagcaaggtcagcaggtttcaacgtaatgaatgttgcagaagcttcaaaatgggcagatgtaattatgatgctaacaccagacgaacttcaaggtaatatttatagaacagatattgaaaagaatatgaagtcaggtgcagcaattgcatttgcacatggtttgaatgtccactttaatcttattgaacctagaaatgatattgatgttttcatggtcgccccaaagggccctgggcatacagttagatctgaataccaaaaaggtggtggagttccatgcttaatcgctattgataaagatgtatctgggaacgttcatgatattggattatcatatgcatgtgcaattggtggtggacgt

SEQ ID NO: 209377 - DNA, 1018 bp, Unknown
  Bacterial polypeptide expressing nucleotide sequence isolated from the Sargasso Sea
catgaaagttttctacgacaaggacgccgacctctccctcatcaagggcaagcaagtcaccatcatcggctatggctcgcaaggccatgctcacgcgctgaacctgaaggaaagcggcgtgaacatcacggtcggtctgcgtaagggcggcgcatcgtggagcaaggctgaaaacgccggcctgcaagtcaaggaagtggcggaagccgtcaagggcgcggacgtcgtcatgatgttgctgccggacgagcagatcgccgacgtctacgcaaaggaagtgcacgccaacatcaagcaaggcgcggcactggctttcgcgcatggcttcaacgtgcactacggtcaagtgatcccgcgtgcggatctggacgtcatcatgatcgcgccgaaggcgccgggccacacggttcgcggtacgtactcgcaaggtggcggcgtgccccacctgatcgccgttgcgcaagacaagtcgggcgcagcacgtgacatcgctttgtcgtacgcggcagcgaacggcggcggccgcgccggcatcatcgaaacgaacttccgcgaagaaacggaaaccgacctgttcggcgaacaggccgtgctgtgcggcggtacggtcgacctgatcaaggccggcttcgaaacgctggtggaagcaggctacgcgccggaaatggcgtacttcgaatgcctgcacgaactgaagctgatcgtcgacctgatctacgaaggcggcatcgcgaacatgaactactcgatctcgaacaacgccgaatacggcgagtacgtgacgggtccgcgtatcgtcacggctgaaacgaagaaggcgatgaaggccgtgctgacggacattcagaccggcgagtacgcaaagagcttcatcatcgaaaacaaggccggcgcaccgacgctgcaatcgcgccgccgtctgacggccgagcaccagatcgaaacggtgggcgcgaagctgcgttcgatgatgccgtggatcgccgcgaacaagctggtcgaccagtcgaagaactaa

SEQ ID NO: 209378 - DNA, 1018 bp, Unknown
  Bacterial polypeptide expressing nucleotide sequence isolated from the Sargasso Sea
atgttttacgaaaaagataccaatgtaaatttaattaaagataagaaagtagcaatttttggttatggaagccaaggacatgcgcacgcacttaatctaagagatagtggtgttaaagaagttgtagtagctttaagagagggctcatcaagtattgaaaaagctgagtctaaaggtttaaaagttatgaatttatctgatgctgcagaatgggcagatgtagttatgattctaactccagacgaattacaagcctcaatatataaaaaccatatagagcaacgtgtaaaagaaggaacatcaattgcgtttgctcatggtttaaatgttcactatgatcttataaaagctagaaaagatttagatgtatttatggttgcaccaaagggacctggtcatttagtaagaagtgaatatgaaaaaggtggtggagtgccttgtttatttgccgtgcaccaagatggttctggtaaagcaagagatttggcaatgtcatatgcatcagctgttggtggtggtagatctggaataattgaaactacatttaaagatgaggtagaaacggatctatttggagagcaaacagtattgtgtggtggacttgttgagttgattaaaaatggatatgaaactttagttgaagctggatacgaaccagaaatggcttattttgaaactgttcacgaagtgaaactgattgtggatttaatatatgaaggtggaattgctaatatgaattattcaatttcaaatacagcagagtatggagagtatcagtcaggtccaagaattattaaaaaagatgaaaccaagcaaagaatgaaagaagttttagcagaaattcaatcaggtaaatttacaaaagaatggatggaagaatgcaaaaatggtcaaaaaaactttcttgcaactagggctaaattagcagaacactcggttgaaaaagttggtgctgaacttcgggctatgatgccttggatttcaaaaaagaaactagttgatagcgataagaagtaga

SEQ ID NO: 209379 - DNA, 487 bp, Unknown
  Bacterial polypeptide expressing nucleotide sequence isolated from the Sargasso Sea
atgcaagtttattatgataaagatgctgatctagatattattaaaaataaaaaagtagtcatagttggttatggttcacaaggtcatgcacatgcaaataatctcaaagattcgggtggaaatgtaaccgttgcactcagaaaagaatctgcctcttggtcaaaagctgaagctgctggattgaatgttcaagaagttgcagaggctgtaaaagatgctgatatggtgatgattttaatgcctgacgaattgcaatctgctacttataagagtgagatagaaaataatattaaacaaggtgctgttttggctttcgcacatggatttaatatccattttgacatgatagagcccagggaagatcttgatgtgataatggttgctcctaaaggtcctggccatactgttagatctcaatatgaaataggtgctggagttccatgccttattgctattcacacagatatctctggtaatgcaaaagaaa

SEQ ID NO: 209380 - DNA, 1018 bp, Unknown
  Bacterial polypeptide expressing nucleotide sequence isolated from the Sargasso Sea
atgttttatgaaaaagatacaaatgtagatttaataaaagataagaaagtagcaatttttggctatggaagccaaggacatgcgcatgcccttaatctaagagatagtggtgttaaagaagttgtggtagctttaagagaaggctcatcaagtattgaaaaagctgagtctaaaggtttaaaagtaatgaatttatctgatgctgcagaatgggcagatgtagttatgattctaactcctgatgaattacaagcatcaatatataaaaatcatatagagcaacgtgttaaagaaggaacatcaattgcgtttgctcatggtttaaatgttcattatgatctcataaaagctagaaaagatttagatgtatttatggttgcaccaaagggacctgggcatttagtaagaagtgaatatgaaaaaggtggtggagttccttgtttatttgctgttcaccaagatggttctggtaaagcaagagatttggcaatgtcatatgcatcagctgttggtggtggtagatctggaataattgaaactacatttaaagatgaggtagaaacggatctatttggagagcaaacagtattatgtggtggacttgttgagctgattaaaaatggatatgaaactttagttgaagctggatatgaaccagaaatggcttattttgaaactgttcacgaagtgaaactgattgtggatttaatatacgaaggtggaattgctaatatgaattattcaatttcaaatacagcagagtatggtgagtatcagtcaggtccaagaattattaaaaaagatgaaaccaagcaaagaatgaaagaagttttagcagaaattcaatctggtaaatttacaaaagaatggatggaagaatgcaaaaatggtcaaaaaaactttcttgcaactagggctaaattagcagaacactcggttgaaaaagttggcgctgaacttcgggctatgatgccttggatttcaaaaaagaaacttgttgatagcgataagaagtaga

SEQ ID NO: 209381 - DNA, 1231 bp, Unknown
  Bacterial polypeptide expressing nucleotide sequence isolated from the Sargasso Sea
atgagtaactacttcaatacattgaatttgcgtcagcagttaaaacagttaggtaaatgccgttttatggccaaagaagagtttgccaaaggctctgatttattgaaaggctggaaagtggtgattgtaggttgtggtgctcagggcttaaaccaaggcctgaatatgcgcgactcaggtctggatatttcttatgccttgcgtgctgaagctattgccgcaaaacgtaagtcgttccaaaacgcctctgacaatggttttaatgtaggcacttacgaagagttaattccgactgcggatttagtattaaacctgactccggataagcagcatacatcagttgttaaagctgtgatgccgttgatgaagcaaggtgcaactttagcttattcgcacggtttcaacattgtggaagaaggtacacaaattcgtaaagacatcactgtggtgatggtagcgcctaagtgtcctggtactgaagtacgtgaagaatacaaaaggggttttggtgtgccaacgctgattgcagtgcaccctgaaaacgatcctaaaggtttaggtttagaaatcgccaaggcgtacgcttctgcaactggtggtgatcgtgccggtgtactggaatcgtcttttgttgctgaagtgaagtccgacttaatgggcgaacagaccattttatgtggcatgttgcaaaccggctctattctggcgtatgacaagttggtggccgaaggtgtagagccaggttatgccgccaagttaatccagtttggctgggaaactgtgactgaagctttaaaacacggtggcatcactcatatgatggaccgtttgtcgaacccagccaaaatcaaagcttatgatttagctgaagaattgaaagtaactttacgtccactgtttgaaaaacatatggacgatatcatcagcggtgaattctcccgcaccatgatggccgattgggccaatgatgataagcagctgtttggctggcgcgaagaaacccgtcaatctggttttgagaatgcacctgtttccagtgagcaaattccagagcaggattatttcgaccgcggaattttgtttgtcgctatggtgaaagccggtgtagagctggcgtttgaaaccatggtcgctgcaggtattgttgaagaatcagcgtactacgagtcgttgcatgaaacaccgttaatcgccaataccatagcgcgtaaacgcttgtacgaaatgaacg

SEQ ID NO: 209382 - DNA, 1018 bp, Unknown
  Bacterial polypeptide expressing nucleotide sequence isolated from the Sargasso Sea
atgttctacgaaaaagatactgacgtaaatctaataaaagataaaaagatcgcaatttttggttatggcagccaaggacatgcgcatgcacttaatctaaaagatagtggtgtaaaagaagtagtggttgctttaagagaaggttctgccagcaaaacaaaagcggagtccaaaggtttaaaagttatgaatttatctgatgctgcagaatgggcagatgtagtaatggtattaactcccgatgaacttcaagcaacaatttataaaaatcatattgaacaaagagttagagaaggaacttcaattgcttttgcacacggactaaatattcattacgatttaattaaagcaagaaaagatttagatgtatttatggtggcgccaaaaggcccaggacatttagtaagaagtgaatttgaaaaaggaggaggagttccatgtttatttgcagtgcatcaaaatggatcaggcaaggcaagagagctagcaatgtcatatgcttcagcagttggtggaggtagatcaggaattattgaaactacatttaaagacgaggttgaaacagatttatttggagaacagactgttctgtgtggaggtttagtagaattaattaaaaatggatatgaaactttagttgaagctggatatgaaccaaaaatggcttattttgaaacagttcatgaagtaaaattaattgttgatttaatttatgaaggtgggattgctaatatgaattattcaatttcaaataccgctgagtacggtgagtatgttactgggccaaaaattattaataaagaagaaacaaagaaaagaatgaaagaagttttggcagatattcagtcaggtaagttcactaaagattggatggatgagtgtaagaatggtcaaaaaaacttcttaaaaaccagagaaaaattagcagaacatccagtcgaaaaagttggagcaggacttagagctcttatgccttggatagctaagaagaagttaatagatagtgacaaaagctaaa

SEQ ID NO: 209383 - DNA, 832 bp, Unknown
  Bacterial polypeptide expressing nucleotide sequence isolated from the Sargasso Sea
atgaaagtttattatgaaaaagatgctaatttagatcttattaaatctaaaaaaatagcaatttacggctatgggagccaagggcatgctcatgcacttaatttgaatgactcaggtgcaagtaatgtagttgttgcgctaagagaaggctcttcaagtgcgaaaaaagctgaagcagaaggtttaaaagtaatgtcgctttcagatgcagctgaatgggccgatattatgatgatgcttatacctgatgagcttcaggctgatgtgtggaaaaatcatattgagcagagagcaaaagaaggctctgcactagcatttgcacacggattaaacattcattttgatttaattaatgccagaactgacatggatgtatttatggtagctcctaaaggtccaggtcatactgttagatctgaatataaaataggtggtggcgtgccatgcttagtggcagttgatagtaataaaacaggaaatgcccttgatctagcactttcgtatgcttctgcaattggcggtggtaaagcaggtataattgaaactacttttaaagatgagtgtgaaacagacttgtttggagaacaaacagttctctgcggcggtgtagtagaattaattagaaatggctttgaaactttagttgaagctggctatccacctgagatggcatatttcgaatgtctacatgaagttaaacttattgttgatttaatatatgaaggtggaatcgcaaatatgaattattcaatttccaacacagctgaatatggtgaatatgtttcaggtcctaaaattgttgatggagatactaaagctaaaagaaaaaggt

SEQ ID NO: 209384 - DNA, 1480 bp, Unknown
  Bacterial polypeptide expressing nucleotide sequence isolated from the Sargasso Sea
atggctaactattttaactctctgaatttacgtcaacaattagcacagcttggccaatgtcgtttcatggaccgttctgaattcagcgacggctgcaattacatcaaagattggaatattgttattttaggttgtggtgctcagggtcttaaccaaggtctgaacatgcgtgactcggggctgaatattgcttacgccctgcgcccagaagccattgctcaaaagcgtgcctcatggcaaaaagccacagacaatggcttcagagtcggtacttttgaagagctgatcccaacggcggatttagtgctgaacttaacgcccgataagcagcactccaatgtagttagcgccgtgatgccactgatgaaacagggcgcaacactgtcttattcccacggttttaacatcgttgaagaaggcatgcagatccgctccgatatcacagtggtgatggtggcgcctaagtgtccaggcactgaagtacgtgaagaatacaagcgtggttttggtgtgccgaccttgattgcagtgcaccctgaaaacgaccctgatggcgatggtttagatattgcgaaagcctatgcgagtgctacaggtggtgatcgtgctggcgtgttgcaatcatcctttatcgccgaagtgaaatcggatctgatgggcgaacaaaccattctgtgcggtatgttgcagactggcgctatcttaggttacgacaagatggtggccgatggtgttgaacctggctatgccgctaaattaattcaacaaggttgggaaaccgtgaccgaggcgcttaagcacggcggtatcaccaatatgatggacagactgtctaatccagccaagattaaagcgtttgaaattgcagaagatttaaaagaaatcctgcaacccttattcgaaaaacatatggatgacatcatcagcggcgagttctcccgcactatgatgcaagactgggccaatgacgacgctaacctgctgcgttggcgcgccgaaaccgccgaaacgggcttcgaaaatgcgccagtgtcgagcgagcatatcgacgagcaaacctatttcgacaaggggattttcctagtcgcgatgatcaaagccggtgtcgaattagccttcgatactatggtgtcggcgggtattgttgaagagtccgcctattacgaatcactgcatgaaacgccgttgatcgctaacaccatcgcccgtaaacgtctttacgagatgaacgtagtgatctcggataccgcagaatacggttgttatctgttcaaccatgctgccgtgcctatgctgcgtgactatgtcaatgccatgtcgccagagtatttaggtgcgggtctgaaggacagttctaacaacgtcgataacctgcagttaatcgccatcaatgatgcgattcgccacacctcagttgagtatatcggtgcggaacttcgtggttatatgactgatatgaaaagtattgttggagcttaat

SEQ ID NO: 209385 - DNA, 928 bp, Unknown
  Bacterial polypeptide expressing nucleotide sequence isolated from the Sargasso Sea
tcttaatctaaaagatagtggtgttaaagaagtagtggtagctttaagagaaggatcaacaagtaaggcaaaagcagagtcaaaaggattaaaagttatgaatttatctgacgctgctgagtgggcagatgtagtaatgattttaacgcctgatgaacttcaagctacaatttataaaaatcatattgagcaacgtgttagagaaggaacttctattgcttttgcacatggattaaacattcattatgatttaataaaagctagaaaagatttagatgtatttatggtggcaccaaaaggtccgggacatttagtaagaagtgaatttgaaaaaggtggtggagtaccttgtttatttgcagttcatcaaaatggatcaggcaaggcaagagaattagcaatgtcgtatgcctcagcagttggtggtggaagatcaggaattattgaaactacatttaaagatgaagtggaaactgatttatttggagagcaaactgttctttgtggtggattggttgaactaattaaaaatggatatgaaactttggtcgaagccggatatgaacctgaaatggcatattttgaaacagtccatgaagttaaattaattgttgatttaatttacgaaggtgggattgctaacatgaattattcaatttcaaatactgctgaatatggtgaatacgtaactggtccaaaaattattaataaagaagaaacaaagcaaagaatgaaagaagttttggcagatattcagtctggtaagttcactaaagagtggatggatgaatgtaaaaatggtcaaaaaaacttcttaaaaacaagagaaaaattagcagagcatccagttgaaaaagttggagcaggacttagagcccttatgccttggatagctaagaagaagttaatagatagtgacaaaagttag

SEQ ID NO: 209386 - DNA, 454 bp, Unknown
  Bacterial polypeptide expressing nucleotide sequence isolated from the Sargasso Sea
atgttttatgaaaaagatactaatgtaaatttaattaaagataagaaagtagcaatttttggttacggaagccaaggacatgcacatgcgcttaatcttagagatagtggtgttaaagaagttgtggtagctttaagagaaggttcatcaagcattgaaaaagctgagtctaaaggtttaaaagttatgaatttatctgatgctgcagaatgggcagatgtagttatgattttaactccagacgaattacaagcttcaatatataaaaaccatatagaacaacgtgttaaagaaggaacgtccatcgcttttgctcatggtttaaatgttcactatgatcttattaaggccagaaaagatttagatgtatttatggttgcaccaaagggacctggacatttagtaagaagtgaatatgaaaaaggtggaggagttccttgtttatttgctgttc

SEQ ID NO: 209387 - DNA, 414 bp, Unknown
  Bacterial polypeptide expressing nucleotide sequence isolated from the Sargasso Sea
aatgttttatgaaaaagatgctgatgtaaatttaattaagcaaaaaaagattgcaatttttggttatgggagccaaggacatgctcatgctcttaatttaaaagatagcggcgtcaaagaagtagtggttgctttaagagatggatcatcaagtaaagcaaaagcagaatctaaaggtctaaaagttatgaatttatctgatgctgcagagtgggcagatgtagttatgattttaactcctgatgaattacaagctacaatttataaaaatcatattgaacaaagagttagggaaggaacctcaatagcttttgctcatggtttaaatattcattatgatttaataaaggctagaaaagatctagatgtttgtatggtagcccctaaaggaccaggtcatttagttagaagtga

SEQ ID NO: 209388 - DNA, 988 bp, Unknown
  Bacterial polypeptide expressing nucleotide sequence isolated from the Sargasso Sea
ttgatcaaagataaaaaaattgcaatttttggttatggcagtcaaggacatgctcatgcgcttaatttaaaagatagtggagttaaagaagttgttgtggctcttagagaaggttctgttagtattgcaaaagcagagtcaaaagggttaaaagttatgaatttatctgatgccgctgaatgggcagatgtagttatgattttaactccagatgaattgcaagcagcaatttataaaaatcatattgaacaaagagttaaagaagggacatcaatcgcatttgctcacggattaaatgttcattatgatttaataaaagctagaaaagatttagatgtttttatggttgctcctaagggtcctggtcatttagttagaagtgagtatgaaaaaggaggaggtgttccttgtttatttgcagttcatcaagatggttctggaaaagcaagagatcttgcaatgtcttatgcttcagctgttggtggtggtagatcaggaataatagaaactacatttaaagatgaagtagaaacagatttatttggcgaacaaactgtgctttgcggtggtttagttgaattgattaaaaacggatatgaaacactagttgaagcgggttatgaacctgagatggcttattttgaaactgttcatgaagttaagttaattgtcgatttaatatatgaaggtggaatagcaaatatgaattattctatttcaaatactgccgaatatggagaatatcaatcaggtccaagaattatcaataaagaagaaacaaaaaaaagaatgaaagaagttttagccgacatccaatctggtaaatttacaaaagaatggatggatgaatgcaaaaatgggcaaaaaaacttccttgcaacaagagctaaactagctgaacattctgttgaaaaagtcggagcagagttaagagctatgatgccatggatctctaagaagaagttagttgacagcgataagaaataga

SEQ ID NO: 209389 - DNA, 901 bp, Unknown
  Bacterial polypeptide expressing nucleotide sequence isolated from the Sargasso Sea
aatgagagtttattacgatagagattgtgatgttaatttaataaaatcaaagaatgtagtagttattggatacggaagtcaggggcatgcgcatgccgcaaatatgaaagatagtggagttaaaaatgttagaatagctcttagggaagattcttcatcagtttctaaagctaaagatgcgggttatgaggttatgaatgtttcagatgctgcgaaatgggctgatgttatgatgatggcaacaccagatgagttgcagtctcaaatttgggaagaaagtttagttgataatatgaaacctggttctgctttaggctttgcccacggtctaaatattcattttggtctaattgatcccaggaaggatatagatatttttatgttagcacctaaagggcctgggcatactgtaagatctgaatacttgagaggtggaggtgttccatcactggtagcagtagctcaagattcaacaaaaaatgctcttgatattggtttgtcttatggatgtgctgtaggcggaggtcgagccggtattattgaaactacatttaaggaagagtgtgaaaccgatttatttggtgaacaagttgtattatgtggaggtttatctgaattaattactgcaggttttgaaacattagtagatgctggttatgctcctgaaatggcatattttgaatgtttgcatgaagttaaacttattgtagatttaatgtatgaaggaggtttagcaaatatgaggtactctatatctaatacagcagaatatggagattatgttactggaaaaagaattataaatgaagatacaagaaaagaaatgaaaagagtacttgatgatattcaatcaggaaaatttgctagggattggatgcaagaatgcaaggttaatcagcca

SEQ ID NO: 209390 - DNA, 1045 bp, Unknown
  Bacterial polypeptide expressing nucleotide sequence isolated from the Sargasso Sea
atgaaaatttattatgatgatgatgcaaatcttgaacttatcaaaaaactaaatgtaacaattattggttatggttctcaaggacatgcacatgcaaataatttaaaagattctggagttgatgttactgttggtttaagagaggggtcttcgtcatggagtaaagcaactgaagcaggattaaaagttatgccagtagatcaatctgtcttaaatgcagatctagtaatgatcttggcgcctgatgaatttcaaaaaggtgtttttgaaaaaagtataaagcctaacctcaaaagtaatgcaattttagcttttgctcatggtttcaatatccatttcaaaaagattgtacctagtgagacaaatactgtaattatgattgcaccaaagggcccaggtcacacagttagaagcacttatttaaatggtggaggagttccatcgctaattgctatatttaatgatgcaatgcaaaagggtgaagattctgcaaaagatattgctttgtcatatgcaaaagcaaatggcggaaccagggctggcgtccttgaaactacttttaaagaggaaacagaaacagacttattcggcgagcaggcagtattgtgtggagggctaactgcactaattaaagcaggttatgaaactttagttgaggcaggttatagtcctgaaatggcatattttgaatgcctacatgaaacaaaactaattacagatttaatacaagaaggcggcatagcaaatatgcattattcaatttcaaatactgctgaatatggtgactatttaagcggcccaaaagttattacagaaaaaacaaaagaagctatgagagaaattcttgataatatccaatccggtaattttgcagatgaatttcttgatgactgcagacaaagtaatgatggttcaggtggaccttttatgaaatcaaatagaaaatcaacgaaaaatcatccaattgaagaagtgggaagagagcttagatctaagatgaaattcctcaattctgaaaaacttgtagatatagaaaaaaattaat

SEQ ID NO: 209391 - DNA, 399 bp, Unknown
  Bacterial polypeptide expressing nucleotide sequence isolated from the Sargasso Sea
aatgagagtatactatgatagagatgcagatttaaatctaataaagaataaaaaaatcgtcattgttggatacggtagtcaaggacatgcccatgcgatgaatttaagagatactggcttagaaaatgtttcaatcgcactaagagaaggatctcagtctagatccaaagctgagcaagcaaatttcaatgtgatgactccagcagaagctgcatcatgggcagacattattatgattttaactccagatgaattacaatctgaaatttatgaaaatgatattgcaaacaatattaaagagggaacaactatagcttttgcacatggtttaaacatacattttgatcttattaaaccaaaagagggtattgatgttattatggttgcacctaaaggacc

SEQ ID NO: 209392 - DNA, 991 bp, Unknown
  Bacterial polypeptide expressing nucleotide sequence isolated from the Sargasso Sea
aatgacccaactcttttacgacacagatgcagatctaagtcttttaaataataaaacaatagcgattattggatatggttcacagggtcatgcacatgccttaaaccttaaagatagtggcatggatgtaattgttggtttgtatgaagggagtaagtctgaaagcaaagctattagcgatggtctacaagtatttagtgtttctcaagcttgcgaaaaagcagactggatcatgattctcctcccagatgagtttcagaaagatgtttatcttaaagaaatagagccaaacctaaaagaaggaaagatattaagttttgctcatggcttcaatataagattcggacttatcaaacctcctggttttgtggatgttgtgatgattgctccaaaaggacctggacatactgttcgttgggaatatcagaatggtcaaggagttccagcattgtttgcagtagagcaggattcttctggaagtgcaagatcattagcgatggcttacgctaaagggattggcggaacgagagcagggattcttgaaacaaacttcaaagaagaaacagaaactgatttatttggtgaacaagctgttttatgcggaggattatcagaactcgtcaaatcaggcttcgaaactctcgtagaggccggatatcagccagaacttgcttacttcgaatgtctacatgaagttaaacttattgttgatttaatggtgaaaggaggcttatcacaaatgagagattccatttcaaatactgctgaatatggagattatgtaagtgggaaaagactcatcaatagtgatacaaagaaagaaatgcagaaaattctaaaagatatacaagatggaactttcgctaagaattttgtggaagaatgcgataaaaataaacccttaatgacaaaattaagagaagagaactcaaaacatgaaattgagaaagtaggtaaaggtctacgatcaatgttcagttggctgaaataa

SEQ ID NO: 209393 - DNA, 667 bp, Unknown
  Bacterial polypeptide expressing nucleotide sequence isolated from the Sargasso Sea
tcgagaaaagatttagatgttttcatggttgcaccaaagggtcctggtcacttagtaaggagtgagtatcaaagaggtggaggcgtcccttgcttaatggcagttcataaagatagctctggtaaggcaagagatcttgctatgtcttatgcatgtgctgttggtggtggaaggtcaggtattattgaaactacttttaaagacgaatgtgaaacagatttatttggtgaacaaactgttttatgcggaggattggttgagcttattaaaaatggatttgaaactttaacagaggcaggatatccgcccgagatggcatattttgaaactcttcatgaggtaaaattaattgtagatttgatatatgaaggtggaattgcaaatatgaattactcaatttctaatacagcagagtatggagagtatgtttcaggaaagaaaattgtagactctaaaacaaaagaaagaatgaaagaggttttaaaaaatattcagtcaggtaaattcacaaagcaatggatggacgagtgcaaaggtggacagaaaaattttttaaaaatgagagaagaattagcaaaacaccctattgaaaaagttggaaaaaaacttagagatttgatgccttggattggtaagaataaattggtcgataaatcaaagaattaac

SEQ ID NO: 209394 - DNA, 1021 bp, Unknown
  Bacterial polypeptide expressing nucleotide sequence isolated from the Sargasso Sea
atgagagtatattatgatagagatgcagatcttaatttaattaaaaataaaaaaatagctattgtaggctatggtagtcaaggtcatgcccatgcaatgaacctccgagattctggcattgaaaatgtagctattgcgcttcgagaagactcagcaacaagagaaaaagctaaaaatgcaagttttgatgttgtgacacctactgaagctgcggattgggccgatataattatgatgttaactcctgatgaacttcaatcagatatctataacaatgaaattgcgccaaatattaaggaaggtacagcacttgcttttgctcacggtttaaacattcattttgatttgatacaaccagcagaaggtattgatgtaattatgattgctccaaaaggaccaggccataccgttcgtgctgaatatgaaagaggagcaggagtaccctgtcttgttgctgttgataaaaatccatcaggcaatgcattagatattgctattgcatatgcatcaggtgttggtggtggaagagccggtataattgaaacaacttttaaagaagagtgtgagactgatttatttggagaacaatctgtattgtgtggaggattgactcatttaattacagcaggttatgaaactcttgttgaagcaggatacgctcctgaaatggcatattttgaatgtcttcacgaagttaaactaatcgttgatctattatatgaaggtggaatggctaacatgcgctattcaatttcgaacactgctgaatatggagattactctagaggaccaagattgattactgatgaaacaaaaaaagaaatgaaaaaaattcttgcagaaattcaatcaggtcaatttaccaaagagtggatggatgaacataaaagtggtcagacaaaatttaaattaatgagaaagcaacaagctgaacattcaattgaagcagtaggagaaaaactaagaactttaatgccatggattgcagaaggcaaaatggttgataaatctaaaaactaga

SEQ ID NO: 209395 - DNA, 1018 bp, Unknown
  Bacterial polypeptide expressing nucleotide sequence isolated from the Sargasso Sea
atgttctatgaaaaagatactgatgtaaatcttattaaagacaaaaaaattgcaatttttgggtatggaagccaaggtcatgctcatgcattaaacttaaaagatagtggagttaaagaagttgttgtagctttaagagaagggtcttcaagtatctctaaagcagagtccaaaggtttaaaagtaatgaatttatctgatgctgctgaatgggctgatgttgttatgattttaacgccagatgaattacaagcagaaatttataaaaatcatattgatcaaagaattagaccaggcacaagtatagcatttgctcacggtttaaatgttcattatgatttaatcaaagctagaaaagatttagatgtatttatggtagctcctaaaggacctggtcatttagttagaagtgaatatgagaaaggtggaggtgtaccatgtttatttgctgttcaccaaaacggatcaggtaaagcaagagatcttgctatgtcatatgcctctgcagtaggtggtggaagatctggaataatagagacaacttttaaagatgaagttgaaacagatctatttggcgaacaaactgttttatgtggaggacttgttgaattaattaaaaatggatatgagacattagttgaggcaggttatgaacctgaaatggcttattttgagactgtccacgaggtaaaattaattgttgatttaatttatgaaggtggaattgctaacatgaattattccatttcaaatacagccgaatatggtgaatatgagtctgggccaagagttgtaaataaagaagaaacaaaaaaaagaatgaaagaggtattagcagatatccaatccggtaaattcactaagcaatggatggatgaatgtaaaaatggtcaaaaaaactttcttgctactagagctaaattggcggaacatcctgttgaaaaagttggtgcaaatttaagagctatgatgccttggattggtaaaaagaaactagtagatagcgataagagttagt

SEQ ID NO: 209396 - DNA, 844 bp, Unknown
  Bacterial polypeptide expressing nucleotide sequence isolated from the Sargasso Sea
tttaagcaatgcggatgctgctcaaaaagctgacttagtaatgtttttaattcctgatgaatttcaaggtaaaacttatatagaagaaatagagcccaatttgaagcaaggcgcgactatagcttttgcgcatggattcaatatacattacaaacaaatcactcctagatcagatctagatgtagttatgatcgctcccaaaggtcctgggcataccgtaagaggtcagtacaaaagtggcgcgggcgtgccatgtttaattgccatccaacaagatgcttcgggtaccgccttggaaaactcaattgcatacgcaagtgcaattggcggcggtagagcggggatcatcaaaaccacgtttaaagacgaaactgaaaccgatttatttggtgaacaagctgtgttgtgcggcggcttaacttctttaattaaagcgggatatgaaacgttaactgaagccgggtatcctccagagttagcttattttgagtgtgtgcacgaggtaaaacttatcgtagatctaatttatgagggtggactagcaaatatgcgttatagcatttccaacactgcagaatatggagattatacctccggtcctaaagtcattaccgatactgctaaagaagctatgaaaaaaattctagaaagagttcaatctggtgattttgctgatgaatttgtatcagatgctagacagagtaacagccaagctggcggaccattaatggaaaagtatcgaaaggagtctcaagaacatccaattgaagaagtcggagagcagttgcgcgggatgatgccatggatttcagagaataaattggtagataaatctaaaaactaa

SEQ ID NO: 209397 - DNA, 991 bp, Unknown
  Bacterial polypeptide expressing nucleotide sequence isolated from the Sargasso Sea
aatgacccaactcttttacgacacagatgcagatctaagtcttttaaacaataaaacaatagcgattattggatatggttcacaaggtcatgcacatgccctaaaccttaaagatagcggtatggatgtaatagtcggattatataaaggaagtaagtctgaaagcaaggctattagtgatggtctacaagtatttagtgttgctgaagcttgcaaaaaagcagactggattatggttctcctcccagatgagtttcagaaagatgtttaccttaaagaaatagaacctaacttaaaagaaggaaagatattaagttttgctcatggttttaatattagatttggacttatcaaacctcctggttttgtagacgttgttatgattgccccaaagggacctgggcacactgttcgttgggaatatcagaatggtcaaggtgtacctgcattgtttgcagttgagcaggactcttctggaagtgcaagatcattagcgatggcttacgctaaagggattggaggaacgcgagctgggatacttgaaacaaatttcaaagaagaaacagaaactgatttatttggcgaacaagcagttttatgcggtggcttatcagaactcgttaaatcaggcttcgaaactcttgtagaggcaggatatcaaccagaacttgcatacttcgaatgtttacatgaagttaaactaattgttgatctaatggtgaagggtggcttatctcaaatgagagattccatttccaacactgcagaatatggagattatgtgagtggcaaaagacttatcaatagtgatacaaagaaagaaatgcagaaaattctaaaagatattcaagatggaactttcgctaaaaattttgtagaagaatgcgataaaaataaacccttaatgacaaaattaagagaagagaactcaaaacatgaaattgagaaagtaggtaaaggtctgcgctcgatgttcagttggctgaaataa

SEQ ID NO: 209398 - DNA, 877 bp, Unknown
  Bacterial polypeptide expressing nucleotide sequence isolated from the Sargasso Sea
tatgaaaacttattacgataaagacacaaacaaagatttaatcaaaaataaaaaggtagctatattcggttatggaagtcaaggccatgcacacgctttaaatttaaaagatagtggagtaaaagaagttgtagtagctttaagggaaggttcttcaagtataaaaaaagcagagggtgccggtttaaaagtaatgtctttatctgatgcagcagcatgggcagatgttgtaatgatgttaaccccagatgaacttcaatcagaaatttataaaaatcatatagagcaaagaatgaaagagggaacaagtttagcgttcgctcatggattaaatattcattttgatttgataaatgcaagaaaagaccttgatgtttttatggtggctccaaaaggtccaggtcacactgttagaagcgaatatcaaaaaggtggaggggtgccttgtctaatggccgtgcataaagatagctcaggcaaagcaaaagatttggctttatcatatgcttcagctgttggtggaggtaaagctggtattatagaaacaacttttaaagacgagtgcgaaacagatttatttggtgagcaaacagttttgtgcggtggtcttgttgaattaatcaaaaacggttttgaaactttaaccgaggctggttatccacctcaaatggcttacttcgaaactcttcatgaggtaaaattaattgttgatttaatttatgagggtggaattgctaacatgaattattccatctcaaatactgcagagtatggagagtacgtttctggaaaaagagtagttgatggtaagacaaaagaaaaaatggaagaagttttaaagatatacaatctggaaaatttaccaaagagtggatga

SEQ ID NO: 209399 - DNA, 1018 bp, Unknown
  Bacterial polypeptide expressing nucleotide sequence isolated from the Sargasso Sea
aatggtaactaaaattatatatgatgattcgatagaccaaaacttaattaagtcaaaaaaagttactgtaattggattcggtagccaaggtcatgcccacgcactcaatctacatgaatcaggtgtagatgttactgtaggattaagagagtcttctgaatcatttaaaagagcatctgatatgggattaaaagttgagaatgtagaagatgccacctctggggcagatgtagttatgcttctattgcccgatcagcttatggctgatatatataacagtgatattgcaccacatatgaaagatggttctacgttgttgtttgcacatggatttaatattcattttggtgaaattgttcctcgtgaagatatatctataggtatggtggcccctaaagggcctggtcacttacttagaaggacttatgaagaagattctggaatgccttgtctagtagctgtagataaagatgtaagtggtaatacatttgaattagcactctcctactcttcagctattggtggaggtaaagcaggaattttaaagacaacattcaaagaagaaacagaaaccgacttatttggtgagcaagttgttttatgtggtggtttaacagagttaattagaaatggttttgaaactttagttgaagcaggatatcaaccagaaagtgcatattttgaaactttacatgaggtaaaactaatagttgatcttatgtatgaaggtggatttgaatggatgagacattccatatcagatactgcagaatatggagacttttcaagaggttcaagaataattacagatgatacaaaaaaagaaatgaaaaaagttcttgaagaaatacaatctggtgcatttgcaaaagaatggatgtctcaagctagagaaggggctccttttcttaatcaaaaaagagaagaagcttctaaacatcagcttgaaaatattggaaaagatttaagagaaatgatgccttttttgaatgccaaggatattaaaaaagatatatga

SEQ ID NO: 209400 - DNA, 364 bp, Unknown
  Bacterial polypeptide expressing nucleotide sequence isolated from the Sargasso Sea
aatgttttatgaaaaagatgcagatgtagatttgattaaaaataaaaaaattgctatatttggatacggtagtcaaggacacgctcatgctttaaatcttaaagacagtggcgttaaagaaattgttgtagcattaagagatggttcttcaagtgcagcaaaagctgagtctaaaggattaaaagtcatgaatttatctgatgctgctgcttgggcagatgtagtaatgattttaactccagatgaattacaggcagaaatttataaaaatcatatagagcaaagagtaaaagaaggaaccagtattgcatttgcccatggattgaatgttcactatgatttaataaagcaagaaaagatctag

SEQ ID NO: 209401 - DNA, 697 bp, Unknown
  Bacterial polypeptide expressing nucleotide sequence isolated from the Sargasso Sea
aatgttttacgaaaaagatacagatgtaaatcttattaaagagaaaaaaatagcaatttttggttatggaagtcaaggtcatgcacatgctcttaatttaaaagatagtggagttaaagaggttgtggtcgctttgagagataattctccaagcaaatcaaaagcagagtcaaaaggattaaaagttatgaatttatcagatgccgcagagtgggccgatgtagtaatggttttaactcctgatgagttgcaggcaacaatttataaaaatcatattgaacaaagagttagagaaggaacttccattgcattcgctcatggattaaatattcactacgatttaatcaaagctagaaaagatttagatgtatttatggttgctcctaaaggaccagggcatttagttagaagtgaatttgaaaaaggtggtggagttccatgtttatttgcagttcatcaaaatggttctggaaaagcaagagaacttgctatgtcatatgcttctgcggtaggagggggtagatcaggtattattgagactacgtttaaagatgaagtagaaactgatttatttggcgaacaaacagttctttgcggtggattagttgaacttataaagaatggatatgaaactttggttgaggcaggctatgaaccagagatggcatactttgaaacagtacatgaagtaaattaa

SEQ ID NO: 209402 - DNA, 784 bp, Unknown
  Bacterial polypeptide expressing nucleotide sequence isolated from the Sargasso Sea
atgttttatgaaaaagatacagatgcaaatttaataaaaaataaaaagatagcgatttttggttatggaagccagggtcatgctcatgctcttaatttaaaggatagtggagttaatgatgtagtggtagctttaagagacggatcttcaagtaagtcaaaggcagaatcaaaaggtttaaaagttatgaacttgtctgatgcagctgaatgggctgatgtggtgatgattttaacaccagatgaattgcaggcaacaatatataaaaatcacatagagcagagagttagagaaggaacctctgttgcttttgcacacggattaaacattcattatgatttaataaaggctagaaaagaccttgatgtttttatggtagcaccaaaaggtccaggacatttagtaagaagtgagtttgaaaaagggggaggcgtcccttgtttatttgcagtgcatcaaaatggttcaggaaaagccagagacctagctatgtcttatgcatcagcaatcggcggtggaagatccggaataattgagacaacatttaaagatgaagtagaaactgatttgttcggagaacaaacagttctttgtggaggacttgtagaattaattaaaaatggttacgaaactttagttgaagctggatatgaacctgagatggcatattttgaaacagtgcacgaagtgaagctaattgtagatttgatctacgaaggtggaattgcaaatatgaattactctatttcaaatactgctgagtatggagaatatgtttctggcc

SEQ ID NO: 209403 - DNA, 526 bp, Unknown
  Bacterial polypeptide expressing nucleotide sequence isolated from the Sargasso Sea
ctgtcttacgcttctgctgttggcgggggaaaagcaggtattattgaaactacttttaaggatgaatgtgaaacagatcttttcggagaacaaacagttctatgtggtggactagttgaattaattaaaaatggttttgaaactttaactgaagctggttatccaccagaaatggcttattttgaaaccttacatgaagttaaattaattgtggatttaatttatgaggggggaatagccaatatgaattattctatttcaaatactgctgaatacggagaatacgtttctggtaaaagaattgtagataataaaacaaaagaaaaaatgaaatcagtcctaaaagatattcagtctggcaagtttactaaagcctggatggatgagtgtaaatctggtcaaaaaaattttgcaaaaatgagaaaagatttagccaatcacccaattgaaaaagttggaaaagatcttagggcgatgatgccctggatcagcaagaataagctggtagataaagatcgaaattagc

SEQ ID NO: 209404 - DNA, 817 bp, Unknown
  Bacterial polypeptide expressing nucleotide sequence isolated from the Sargasso Sea
atgttttatgaaaaagatactgatgtaaatcttataaaagataaaaaaattgcaatctttggttatggtagtcaaggacatgcacatgccttaaatttaaaagatagtggtgtaaaagaagttgtggtggctttaagagaaggttcatcaagtattgctaaagcagagtcgaaaggtcttaaagttatgaatttgtctgatgctgctgagtgggcagatgttgttatgattttaacaccagatgaattacaagcttcaatttataaaaatcatatagaacagagagttagagaaggaacttcaattgcttttgctcatggtttaaatgttcattatgatttaattaaagctagaaaagatttagatgtatttatggttgctccaaaaggacccggtcatttagttagaagtgaatatgaaaaaggaggtggagttccctgtttattcgctgttcatcaaaatggctcaggcaaagctagagacttagctatgtcttatgcttctgctatcggtggtgggagatctggaataattgaaacaacttttaaagacgaagttgaaactgatttatttggtgaacaaactgttttatgtggtggattagttgaattaataaaaaatggttatgaaactttagttgaggcaggatatgagcctgagatggcatattttgaaactgttcatgaagttaaactaattgttgatttaatttatgaaggtggaatagcaaatatgaattactctatttcaaatacagcagaatatggtgagtatcaatctggaccacgaattataaataaggaagatacaaaaaaaa

SEQ ID NO: 209405 - DNA, 694 bp, Unknown
  Bacterial polypeptide expressing nucleotide sequence isolated from the Sargasso Sea
ttaaatatacattttgatttaatcaaaccaaatgctaacatagatgtgattatgatggctccaaaaggccctggtcatactgttagagcagaatatgttagaggtgcaggagtcccatgtcttgttgcagttaatcagaatccttctggtaatgctcttgaaattgcaatagcttactcttcagcaataggtggtggtagagctggaataatagaaacaacttttaaagaagaatgtgaaactgacttatttggagaacaatcagttttatgtggaggtctaacacatttaattatagcaggttatgaaactttggtggatgcaggttatgctccagaaatggcatattttgaatgtcttcatgaagttaagttaattgtagatcttctttatgagggtggtatggccaacatgcgatattctatttctaatacagctgaatacggtgattattctagaggtccaagattaattactgatgaaacaaaaaaagaaatgaaaaaaatcttatctgaaatacaatctggtcaatttgctaaagaatggatggaagaacatagagctggtcaaactaagtttaccacaatgagaaaaaaacatgctgagcatcctattgaaaaaattggtgaaaaattaagaacactaatgccttggatagctgaaggaaaaatggttgataaaagtaagaattaat

SEQ ID NO: 209406 - DNA, 1018 bp, Unknown
  Bacterial polypeptide expressing nucleotide sequence isolated from the Sargasso Sea
atgaatatttattatgacaaagatgctgatttatcaatcataaaaggtaaacaagtagccataattggatatggttcgcaaggacatgcgcacgcaaataatcttaaagactctggtgttaatgtatgtgttggtttacgtgacgggtcatcatctatcgaaaaagccaagtcagcagggttagaagtaaaatctattgcagaggctgtttctgcctctgacgtagttatgatactggcacctgatgaacatcaatctgaattatacaaaaatgaaatagagccaaatataaaacaaggcgcagcacttgcatttgctcatggttttaacattcactttaaacaaatcattccgcgagctgatttagatgtgattatggtagcccctaaaggcccaggacatttggttcgtgctacttactcaagcggcggtggagtcccatccttaattgctatatttcaggattcttctggtcacgctaaagagctttctctatcttacgcttcagctaatgggggtggccgtgcagcaatcattgaaaccacatttaaagaggaaactgaaaccgatttatttggcgagcaaacagtattatgcggtggtattacatctctcatacagactggttttgagaccttagtagaagcaggatatgcgcctgagatggcatattttgaatgtttacacgagacaaaattgattgttgatttaatttacgaaggcggcattgcaaatatgcgttattcaatttcaaataccgcagagtatggtgattttacacgcgggcctcgtgttataactgaagatacaaagcgcattatgaaagaaattttagcagagatacaaagcggtgaatttgcacgtgaatttatttcagaatataaaaatggtgctcctgttatggaagaaaaaagacgtgtaagtcgtgaacacggaattgaaattattggtgaaaagttgagatctatgatgccgtggattggagaaaataaattagttgatgaaaaaaagaattaac

SEQ ID NO: 209407 - DNA, 991 bp, Unknown
  Bacterial polypeptide expressing nucleotide sequence isolated from the Sargasso Sea
atgacccaactcttttacgacacagatgcagatctaagtcttctaaataataaaacaatcgcgattattggatatggttcacaaggtcacgcacatgccctaaaccttaaagatagcggtatggacgtaatcgtaggattatataaagggagtaagtctgaaagcaaagctattagcgatggtctacaagtttttacagtttctgaagcttgcgaaaaagcagactggattatgattctcctcccagatgagtttcagaaagatgtttacttaaaagaaatagagccaaacttaaaagaaggaaagatattaagttttgctcatggctttaatattagattcgaacttattaaacctcccagttttgtggatgttgtaatgattgccccaaaaggacctggacacactgttcgttgggaatatcagaatggtcaaggtgtacctgcattgttcgcagttgagcaggattcttctggaagtgcaagatcattggcgatggcttacgctaaagggattggaggaacgcgagctgggatacttgaaacaaatttcaaagaagaaacagaaactgatttatttggcgaacaagcggttttatgcggaggcttatcagaactcgtcaaatcaggcttcgaaactcttgtagaggcaggatatcaaccagagcttgcatacttcgaatgtttacatgaagttaaactaattgttgatctaatggtgaagggaggcttatctcaaatgagagattccatttccaatactgcagaatatggagattatgtaagtggcaaaagacttatcaatagtgatacaaagaaagaaatgcagaaaattcttaaagatattcaagatggaactttcgctaagaattttgtagaagaatgtgataaaaataaacccttaatgacaaaattaagagaagagaactcaaaacatgaaattgagaaagtaggaaaaggtctgcgctcgatgttcagttggctgaaataaa

SEQ ID NO: 209408 - DNA, 1018 bp, Unknown
  Bacterial polypeptide expressing nucleotide sequence isolated from the Sargasso Sea
atgttttacgaaaaagatactgatgcaaatcttataaaagataaaaaaattgcgatttttggttacggaagccaagggcatgctcatgcattaaacttaaaggatagcggagtaaaagatgttgttgtcgctcttcgtgaaggatccgcaagtattactaaagcagaatcaaagggattaaaagttatgaatctttcagacgctgcagagtgggctgacgttgtaatgattttaactccagatgagttacaagcaactatttataaaaatcatattgagcaaagagtaaaagaaggaacatctatagctttcgctcatggattaaatgttcactatgatttaataaaagctagaaaggatttggatgtatttatggtggccccaaaaggaccaggtcacttagtcagaagtgaatttgaaaaaggtggtggggttccatgcttgtttgctgttcatcaaaacggatcaggaaaagctagagacttagcaatgtcttatgcatcagcaataggtggtggaagatctggtataatagaaacaacatttaaagatgaagtagaaacagatttgtttggcgaacaaacagttttatgtggtggtcttgttgaattaattaaaaatggatatgaaactttggttgaggctggttatgaacctgaaatggcatattttgaaactgttcatgaagttaaacttattgttgatttaatttatgaaggtggaatagcaaacatgaattattctatttctaatacagctgaatatggagaatacgagtctggtccaagaattataaacaaagaagaaacaaaaaaaagaatgaaagaagttttggcagatatccagtctggtaaatttaccaaacagtggatggatgaatgcaaaaatggtcaaaaaaatttcctggcaacaagagcaaaactagcagaacatccagttgaaaaagttggtgctactttaagagaaatgatgccttggattgctaagaagaagcttgttgatagcgataaaaaataac

SEQ ID NO: 209409 - DNA, 982 bp, Unknown
  Bacterial polypeptide expressing nucleotide sequence isolated from the Sargasso Sea
atgttttatgaaaaagatgcagatgtaaatcttataaaaagtaaaaaagttgcaatttttggttatggaagtcaagggcatgcccacgcattaaatttaaaagatagtggtgtgaaagatattgttgttgctttgagagaaggttcgtcaagtgcagcaaaagcagaatcaaaaggattaaaagtaatgaatttatcagatgctgctgaatgggctgatgtagtaatgattcttacaccagatgaacttcaagcagaaatttataaaaatcatattgaacaaagagtaagagaaggaacaagtattgcgtttgctcatggtttaaatgttcattacgatttaataaaagctagaaaagatttagatgtttttatggttgctccaaaaggacctggtcacttggttagaagcgaatatgaaaaaggaggtggagtgccttgtttgtttgctgtacaccaagatggatctggaaaagcaagagacttagctttatcgtacgcttcagcagttggaggaggaagatcaggaattattgaaactacatttaaagatgaagttgaaacagatttatttggtgaacaaactgtattatgtggaggtttggttgagctaattaaaaatggttatgagactttagttgaagcaggatatgaacctgagatggcatactttgaaacagttcatgaagttaaattaattgttgatttaatttatgaaggtggaattgccaatatgaattattccatctctaatactgcggaatatggtgaatatcaatcgggaccaagaatagtcaataaagaagaaaccaaaaaaagaatgaaagaaattttagctgaaattcagtccggaaaattcactaaagaatggatggatgaatgcaaaaatggtcaaaagaattttcttgccacaagagctaaattagccgaacacccagttgaaaaagtgggcgcagagcttagagctatgatgccttggattg

SEQ ID NO: 209410 - DNA, 447 bp, Unknown
  Bacterial polypeptide expressing nucleotide sequence isolated from the Sargasso Sea
aatgttttatgaaaaggacactgatgtaaatttaattaaaaataaaaagattgcaatctttggatatggaagccaaggacacgcacacgcccttaatcttaaagatagcggggtaaaagaagtggtggttgctttaagagatggttcagctagtaaagcaaaagcagagtcaaaaggattaaaagttatgaatttatctgatgcagccgaatgggcagatgtagttatgattttaactcctgatgagctacaagctacaatttataaaaatcatattgagcaacgtgttagagaaggaacctcaattgcttttgcacatggattaaacattcattatgatctgataaaagctagaaaagatttagatgtttttatggtagctccaaaaggtccaggacatttagtaagaagtgaattgaaaaaggtggtggagtaccatgtttattg

SEQ ID NO: 209411 - DNA, 1000 bp, Unknown
  Bacterial polypeptide expressing nucleotide sequence isolated from the Sargasso Sea
atggcaaagacatggaaagatgcagacattagtcttgaccctatcaaagaccaaactattgcagtaattggatatggtatccaaggagatgcacaggcaaataacatgaaagattcaggtctaaaagttattgttggtttaagagaaggtagtccaacttggaataaagcaaaagaagacggtcaccaagtaatgtcagttgccgatgccacaaaacaagcagacattgttcacattttacttccagatatggttcaagccaaagtgtacaaagaagaaattggtccaaacctttcagaaggaaatgcattatcattttcacatgcagcagcaatttactggaaatggattgacgcaccagaaaatgttgatctaattatggttgcaccaaaaggtcctggctctaaagtaagagagacatacttacaaaactttggaactccatcaattgttgcagtagaacaagacaagacaggtaatgcatgggatagaacattaggaattgcaaaggcaattggtagtgctcgtgctggattaatccaaactacattcaaagaggaagttgaaactgactggtttggggagcaagcagatttgtgtggtggttctgcatcaatggtagttaacgcatttgagacattagtagaagcaggctatcaaccagaaattgcatactttgaggtattacacgaattaaaattaattgtagacatgattcaaagatatggaatcaatggaatgtggagacgtgtttcagaaactgcaagatatggtggacttacaagaggtccaatggtcatgacatctgatacaaaagaaaacatgaaaaaagttctaacaatgattcaagatggaacatttaacaaagaatggattgacaattatcaaaatgaaggcaaggctgcatttgataaatacatgaaagacttggatggtcatcaaatcgaaactgtaggaaaacagatgagaaaaatgatgtggcctgactctactgaataaa

SEQ ID NO: 209412 - DNA, 661 bp, Unknown
  Bacterial polypeptide expressing nucleotide sequence isolated from the Sargasso Sea
atgcaagtttattacgataaagatgctgatctagatattataaaaaataaaaaagtagtcatcgttggttatggttctcaaggtcatgcgcacgcaaataaccttaaagattcgggtggcaatgtaactgttgcattaagaaaagaatccacttcatgggctaaagctgaagctgctggactgaatgttcaagaagttgctgaagctgtgaaagatgcagatatggtcatgatactaatgccagacgagcttcaatcagctacttataaaagtgaaatagagagtaatatcaaagaaggcgcggtcttggctttcgcgcacggatttaatattcactttgacatgatagaacctagaaacgacctcgacgttataatggttgctcctaaagggcctggtcatacagttagatctcaatatgaaattggtgctggagttccctgtcttatagcaattcacaaagatgtctcaggcaatgcaaaagaaataggcttgtcttacgcttctgcaataggctctggaagagcgggcataattgaaaccaactttaaagatgaaaccgagacggatttatttggcgaacaggctgtgctttgtggtggcttaactcaattaattcaaaatggttatgaagtgttagttgaagatggatatccaccct

SEQ ID NO: 209413 - DNA, 1033 bp, Unknown
  Bacterial polypeptide expressing nucleotide sequence isolated from the Sargasso Sea
aatggaagtattttacgaaaaagattcaaatcctgaattattaaaagataaaactatagcgattataggctacggttctcaaggtcatgcacatgctaataatttgaaagactctggtttcaatgtaattcttggattaagagatggatcatcttcagctgcaaaggcatctgaagcaggttttgaagttgctagtaatgtcgaagctgcatctaaagccgatgtattgatgatgttaattcccgacgagtttcaaggaattacttataaagaagagatagaacctaaccttaagcaaggcgctaccttagcatttgcgcatggatttaatattcattacgaacagattgttccaagagatgacttagacgtaatcatgatagctcctaaaggacctggtcatacagtccgaggccaatacttagatggagctggagtaccttgcttagttgcaattcatcaagatgcctcctctaatgcgttggatacatcaattgcttatgcttcagctataggtggcggtagagcaggtattatcaaaacaactttcaaagatgaaacagagacagatttgtttggtgaacagtctgtgctgtgtggaggtctgacttcattgattcaagcaggctatgaaactctggtagaagccggttatccacccgagatggcatattttgaatgtgtacatgaagttaaattaatcgttgatttgatttatgagggaggtttagcaaacatgagatatagcatttcaaatacagcagaatatggagattacacttcaggacctaaagtaattactgacgaaaccaaaaaggaaatgaaaaaaattcttgaaaggattcagtctggagattttgcagacgaatttattgctgatgcaagaaaaagcaacggtccagatggaggtcctgcaatgcaagaatttagaagacaatcagccgcacatccaatagaagaggttggaaaatctttaagagagatgatgccttggatagctaataaccgtctggttgataaggcaaaaaactag

SEQ ID NO: 209414 - DNA, 1018 bp, Unknown
  Bacterial polypeptide expressing nucleotide sequence isolated from the Sargasso Sea
aatgttttatgaaaaagatactgatgtaaatttaattaaaagtaaaaaaatagctatttttggttatggtagtcaaggacatgcccacgcacttaatttgaaagacagtggtgttaaagaagttgtagttgctctaagagatggatcgtcaagcaaagcaaaagcagagtctaaaggacttaaagttatgaatttgtcagatgccgcagagtgggcggatgttgtaatgattttaacaccagatgaattacaagctacaatttacaaaaatcatattgagcaaagagtcagagaaggaacttcaatcgcatttgcacatggattaaatattcattacgatcttattaaagcaagaaaagatctagatgtatttatggttgcaccaaaaggaccaggtcatttggtaagaagtgaatttgaaaaaggtggaggcgttccatgtttattcgctgttcatcaaaatggttctggaaaagcaagagatctagctatgtcatatgcgtctgcagttggcggaggtaggtcaggaataattgaaacaacatttaaagacgaagtcgaaacagacttatttggagagcaaactgttttatgtggtggattagttgaactaattaaaaatgggtatgaaactttagttgaagcaggttatgagccagagatggcatattttgaaactgttcacgaagttaaattaatcgttgatttaatttatgaaggtggaattgcaaatatgaattattcaatttcaaatacggctgagtacggagaatatgtgaccggaccaagaattattaataaagaagaaacaaagaaaagaatgaaagaagttcttacagatattcaatcaggcaagtttaccaaagaatggatggatgaatgtaagaatgggcaaaagaatttcttaaaaactagagaaaaattagctgaccatccagtagagaaagttggagcaggtctaagagcaatgatgccttggatagctaaaaagaaactagttgatagtgataagaaataa

SEQ ID NO: 209415 - DNA, 1045 bp, Unknown
  Bacterial polypeptide expressing nucleotide sequence isolated from the Sargasso Sea
gatgaaaatttattatgatgatgatgccaatatagaactcatcaaaaatcttaaagtaacaattatagggtatggatctcaaggacatgctcatgcaaacaatcttaaagattctggagtagacgtaactgttggtttaagagaaggctcatcttcatggggtaaagcttctgaagctggtttaaatgtaaagactgttgaagaatcaatttcaaatgctgacttgattatgatacttgcgccagatgagttccaaaaaggaatatttgaaaaaaatattagaccaaatttgaaaccagatgcaattcttgcttttgctcacgggtttaacattcattttaaaaagattattgctgaagaaactaacagtgtaattatgattgcacctaaaggcccaggccacactgtaagaagcacgtatttaaaaggcggaggcgttccatctttaatagctatttaccatgactcgctagataatgaagactactcggcaaaagatattgcattatcttatgcaaaagcaaatggaggaactagagcaggtgttttagaaacttcatttaaagaagaaactgaaacagatctatttggtgaacaagcagttttatgcggaggtatgacagcattaattaaggctggttttgaaactttagttgaagctggttatagtcctgaaatggcatattttgaatgcttacatgaaacaaagttgatcacagatcttattcaagagggaggtattgctaatatgcattactccatttcaaacacagccgaatatggtgattatttaagtggccccaaggttattacggatgatacaaaagttgctatgaaaaagattctagataatattcaatctggtaattttgctgacgagtttttggatgattgtcgccaaagcaatgatggatcaggtggaccatttatgaaaagtaaaagagaatctactaaaaatcatccaatcgaaaaggttggaaaagagcttagatctaagatgaaattcctcaatagcgaaaaactagtagataaagaaaaaaattaa

SEQ ID NO: 209416 - DNA, 922 bp, Unknown
  Bacterial polypeptide expressing nucleotide sequence isolated from the Sargasso Sea
gatgttttatgaaaaagatactgatccaaatctaattaagaataagaaaattgctattttcgggtatggtagtcaaggacatgctcatgccttaaatttaaaagatagcggggttaaagaggttgtcgtagcactaagagatgggtctgctagcaaagcaaaagctgagtctaaagggttaaaagttatgaatttatctgatgccgcagaatgggcagacgtgattatggttttaacaccagacgaactacaagcatcgatttataaaaatcacattgaacaaagagtaaaagagggaacttcaattgcttttgctcatggtttaaatgttcattatgatctgattaaagctagaaaagatttggatgtttttatggttgcaccaaaaggcccaggacatttggtaagaagtgaattcgaaaaaggaggtggagttccatgtctctttgcagtgcatcaaaatggatcaggtaaagctagagatttagctatgtcatatgcttctgcaattggcggtggtcgatcaggtattattgaaactacatttaaagatgaagtagaaacagatttatttggagagcaaactgttttatgtggtggattagttgaacttataaaaaatggttatgaaactttggttgaagctggctatgaaccggaaatggcatattttgaaactgttcatgaagtaaaattaattgttgatttaatttatgaaggtggaattgcaaatatgaattattcaatttctaatactgctgaatatggagaatatatgtctggccctagaattataaacaaagaagaaacaaaaaaaagaatgaaagaagttcttcaagatattcaatcaggtaaatttaccaagcagtggatggatgaatgcaaaaatggccaaaaaaattttcttaaaacaagagagaaa

SEQ ID NO: 209417 - DNA, 484 bp, Unknown
  Bacterial polypeptide expressing nucleotide sequence isolated from the Sargasso Sea
atgaaaatctattatgatgaagatgcaaatctagaaattattaagaaccttaaagtagcaataatcggatatggttctcaaggacatgctcacgcaaataatttacatgattcaggagtggatattacagttggtctcagagagggttcagcctcatgggataaggcagaatctgctggcttaaaagtttcaagtgtaggagactcagttaaaggctctgattttgtaatgattctagcgccagatgagtttcaaagtgatttgtattcaaaacagatagagccaaacctcaaagaaggcgctattttggcttttgcacatgggtttaatattcattttggtaagatcaaacctactgatgatattagcgtagtgatgattgctccaaaagggcctggtcatactgttagaagcacatatatgtctggaggaggagtgccttcattaattgcaatatacagagattctattccgcaaaagattt

SEQ ID NO: 209418 - DNA, 709 bp, Unknown
  Bacterial polypeptide expressing nucleotide sequence isolated from the Sargasso Sea
ttttgctcatggattgaatattcattatgaactaattaatgcaagaaaagatttagatgtatttatggtagccccaaaaggtcctggccacctcgtgagaagcgagtatgaaaaaggaggtggagtaccatgcctatttgcagttcaccaaaatggctcaggcaaagcaagagaacttgcaatgtcttatgcatcagctgttggtggtggaagatcaggaataattgaaacaacttttaaggatgaggttgaaactgatttatttggagaacaaactgttctttgcggtggtttggttgagttaattaaaaatggttatgaaactttggtcgaaggaggctatgagcccgaaatggcatattttgaaacagttcacgaagtcaaattaatagttgatttaatttatgaaggtggaattgctaatatgaattattctatttcaaacaccgcagaatatggtgagtaccaatctggaccaaaaataattaataaagaagaaacaaaaaaaagaatgaaagaagttctagatgatattcagtctggtaagtttactaaagattggatggatgaatgtaaaaatggtcaaaaaaacttcctagcaactagagcaaaattagccgagcatccagttgaaaaagtaggggcaaaccttagagcaatgatgccttggattgccaaaaagaaattagttgatagtgataagaaatag

SEQ ID NO: 209419 - DNA, 1033 bp, Unknown
  Bacterial polypeptide expressing nucleotide sequence isolated from the Sargasso Sea
atgcaggtttattacgataaggacgccgatctagaaattataaaaaataaaaaagttgtgatcgttggttatggctcacaaggtcacgctcacgctaataacctaaaagattctggaggtaacgtaacggttgcattaaggaaagactcctcttcttgggaaaaagcagaagcagccggtcttcaagtacaagaagtttcagaagcggtcaaagatgcagatatggtcatgattttgatgcctgatgaattgcaatcagcaacttataaatcagaaattgaacaaaatataaaagaaggggcggttttagcttttgcccatggttttaatattcattttgatatgatcatgccaagagaagatcttgatgtcattatggtcgctccaaaaggaccgggtcatacagtcagatctcagtacgaaataggtgcaggtgtaccttgtttgttggcaatacacaaggatgtatcaggtaatgctaaagatattggtttgtcttatgcctcagcaataggatcaggacgagcaggaataatagaaactaattttaaggatgaaactgagacggatttatttggtgagcaggctgttttatgcggtggtctaactcagttgatacaaaatggttacgaggtgttagttgaaggtggctaccctcctgagatggcttatttcgaatgccttcatgaggtcaagcttattgtggatttgatttatgaaggtgggttagaaaacatgaggtatagcatttcaaatactgctgaatttggagactacgttagtggaccaaaagtcattaattctgacaccaaagaagaaatgcgcgctatcctaaaacgtatccaatctggagaatttgcaaatgaattcatgtctgattgcagagaaagtaatgatggaaaaggtgggcctaggatgaaagaataccgccaacaaacatcagaacattccattgagaaggtagggtcagaattacgagctatgatgccatggatagctcaaaacaaaatcgtagataaagcaaagaattaga

SEQ ID NO: 209420 - DNA, 1018 bp, Unknown
  Bacterial polypeptide expressing nucleotide sequence isolated from the Sargasso Sea
aatgcaaatattttatgacagtgatgctgatcagaatattgttaaagggatgaacatagtaatcgttgggtatggatcgcaaggacatgctcacgcaaacaatctgaaagattctagtgctaatgtgactgttgcccttcgaaaggagtctgagtcttgggcaaaagccgaatctgctggattcaacgttaaagaagttgatgatgcagtgcctgaagcagatcttgtgatgatgctaattcctgatgagaaacaggctgtaatgtatgaaaattatcttaaaggtaatatcaaagatggagctgttttggcctttgctcacgggtttaatatccattttgaaatgattgttccaagagaagatcttgatgtaataatgatcgctccaaagggaccgggacatactgtccgttctcaatttgaatcaggcgcaggagtgccttgcttactcgcaattcataaaaatgtttctggtaaagcaaaggacattggtctttcgtatgcatctttaataggctcaggtcgagctggaattatagagacaaactttaaagacgagactgaaacagatctctttggggaacaagcagtgctttgtggcgggctgacctctctaattcaaacaggctatgaggtcttggtagaaaatggctatccacctgaaatggcttattttgaatgcctacacgaggtaaaactcatcgttgacctcatttatgaaggaggccttcaaaatatgaggtacagcatttccaatactgcagagtatggggattatgtaacaggtccaaaaattgtgaatcaaagcacaaaagaaacaatgcagaaaattctaagtgagattcagtctggagaatttgccaaagacttcatggatgattgtaactctggtggtgacaagatgaatgaatacagaagaaattcatccgaacactctatagaggcagtgggagaaaaccttcgttcaatgatgccttggatttctgctaataaaattgtcgacaaagctaaaaattaa

SEQ ID NO: 209421 - DNA, 739 bp, Unknown
  Bacterial polypeptide expressing nucleotide sequence isolated from the Sargasso Sea
aatgttttatgaaaaagacactgatgtcaacctgattaaagataaaaagatcgcaatttttggttatggtagtcaaggtcatgcacatgcacttaatctaaaagatagtggagtaaaggaagtggtagttgcattaagagaaggctcagctagcaaaacaaaagctgaatctaaaggactaaaagttatgaatttgtctgatgccgctgaatgggctgatgtagttatggttttaactcctgatgaacttcaagcaacaatttataaaaaccacatagagcaaagagttagagaaggaacatctattgcattcgcacatggtttaaatatccattatgatttaattaaagcaagaaaagatttagatgtatttatggtagcgccaaagggtcctggacatttagttagaagtgaatatgaaaaaggaggaggagtaccttgtttatttgctgtccatcaaaatggatcgggcaaggcaagagaattagcaatgtcgtatgcttcggcagttggtggtggaagatcaggaattattgaaactacatttaaagatgaagttgaaactgacctatttggggaacagactgttctttgtggaggtttagtagaattaattaaaaatggatatgaaactttagttgaagctggatatgagccagaaatggcttattttgaaacagttcataaagtaaaattaattgttgatttaatttatgaaggtggaatcgctaatatgaat

SEQ ID NO: 209422 - DNA, 466 bp, Unknown
  Bacterial polypeptide expressing nucleotide sequence isolated from the Sargasso Sea
atgaatgtgaaacagatttattttggagaacaaacagttttgtgtggtggtttagtagaactaattaaaaatggttttgaaactttaactgaggcaggctatccacctgagatggcgtactttgagactcttcatgaagttaaattaattgtagatttaatttatgaaggaggtatagctaatatgaattattcaatttctaatactgccgaatatggagaatacatatctggaaagaaaatagttgatccaaaaactaaagagaggatgaaagaagttttaaaagacattcaatcaggcaaattcacaaaacaatggatggatgaatgtaaaggcggtcagaaaaactttttaaaaatgagagaagaactggcaaaacatcctattgaaaaggtcggaaaaaaacttcgagatctaatgccttggattggaaaaaataaattggtagacaaagctaagaattaac

SEQ ID NO: 209423 - DNA, 629 bp, Unknown
  Bacterial polypeptide expressing nucleotide sequence isolated from the Sargasso Sea
cttatcttcaggtggaggtgttccatctcttatagctatatatagagactcaatttctaatgaatcatattctgcaaaagatgttgcattgtcttatgcaaaagcaaatggtggaacaaaggcaggagttttagaaacaacttttaaagaagagacggaaacagatttatttggcgaacaagctgtattatgtggtggcatgacagcgttaattaaagcaggttatgaaactttagtagaagcaggatatagtcctgaaatggcttattttgaatgtttgcatgaaacaaaattaatagttgatcttattcaagaagggggtatttcaaatatgcactattctatttctaatactgctgaatatggagattacttaagtgggcctaaaataattactgatgaaactaaggagtctatgagagaaattttagaaaatatacaatcaggtaattttgcaaatcaatttttgaatgattgtagacaaagcaatgatgggtctggaggacctttcatgaaaagcaatagagaagctactaaaaatcatccaattgagagtgttggacaagagttaagatctaaaatgaagttcctaaaaacacaaaaattagtagataaaaaaattaattaaa

SEQ ID NO: 209424 - DNA, 1045 bp, Unknown
  Bacterial polypeptide expressing nucleotide sequence isolated from the Sargasso Sea
aatgaaaatctattatgatgaagatgccaatctagaaattatcaagaaccttaaagtagcaataattggatatggctctcaaggacacgctcacgcaaataatttacatgattcaggagtagatattacagttggtctcagagaggggtctacttcttgggaaaaagcagaatctgctggtctaaaagtttcaagtgtagaagactcagttaaagactctgattttgtaatgattttggcacctgatgagtttcaaagtgatttgtatacaaaaaaaatagagccaaacctcaagcagggagctattttggcttttgcacatggatttaatattcattttgctaagatcaaacctactgatgatatcagcgtagtgatgattgctccaaaagggcctggacatactgtcagaagtacatatatttctggaggaggagtaccatcattaattgcaatatacagagattctatttctgcaaaagactttaatgctaaagatgttgctctttcttatgcaaaagcaaatggcggaactagagcaggtgttctagagacttcttttagagaagaaaccgaaacagatttatttggagagcaagctgttctatgtggaggaatgacagcactaataaaagcaggttatgagacattagtagaagcaggctatagccctgagatggcatattttgaatgtttgcatgaaacaaaactaattgttgaccttcttcatgagggaggaatctctaatatgcattattcaatatcaaatactgcagagtttggtgattacttaacaggcccaagaatcattactgaagaaacaaaaaaagaaatgaaaaaagtccttgaagacattcaatcaggtgattttgcggataagtttcttgacgattgtcgtcaaagtaacgatggaagtggcggcccttttttaaaaaataatcgagaaaaaactaaggaacattctatagaatttgttggaaaagaacttcgatccaagatgaagtttttgagtgaaaaaaagcttgttgataaagataaaaattaa

SEQ ID NO: 209425 - DNA, 481 bp, Unknown
  Bacterial polypeptide expressing nucleotide sequence isolated from the Sargasso Sea
atgcaaatttattatgacagtgatgctgatcagaatatcgctaaagggatggaaatagtcatcattggttatggatcgcaaggacatgctcatgcaaacaatcttaaagattcaggtgccaatgttacggttgctcttagaaaagaatctggatcatgggcaaaagctgaagctgctggttttgatgtcaaagaggtaggcgaagctgtacccaatgcagatcttgttatgatgcttattccagatgagaaacaatcagctatgtatgaaaatcatttaaaagacaatataaaagatggagcagttctggcatttgctcatggatttaatatccactttgaaatgattattcctagagatgatctggatgtaattatggttgcaccgaaaggcccaggacatactgttcgatcacaatatgaatcaggagcaggagtgccttgcttactcgctgtgcatagaaatattccggaaaagcaaa

SEQ ID NO: 209426 - DNA, 1018 bp, Unknown
  Bacterial polypeptide expressing nucleotide sequence isolated from the Sargasso Sea
atgtattatgaaaaagacactgatgttaatttaattaaagataagaaagttgcaatatttggttatggaagccaaggacacgcacatgctttaaatttaagagatagtggagttaaagaagttgttgtagcgcttagagatggatcttctagcgcagctaaagctgagtcaaaaggattaaaagttatgaatctttcagatgcagccgagtgggctgatatagttatgattttaacaccagatgaattgcaagcatctatatataaaaatcacattgaacaaagagtcaaagaaggtacattgattgcttttgctcatgggttaaatattcattacgatttaattagtgcaagaaaagatttagatgtttttatggttgcacctaaaggacctggtcatctagttagaagtgagtatgaaaaaggtggcggagttccatgtttatttgcagttcatcaaaacggttcaggaaaagcaagagagcttgcaatgtcttatgcttctgcagttggaggtggaagatcaggaataatagaaacaacttttaaggatgaggttgaaactgatttatttggtgaacaaaccgttctttgtggtggacttgttgaattaattaaaaatggttatgaaacattagttgaagcaggatatgagcctgaaatggcatattttgaaaccgttcatgaagttaaattaattgttgatttaatttatgaaggtggaattgctaatatgaattactctatttctaatacagccgaatatggagaatatcaatctgggccaagaataattaataaagaagaaacaaaaaaaagaatgaaagaagtattagatgatattcagtctggtaagtttactaaagaatggatggatgaatgcaagaatggtcaaaagaattttcttgctactagagcaaaattagccgaacatcctgttgaaaaagtaggcgcaaatcttagagctatgatgccatggattgctaagaagaagttagttgacagcgataagaaataga

SEQ ID NO: 209427 - DNA, 689 bp, Unknown
  Bacterial polypeptide expressing nucleotide sequence isolated from the Sargasso Sea
aatgaaaattttttatgatgatgatgcaaatattgaaataattcaaaaaatgcaagtaactattattggttacggatcacagggccatgctcatgctaataatttaagtaactcaggggttgatgtgaccgttggtttaaggacaggttcatcctcttgggaaaaggcaacagatgttgggcttaaagtgaaagaagttgaagaagctgtgacgaattcggacttagtaatgattctagctcccgacgaatttcaaaaagatatttatgaaaaaagtatcaagccaaatttaaaaactgatgcaatcttggcatttgctcatggatttaatattcatttcaaaaaaataattcctgatttatcaaatagcgttattatgattgcgccaaaaggccctggccatactgttagaagcacatatttgaaaggtggtggagttccatcattaatagctgtttatcaagattcaaatattgagaataatatatctgcaaaagaaattgctctgtcttatgcaaaagctaatggtggaacaaaagcgggtgttctagagacaacatttaaggaagagactgagactgatttatttggtgagcaggctgtattatgtggtggtattactgcacttataaaagctggttacgaaacattggtagaggccaggttacagtccagaaatggcttatttg

SEQ ID NO: 209428 - DNA, 991 bp, Unknown
  Bacterial polypeptide expressing nucleotide sequence isolated from the Sargasso Sea
atgacccaactcttttacgacacagatgcagatctaagtcttttaaataataaaacaatagcgattattggatatggatcacaaggtcatgcacatgccttaaatcttaaagatagcggtatggatgtaattgttggattatataaaggaagtaagtctgaaagcaaagccattagcgatggtctacaagtctttagcgtttctgaagcttgcgaaaaagcagactggattatgattctactccccgatgagtttcagaaagatgtttaccttaaggaaatagaaccaaacttaaaagaaggaaagatactaagttttgctcacggcttcaatataagattcggacttattaaacctcctagttttgtggatgttgtaatgattgccccaaaaggaccaggacacactgttcgttgggaatatcagaacggtcaaggagttccagcactctttgcagttgagcaggattcatccggaagtgcaagatcattggcaatggcttacgccaaaggaattggaggaacgagagctgggattcttgaaacaaactttaaagaagagacagaaactgacttatttggcgaacaagcggttttgtgcggaggattatcagaactggtcaagtcaggatttgaaactcttgtagaggcaggttatcaacccgaacttgcttacttcgaatgcttacatgaagttaaacttattgttgatttaatggtgaagggaggcttatctcaaatgagagattccatttcaaatactgcagaatatggagattatgtaagtggtaaaagacttattaatagtgatacaaagaaagaaatgcagaaaattctgaaagatattcaagatgggactttcgctaagaattttgtggaagaatgcgataagaacaaacccttaatgacaaaattaagagaagaaaactcaaaacatgaaattgagaaagtgggtaaaggtctgcgctcgatgttcagttggctgaaataaa

SEQ ID NO: 209429 - DNA, 1018 bp, Unknown
  Bacterial polypeptide expressing nucleotide sequence isolated from the Sargasso Sea
catgaacgttttctacgacaaagacgctgacctctccctcatcaagggcaagcaagtcacgatcatcggctacggctcgcaaggccatgcacacgcgctgaacctgaaggacagcggcgtgaacgtgacggtcggcctgcgcaagggcggcgcgtcgtggagcaaggccgaaaacgcaggcctgtcggtcaaggaagtcgcggaagcggtgaagagcgccgacgtcgtgatgatgctgctgccggacgagcagatcgccgacgtgtacgcgaaggaagtccacgcgaacatcaagcagggcgcggcgctggcattcgcgcacggcttcaacgtccactacggtgcggtgatcccgcgcgccgacctcgacgtgatcatgatcgcgccgaaggcaccgggccacacggttcgcggcacgtactcgcaaggtggcggcgtgccgcacctgatcgcggttgcgcagaacaagtcgggcgcggcacgcgacatcgcgctgtcgtacgcggcagcgaacggcggcggccgtgcaggcatcatcgaaaccaacttccgtgaagaaaccgaaaccgacctgttcggcgagcaggccgtgctgtgcggcggtaccgtcgagctgatcaaggcgggtttcgagacgctggtcgaagcaggctacgcgccggaaatggcgtacttcgagtgcctgcatgaactgaagctgatcgtcgacctgatctacgaaggcggcatcgcgaacatgaactactcgatctcgaacaacgccgagtacggcgagtacgtgacgggcccgcgcatcgtcacggaagagacgaagaaggcgatgaagcagtgcctgaccgacatccagacgggcgagtacgcgaagagcttcattctcgagaacaaggcaggcgcgccgacgctgcagtcgcgccgccgcctgacggccgagcaccagatcgagcaggtcggctcgaagctgcgcgcgatgatgccgtggatcgcgaagaacaagctcgtcgaccagtcgaagaactaa

SEQ ID NO: 209430 - DNA, 508 bp, Unknown
  Bacterial polypeptide expressing nucleotide sequence isolated from the Sargasso Sea
gttggcgaggaaggtcaggaattatgaaaccacttttaaagatgaagtgaaaacagatctatttggtgagcaaacagttttatgtggaggactggttgaacttattaaaaatggttatgaaacattagttgaagctggttatgaacctgaaatggcttattttgaaactgtacatgaagtaaaattaattgttgatttgatttatgaaggtggaattgcaaatatgaactattccatttcaaatactgctgaatatggagaatatatgtctggtccaagaattattaataaagacgagacaaaaaaaagaatgaaagaagttttagcagacattcaatcaggtaaatttactaaagaatggattaatgagtgcgaaactggccaaaagaactttttaaaaactagagcaaaacttgcagaacaccctgttgaaaaagttggagctggattaagagccttaatgccttggataagcaagaagaagcttattgatagcgataaaaattaa

SEQ ID NO: 209431 - DNA, 1018 bp, Unknown
  Bacterial polypeptide expressing nucleotide sequence isolated from the Sargasso Sea
aatgttttatgaaaaagatacagacgtcaacttaattaaagataaaaaaattgcaatttttggttatggtagtcaaggacatgcgcatgcgctaaatttaaaagatagtggtgtaaaagaagttgcggttgctttgagagaaggatcttcaagtaaagctaaagcagaatctaaaggtttaaaagttatgaatttatcagatgcagcagaatgggcagatgtagtaatgatattaactcctgatgaattacaggcctcaatttataaaaatcatattgaacaacgtgtaaaagaaggaacatcaatagcttttgctcatggattgaatattcattatgatttgattaaagctagaaaagatttagatgtttttatggttgccccaaaaggtcctggacatttagtaagaagcgaatacgaaaaaggtggaggagtaccatgcttatttgctgtacatcaaaatggttctggtaaagctagagatttggcaatgtcttatgcttcagctgttggaggtgggagatctgggataattgaaacaacttttaaagatgaagttgaaactgatttatttggtgaacaaacagttttatgtggtggtttagtagaactaattaaaaatggttatgaaactttagttgaagcaggatatgaacctgagatggcctactttgaaacagttcatgaagtaaaattaattgtagatttaatttatgagggtggaattgcaaatatgaattattcaatttcaaacactgctgagtatggtgaatatcaaacaggaccaagaattatcaataaagaagaaactaaaaaaagaatgaaagaagttcttgaagagattcaatctggaaaatttacaaaagattggatggatgaatgtaagaatggtcaaaaaaactttcttgctacaagagctaaattagctgaacatccagtagaaaaagttggagcaaacttgagagctatgatgccctggataggtaaaaagaaattagttgatagtgataagaagtaa

SEQ ID NO: 209432 - DNA, 951 bp, Unknown
  Bacterial polypeptide expressing nucleotide sequence isolated from the Sargasso Sea
aatgtattatgaaaaagatgctgacattaatctaataaaaaataaaaaagttgcaatatttggatatggaagccaaggacatgcgcatgctttaaatttaaaagatagcggggttaaggaagttgctgttgcgttaagagaaaactctcctagcataaaaaaagctgaaagcgaaggattgaaagttatgtccttatccgatgcagctgcttgggctgatgtagttatgattttaacacctgatgaacttcaatcacaaatttataaaaatcatattgaacaaagaatgaaggaagggactagcttagcttttgcgcatggtttaaatattcatttcgatttgattaatgccagaaaagatttggatgtttttatggttgctccaaaaggaccgggacatttggttagaagcgaatatcaaaaaggaggaggagttccttgtttgatggccgttcacaaagatagttctggaaaagcaagagatcttgcaatgtcttacgcttcagctataggtggaggaaagtctggaattattgaaacaacttttaaagacgagtgcgaaacagatttatttggagaacaaactgttctatgcggtggtttagttgaacttataaaaaatggttttgaaactttaacagaagctggttatccgcctgaaatggcatattttgaatgtttacatgaggtaaaattaatcgttgatttaatttacgaaggtggaattgccaatatgaattattcaatttctaatactgcagaatatggtgaatacgtatctggtaaaaagattgtagacagcaaaactaaagaacgaatgaaagaggttttaaaagatattcagtctggtaaatttaccaaacaatggatggaagaatgtaggtccggtaaaaaaaatttcttaaagatgagaaaagaactatcagatcatgaaattgagaaagtaggcaa

SEQ ID NO: 209433 - DNA, 865 bp, Unknown
  Bacterial polypeptide expressing nucleotide sequence isolated from the Sargasso Sea
atgaaaaattactttaacactctgtcatttagagagaaacttatgcaattaggaaaatgtagatttatgagatcatctgaatttagtgatagggtagaatttctaaagaataaaaaaatagctattgttggttgtggtgcccaaggtttaaatcaaggccttaatatgagagattctggtcttgatatttcgtacgctcttaggcagtcctcaattgattcaaaaagacaatcatttgttaatgcaagtacaaacaattttaatgttggtaattttgaagaaataataccaaattctgatttagttataaacttgaccccagataaaaaccatactccagttgttgaacaacttatgccattaatgaaaaaaaactctattctatcttattctcatggatttaacatagtagaagagggcattaaagtaagagaagatataactgtcattatggtcgcaccaaaatctccaggatctgaggtaagagaagagtatctaagaggttttggagttcctacacttattgctgttcatcctgaaaatgatactaatggaattggctttgatgcagcaaaagcatatgcggtatctcttggatctgataaagcgggagttttagaatcatcttttgttgctgaagttaaatctgatttaatgggtgagcagactatattatgtggaatgcttcagacagggtcaatactgtgttttaataaaatgaaagaactcggaattgaacctagctactctgcaaagcttattcaatatggatgggagactattacagaatctttaaagcatggaggtataacaaatatgatggacagattatcaaattccgcaaaagttaaagcatttgaattat

SEQ ID NO: 209434 - DNA, 1018 bp, Unknown
  Bacterial polypeptide expressing nucleotide sequence isolated from the Sargasso Sea
atgtcagcaaaaattatatatgatgactcaattgatgttgagcttattaaatcaaaaaaagttagtgtaattggatttggtagtcaaggccatgcgcatgctttgaatctacatgattcaggtgttgatgtaacagttggtctaagagaggaatcaaattctttcgatagggcaaaaaaaatgggtttaaaagtagaaaatcttgagaatgctacaaagaatgcagacgtcgtaatgcttttattacctgatcaacttatggcggatgtatatgaaaaagatatagccccatttatgaaagagagctcgactttgttttttgcacatggatttaatatacattttggtgagattgtacctcgtgaagatatttcaatagcaatgattgctcctaaaggtccaggccatttattgagaagaacttatgaagaaggatctggtatgccttgtttagttgcggtcgaaaaagatttaaatgacaacacaaaagatttggccttatcttatgcgtcggcaataggtggaggaagagcaggagtattaaacacaacatttaaagaagaaactgaaacagatttatttggtgagcaagttgttttatgtggtggtttgactgagttgatacgtaatggatttgaaacattagtggaagctggatatcaacctgaaagtgcttattttgaaacattacatgaagtcaagctgatagtagacctaatgtatgaaggtgggtttgaatggatgagacactccatatcagatacagcagagtatggtgacttctcaagaggctcaagaataattacagatgaaactaagaaggaaatgaaaaaagtgttggaagaaattcaatctggagcttttgcaaaagaatggatgtctcaagctcgtgaaggttctccctatcttaaacaagaacgtgaaaaagcatcaaaccatcaaattgaaaatattggtaaagaattaagaaatatgatgccttttttagatgctaaagatatcaaaaaagatatatgag

SEQ ID NO: 209435 - DNA, 394 bp, Unknown
  Bacterial polypeptide expressing nucleotide sequence isolated from the Sargasso Sea
atatgaaactttagttgaagctgggtatgagccagaaatggcatattttgaaactgtacatgaagttaaattaattgttgatttaatttatgaaggtggaattgcaaatatgaattattctatttcaaatacagctgaatatggtgagtatcaatctggtccaagaattatcaacaaagaggagacgaagaagagaatgaaggaagttttggctgatatccaatcaggtaagtttaccaaagaatggatggatgagtgtaaaactggtcaaaagaacttcttagcaactagagcaaagttggcagaacactctgtagaaaaagttggagcagagcttagagccatgatgccttggataagtaagaaaaaattagtagatagcgataaaagctaa

SEQ ID NO: 209436 - DNA, 406 bp, Unknown
  Bacterial polypeptide expressing nucleotide sequence isolated from the Sargasso Sea
tttgtgtggtggttctgcatcaatggtagttaacgcatttgaaacattagtagaagcaggttatcagccagaaattgcatactttgaggtattacacgaattaaaattaattgtagatatgattcaaagatacggtattaacggaatgtggagacgtgtctctgaaaccgcaagatacggaggactcacaagaggtccaatggttatgacatctgatacaaaagaaaacatgaaaaaagttctaacaatgattcaagacggaacattcaacaaagaatggattgataattatcaaaatgaaggtaaggctgcatttgataaatacatgaaagacttggatggtcatcaaatcgaaactgtaggaaaacagatgagaaaaatgatgtggcctgactctactgaataa

SEQ ID NO: 209437 - DNA, 961 bp, Unknown
  Bacterial polypeptide expressing nucleotide sequence isolated from the Sargasso Sea
catgaaagttttctacgacaaagacaccgacctgagcctgatcaagggcaagaccgtggccatcattggttacggcagccaaggccacgcccacgcacaaaacctgaacgacagtggcgtgaaggttgtggtcggcctgcgcaagggcggtgcatcgtgggacaaggttggcaaggctggcctgacggtgatggaagtcaacgacgccgtgaaggccgctgacgtggtcatgatcctgctgcccgacgaagacatcgcagccgtgtacaagaacaacgtcgaacccaacatcaagcaaggcgcttcgctggcctttgcccatggcttcaacgtgcactacaaccaggtcgtgccccgcgctgacctggacgtgtggatggtggcccccaaggccccaggccacaccgtgcgcaacacctacacccaaggcggcggcgtgccccacctggtcgctgtgcatcaagacaagtccggcaaggcccgtgacctggccttgagctacgcagctgccaacggcggcggcaaggccggcatcatcgagaccaacttcaaggaagaaaccgagaccgacctgttcggcgaacaggccgtgctgtgtggcggtgccgtcgagttgatcaagatgggttacgaaaccctggtcgaagctggctacgctcctgaaatggcctacttcgagtgcctgcacgagctcaagctcatcgtggacctgatctacgaaggcggcattgccaacatgaactactcgatctcgaacaacgccgagtacggcgagtacgtgaccggccctgaagtgatcaacgagcagtcgcgcgccgccatgcgcaatgccctgaagcgcatccagaacggcgactacgccaagatgttcatccaggaaggccgcctgaactacccatcgatgacggcccgccgccgcaacacggccgaacacagcatcgaaaaaggtgggcagccagct

SEQ ID NO: 209438 - DNA, 541 bp, Unknown
  Bacterial polypeptide expressing nucleotide sequence isolated from the Sargasso Sea
atgttttatgaaaaagatacagatgtaaatttgataaaagataaaaaaatagcaatatttggttatggcagccaaggacacgcacatgctttaaatttaaaagatagcggagttaaagaagttgtagttgctttaagagatggatcttcaagcaaagcaaaggcagagtcaaaaggattaaaagtaatgaatttatcagatgctgcagaatgggcagatattgtaatgattttaactccagatgaattacaagcaacaatttataaaaatcatattgagcaaagagttaaagaaggaacatcaatagcttttgctcatggtttaaacattcattatgatcttattaatgcaagaaaagatttagatgtttttatggtagcgccaaaaggtccaggacatttggtaagaagcgaatttgaaaaaggaggaggcgtcccttgtttatttgcagttcatcaaaatgggtcaggaaaagctagagacttggcaatgtcatatgcatctgcagttggtggaggtagatcaggtattattgaaacaa

SEQ ID NO: 209439 - DNA, 736 bp, Unknown
  Bacterial polypeptide expressing nucleotide sequence isolated from the Sargasso Sea
atgacccaactcttttatgacacagatgcagatctaagtcttttgaataataaaacaatagcgattattggatatggatcacaaggtcatgcacatgccctaaatcttaaagatagcggtatggatgtaattgttggactatataaaggaagtaagtctgaaagcaaagccattagcgatgggctacaagtctttagcgtttctgaagcttgcgaaaaagcagactggattatgatcctactccccgatgagtttcagaaagatgtttaccttaaggaaatagaaccaaacttaaaagaaggaaagatactaagttttgctcatggcttcaatataagattcggacttatcaaacctcctagttttgtggatgttgtaatgattgccccaaaaggacctggacacactgttcgttgggaatatcagaatggtcaaggagttccagcactctttgcagttgaacaggattcttccggaagtgcaagatcattggcaatggcttacgccaaaggaattggaggaacgagagctgggattcttgaaacaaactttaaagaagagacagaaactgatttatttggcgaacaagcagttttgtgtggaggattatcagaactggtcaagtcaggatttgaaactcttgtagaggcaggttatcaacccgaacttgcttacttcgaatgcttacatgaagttaaacttattgttgatttaatggtgaagggaggcttatctc

SEQ ID NO: 209440 - DNA, 721 bp, Unknown
  Bacterial polypeptide expressing nucleotide sequence isolated from the Sargasso Sea
aaattagtgcagcacggctgggaaacagtagctgaaggcctaaagcacgggggaattacaaatatgatggatcgtttgtcgaatcccgcaaaactgatcgctgtagaacttgctgacgaacttaaagtaataatggagcccttattcaaaaagcatatggacgatattataactggcactttctcatctggaatgatgagtgactgggataatgacgacaagaaattactgacttggcgagaagaaactgccgagacaccttttgaaaaatctaccgccagcgaattacccattacagagcaggaatactatgataatggaatattaatggtcgctatggttaaagcaggagtagagcttgcttttgaaacaatgactgccagcggcgtgatagccgaatctgcatattatgaatcacttcatgaagttcctctgatagcgaatttgatcggacgcaaaaagttatatgagatgaataaagtaatatcagacacagctgagtacggttgttatcttttctctcacgaatgcgttccgctccttacaggctttatgcaaaatattgatgctgacgtaattggcagaggtttgcagttaaatgattttggggcagataacgcagaactgatcgctgctaatgaatctattagatcccatccgatagaggtggttggcaaaaaacttcgaatgcatatgacctcgatgaaaaaagcaatatgag

SEQ ID NO: 209441 - DNA, 889 bp, Unknown
  Bacterial polypeptide expressing nucleotide sequence isolated from the Sargasso Sea
atgcaaatttattatgacagtgatgctgatcagaatatcgctaaagggatggaaatagtcatcattggttatggatctcaaggacatgctcatgcaaacaatcttaaagattcaggtgccaatgttacggttgctcttagaaaagaatctggatcatgggcaaaagctgaggctgctggttttgatgtcaaagaggtaggcgaagctgtacccaatgcagatcttgtcatgatgcttattccagatgagaaacaatcagctatgtatgaaaatcatttaaaagacaatataaaagatggagcagttctggcatttgctcatggatttaatatccattttgaaatgattattcctagagatgatctggatgtaattatggttgcaccgaaaggcccaggccatactgttcgatcgcaatatgaatcaggagcaggagtgccttgcttactcgccgtgcatagaaacgcctccggaaaagcaaaagatgttgggctttcatatgcatctatgattggttctggccgagccggaattattgagacaaattttaaagatgagactgaaacagatctatttggggaacaagcggtcctttgtggaggtttaacgtcacttattcaaactggttatgaagttctggtagaaaatggttatccaccagaaatggcatattttgaatgtcttcatgaagtaaaattaattgttgacctgatttatgaaggtggtcttcagaatatgagatatagcatttccaatactgcagagtacggagattatgtgacaggaccaaagattgtgaatgaaaatacaaaggaaacgatgcagaagatattgactgagattcagtctggagaattcgcgaaagattttatgaatgactgtcactctg

SEQ ID NO: 209442 - DNA, 568 bp, Unknown
  Bacterial polypeptide expressing nucleotide sequence isolated from the Sargasso Sea
aatgttttatgaaaaagatacagatgtaaatctaataaaagataaaaagattgcaatttttggatatggaagtcaaggacatgcacatgctcttaatcttaaagacagcggtgtaaaagaagtagtagttgcacttagagatggttcagccagcaaagctaaagcagaatcaaaaggattaaaagttatgaatttatcagatgcagccgaatgggcagatgtagttatgatcttaaccccagatgaacttcaagcaacaatttataaaaatcatattgaacaacgagtaagagaaggaacttcaattgcttttgcacatggattaaacattcattatgatttaataaaagcaagaaaagatttagatgtatttatggtggcgccaaaaggcccaggacatttagtaagaagtgagtatgaaaagggtggaggagttccatgtttatttgcagtacatcaaaacggatcaggcaaagcaagagagctagcaatgtcatatgcttcagcagttggtggaggtagatcaggaattattgaaactacatttaaagatgaagttgaaacagat

SEQ ID NO: 209443 - DNA, 1018 bp, Unknown
  Bacterial polypeptide expressing nucleotide sequence isolated from the Sargasso Sea
atgaaagtatattacgataaagatgcagacattaacatcattaaaaaattaaatgtatcaataataggttacggttcgcaaggacatgctcatgcactgaacttgaaagattcaggtgtaaatgtaacagttggtttaagagcgaattcacaaaatgctacacgtgcggaagctgaaggtctaaatgtgttagaaatatctgaggcagtaaatagtgcagatatcgtgatgattttagcaccggatgaatatcaagctgacttatacaaagagtctattaagccatatttaaaagataatgccaaactagcttttgctcatggatttaatattcactataaccaaataatacctgataagaatgtagatgtttttatggttgctcctaaaagcccaggacatctagtcagatcaacttatttaaatggtaaaggggtacctactttaatcgctatcaaaagtgatacatctggtaatactaaagaaaccgcactagcatatgcttctgcaataggcggaggaagagccggaataattgagactactttcaaggaagagaccgaaacagatttatttggtgaacaagctgttttatgcggcggtgttactgcgttagtaaaagctggttttgaaacactagttgatgctggctatgcgccagaaatggcttattttgagtgtctaaatgaattaaaactaattgtagatttaatgtatgaaggaggaatgacagagatgcgttattctatttctaacactgcagagtatggagatcttaccaaaggaccatatctaatcgatggtcatgtgagagagaaaatgaaagatgttttaaaagatgttcaaaatggtaagtttgcagatgaatttgttaatgaaataaaaagtggttcaaaaaatttcgatcaactccgaaagcaaggatcagagcatttaattgaggagactggcaagaagcttcgagacatgatgtcgtggatgaaagataaaaaactagttgatgaaaaaataaaataat

SEQ ID NO: 209444 - DNA, 1021 bp, Unknown
  Bacterial polypeptide expressing nucleotide sequence isolated from the Sargasso Sea
atgaaaacttattacgataaagatacaaaaaaagacctgattaaaaataaaaaagttgctatttttggttatggaagccaaggtcatgctcacgcgcttaaccttaaagatagcggggtgaaagaagttgttgtagctttaagagaagggtcttcaagtattaaaaaagctgagagtgctggtttaaaagtaatgtcactttctgatgcagctgcttgggctgacgtggtgatgatgttaactccggatgaacttcaatcagaaatttataaaaatcatatagaacaaagaatgagagagggaacaagtttagcttttgcgcatggattaaatattcattttgatttgattaaagcaagaaaagatttagacgtattcatggttgctcctaagggacctggccatacggtaagaagcgaataccaaaaaggtggaggtgttccttgtttaatggcagtacataaagatagttcaggaaaagcaaaagaattagctttgtcttatgcttcagctgtaggtggaggtaaggccggtataatcgaaacgacttttaaagatgagtgcgaaaccgacttattcggtgaacaaacagttttatgtggcggcttagttgaattaattaaaaatggttttgaaacattaaccgaagcaggttatccacctgaaatggcatacttcgaaactcttcacgaagtaaaactaattgtagatttaatttatgaaggtggaatagctaatatgaattattcaatttctaacacagctgaatacggggagtatgtttctggtaaaagaatagtagattcaaaaactaaagaaaaaatgagagaagtattaaaagacatccaatcgggtaaatttacaaaacaatggatggaagaacacaaatctggtcaaaagaactttcttaaaatgagaaaagatttagctgatcatcctatagaaaaagtaggtaaggaccttagagccatgatgccatggattggaaaaaacaaattggtcgacaaagacaaaaattagc

SEQ ID NO: 209445 - DNA, 439 bp, Unknown
  Bacterial polypeptide expressing nucleotide sequence isolated from the Sargasso Sea
atgcaagtttattatgataaagatgctgatctagatattattaaaaataaaaaagtagtaatagttggttatggttcacaaggtcatgcacatgcaaataatcttaaagattcgggtggaaatgtaaccgttgcactcagaaaagaatatgcttcctggtcaaaagctgaagttgctgggctgaatgttcaagaagttgcagaggccgtaaaagatgctgatatggtaatgattttaatgcctgacgaattgcaatctgctacttataagagtgagatagaaaataacattaaacaaggagctgttttagcttttgcgcatggatttaacatacattttgacatgatagagccgagggaagaccttgatgtgataatggttgctccaaaagggcctggtcatactgttaggtctcaatacgaaataggtgcaggagttc

SEQ ID NO: 209446 - DNA, 1045 bp, Unknown
  Bacterial polypeptide expressing nucleotide sequence isolated from the Sargasso Sea
aatgaaaattttttacgatgatgatgctgatcttgatattattaaaaaccttaaggtatcagtaatcggttatggttctcaaggtcatgcacactcgaataatcttcatgattcaggagtggatgtaacggttggcctaagaaaagactcaagctcatggacaaaagctaatgatgctgggttaaaagttgcagaagttgaggaagcagtttcaggtgctgacttagttatgatattggcaccagacgagtttcaacaagatctttttgaaactaaaattaaacccaatgcaaaagaaaatagcattcttgcattcgcacatggttttaacatccattttaagaaaataattccaagccaaaaacaatcagtgataatgattgctccaaaaggacctggtcataccgtcagaagtacttacaaaagtggaggtggcgttccatctctggtggcagtttatcaagacgcactccaagaaaaggaattttctgcattagatctggctctttcttatgctaaagcgaatggtgggactagagcaggcgttttggaaacaaattttaaagaagaaacagagactgatctttttgggagaacagctgtgttatgcggaggtataacggctctaataaaagcaggatatgaaaccttggttgaagcaggatatagtccagaaatggcatattttgagtgcttacacgaaacaaaattaattgttgatcttattcatgaaggtggaatctcaaacatgcattattcgatttcaaatacagcagaatttggtgattatctgagtggaccaaaagttataactgatgatacaaaggatagtatgaaaaagattcttatgaaaatacaatcaggtgaatttgccgatgagtttcttaatgattgcagatcaagtaatgatggtaaaggcggtccatttatgagacaaaatagaaaaaatactcaaaaccactcgattgagatggttggaaaagaacttagatccaagatgaaattccttcaaactgaaaagcttgtcgataaagaaaaaaattaa

SEQ ID NO: 209447 - DNA, 1018 bp, Unknown
  Bacterial polypeptide expressing nucleotide sequence isolated from the Sargasso Sea
atggttacaaaaattatatatgatgattcgatagaccaagatttaattaagtcaaaaaaagttactgtaattggattcggcagccaaggtcatgcccacgcacttaatctacatgaatcaggtgtggatgttactgttggactaagagagtcttctgaatcctttaaaagagcatctgatatgggattaaaagttgagaatgtagaagatgcgacttctggggcagatgtagttatgcttctattgcccgatcagctcatggcagatatatataacagtgatattgcaccacatatgaaagatggctctacattgttgtttgcacatggatttaatattcattttggtgagataattcctcgtgaagatatatctataggtatggtggcccctaaagggcctggtcacttacttagaaggacttatgaagaggattctggaatgccttgtttagtggcagtagataaagatgtaagtggtaatacatttgaattatcactctcctactcttcagctattggtggaggtaaagcaggaattttaaagacaacattcaaagaagaaactgaaaccgacttatttggtgagcaagttgttttatgtggtggtttaaccgagttaattagaaatggttttgaaactttagtagaagcaggatatcaaccagaaagtgcatattttgaaactttacatgaggtaaaactaatagtcgatctaatgtacgaaggtggatttgaatggatgagacattctatatcagatactgcggaatatggagatttttcaagaggttcaagaataattacagatgatacaaaaaaagaaatgaaaaaagttcttgaagaaatacagtctggtgcatttgcaaaagaatggatgtctcaagctagagaaggtgctccttttcttaatcagaaaagagaagaggcttctaaacatcagcttgaaagtattggaaaagatttaagagaaatgatgccttttctaaatgccaaggatattaaaaaagatatatgag

SEQ ID NO: 209448 - DNA, 955 bp, Unknown
  Bacterial polypeptide expressing nucleotide sequence isolated from the Sargasso Sea
agtcttttaaataagaaaacaatagcgataataggatatggttcacaaggtcacgcacatgccctaaatcttaaagatagcggtatggatgtaattgtcggattatataaaggaagcaagtctgaaagtaaagctaaaagcgatggtctacaagtttttagtgtttctgaagcttgcgagagagcagactggattatgattctcctcccagatgaatttcaaaaagatgtttaccttaaagagatagagccaaacttaaaagaaggaaagatattaagttttgctcatggcttcaatattagattcggactaatcaaacctcctagttttgtggatgttgtaatgattgctccaaaaggacccgggcatactgttcgttgggaatatcagaatggtcaaggtgtgcctgcattgttcgcagttgaacaggattattctggaagtgcaagatcactggcgatggcttacgctaaagggattggaggaacgcgagctgggatacttgaaacaaatttcaaagaagaaacagaaactgatttatttggagaacaagcagttttatgcggaggcttatcagagcttgttaaatcaggcttcgaaactcttgtagaggcaggatatcaaccagagcttgcatacttcgaatgtttacatgaagttaaactgattgttgatctaatggttaagggtggcttatctcaaatgagagattccatttctaatactgcagaatatggagattatgtaagcggtaaaagacttatcaatagtgatacaaagaaagaaatgcagaaaattctaaaagatattcaagatggcactttcgctaagaattttgtacaagaatgcgataaaaataaacccttaatgacaaaattaagagaagaaaactccaaacatgaaatcgaaaaagtaggtaagggtctgcgctcgatgttcagttggctgaaataaa

SEQ ID NO: 209449 - DNA, 1021 bp, Unknown
  Bacterial polypeptide expressing nucleotide sequence isolated from the Sargasso Sea
atgaaaacttattacgacaaagatactaacaaagacttaattaaaaataaaaaagttgcaatttttggctatggaagccagggtcatgcccatgcattgaatcttaaggacagtggagttaaagacgttgttgtagctttaagagatggttcatcaagtattaaaaaggctgaaagcgcaggtttaaaagtaatgtctctctcagacgctgctgcttgggctgatgtagtgatgatgttaacaccagatgagttgcaatcagagatttataaaaatcatatagaacaaagaatgagagaaggaacaagtttagcttttgctcatggattaaatattcattttgatttaattaaagctagaaaagatttagatgtttttatggttgctcccaaaggacctggccacacggtaagaagcgaatatcaaaaaggtggaggagtaccttgtttaatggcagttcacaaagacagctcaggaaaagcaaaagaattagcattgtcttatgcttcagctgtaggtggaggtaaggctggtataatcgaaacgactttaaaagatgagtgtgaaacagacttatttggcgaacaaacagttttatgtggtggcttagttgaattaattaaaaatggctttgaaactttaactgaagcaggctatccacctgaaatggcttacttcgaaactctccacgaagtaaaactaatagtagatttaatttatgaaggcggaatagctaatatgaattactcaatttctaatacagctgaatatggagagtatgtttcaggtaaaagaatagtcgatggaaaaaccaaagaaaaaatgagagaagttttaaaagacattcagtcaggcaagtttacaaaacaatggatgaatgaacataaatctggtcaaaagaattttcttaaaatgagaaaagatttagccgatcatcccattgaaaaagttggtaaagatctgagggctatgatgccatggatcggcaaaaataaattagtcgacaaagacaaaaattaac

SEQ ID NO: 209450 - DNA, 794 bp, Unknown
  Bacterial polypeptide expressing nucleotide sequence isolated from the Sargasso Sea
aatgagagtatattacgatagagatgcagatttaaacttaataaaagataaaaaaatatcaattgtaggatatggaagtcaaggtcatgcgcatgcaatgaacttgagagattctggaatagaaaatgtttcaattgcattaagagaaggctcaaattcaagaagtaaagcagagcaagctaatttcaaagtaatgactcctgcagaagctgcaagttgggctgatgtgattatgatgttaacacctgatgaacttcaatcagaaatatataaaaatgacatagctgaaaatattaaggaaggaacaactattgcatttgctcatggattaaatattcactttgacttaattaaacctaaggaaggtatagatgtaataatggttgcacctaaaggtcctggtcatacagtaagagcagaatatgtaagaggtgctggtgtgccttgtttagttgctgtagataaaaatccttcaggtaatgctcttgaaataggaattgcatatgcatcagcaataggtggagggcgtgctggaattattgaaacaacttttaaagaagaatgtgaaacagatctatttggagaacaatctgttttatgtggaggtttgacacatttaattttggcaggttatgaaactcttgttgaagcaggatatgctcctgaaatggcatattttgaatgtcttcatgaagtcaaacttattgttgatcttttatatgaaggtggaatggcaaatatgagatattcaatttccaatacagcggaatatggagattattcaagaagtccaa

SEQ ID NO: 209451 - DNA, 839 bp, Unknown
  Bacterial polypeptide expressing nucleotide sequence isolated from the Sargasso Sea
tatggctaaaatgttttacgattcagatgcagatttaaatcttttaaaagataaatcaattgctgtcattggttacggaagtcagggacatgctcatgcgcttagtgctcatgatagtggtataaaagtaagagtaggcctttacaaaggaagtaaaagttgggaaaaagctgaaaaagatggattggaagttggtactgtagatcaagtaacaataaattcagatattatcatgttacttttacccgatactgtccaaccatcagtttacaacgatcttataaaacctaatttggatgaaagtaaaaccttaatgtttgctcatggatttaacatccattatgaaacaatagtcccgccagaaaatatagatgtgataatggttgcaccaaaagctcctggacatagaatgagagaagtttacactaaaggatcgggagtacctggactattagctatacatcaagatccatcaggaacagcagaacaaaaaggattagcttatgctaaagcagtcggatgcacaagagccggggtattaaacacaacgttcaaagaagaaactgaaacagacttatttggagagcaatcagtgctttgtggaggtactgctcaattagttaaatacgcatttgaaacattaattgaagcaggataccagcctgaatctgcatactttgagtgtcttcacgaactaaaacttatcgtagatctgatgtatgaaggcggattagattatatgagatattcaataagtactactgctgaatacggagaccttacaagaggtcctgtgattattgatgaatcagtaaaagaaaatatgaaaaaagttctta

SEQ ID NO: 209452 - DNA, 1045 bp, Unknown
  Bacterial polypeptide expressing nucleotide sequence isolated from the Sargasso Sea
atgaaaatctattatgatgaagatgctaacctagacatcattagaaatctaaaggtaaccataattgggtacggatctcaggggcatgcacatgcaaataatttacatgattcaggagtggatattacagttggtctcagagaaggatcagcctcatgggaaaaggcagaatctgctggcttaaaagtttcaagcgtggaagactcagttaaaggatctgattttgtaatgattctcgcaccagatgagtttcaaagcgatttgtattccaaaaaaatagagccaaatctcaaggagggagttattttagcttttgcacacgggttcaatatccattttggcaagatcaaacctactgatgatattagcgtagttatgattgcaccaaaaggaccgggacacactgtaagaagcacatatatgtctggaggaggagtcccatcattaattgcaatatatagagattctatttctgcaaaagactttaatgcaaaagatgtcgcgctctcatatgcaaaagcaaatggtggaaccagagctggagttctagagacttcttttagagaagaaaccgaaacagatttgtttggggagcaagctgtcctatgtggtggaatgacagcattaatcaaagcaggttatgaaacattagtagaagctggctatagtcctgagatggcatattttgaatgtctacatgaaacaaaactaattgttgatcttcttcatgaggggggaatctcaaatatgcattattcaatatccaatactgcagagtttggtgattacttaacaggcccaaggatcattactgaagaaacaaaaaaagaaatgaaaaaagtcctcgaagatattcaatcaggcgattttgcggataagtttcttgacgattgtcgtcgaagtaacgatggaagtggaggcccttttttaaaaaataatcgagaaaaaaccaaggaacactctatagaatctgttggaaaagaactacgatccaagatgaagtttttgagtgaaaaaaagcttgttgataaagataaaaattaac

SEQ ID NO: 209453 - DNA, 989 bp, Unknown
  Bacterial polypeptide expressing nucleotide sequence isolated from the Sargasso Sea
gtacctgtgtggcttcggcgtgccgactctgatagcggtccatttggaaaacgacccggaaggcaaaggcctggagtgggcgaaggcatacgctgcgggaacaggcggccaccgcgccggcgtgctcgaatcatcgttcatcgccgaagtgaaatccgatctgatgggcgagcagactattctttgcggcatgctgcaaactggctcgctgttgtgctttgaccggatggtggaactcggcaccgaccccgcatacgccgcaaagctggttcaatacggatgggaaacagttaccgagggcctcaaacaaggtggcatcaccaatatgatggatcgcttgtcaaaccccgccaagattcgggcctttgacctggcggaggagatgaagcttattttgcggcccttattcgagaagcatcaggacgacatcatgtcgggccatttttccagcaccatgatggctgactgggcgacaggtgatgccaacttgctcaagtggcgtgaggaaaccaacggcacgccgttcgaattgcaggacatcaccgacgaccccatcgacgagcaaacctattacgatcagggcattctcatggtcgcgatggtcaaagccggcgttgaactggcttatgagaccatggtgtcggcgggcattatcgaggagtctgcttactacgaatcactgcacgaaacgcctttgatcgccaataccatcgcccgcaaaaaactgtatgagatgaatgtggtgatctcggataccgccgaatatggatgctacctatttgatcaggcggcgagacctctgttgaagaacttcgttgccgggctcgacagcgaggtcatcggtgaaggcatgggcagcaacaacgccgtcgacaatcgtcggctaatcgatgcgaatgcccagataaggcatcactcggtagaagtcgttggcacgaaattgcgcgggtttatgacgggcatgaaggccatctcttccgctgactgac

SEQ ID NO: 209454 - DNA, 446 bp, Unknown
  Bacterial polypeptide expressing nucleotide sequence isolated from the Sargasso Sea
tgatttgtttggcgagcaagtcgttctctgtggtggacttaccgaactaattcggaatggatttgaaacattggttgaagctggttaccagccagaaagtgcttattttgaaactcttcatgaagttaaattaattgttgatctgatgtatgaaggtggttttgaatggatgagacattcaatttctgatacagctgagtatggtgatttttcaagaggatcaagaattattacggatgaaacaaaaaaagagatgaaaaaagttttggaggagatacagtcaggagcttttgctagagaatggatgtctcaagctcgtgagggatctccataccttaagcaggagcgtgaaaatgcttcaaaacaccagatagaaaatattggtaaagaattaagaaatatgatgccatttttagatgctaaagatataaaaaaggatatatgag

SEQ ID NO: 209455 - DNA, 358 bp, Unknown
  Bacterial polypeptide expressing nucleotide sequence isolated from the Sargasso Sea
atgagagtatattacgatagagatgcagacttaaatttaataaaagataaaaaaatatcaattgtaggatatggaagtcaaggacatgctcatgcaatgaacttgagagattctggaatagaaaatgtttcaattgctttaagagaaggttcaaattcaagaagtaaagcagaaaaagctaattttaaagtaatgacacctgcagaggcagcaagttgggctgatgttattatgatgttaacacctgatgagcttcaatctgaaatctataaaaatgatattgctgaaaatattaaagagggcacaacaattgcatttgctcacgggctaaatattcattttgatttaataaaaccta

SEQ ID NO: 209456 - DNA, 583 bp, Unknown
  Bacterial polypeptide expressing nucleotide sequence isolated from the Sargasso Sea
ctgggataccagaacgcccagggcgtgcctgccctgtttgccatcgagcaagacgccagcggcaaagcccgcggcctggccatggcttatgccaaaggaattggcggcacccgcgccggcatccttgaaaccaacttcaaagaggagaccgaaaccgatctatttggcgagcaagccgtgctctgcggtggcctctctgagctggtcaaagctggttttgaaaccctcgtggaagctggctatcagccggaactggcctacttcgagtgcctccacgaggtgaagctgatcgtggacttgatggtcaaaggcgggctctcagccatgcgcgattcgatctccaacaccgctgaatacggtgactacgtcagcggtcctcgcctgatcaccgccgacaccaaagcggaaatgaagcggatcctgggtgacatccaagacggcaccttcgccaaaaacttcgtggctgaatgcgaagcaggcaagcctgaaatgaacaaaatccgcgaacgcgatagcgtccacaagatcgaagaagttggcaaaggcctgcgcgcgatgttcagctggctcaaagcggcctgat

SEQ ID NO: 209457 - DNA, 1024 bp, Unknown
  Bacterial polypeptide expressing nucleotide sequence isolated from the Sargasso Sea
atgaaggtttattacgatagtgatacagataaaaatcttataactgattataaaatagctataattggatatggtagtcaaggtcatgcccatgcacttaatttaagagatagcggcgtaagtgatgtttgcatagcgcttcgcgaagattcaaaatcaataaaaaaggctgaaaatgctggttttgaagtaaaaacagtcgctgatgcggcgaaatgggctgatatcatgatgatggtaactcctgatgaattacaggcagatatttataattctgatattgagccaaatctgaaagaaaatgcatctttattttttgcgcatggtttaaacatccattttaatttaataaatgctagagatgaccttaatgttgttatggtagcgccaaaaggacctggacacacagttagatcagagtatgagagaggagctggcgttccttgtctaattgctgttcatcaagactctacaggaaatgctcttgatattggtttatcttatgcatccctgattggcggcggaagggctgcaatcatagaaacaacatttaaagaagaatgcgaaactgatttatttggagagcaagctgttctttgtggaggagtggttgaattaatcaggaatggattcgatactcttgttgaggctggatatgctcctgaaatggcttatttcgaatgtcttcatgaaatgaaattaatagttgatcttatgtatgagggaggaattaaaaacatgaattactctatctctaatactgctgaatatggtgagtatgtatctggaccaaaagtagtaggtagtgaatcaaaagaggctatgaaaaaagtacttgagaatattcaatctggtaattttacaaaagaatggatcaatgaaaacaaggaaggctctaataaagaatttcatgcaatgagagaaaaatctaattctcattctattgaagaagttggtacaaaattaagaggcatgatgccttggattggcgaaaactctctcgttgataaagaaaaaaattaat

SEQ ID NO: 209458 - DNA, 962 bp, Unknown
  Bacterial polypeptide expressing nucleotide sequence isolated from the Sargasso Sea
ttttgggtacggtagtcaagggcatgctcatgctctaaatttaaaagatagtggtgtaaaggaagtcgttgtagctttaagagatggatcttccagcaaagcaaaagctgagtcaaaaggtttaaaagttatgaatttatccgatgctgctgagtgggcagatgtgattatggttttaacaccagatgaattacaggcatcaatttataaaaatcatattgaacaaagggtaaaagggggaacttcgattgcttttgcacatggattaaatgttcattatgatttgattaaagctagaaaagatttagatgtttttatggttgcaccaaaaggcccagggcatttagtaagaagtgaattcgaaaaaggaggtggagttccatgtctctttgcagttcaccaaaatggatctggcaaagctagagatttagcaatgtcatatgcgtctgcaattggtggtggtcgatccggtattattgaaactacatttaaagatgaagtggaaacagatttatttggagaacaaactgttttatgtggtggattagttgaacttataaaaaatggttatgaaactttggttgaagctggctatgaaccagaaatggcatattttgaaactgttcatgaagtaaaattaattgttgatttaatttacgaaggtggaattgccaacatgaattattctatttctaatactgccgagtacggagaatacatgtcgggtcctagaattataaataaagaagaaacaaaaaaaagaatgaaagaagttcttcaagatattcagtcgggaaaatttactaagcagtggatggatgaatgcaaaaatggtcagaaaaattttctaaaaacaagagaaaaacttgcagaacatccggttgaaaaagtaggagctaaattaagagctatgatgccttggatttcaaaaaagaaactagtagatagcgataagaattaaa

SEQ ID NO: 209459 - DNA, 739 bp, Unknown
  Bacterial polypeptide expressing nucleotide sequence isolated from the Sargasso Sea
atgttttatgaaaaagatactaatgtaaatcttattaaagataaaaaaattgcaatatttggatatggtagtcaaggacatgctcatgctctaaatttaagagatagtggagtgaaagaagtagttgttgcattaagagaaggttcttccagtatcgcaaaagctgagtctaaaggtttaaaagtaatgaatttgtctgatgcagcagagtgggcagatgttgtaatgatattaactccagatgaacttcaagccgctatatataaaaatcatattgaacaaagagtaaaggaaggaacttcaattgcatttgcacatggcttaaatgttcactacgatttaattaaagcaagaaaagatttagatgtttttatggttgctcctaaaggaccaggtcacttagtaagaagtgaatacgaaaaaggtggtggtgtaccatgcttatttgctgtacatcaagatggatcgggtaaagcacgtgatcttgcgatgtcttatgcttcagctgtaggaggtggaagatcagggattattgaaactacttttaaagatgaggttgaaacagatttatttggtgaacaaactgttttgtgtggtggattagttgaattaattaaaaatggttatgaaactttagtcgaagctggttacgaacctgaaatggcatattttgagacagtccatgaggtaaaattaatcgtagatttaatttacgaaaggagaatcgcaaatatgaact

SEQ ID NO: 209460 - DNA, 747 bp, Unknown
  Bacterial polypeptide expressing nucleotide sequence isolated from the Sargasso Sea
acgaaattgcaagtaatattaaagaaggtacagcacttgcttttgcgcacggtttaaacattcattttgatttaatacaaccagcagaaggcattgatgtaattatgattgcaccaaaaggaccaggtcatactgttcgtgctgaatatgaaagaggagcaggagtaccttgtcttgttgctgttgataaaaatccatcaggaaatgctttagacattgctattgcatatgcttcaggtgttggtggcggaagggctggtataattgaaacaacttttaaagaagagtgtgagactgatttatttggagagcaatctgtattgtgtggaggtttgactcatttaattacagcaggttatgaaactcttgttgaggctggatatgcccctgaaatggcatattttgaatgtcttcatgaagttaaactaatcgttgatcttttatacgaaggcgggatggctaatatgcgttattcaatttcgaacactgctgaatatggagattattccagaggtcctagattgattacagatgaaacaaaaaaagaaatgaaaaaaattcttgcagaaattcaatcaggtcaatttactaaagagtggatgaatgaacataaaagtggtcagacaaaatttaagttaatgagaaagcaacaagctgagcattcaattgaggctgtgggagaaaaactcagaactttaatgccatggattgcagaaggaaaaatggttgataaatctaaaaactaga

SEQ ID NO: 209461 - DNA, 472 bp, Unknown
  Bacterial polypeptide expressing nucleotide sequence isolated from the Sargasso Sea
ttttaagaagagtgtgaaacagatttattttggtgagcagtctgtattatgcggtggacttacacatttaatattagcaggttatgagacacttgtagacgctggttatgcacctgaaatggcatattttgaatgtttgcatgaagttaagttaatcgttgatcttctctatgaaggtgggatggcaaatatgagatattcaatttctaatacagctgaatatggtgattattcaagaggcccaaggctcataactgatgagacaaaaaaagaaatgaaaaaaatactttctgaaattcaatcaggacaatttgccaaggaatggatgcaagagcataaaagtggccaaactaagtttaaagtaatgagaaaaaatcaagctgaacatccaattgaagcggttggtgaaaaactaagaactctaatgccttggatcgctgagggaaaaatggttgataaatctaaaaattag

SEQ ID NO: 209462 - DNA, 433 bp, Unknown
  Bacterial polypeptide expressing nucleotide sequence isolated from the Sargasso Sea
atgttttatgaaaaagatacaaatgtaaatttaattaaagataaaaagattgcaatttttggatatggaagtcaaggacatgcacacgcattaaacttgaaagatagtggtgtaaaagaagttgttgtggctttaagagaaggttcatcaagtattgctaaagcagagtcaaaaggtttgaaagttatgaatttatctgatgcagctgaatgggcagatgtagttatgattttaactccagatgaattacaagcagaaatttataaaaatcatattgatcaaagaataagaccaggtacaagtatcgcatttgctcatggtttaaatgttcattatgatttaattaaagctagaaaagacttaaatgtatttatggttgctccaaaaggacctggtcacttggtgagaagtgaatatgaaaagggaggcggtg

SEQ ID NO: 209463 - DNA, 1177 bp, Unknown
  Bacterial polypeptide expressing nucleotide sequence isolated from the Sargasso Sea
tttatgaagtctgaagagttttcagatggggttaatgttttaatagacaaaaaaatagttattattggatgcggagctcaaggcttaaatcagggtttaaatatgagagactctggattggatatatcttatgtgttaagacaatcatctattgataataaaaaggaatcatttttaaatgcatctaataataaatttaatgttggtacatatagcgatctaattccaagtgcagacatggtaattaatctcacacctgataaaaatcatactcaagttgtcaatgaagttatgcctcttatgaagaagaactctatcttatcatattcacatggttttaacattgttgaggagggattaaaaattagagaagatataacagtaattatggttgctccaaagtgtcctggaacagaagttagggaagagtatttaagaggattcggagttccaacacttatagcagttcatccaccaaatgatccaaacggagatggattagattacgctaaagcttatgcagttgcaactggtggtcatcgagcaggagtcttggaatcatcgtttgttgctgaagttaaatctgatttgatgggagaacaaacaattttatgtggagtattgcagtcaggatcaattttatgttttaataaaatgattgagcttggttttgatagtggtttttcatcaaagttgattcaattcggttgggaaacaatcactgaagaattaaaacataatggtattaatgggatgttagctagattagatgatgattcaagatatttagtacataccctttctgaagaattaaaagagattttaaacccattattcaaacatcacatgaaaaatattttagatggaactttttcaaaggacatgatggaagattgggtaaatgatgatgtgaagcttcttaactggagaagagaaactggtttaactgattttgaaaagtcctctgtatcagatattgaaatttctaatcaagattactttgaaaaaggaatattaatgattgcttttgttaagtcaggtgttgaattagcattcgaaacgatgttagacaatggaataatagatgagtcagcatattatgaatctcttcatgaacttcctttgatagcaaatcttgttgcaagaaaaaaactatttgaaatgaatagaattattt

SEQ ID NO: 209464 - DNA, 529 bp, Unknown
  Bacterial polypeptide expressing nucleotide sequence isolated from the Sargasso Sea
atgaaaatctattatgatgaagatgcaaatctagaaattattaagaaccttaaagtcacaataattggatatggttctcaaggacatgctcatgcaaataatttacatgattcaggagtagatattacagttggactcagagagggttcagcctcatgggaaaaggcagaatctgctggcttaaaagtttcaagtgtagaagactcagttaaaggctctgattttgtaatgattctagcgccagatgagtttcaaagtgatttgtattcaaaacagatagagccaaaccttaaagaaggcattattttggcttttgcgcatggatttaatattcattttggtaagatcaaacctactgatgatattagcgtagtgatgattgctccaaaagggcctggtcatactgttagaagcacatatatgtctggaggaggagtgccttcattaattgcaatatacagagattctatttccgcaaaagaatttaatgctaaggatgttgctctttcttatgcaaaagcaaatggcg

SEQ ID NO: 209465 - DNA, 733 bp, Unknown
  Bacterial polypeptide expressing nucleotide sequence isolated from the Sargasso Sea
agtaagagaaggaacaagtattgcatttgctcatggtttaaatgttcattacgatttaattaaagctagaaaagatctagatgtttttatggttgctccaaaaggaccaggtcatttggtaagaagcgaatatgaaaaaggaggtggagtaccttgtttatttgcagtacatcaaaatggttcaggaaaagctagagacctagctttatcttatgcttcagcagttggtggaggaagatcaggaattattgaaactacatttaaagacgaagttgaaacagatttatttggtgaacaaactgtattgtgtggaggtttagtagaactaatcaaaaatggttatgaaactttagttgaagcaggatatgaacctgaaatggcatattttgaaaccgttcatgaagttaaattaattgtcgatttaatttatgagggtggaattgcaaatatgaattattcaatatcaaatactgctgaatatggtgaatatcaatcagggccaagagtagtaaacaaagaagaaactaaaaaaagaatgaaagaagttttggctgaaattcaatctggaaaattcactaaggagtggatggatgaatgtaaaaatggtcagaaaaattttctagctacaagggctaaattagctgagcatccagtcgaaaaagttggtgctgaacttagagctatgatgccttggattgctaagaaaaaattagttgatagtgataaaagttaa

SEQ ID NO: 209466 - DNA, 1021 bp, Unknown
  Bacterial polypeptide expressing nucleotide sequence isolated from the Sargasso Sea
tatgaaaacatattatgaaaaagatactgacgctaatttgattaaaaacaaaaagattgcaattttcggttatggtagtcagggacacgcccatgcattaaatttaaaagatagtggagtaaaagaagtagtcgtagctttaagagagggttcatcaagcaaagtcaaagcagaaaaagaaggtcttaaggtaatgtctctttcagatgccgcagcttgggcagatattgtaatgatgttaacacctgacgaacttcaatcagaaatttataaaaatcatatcgaacaaagaatgaaagaaggtacaagtttagcatttgcacatggtttaaatattcactttgaattaattaatgctagaaaagatctagatgtatttatggtggcccctaaaggtccaggacatacagttagaagtgaatttcaaaaaggaggaggagtaccttgtttaatggcagtgcataaaaatagctctggaaaagccagagagttggcattatcttatgcatctgcgataggtggtgggaagtctggaattattgaaacaacttttaaagatgagtgtgaaacagatctctttggcgaacaaacagttttgtgcgggggtttagtagaattaattaaaaatggattcgaaactttaacagaagccggttatccaccagaaatggcttacttcgaaactcttcacgaagtgaaacttattgtagacttaatttatgaagggggaattgcaaatatgaattattcaatttctaatacagctgagtacggagagtacgtttctggaaaaaaaattgttgatagtaagaccaaagagaaaatgaaagaagttttaaaaaatattcaatcaggaaaatttacaaaagaatggatggaagagtgcaaatctgggcaaaaaaactttcttcaaatgagaaaagatttagctaatcatccaatcgaaaaagttggaaaagagcttagagatatgatgccttggattcgaaagaataaattagtcgataaggataagaattaa

SEQ ID NO: 209467 - DNA, 940 bp, Unknown
  Bacterial polypeptide expressing nucleotide sequence isolated from the Sargasso Sea
atgaatattttttatgatgatgatgcaaatattgaaataattcaaaaattgaaagtatctattgtgggttatggatctcaaggtcatgcgcatgcaaataacctaagtgactctggtgttgatgttactgtcgctcttagagaaggttcatcttcatgggaaaaagcagaggaagctggtttaaaagtcatgcctgttgatgaggcaacaaaagatgcagaccttgtgatgattcttgctcctgatgagtttcagaaaggaatttatgagaagagtatcaaacctaatttaaaaaacgacgcaattttagcctttgctcatggatttaatattcattttaaaaaaattattcctgatgaaaccaacagcgttatcatgattgcaccaaaaggaccaggccatacagtaagaagtacttatttaaaaggcggaggcgttccatctttaattgctatatatcaagattcaaccaatacaagtgactctagcgccaaggaagttgctctttcttatgctaaagctaatggaggcacaagggctggagttttagaaacaacatttaaagaagaaacagaaacagatctttttggagagcaagctgtgttatgtggaggcatgacagccctaataaaagctggatatgaaacattggttgaggcaggctacagtcctgaaatggcttattttgagtgtcttcatgaaacaaaattaattacagatttgattcaagaaggtgggattgcgaatatgcattattctatttcaaatacagctgagtatggcgattatttgagcgggccaaaaattattactgagaaaactaaggaagcaatgaaagaggttttggacaatatacaatctggaaattttgcagatgaattcttggatgattgcaggcaaagtaatgatggctctggaggaccttttatgaaatcaaaaa

SEQ ID NO: 209468 - DNA, 1018 bp, Unknown
  Bacterial polypeptide expressing nucleotide sequence isolated from the Sargasso Sea
atgttttatgaaaaagacactgatgtaaatcttatcaaagataaaaaaatagcaatttttggttatggtagtcaaggacatgcccatgctttaaacttgagagatagtggcgtaaaagaaatagtagtagcattaagagaaggttcatctagtgcagcaaaagcagagtccaaaggtttaaaagtaatgaatttatctgatgctgctgcttgggcagatgttgtaatgatcctaactcctgatgaattgcaagctgaaatttacaaaaaccatattgaacaaagagctagagaaggaacaagcatagcatttgcgcatggtttaaatgttcattatgatttaattaaagcaagaaaagatttagacgtatttatggttgctccaaaaggacctggtcacttagttagaagtgaatatgaaaaaggtggaggggttccatgtttatttgctgtacatcaggatggctcaggaaaagcgagagatttagctttatcttatgcatcggctgtaggtggaggaagatctggaattatagaaacaacatttaaagacgaagtcgaaacagatttatttggcgagcaatcggttttatgtggtggattagttgagctaatgaaaaatggatatgaaacattagttgaggctggttatgaacctgagatggcatactttgaaactgttcatgaagttaaattaattgttgatttaatttatgaaggtggaatagcgaatatgaattattctatttcaaatactgcagaatatggagaatataaatctggtccaagaattataaataaagaagaaacaaaaaaaagaatgaaggaaatactatctgaaatacaatctggaaagttcaccaaagaatggatggatgaatgcaaaaatggtcaaaaaaactttctagcaactagagcaaaattagcagaacattcagttgaaaaggttggagctcagctaagagctatgatgccttggattggtaagaaaaaattggttgatagcgataaaagttaat

SEQ ID NO: 209469 - DNA, 1000 bp, Unknown
  Bacterial polypeptide expressing nucleotide sequence isolated from the Sargasso Sea
atggcaaagttattttatgacaaagatatagacgatcaaatactaagagataaaagaatttctgttattggttatggctctcaaggtcatgctcatgcacaaaatcttaaagattctggatttgatgtaattataggtctttatgaaggttctaaatctaaagaacaggctgaacatgatggatttgaagtatatagtatttcagatgcagtaaaaaactcacaacttataagtctttgtatccctgatccttcaatgaaaaaggtatttaatgaagatatagagcaaaatctatctgaaggagatattttgctttttgcacatggctttgcaattctttatggagaaattaagccacctgaaaatgtggatgtagttatgattgctccaaaagctccaggacatagagttagggctgtttttgagagagacttaggagttccatgcttgatagctgttgaccaggacttttcaggaaaagcttatgaaactgcattagcttatggaaaaggtattggtggtggaagagcaggaatattagaaaccacttttaaagaagaaactgaaactgatctttttggagaacaagctgttctatgtggaggtgtgacagcattaattaaggcaggattcgaagtattgactgaagctggatatcagcctgaatctgcctatttcgaagttttgcatgagttaaaactcatagttgatttgatttatcaaggtggtttggaaggaatgaggtactcagtatctacaactgctgaatatggagactatactgttggtccaaaaataattgatgattctgttaagcaatcaatgaaaaatgtcttagatgatatccaaagtggtagatttgcaagagagtggattgcagaaaatgatgaaggattacataaatataacgaattaagagaagcagatttgagtcatccagttgagaaaattggtaaagatctgagagcaatgatgccttggctagaatcaacaacataat

SEQ ID NO: 209470 - DNA, 1045 bp, Unknown
  Bacterial polypeptide expressing nucleotide sequence isolated from the Sargasso Sea
atgaaaatttattatgacgatgatgcaaatcttgaacttattaaaaaactaaatgtaacaattattggttatggttcccaaggacatgcacatgcaaataatttaaaagattctggagttgatgttactgttggtttaagagaggggtctttgtcgtggagtaaagcatttgaagcaggattaaaagttatgccagtagatcaatctgtcttgaatgcagacctagtaatgatattggcgcctgatgaatttcaaaaaggcgtttttgaaaaaagtataaagcccaacctcaaaagtaatgcaattttagcttttgctcatggtttcaatattcattttaaaaagattgtgcctagtgagacaaatactgtaatcatgattgcaccaaaaggcccaggtcacacagttagaagcacttatttaaatggcggaggagtaccatcactcattgctatatttaatgatgcaatgcaagaggatgagcattctgcaaaagacattgctttgtcatacgcaaaagcaaacggaggtaccagagctggtgtgcttgaaactacgtttaaggaggaaacagaaacagacttattcggcgagcaggcagtattatgtggaggattaactgcactaattaaagcaggtttcgaaactttagttgaggcaggttatagtcctgaaatggcatattttgaatgcctacatgaaacaaaattaatcacagatttaattcaggaaggtggcatagcaaatatgcattattcgatttcaaatactgctgagtatggtgattatttaagcggcccaaaagtcattacagaaacaacaaaagaagctatgagagaaattcttgataatatacaatccggtaattttgctaatgaatttcttgatgactgcaggcaaagtaatgatggctcaggcggaccttttatgaaatcaaatagaaaatcaacgaaaaatcatccaattgaagaagtgggaaaagagctaagatctaagatgaaattcctcaattctgaaaaacttgtagatatagaaaaaaattaat

SEQ ID NO: 209471 - DNA, 319 bp, Unknown
  Bacterial polypeptide expressing nucleotide sequence isolated from the Sargasso Sea
tattgtagatcttatttatgaaggtggaattgcaaatatgaactactcaatatcatacacagcagaatacggagaatatgtttctggtaaaaaaattgttgattcaaagacaaaagagaaaatgaaagaagttcttaaagatattcaatcaggtaaatttacaaaacaatggatggatgaatgtaaaggaggtcaaaaaaactttttaaaaatgagagaagaattggcaaaacatcccattgaaaaggttggaaaaaaacttcgagatctaatgccttggattggtaaaaataaattggtagacaaagctaagaattaa

SEQ ID NO: 209472 - DNA, 1018 bp, Unknown
  Bacterial polypeptide expressing nucleotide sequence isolated from the Sargasso Sea
atgttttacgaaaaagatgcagatgtagatttaattaaaaataaaaaaattgcaatttttggttatggtagtcaaggacatgcacatgcattaaatcttaaagatagtggtgttaaagaaattgtggttgcactaagagatggctcatcgagtgtagcaaaagctgagtcaaaaggattaaaggtcatgaatttatctgatgcagctgcttgggcagatgtagtaatgattttaactccagatgaattacaggcagaaatttataaaaatcatatagagcaaagggtaaaagaaggaaccagtattgcatttgctcatggattaaatgttcactatgatttaatcaaagcaagaaaagatttagatgtatttatggttgctcctaaaggacctggtcatttagttagaagtgaatatgaaaaaggtggaggagtaccatgtttatttgcggtacatcaaaatggatcaggtaaagcaagagatctagcgttatcatatgcgtcagctgttggtggtggaagatctggaattattgaaaccactttcaaagacgaagttgaaacagatttatttggtgagcaaacagttctttgtggaggattggtagaattaattaaaaatggttatgagactttagttgagggtggttacgagcctgagatggcatattttgaaactgtgcacgaagtaaaactaattgttgatttgatttatgaagggggaattgcaaatatgaactactcaatatcaaatacagctgagtatggtgaataccaatctggaccaagaattataaataaagaggaaaccaaaaaaagaatgaaggaagtattgtctgatattcaatctggaaaattcactaaagagtggatggatgaatgtaaaaatggccagaaaaactttttagcaactagagctaagttagcagagcattctgtggaaaaagttggtgctgaacttagagctatgatgccatggattggcaagaaaaaactagttgacagtgataaaagttaga

SEQ ID NO: 209473 - DNA, 1018 bp, Unknown
  Bacterial polypeptide expressing nucleotide sequence isolated from the Sargasso Sea
tatgaatatttattatgataaagatgctaatttacaaattataaaagaaaaaaaagtagcaataattggctatggatctcaaggacatgcacatgctaataatcttaaagattctggtgtagatgtttgtgttggtttacgcgcggggtcatcttcaatagaaaaggcaaagtctgcaggattaaacgtagaatcaattgccgaagctgtatctagcgcagacgtcgttatgttgttggctcctgatgagcatcaggctgaattatacaaaagtgaaatagagccaaatattaaaaatagtgctactttggcattcgcacatggcttcaatattcattttaaacaaattattccgcgggatgatcttgatgtcataatggttgctccaaaaggccctggacacttagttcgcgctacttatgctagtggtggcggtgttccatcactaatcgctatttttcaagatgcatctggttcagctaaagagttatctttgtcctatgcatcagctaatggaggaggccgagcagcaataatagaaaccacatttaaggaagagacagaaacagatttatttggcgaacaagctgttttatgcggtggaataacatctcttatacagactggttatgagaccttggttgaggcagggtatgctccggagatggcgtattttgaatgtttacatgaaacaaaattaattgttgatttaatttacgagggtggaatagcaaatatgagatattcaatttctaataccgctgaatatggagattttacccgtgggccacgagtaattacggaggaaacaaaagaggtgatgaaaaaaatcttatcagaaattcaaagcggtgaattcgcacgtgagtttatttcagaatataaaaacggtgcttcagtaatggatcaaaaaagaaaggaaagtcgtcaacatggaattgaaattattggtgaaaaattacgttcaatgatgccgtggatcggtgaaaataaactagtagatgagaaaaaaaattaa

SEQ ID NO: 209474 - DNA, 1483 bp, Unknown
  Bacterial polypeptide expressing nucleotide sequence isolated from the Sargasso Sea
catggctaactatttcaacaccttgaacctgcgtcagcagttggcccagctgggcaagtgtcgtttcatgcagcgcgaagagttcgcggacggctgcaacgtgctgaagggcaagaaggtggtgattgtgggctgtggtgcccagggtctgaaccagggcctgaacatgcgcgactccgggctggatatctcctacgccctgcgcaaggccgccatcaccgagaagcgtgcctcctggcagaaggccaccgacaacggcttcgcggtcggcacctatgaagagctgatcccgaccgccgatctggtgctgaacctgaccccggacaagcagcactccgacgtcgtcaaaaccgtgatgccgctgatgaagcagggcgccgcgctgggctactcccacggtttcaacgtggtggaagagggtcagcagatccgctccgacatcacggtcgtgatggtggcgccgaagtgcccgggcaccgaagtgcgtgaagagtacaagcgcggcttcggtgtgccgaccctgatcgctgttcacccggagaacgaccccaagggtgaaggcatggccatcgccaaggcgtgggcctctgccaccggtggcgaccgtgccggcgtgctggagtcctccttcgtggcggaagtgaaatctgacctgatgggcgagcagaccatcctctgcggcatgctgcaggccggttccctgctctgctacgacaagctggttgccgaagggaccgacaaggcctatgccggcaagttgatccagttcggttgggagaccatcaccgaagccctgaagcagggtggcatcagcctgatgatggaccgtttgtccaacccggccaagctgcgtgccttcgagctctccgagcagctcaagaccctgatgcgcccgctgttcgagaagcacatggatgacatcattgccggtgaattctcccgcggcatgatggccgactgggccgaagacgatgccaagctattcggctggcgcgaagagaccggcaagtccgccttcgaaaacgcgccggcgtttgcaggcaagattgccgagcaggagtacttcgacaatggcgtggtgatggtggccatggtcaaggcgggtgtcgagctggcgttcgaaaccatggtggcctccggcatctatgaagagtctgcctactacgaatccctgcacgagctgccgctgatcgccaacacagtggcccgcaagcgtctgtacgagatgaacgtggtcatctccgacaccgccgagtacggcaactacctgttcgccaacgccgccgtgccgttgctgcgcgagcacttcatgccgaccctgaaagcgggcgacctgggtgccagcaaggcggatgagcagagcgtcgataacctggcgctgctggcggccaatgaggcgacccgcaaccaccccatcgaagcgatcggtcaggtactgcgcggttacatgaaagacatgaagcgcatcgccgtcggcggttaa

SEQ ID NO: 209475 - DNA, 1018 bp, Unknown
  Bacterial polypeptide expressing nucleotide sequence isolated from the Sargasso Sea
atgttttatgaaaaagatgcagatgtaaatctgattaagagtaaaaaagttgctatttttggttatggaagtcaaggccatgcccatgcattaaatttaaaagatagtggagtaaaagaaattgttgtagcattaagagaaggttcatcgagtgcagcaaaagcagagtcaaagggtttaaaggtaatgaatttatcagatgccgctgagtgggctgatgtagtaatgattttaactccagatgagttacaagcagaaatttataaaaaccacatagaacaaagagtaagagaaggaacaagtattgcttttgctcatgggttaaatgttcattacgatttaattaaagcaagaaaagatttagatgtttttatggttgctcctaaaggacctggtcatttagttagaagtgaatatgaaaaaggaggtggggtaccttgtttatttgctgttcatcaagatggttcaggaaaagcaagagacttagctttatcttatgcttcagcagttggaggtggaagatcaggaattattgagactacatttaaagatgaagttgaaacagatttatttggtgaacaaactgtattgtgtggaggtttagttgaactaattaaaaatggttacgaaactctagttgaagcaggatatgaaccagagatggcatattttgaaacagttcatgaagttaaattgattgttgatttaatttatgaaggtggaattgcaaacatgaattattctatttcgaatactgcagaatatggcgaatatcaatcaggaccaagagtggttaataaagaagaaactaaaaatagaatgaaagaagtcttggctgaaattcagtctggaaaattcactaaagagtggatggatgaatgcaaaaatggtcaaaagaattttcttgccacaagagcaaagttagctgagcatccagttgaaaaagtaggtgcggaactaagagctatgatgccttggattggtaagaaaaaattagttgatagtgataaaagttaaa

SEQ ID NO: 209476 - DNA, 920 bp, Unknown
  Bacterial polypeptide expressing nucleotide sequence isolated from the Sargasso Sea
aaaagacagtggagttaaagaaattgtagtagctcttagagaaggttcttctagcgctgctaaagccgagtcaaaaggacttaaggtaatgaatttatcagatgctgctgcttgggctgatgttgtaatgatattgacaccagatgaactacaagctgaaatttataaaaatcacatagaacaaagagtaagagaaggaacaagtattgcgtttgctcatggattaaatgttcattacgatttaattaaagcaagaaaagatctagatgtatttatggttgcaccaaaaggaccaggacatttagttagaagtgaatatgaaaaaggtggtggagttccatgtttatttgcagttcatcaaaatggttcaggaaaggcaagagatcttgctttatcttatgcatcagctgtaggtggaggaagatcaggaattattgaaacaacatttaaagatgaagtagaaacagatttatttggagaacaaactgttttatgtggcggcttagtcgaattaattaaaaacggttatgaaactttgaccgaagcaggttatgaacctgaaatggcatattttgaaacagttcatgaagttaaattaattgtagatttaatttatgaaggggggattgctaatatgaattattctatttcaaatactgctgaatatggtgaataccaatcaggaccaagaataataaataaagatgaaactaagaaaagaatgaaagaagttttagcagatatacagtcaggtaaattcacaaaagagtggatggatgaatgtaaaaatggtcaaaaaaactttcttgcaactagagctaaattagcagagcattcagtagaaaaagtcggagccgaacttagagcaatgatgccttggattgcaaagaaaaaattagtagatagcgataaaagttaaa

SEQ ID NO: 209477 - DNA, 1015 bp, Unknown
  Bacterial polypeptide expressing nucleotide sequence isolated from the Sargasso Sea
aatgttttatgaaaaagatgcagatccaaatttaattaaggataaaaaagttgcaatttttggttatggaagccaggggcatgcacatgcacttaatttaaaagatagtggagtaaaaaatgttgttgttgcacttcgagaaggttcttcaagtataaaaaaagcagagagcgaaggattaaaagtaatgtccctttcagatgctgctgcttgggcagatgttgttatggtacttactcctgatgaacttcaagcatcaatttataaaaatcatatagaacaaagaatgagagaaggaacaagtttagcatttgctcacggtttgaatattcactttgatttaattaaagctagaaaagatttagatgtttttatggttgcacctaaaggtcctggacacttagtaagaagtgaataccaacgaggtggtggagttccatgtctaatggcagttcataaagatagttcaggcaaagctagagatttagctatgtcatatgcatgcgctgtcgggggaggtagatctggaattatagaaacaactttcaaagatgaatgcgaaacagatttatttggagaacaaacagtactatgcggtggtttagttgaactaattaaaaatggttttgaaactttaacagaagcaggctacccacccgaaatggcatatttcgaaactcttcatgaggttaaattaattgtagatttaatctacgaaggtggaattgcaaatatgaattactcaatttctaatacagctgagtatggcgaatatatttctggaagaaaaattgtagactcaaaaacaaaagagagaatgaaagaggttttaaaagacattcaatctggcaaatttacaaaacaatggatggatgagtgcaaaggtggccaaaaaaactttctgaaaatgagagaagaattagcaaaacatcccattgaaaaagtgggtaaaaagttaagagatttaatgccttggattggtaagaataaactcgtcgataaatcgaagaattaa

SEQ ID NO: 209478 - DNA, 379 bp, Unknown
  Bacterial polypeptide expressing nucleotide sequence isolated from the Sargasso Sea
gaggcaggatatgacccagaaatggcatactttgaaacagtacatgaagtgaaattattgtgggatttaatatatgaaggtgggatagcaaatatgaattattctatttcaaacactgcagaatatggagaatatgtaactggaccaaaaattattaacaaagaagaaacaaaaaaaagaatgaaagaagtattggctgatatccagtctggaaagtttaccaagcaatggatggatgaatgtaaaaatggtcaaaaaaattttttaaaaacaagggaaagacttgccgatcatcctgtcgaaaaagttggaactgcgcttagagcaatgatgccatggataagtaaaaagaaattggttgatagtgacaagaagtaaa

SEQ ID NO: 209479 - DNA, 586 bp, Unknown
  Bacterial polypeptide expressing nucleotide sequence isolated from the Sargasso Sea
agttccatgtctttttgcagttcatcaaaatggatcgggtaaagcaagatatttagcaatgtcatatgcttcagcgattggtggaggtcgatctggtattattgaaacaacttttaaagatgaagtagaaacagatttatttggagagcaaacagttttatgtggggggttagttgaactaataaaaaatggttatgaaactctggttgaagctggctatgaacctgagatggcatactttgaaactgttcacgaagtaaaattgattgtagatttaatttatgaaggtggaattgcaaatatgaattattcaatttctaatactgctgaatatggagaatatatgtcgggccccagaattataaacaaagaagaaacaaaaaaaagaatgaaagaagttcttcaagatattcaatcaggtaaatttaccaagcagtggatggacgagtgcaaaaatggccagaaaaattttcttaaaacaagagagaaacttgctgaacatccagttgaaaaagtaggtgctaaattaagagctatgatgccttggatttcaaaaaagaaactagtagatagcgataagaattaa

SEQ ID NO: 209480 - DNA, 1015 bp, Unknown
  Bacterial polypeptide expressing nucleotide sequence isolated from the Sargasso Sea
atgttttatgaaaaagatgcagatacaaatttaataaaagacaaaaaagttgcaatttttggttatggtagccaaggacatgctcatgcactcaatttaaaagatagtggagtaaaaaatgttgtagttgctcttagagagggttcatcaagtataaaaaaggcagagagtgaaggattaaaagtgatgtctctttcagatgctgctgcttgggcagacgttgttatggttttaactccagatgaacttcaagcatcaatttataaaaatcatatagagcaaagaatgagagagggtacaagtttagcatttgctcatggtttgaatattcattttaatttaatcaattctaggaaagatttagatgtatttatggttgcacctaaaggccctggtcatttagttagaagtgaataccaacgtggtggtggagttccatgtttaatggcagtacacaaagatagttcaggtaaagctagagaccttgcaatgtcatacgcaagtgctgttggtggtggtagatctggaattattgaaacaacttttaaagacgaatgcgaaacagatttatttggtgaacaaacagttttatgtggcggtttagtagaattaattaaaaatggttttgaaactctaaccgaagcaggctacccgcccgaaatggcatatttcgaaactcttcatgaggtaaaattaattgtagatttaatttatgaaggtggaattgcaaatatgaattactcaatttctaatacagctgagtatggtgaatatatttctggaagaaaaattgtagactcgaaaacaaaagaaaaaatgaaggaggtattaaaagacattcagtctggtaaatttacaaaacaatggatggaagagtgcaaaggtggtcagaaaaactttctgaaaatgagagaagaacttgcaaaacaccctattgaaaaggtgggtaaaaaattaagagatttaatgccttggattggtaagaataaactcgtcgataaatcgaagaattaag

SEQ ID NO: 209481 - DNA, 601 bp, Unknown
  Bacterial polypeptide expressing nucleotide sequence isolated from the Sargasso Sea
aatgttttatgaaaaagatgcagatgtagatttaattaaaaataaaaaaatcgcaatatttggttatggtagtcagggacatgctcatgcattaaacttaagggatagtggtgttaaagaaatagttgtagctcttagagaaggttcatcaagtgctgctaaggcagagtccaaaggactaaaagttatgaacttatcggatgcagctgcctgggcagatgttgttatgattttaacaccagatgaattacaagctgagatttataaaaatcacatagagcaaagagtaagagaaggaactagtattgcatttgctcatggactaaacgttcattatgatttgattaaagcaagaaaagatttagatgtatttatggttgctcctaaaggaccaggtcatctagttagaagtgaatatgaaaaaggtggtggagtaccatgcttgtttgcagttcatcaaaatggttcaggaaaagcaagagacctcgctttatcttacgcatcagctgtaggtggaggaagatctggaattattgaaaatacatttaaagatgaagttgaaaccgaatttatttggagaaccagactggttttatgtggt

SEQ ID NO: 209482 - DNA, 889 bp, Unknown
  Bacterial polypeptide expressing nucleotide sequence isolated from the Sargasso Sea
ttggcctcagaaaggatgggggaaagtttggggtaaagcaaaagcaacaggacttgatgttgttgaagtcgatgagcttgtaaaaaaatctgatattattatgattttagccccagatacaagtcaaaaaaagatttatgaagattcaatacgagataatatagaaccgggaaaatatttagctttcggccatggtttcaatattcattataaccaaattgttccagaagatggtgtaaatgtattcatggttgcaccaaaagctccgggtcatactgtgcgaggtacatatgaagaaggtgcgggtgttccaggattgattgcgattcaccaagatccatcctctgatacaaaagatattgcccttgcttatgccgcagggataggctcttctagggttggaattattgagacaacttttaaggatgaaactgaaacagatttatttggagagcaatctgttctttgtggcggggtctcaagtttgatattagcgggcttcgaaactttgacagaagctggctatccacctgaaatggcttatttcgaatgtcttcacgaggtaaaattaattgttgatttaatatatcaaggcggaatttctaatatgcgctattcgataagcgatactgcaaaatatggtgatataactaggggtcctagattaatagattcttcggttaaagaaagaatgaagattgttttagatgagattcaaagtggacaatttgctgacgaatggattaaagaaaatgaatcaggcagaccaaattacaatcgtttacttaaagaaggggaaactcatcctatagaggatattgggacagagctcagatctatgatgaccgctttatttaaaaagaaattagtagataaagaaaagaactaa

SEQ ID NO: 209483 - DNA, 1021 bp, Unknown
  Bacterial polypeptide expressing nucleotide sequence isolated from the Sargasso Sea
atgagagtatattacgatagagatgcagatttaaacttaattaaagataagaaaatagcaattgttggttacggcagtcaaggacatgctcatgcaatgaatttaagagattctggcttagagaatgtttcaatagctttgagagaaggatcgaattcaagacctaaggcagagcaagcaaattttaaagttatgactccagcagaagctgctagttgggctgacgtaattatgatgttaaccccagatgaattacaatctgaaatttacacaaatgatattgctgataatattaaagaaggaacgacaattgcatttgcacacggattaaatattcacttcgatctcattaaacctaaagaaggaatagatgtcattatggttgcacctaagggtcctggacatactgttagggctgaatatgtaagaggtgcaggtgttccttgtttagtagctgttgataaaaatccttcaggtaatgctcttgaaataggaattgcatatgcatcagcaattggtggtggaagagctggaattattgagacaacatttaaagaagaatgtgaaacagatctttttggtgagcaatcagtactatgtggaggattaacccatttgattttagctggttatgaaactcttgttgaagcaggatatgctcctgaaatggcatattttgaatgccttcacgaagtaaaacttatcgttgatcttttatacgaaggaggaatggcgaatatgagatactcaatttctaacactgctgaatatggagattattcaagaggtcctagacttattactgatgaaacaaaaaaagaaatgaaaaaaattctttcagaaatacaatctggtcaatttgctaaagaatggatggcagaacataaaagtggtcaaacaaaattcaaagtaatgagaaaagatcaagctgaacatccaatagaagccgttggagagaaacttagaacccttatgccttggattgcagaaggaaaaatggttgataaatctaaaaactaga

SEQ ID NO: 209484 - DNA, 1045 bp, Unknown
  Bacterial polypeptide expressing nucleotide sequence isolated from the Sargasso Sea
catgaaaattttttacgatgatgatgctgatatctcaatcattcaacaacttaaagtaactatagttggttatggttctcaaggtcatgcgcatgcaaataatcttcatgaatctggagtggatgttactgttgctttgagagagggctcctcatcatggaaaaaagctcaagcagctggattaaaagttgccaaggtttcagatgcagtttgtgatgcagatctagttatgattttagcgccggatgaattccaacaaggattatatgaatcagaaattaaagctcatttaaaacaagatgcggttttagcattcgcacatggttttaatattcactttaaaaaaattgttcctggagaaaagacatctgtcattatgattgctcctaaaggtcctgggcatactgtaagaagtacatatgttaacggcggcggggtgccatctttgattgcaatttatcaagatggagttaatccgtgcaatcatagcgcaagagatattgctctttcatatgcaaaggcaaacggtggaacaagagcaggtgttctagaaacctcttttaaggaagaaactgaaactgatctttttggagaacaagctgttttgtgtggtggtatgacagctttgataaaggcaggatatgaaactttggtagaagctggatacagtcctgagatggcatactttgaatgtttgcatgaaacaaaattaattgttgacctcattcatgagggagggatagcaaatatgcattattccatttctaatacagcagaatatggggattatttaagtgggccagaaataattaccaatgatacgaaagaagctatgaaaggaattttaaatagaattcaaactggtgaatttgctgacaattttttaaatgattgtcgacaaagtaacgatggtactggcggcccaattatgaaagaaatgcgtaaaaatacagctgctcattcaatcgaagaagttggagccgaacttagatcaaagatgaaatttcttaactcagaacgcttagttaataaagataaaaattag

SEQ ID NO: 209485 - DNA, 1018 bp, Unknown
  Bacterial polypeptide expressing nucleotide sequence isolated from the Sargasso Sea
aatgttttatgaaaaagatactaatgtaaatttaattaaagataagaaagtagcaatttttggttacggaagccaaggacatgcacatgcgcttaatcttagagatagtggtgttaaagaagttgtggtagctttaagagaaggctcatcaagtattgaaaaagctgagtctaaaggtttaaaagtaatgaatttatctgatgctgcagaatgggcagatgtagttatgattttaactccagacgaattacaagcttcaatatataaaaatcatatagaacaacgtgttaaagaaggaacgtcaatcgcgtttgctcatggtttaaatgttcactatgatcttataaaagccagaaaagatttagatgtatttatggttgcaccaaagggaccagggcatttagtaagaagtgaatttgaaaaaggtggaggagttccttgcttatttgctgttcaccaagatggttctggaaaagcaagggatttagcaatgtcatatgcatcagccgttggtggaggtagatctggaataattgaaactacattcaaagatgaagtagagactgatctatttggagagcaaacagtattatgtggtggacttgttgagctgattaaaaatggatatgaaactttagttgaagctggatatgaaccagaaatggcttattttgaaactgttcacgaagtgaaactgattgtggatttaatatatgaaggtggaattgctaatatgaattattcaatttcaaatacagctgagtatggtgagtatcagtcaggcccaagaataattaaaaaagatgaaaccaagcaaagaatgaaagaagttttagctgaaattcaatcaggtaaatttacaaaagaatggatggaagaatgcaaaaatggtcaaaaaaactttcttgcaaccagagctaaattagcagaacactcggttgaaaaagtaggtgctgaacttcgagccatgatgccttggatttcaaaaaagaaactagtagatagcgataagaagtag

SEQ ID NO: 209486 - DNA, 865 bp, Unknown
  Bacterial polypeptide expressing nucleotide sequence isolated from the Sargasso Sea
agcgaaaaaagctcaagctgaaggtctcaatgttatgggtattccggaggccgcggcttggtgtgatttaataatgtttacgatgcctgatgagcttcaagccgaaacatacaaaaaatatgtgaacgacaacattaaagaaggcgctgcaatcgcttttgcacacggacttaatgtccactttggattaattgaacctaaaaaaggtatcgatgtactgatgatggctcctaagggtccaggtcatactgttcgaggagaatacacaaagggcggaggcgtaccttgccttgttgcagttgataaagacgaatccggtaaagcacttgaaataggactatcttactgctctgcgattggcggaggacgctcaggaataattgaaacaaattttcgagaagagtgtgaaactgacctatttggagaacaagccgtactttgtggtgggctaattgagttaattcgctgtggcttcgaaacacttgttgaggctggatatgctcctgaaatggcctattttgagtgtcttcatgaggtcaaattaattgttgatctaatatacgagggtggcattgccaatatggattactccatttctaatacggccgaatatggccagtatgttacaggccctcgtattctaccttatgaacagactaaaaaggtaatgaagggagttctctccgatattcaaaaaggtaacttcgttcgcgacttcatgcttgagaatgctgtaggtcagccgactattaaagctgcgcgtcgtgcaaacgatgagcacatgattgaagcagtaggagaaaaactgcgtggaatgatgccctggatatctgctgggaaaatggtcgataaagacaaaaactaa

SEQ ID NO: 209487 - DNA, 634 bp, Unknown
  Bacterial polypeptide expressing nucleotide sequence isolated from the Sargasso Sea
aatgttttatgaaaaagatactgatgtgaatttaattaaagaaaaaaagatcgcaatttttggatatggaagccaaggacatgctcatgcattaaatttaaaagatagtggtgtaaaagaagttgttgttgcattaagagatggatcagcaagcaaagccaaagcagagtctaaaggactaaaagttatgaatttatctgatgctgcagagtgggcagatgtagttatgatactaactcctgatgaactacaagcaacaatttataaaaatcatatagaacaaagagttcgagaaggtacatctattgcttttgcgcatggtttaaacattcattatgatttaattaaagctagaaaagatttagatgtttttatggttgctccaaaaggaccagggcatttagtaagaagtgaatttgaaaaaggtggtggagttccttgtttatttgctgtacatcaaaatggatctggaaaagcaagagaacttgcaatgtcttacgcatcagccgttggaggaggaaaatctggaattattgaaactacttttaaagatgaagtagaaacagatttatttggagaacaaacagttttatgtggtggtttagtcgagctcattaaaaatggttatgaaact

SEQ ID NO: 209488 - DNA, 514 bp, Unknown
  Bacterial polypeptide expressing nucleotide sequence isolated from the Sargasso Sea
gcagtcggtggtggtagatcagggattattgaaacaacatttaaagatgaagttgaaacagatttatttggggaacagactgtgctttgtgggggtttggttgaactaataaaaaatggctatgaaactttggtggaagctggatatgaacctgagatggcatattttgagactgttcatgaagtaaaacttattgttgatcttatttatgaaggtggaattgctaatatgaattactctatttcaaacactgcagaatatggagaatatcaatctggtcctagggtgattaataaagaggaaactaaaaaaagaatgaaagaagttttagctgatattcaatctggtaaatttacaaaagaatggatggatgaatgtaaaaatggccaaaaaaactttcttgctacacgggcaaaattagctgaacatccagttgaaaaagttggggctaatttgagagctatgatgccatggatagggaagaagaaattagttgatagtgacaagaagtaaa

SEQ ID NO: 209489 - DNA, 1045 bp, Unknown
  Bacterial polypeptide expressing nucleotide sequence isolated from the Sargasso Sea
atgaatattttttatgatgatgatgcaaatattgaaataattcaaaaattgaaagtatctattgtgggttatggatctcaaggtcatgcgcatgcaaataacctaagtgactctggtgttgatgttactgtcgcacttagagaaggttcatcttcatgggaaaaagcagaggaagctggtttaaaagtcatgcctgttgatgaggcaacaaaagatgcagaccttgtgatgattcttgctcctgatgagtttcagaaaggaatttatgagaagagtatcaaacctaatttaaaaaacgacgcaattttagcctttgctcatggatttaatattcattttaaaaaaattattcctgatgaaaccaacagcgttatcatgattgcaccaaaaggaccaggccatacagtaagaagtacttatttaaaaggcggaggcgttccatctttaattgctatatatcaagattcaacaaatacaagtgactctagcgccaaggaagttgctctttcttatgctaaagctaacggaggcactagggctggagttttagaaacaacatttaaagaagaaacagaaacagatctttttggagagcaagctgtactatgtggaggcatgacagccctaataaaagctggatatgaaacattggttgaggcaggctacagtcctgaaatggcttattttgagtgtcttcatgaaacaaaattaattacagatttgattcaagaaggtgggattgcgaatatgcattattctatttcaaatacagctgagtatggcgattatttgagcgggccaaaaattattactgagaaaaccaaggaagcaatgaaagaggttttggacaatatacaatctggaaattttgcagacgaattcttggatgattgcaggcaaagtaatgatggctctggaggaccttttatgaaatcaaaaagagaatctaccaaaaatcaccctatagaaaaagttggaaaagagctcagatctaagatgaaatttttaaattctgagaaactcgttgataaagaaaaaaattagt

SEQ ID NO: 209490 - DNA, 1454 bp, Unknown
  Bacterial polypeptide expressing nucleotide sequence isolated from the Sargasso Sea
catggctaactactttaatacactgaacctgcgccagcagttggcacagctgggtaaatgtcgctttatgggccgcgacgaattcgccgatggtgcgagctaccttcagggtaaaaaagtggtcattgtcggctgtggcgctcagggtctgaaccagggcctgaacatgcgtgactccggtctggatatctcctacgcactgcgtaaagaagccattgctgagaagcgtgcttcctggcgtaaagcgaccgaaaacggcttcaaagtaggtacctacgaagatctgatcccgcaggctgacctggtggttaacctgacgccagacaagcagcactccgacgttgtacgttcggtacaaccgctgatgaaagatggcgcggcgctgggctattcacacggcttcaacatcgtcgaagtgggcgagcagatccgtaaagacatcaccgttgtgatggtggcaccgaagtgcccgggtactgaagttcgtgaagagtacaaacgtggcttcggtgtaccgaccctgatcgccgttcacccggaaaacgatccgaaaggcgaaggtatggcgattgctaaagcctgggctgcggccaccggcggtcaccgtgcgggcgtgctggagtcttctttcgttgcggaagtgaaatctgacctgatgggcgagcagactatcctgtgcggtatgctgcaagccggttctctgctgtgcttcgataagctggtggcagaaggtaccgacccggcatatgcggaaaaactgattcagttcggctgggaaaccatcaccgaagcgctgaagcagggcggcatcaccctgatgatggaccgtctgtctaacccggcgaaactgcgtgcttacgcgctgtccgaacagctgaaagagatcatggcgccgctgttccagaaacacatggatgacatcatctccggcgaattctcctccggcatgatggctgactgggctaacgacgataagaaactgctgacctggcgtgaagagaccggcaaaaccgcgttcgaaaccgctccgcagtatgaaggcaaaatcggcgagcaggagtacttcgataaaggcgtgctgatgatcgcgatggtgaaagcgggcgttgagctggcgttcgaaaccatggtcgattccggcatcatcgaagaatccgcttactacgaatcactgcacgaactgccgctgatcgccaacaccattgcccgtaagcgtctgtacgaaatgaacgtggttatctccgataccgcagaatacggtaactacctgttctcttacgcttgcgtaccgctgctgaaagagttcatgaccaccctgcagaccggcgacctgggcaaagcgattgccgaaggcgcggtagacaacgcgcagctgcgtgatgtaaacgacgccattcgcagccatgctatcgagaaagtgggccagaaactgcgtggctacatgactgatatga

SEQ ID NO: 209491 - DNA, 988 bp, Unknown
  Bacterial polypeptide expressing nucleotide sequence isolated from the Sargasso Sea
tctaattaaaagcaaaaaagttgctatctttggttatggaagccaagggcacgctcacgcattaaatttaaaagatagtggagtaaaagatattgttgtagctttgagagaaggttcatcgagtgcagctaaagcagaatcaaaaggattaaaggtaatgaatttatctgatgctgctgaatgggcagatgtagtaatgattttaactccagatgaacttcaagcggaaatttataaaaatcatattgaacaacgagtaagagaggggacaagtatcgcttttgctcatggtttaaatgttcattacgatttaattaaagccagaaaagatctagatgtttttatggttgctcctaaaggacctggtcacttagttagaagtgaatacgaaaaaggaggtggagtgccttgtttatttgctgttcatcaagatggttcaggaaaagcaagagacttagctttatcttatgcttcagcagttggtggaggaagatcaggaattattgaaactacattcaaagatgaagttgaaacagatttatttggtgaacaaacagtgctttgtggaggtttggttgagctaattaaaaatggttatgaaactttagttgaagctggatatgaaccagagatggcatattttgaaacagttcatgaagttaaattgattgttgatttaatttatgaaggtggaattgcgaacatgaattattctatttcgaatactgctgaatatggcgaatatcaatctggccctagagtagttaataaagaagagaccaaaaaaagaatgaaagaagttttggctgaaattcaatctggaaaatttactaaagagtggatggatgaatgcaaaaatggtcaaaaaaacttccttgctaccagagctaaattagccgagcatccagttgaaaaagttggtgcagaattaagagctatgatgccttggataggtaagaaaaaattagttgatagcgataaaagttaa

SEQ ID NO: 209492 - DNA, 979 bp, Unknown
  Bacterial polypeptide expressing nucleotide sequence isolated from the Sargasso Sea
aaataaaaagatcgcaatttttggttatggaagccaaggtcatgcacacgctcttaatcttagggacagtggagtaaaagaagtagtagttgctcttagagatggctcatcaagtaaagcaaaagcagaatctaaaggattaaaagttatgaatttatcagatgccgctgaatgggctgatgtagttatggttttaactcccgacgaacttcaggcaacaatttataaaaatcacatagagcagagagttagagaaggaacttcaatagcttttgcacacggattaaacatccactatgacttgataaaagctagaaaagatttagatgtatttatggtggcaccaaaaggtccgggtcatttagtaagaagtgaatttgaaaaaggtggtggagttccatgtttatttgcagtacatcaaaatggatcaggcaatgcaagagagttggcaatgtcatatgcttctgcagttggtggaggtagatcaggaattatcgaaacaacatttaaagacgaagttgaaacagatttatttggtgagcagacagttctttgcggcggtctagttgagctaattaaaaatggatatgaaactttggttgaggcaggttatgaacctgagatggcatattttgaaacagttcatgaagttaaactaattgttgatttaatttatgaaggtggaatagctaatatgaattattcgatttctaatacagctgaatatggtgagtatgttacaggtccaaaaattattaataaagaagaaacaaaaaaaagaatgaaagaagttttagcagatattcagtcaggaaaatttactaaagattggatggaagaatgtaaaaacggccaaaagaacttcttgaaaactagagaaaaacttgctgaacaccctgttgaaaaagtgggagcaggattaagagctctaatgccctggatatctaagaagaagttaatagatagtgataaaaattag

SEQ ID NO: 209493 - DNA, 997 bp, Unknown
  Bacterial polypeptide expressing nucleotide sequence isolated from the Sargasso Sea
gatggcccagctcttttacgactccgacgccgatctcggtctgctgaatggcaagaccgtggccatcattggctacggctcccagggccatgcccacgccctgaacctgaaggacagtggcgtgaacgtggtggtaggcctctacgacggcagccgctccgcagacaaggccaaggctgatggcttggaggtgctcagcgtggccgatgcatccgccaaagcagactgggtgatggtgctgctgcccgacgagttccagaaggacgtttacgagaaggagatcgctcctcacctcacgtctggcaaggtgctgagcttcgcccatggtttcaacatccgtttcgagctgatcaagccccccgccgatgtggatgtggtgatgatcgcccccaagggtcctggccacaccgtgcgctgggagtaccagaacggccagggtgttcctgcgctgttcgcaatcgagcaggacgcttccggtcaggcccgtggcctggccatggcctacgccaagggaattggcggcacccgtgccggcattctcgaaaccaacttcaaggaagaaaccgaaaccgatctgttcggtgaacaggcggtgctctgcggcggtctgtccgagctggtgaaggctggtttcgagaccctggtggaggcgggttaccagcctgaactggcttacttcgagtgcctccacgaggtgaagctgattgtggatctgatggtgaaaggtggtcttacctcgatgcgtgactccatctccaacactgcggaatacggcgattacgtcagcgggcctcggctgatcactgccgacaccaaggccgagatgaagcgggttctggctgacatccaggacggcacctttgccaagaacttcgtggccgaatgtgaggccggcaagccggagatgaagaaggtgcgcgaccgcgactcccaacacccgatcgaaaaggtgggcaagggcctacgttcgatgttcagctggctgaaggacgcctga

SEQ ID NO: 209494 - DNA, 856 bp, Unknown
  Bacterial polypeptide expressing nucleotide sequence isolated from the Sargasso Sea
atgttttatgaaaaagatactaatgtagatttaataaaagataagaaagtagcaatttttggctacggaagccaaggacatgcgcatgcacttaatctaagagatagcggtgttaaagaagttgttgtagctttaagagagggctcatcaagtattgaaaaagctgagtctaaaggtttaaaagtaatgaatttatctgatgctgcagaatgggcagatgtagttatgattctaactccagacgaattacaagcatcaatatataaaaaccatatagagcaacgtgtaaaagagggaacatcaatcgcgttcgctcatggtttaaacgttcactatgatcttataaaagctagaaaagatttagatgtatttatggttgcaccaaagggacctgggcatttagtaagaagtgaatatgaaaaaggtggtggagttccttgtctatttgcagttcaccaagatggttctggtaaagcaagagatttggcaatgtcatatgcatcagctgttggtggtggtagatctggaataattgaaactacatttaaagatgaggtagaaacggatctatttggagagcaaacagtattatgtggtggacttgttgagctgattaaaaatggatatgaaactttagttgaagctggatatgaaccagaaatggcgtattttgaaactgttcacgaagtcaaactgattgtagatttaatatatgaaggtggcattgctaatatgaattattcaatttcaaataccgcagagtatggtgagtatcagtcaggtccaagaataattaaaaaagatgaaaccaagcgaagaatgaaagaagttttagcagaaattcatctggtaaatt

SEQ ID NO: 209495 - DNA, 1111 bp, Unknown
  Bacterial polypeptide expressing nucleotide sequence isolated from the Sargasso Sea
atgacaaattattttaacaagttatcaccagaagaaaagaaaattcagttaggaaaatgtaggttcatggattcctcagaattcagtgatggagtctcttttttaaaagaaaaaaaaatagtcattgttggttgtggtgctcaaggacttcatcaagggctaaatatgcgagattcaggattagatatctcttatgcgttaagacaatcatcaattgactccaaaagacaatcctttcttaatgcgactcaaaataattttaatgttggaaattttgatgatatgattcctattgctgacctagtaataaacttaacgccagataaaaatcacactcctgttgtgaataaattgatgcctttaatgaaaaaagactctatactttcttattcccatggatttaatatagttgaagaagggatggaagttagagatgatataactgtaataatggttgcacctaaatcacctggttcagaggttagagaagaatatatgagaggatttggagtacctactttgattgcagtgcatcctgataatgactacaaaaatattggcttatctgcatccaaagcttatgcagtatcattaggatcccacaaggcaggagttcttgaatcttcatttgtagcagaagtaaaatctgacctaatgggtgagcagactattttatgtggaatgcttcaaaccggttcaatactatcgtttaacagaatgttagaattaggaattgaaccaaaatatgcttcaaaactagtccagaacggatgggaaactattactgaagcattaaaacatggtggtatcacaaaaatgatggatagactaaacaatattgctaaaattaaagcgtataatttatctgaggaactaaaagagatattaacaccactctttaagaagcatatggaaaatattctttcaggaagtttctctactactatgatgagagattgggagaatgatgataatgaattattaaattggagagaagaaacgagtcaaacagtatttgaaaaaacatcttcaactgatcaaaacattgaagaacaagaatactttgataatggtattttaatgattgcttttattaaagccaggtgttgaa

SEQ ID NO: 209496 - DNA, 739 bp, Unknown
  Bacterial polypeptide expressing nucleotide sequence isolated from the Sargasso Sea
gctgaaaatattaaagaagggtacaacaatcgcatttgctcacggattaaatattcactttgatttaatcaaacctaaagaaggtatagatgtaataatggttgcacctaaagggcctggtcatacagtaagagcagaatatgtaagaggtgctggagtgccttgtttagttgctgtagataaaaatccatcaggtaatgctcttgaaataggtattgcgtatgcatcagcaataggtggaggacgtgctggaataattgaaacaacttttaaagaagaatgtgaaacggatctttttggagagcaatctgttttatgtggaggtttaacacatttaattttagcaggttatgaaactctagttgatgcaggatatgcacctgaaatggcatattttgaatgtcttcatgaagtcaaacttattgttgatcttttatatgaaggcggaatggcaaatatgagatattcaatctcaaacacagctgaatatggagattattcaagaggtccaagacttattacagatgaaacaaaaaaagaaatgaaaaaaattctttcggaaattcaatctggtcaatttgctaaagaatggatgcaagagcatcagagtggtcaaactaaatttaaagtaatgagaaaagaacaagctgaacatccgattgaggcagttggagaaaagttgcgaactttgatgccatggattgctgaaggaaaaatggttgataaatcaaaaaactaa

SEQ ID NO: 209497 - DNA, 1018 bp, Unknown
  Bacterial polypeptide expressing nucleotide sequence isolated from the Sargasso Sea
gatgttttatgaaaaagacacagatgtaaatttaataaaaagtaaaaaagttgctatatttggatatggtagtcaaggacatgcgcatgctttaaatttaaaagacagtggagttaaagaagtagtagttgctttaagagatggatcatccagcaaagagaaagcagagtcaaaaggtttaaaagtaatgaatttatcagatgccgcagagtgggctgatattgtaatgatattaactccagatgaattacaagcatctatttacaaaaatcatatagaacaaagagtaaaagaaggaacttcggtagcttttgcccatggcttaaatattcactacgatttaattaaagctagaaaagatttagatatttttatggttgcgccaaaaggacctggtcatttagttagaagtgaatttgaaaaaggtggaggtgttccatgtttatttgcagttcatcaaaatggttcaggcaaagcaagagatttagcaatgtcttatgcatcagctgttggaggtggtagatctggtattatagaaacaacatttaaagatgaagtagaaacagatctttttggtgaacaaacagtgttatgtggtggccttgtagaattaataaaaaatggctatgaaactttagttgaagctggatatgaaccagaaatggcatattttgaaactgttcacgaagttaaattaattgtagatttaatttatgaaggtggaattgccaatatgaattattcaatttcaaatacagctgagtatggagagtatgtttctggtccaagaataatcaataaagctgaaacaaaaaaaagaatgaaagaagttttggatgatatccagtctggcaaatttacaaaagaatggatggatgaatgtaaaaatggtcaaaaaaactttcttaaaacaagggaaaaattagctgagcatcctgttgaaaaggttggagcaggattaagagcaatgatgccttggatctcaaagaaaaaattagtagacagcgataagaaatag

SEQ ID NO: 209498 - DNA, 939 bp, Unknown
  Bacterial polypeptide expressing nucleotide sequence isolated from the Sargasso Sea
atagtggtgttaaaaatgtttgtattgctctacgtgaagactctaattcagtgcctaaagcgaaaaatgctggtttcgaagtaaaaactgtttcagagggttcaaaatgggctgacgtagtgatgatattaactccagatgaattgcaaggtgaaatttataccaatgaaattaaaaataatataagatctggatcagcaattgcctttgctcacggcttaaatattcactttaacttaattgagccaagaaatgatattgatgtttttatggtagccccaaaaggtcctggacatactgtaagggctgaatatcaaaagggtggtggagttccatgtttattagcagttcatttggatagttcaggaaatacacatgaaataggcctttcatatgcttgtgcagtaggtggaggtagatctggaataattcaaactacatttaaagaggaatgtgaaactgatctgtttggtgaacaggtcgtattatgtggaggattagttgagttaattaaggctggatatgagactttagttgaagcaggttatgctccagaaatggcatattttgagtgcttgcatgaggtaaagttaattgttgaccttatttacgagggtggaatatcaaatatgaattattctatttccaatactgctgagtatggagaatatgtttcaggaccaagattaattacaaatgaaactaaagaaacaatgaaaggaattctcaatgatattcaaactggtaaatttacaagagaatggatgttagaaaataaggtcaatcaaactagtttcaaagcaataagaaataaaaatgcaaatcatccaatagaggaagttggtgaaaagctaagatctatgatgccatggattggatcaaataaattagttgataagggaaaaaaattaaaatttaaaaacataaaaatttattaat

SEQ ID NO: 209499 - DNA, 509 bp, Unknown
  Bacterial polypeptide expressing nucleotide sequence isolated from the Sargasso Sea
tgttggcggaggcaaagcaggtataattgaaacaacttttaaagatgagtgcgaaactgatttatttggtgaacaaacagttctttgtggaggtttagtagaattgattaaaaatggttttgaaactctgactgaagctggttatccacctcagatggcttattttgaaactttgcatgaagtaaagttaatagtggatttaatttatgagggaggcatagcaaacatgaattattctatttctaatactgcagagtatggcgaatatgtttctggaaaaagagttgttgatggaaagactaaggaaaaaatgaaggaagttttaaaagatatacaatctggtaaatttactaaacagtggatggatgaacataaatcaggtcaaaaaaatttccttaaaatgaggcaagatctagctaaacaccccatcgaaaaggtaggtaaagaacttcgagctatgatgccatggattggtaaaaataaactagtcgataaagataaaaattaag

SEQ ID NO: 209500 - DNA, 922 bp, Unknown
  Bacterial polypeptide expressing nucleotide sequence isolated from the Sargasso Sea
atgacacaactcttttatgacacagatgctgacctaagtctattaaaaaataaaactatcgcaataataggctacggttcacaaggccatgcacatgctttaaatcttaaagacagtggaatggatgtaatagtagggttatacaaaggtagtaattctgaaagcaaagctattaatgatggattaaaagtatttacagtttctgaggcttgtgaaaaagcagattggattatgattctgcttccagatgagttccaaaaagatgtttatatcaaagagatagaaccaaatttaaaagaaggtaagatattaagttttgcacatggattcaatataagattcgaactcattaagccacctaattttgtcgacgttgtaatggttgcaccaaaagggcctggacatactgttcgttgggaatatcagaatggccaaggagttcctgctctattcgcagttgagcaggactattcaggcaatgcgagatcattagctatgtcttatgccaagggtattggaggtacaagagctgggattcttgaaacaaatttcaaagaagaaaccgaaacagatctttttggagaacaggcagttttatgtggtggtttatcagagctggttaaatcaggatttgaaactctcgttgaggcaggatatcaaccagaattagcatattttgagtgtttacacgaagtaaagttaattgtcgatcttatggtcaagggaggattatctcaaatgagagattcaatttcaaatactgcagaatatggtgattatgtaagtgggaaaagacttataaataataatacaaagaaagaaatgcagaaaattttaaaagatattcaagatggtactttcgctaagaattttgtagatgaatgtgataacaacaaacccttaatgacaaaattgagagaag

SEQ ID NO: 209501 - DNA, 343 bp, Unknown
  Bacterial polypeptide expressing nucleotide sequence isolated from the Sargasso Sea
ccaaatctggcttatttcgaatgtctacatgaactcaaattgattgttgatttaatttatgaagggggaattggtaatatgcgttactccatcagcaccactgccgcttatggcgatgtcacacggggaccgcgcatcatcaccgatgaaacccgcgcagagatgaaaaaaattctcagcgaaattcaaagtggaagttttgccaaagagttcatcctggagaataaggccaatcgacctatgtttaacgcattactgagaaaaggaaaagaacatcgggtcgaacaggttggggaaaaactacgcaagatgatgcctttcgtcggtaaaaaattgcagtaag

SEQ ID NO: 209502 - DNA, 778 bp, Unknown
  Bacterial polypeptide expressing nucleotide sequence isolated from the Sargasso Sea
tatggcaaagacatggaaagacgcagacatcagtcttgaccctatcaaagaccaaacagttgcagtaattggatatggtatccaaggtgatgcacaggcaaataacatgaaagattcaggtctcaaagttattgttggtctaagagaaggcagtccaacatggaacaaagcaaaagaagacggtcatgaggtcatgtcagttgccgatgccacaaaacaggcagacattgttcacattttacttcctgatatggttcaagccaaagtgtacaaagaagaaattggtccaaacctctcagaaggaaacgcattatcattttcgcacgcagcagcaatttactggaaatggattgacgcaccagaaaacgttgatctaattatggtcgcaccaaaaggtcctggctctaaagttagagaaacataccagcaaaactttggaactccctcaattgttgcagtagaacaagacaaaacaggaaaagcatgggatagaacactaggaattgcaaaagcaattggcagtgcacgtgcaggattaatccaaacaacattcaaagaagaagttgaaactgactggtttggagaacaagcagatttgtgtggaggttcagcatctatggtagtcaatgcatttgaaacattagttgaagcaggatatcaacctgaaatcgcatactttgaggtattacacgaactaaaattaatcgtagatatgattcaaagatatggaattaatggaatgtggagacgtgtttcagaaactgcaagatacggcgga

SEQ ID NO: 209503 - DNA, 535 bp, Unknown
  Bacterial polypeptide expressing nucleotide sequence isolated from the Sargasso Sea
gatgaaagtctattacgatgacgatgccgatctcggtatcatttccgcaaagaccgtagccgtgatcgggtacggttcccaaggacacgcccacgcgaacaatttacgtgacagcggcgtcgatgtggtggtcgggctgcgcgaggattcttcctctcgcgacaaagcagtgacctcgggacttcgggtggatacggtcgcgaatgcggtgggcgcagcggatgttgtgatgatgctggtaccggatgaacttgcggcagagctttatgagagtgatgtggcggccaatctgaagcctggcgcagctctggcattcgcccatgggttcaacgtgcactttggcttcatcgagcccgatagttcggtcgatgtaatcatgattgcgcccaagggacctggacatctggtgcgttccacctacaccgaaggcgggggtgtgccctgccttattgcgattcagcaggacgcgagcggatccgcccgagcgaccgcgctttcctatgcaagttgccataggcggaggcagggccggcgt

SEQ ID NO: 209504 - DNA, 1021 bp, Unknown
  Bacterial polypeptide expressing nucleotide sequence isolated from the Sargasso Sea
tatgaaagtttattatgaccaagatgctgatttaaatttaataaaaagtaaaaatgttttgattgttggttatggtagtcaaggtcatgctcatgctgcaaatttaagagatagtggtgttaaaaatgtttgtattgctcttcgtgaagactccaattcagtgcctaaagcaaaaaatgccggtttcgaagtaaaaactgtttcagagggttcaaaatgggctgacgtagtgatgatattaacgcctgatgaattgcaaggtgaaatttataccaatgaaattaaaaattatataaaatctggttcagcaattgcctttgctcacggcttaaatattcactttaacttaattgagccaagaaatgatattgatgtttttatggtagccccaaaaggccctggacatactgtaagggctgaatatcaaaagggtggcggagttccatgtttgttagcagttcatttggatagttcaggaaacacacatgaaataggcctttcatatgcttgtgcagtaggtggaggtagatctgggataaatacaactacatttaaagaggaatgtgaaacagatttgtttggtgaacaggtcgtattatgtggaggattagttgagttaattaaggctggatatgagactttagtagaagctggctatgcaccagaaatggcatattttgagtgcttgcatgaggtgaagttaattgttgaccttatttacgagggtggaatatcaaatatgaattattctatttccaatactgctgagtatggagaatatgtttcaggaccaagattaattacaaatgaaactaaagaaacaatgaaaaaaattctcaatgatattcaatctggtaaatttactagagaatggatgttggaaaacaaggttaaccaaactagtttcaaagcaataagaaataaaaactcaaatcatccaatagaggaagttggtgaaaaactaagatctatgatgccatggattgggtcaaataaattagttgataagggaaaaaattaa

SEQ ID NO: 209505 - DNA, 1021 bp, Unknown
  Bacterial polypeptide expressing nucleotide sequence isolated from the Sargasso Sea
atgaaagtatattacgaaaaagatgctgacctggatttaataaaaaccaaaaaaattgctgtatatggttatggtagtcagggtcatgctcatgcattaaatttaaaagactcaggtgccagcgatgttgtagtagctttgagagagggttcttcgagtgcaaaaaaagcagaagctgaaggtttgagagtaatgtctatgtctgatgcagctgaatgggcggatataatgatgatgttaatacctgatgaacttcaggcagatgtttggaaaaaccatattgaacaaagagctaaagaaggttcagcacttgcgtttgcacatggattaaatgttcactttgaccttattaacgcaagaccagatatggatgtattcatggttgcaccaaaaggacctggtcatactgttaggtcagaatttaaaaaaggaggcggtgtaccttgtctagtcgcagtagatagcgataaaacgggaaaggcacttgatattgcattgtcatatgcatcagctattggcggaggtaaagctggaattattgaaacaacatttaaagacgaatgtgaaacagatttgtttggtgaacaaactgttttatgtggtggtgtcgttgaattgattagaaatggatttgaaactttagttgaggcaggttacccacctgaaatggcatactttgaatgtttacacgaagtaaagcttatcgttgatctaatttatgagggtggaattgcaaatatgaactactcaatatctaataccgctgaatatggtgagtatgtatctggtccaaagatagttgatggagaaacaaaatcaaaaatgaaaaaggttttagaaaaaatccagtctggagaatttacaagagagtggattgaagaatataagagtggtgcaaaaaattttgaagcaatgagaagtaaaattgataatcaccaaattgaaaaggtcggcaaagatttaagagctatgatgccctggatttcaaaaaataaattggttgataaagaaaaaaactagt

SEQ ID NO: 209506 - DNA, 1027 bp, Unknown
  Bacterial polypeptide expressing nucleotide sequence isolated from the Sargasso Sea
tttggttcaaaaggagccccccgtgccagctacaatttactacgattctgacgctgatttggccgttctctcaggcaaaacaatagcggttattggttatggaagtcagggtcatgctcaggcacagaatctacgtgacagtggtctgaatgtcgtcgttgcacaacggcccggtggaccaaattttgatctagcgaaaagtcacggctttgaaccactctctgtggaagaggcagtgaagcaggcagatgttgtgaatattcttttgccggatgagctacagggcgatgtctacaagacgtcaatcaagccaaatcttaaggctggtgcggttcttatggcgagtcacggattcaattttcacttcaatcaggtcgagcctcccccgggccatgacattcttcttgtagcaccaaaaggtcctggtcatctcgttcgaagtgagtacgaaaaagggggcggtgttccctgtctcattgcacttggtgaaggggcctcggaggagacaaaaaagatcgggttggcttacgcgaaaggtgttggtggcactcgtggtggtgttatcgagacgacaatcgcggaagaaaccgaaaccgatctgtttggtgaacaggcggtcctctgtggcggtgtatcagaactgatcaaggctggctttgacaccttggttgaagcgggctatcagcccgagatggcgtatttcgagtgtcttcatgagatgaaattaatcgtcgatcttctttatcagggtggtttggaatacatgagatatagtgtttccaatacagctgaatacggcgactacactcgaggaaatcgtgtaattactgatgaaacccgagctgaaatgaagaagattcttgaagagattcaaaccggtgaatttgcgagagactggattcttgaaaatcgagccggagccgccatgttcaaggctacgcgtcgtcgtgaacgggagcataagttgaccgaaacgggtcgccacttgaggaagatgatgaaatggatcgattcaaaagaagtttga

SEQ ID NO: 209507 - DNA, 1018 bp, Unknown
  Bacterial polypeptide expressing nucleotide sequence isolated from the Sargasso Sea
atgcaaatattttatgacagtgatgctgatcagaatattgttaaagggatggacgtagtaattgttgggtatggatcgcaaggacatgctcacgcaaacaatctaaaagattcaggcgctaatgtgactgttgcccttcgaaaggagtccgagtcttgggcaaaagccgagtctgctggatttaacgttaaagaagttgatgatgcagtgcctgaagcagatcttgtgatgatgctaattcctgatgagaagcaggctgtaatgtatgaaaatcatcttaaaggtaatatcaaagatggagctgtattggcctttgcccacgggtttaatattcattttgaaatgattgttccaagagaagatcttgatgtaataatgattgctccaaagggaccaggacatactgtccgttctcaatttgaatcaggcgcaggagtgccttgcttactcgctgttcataaagatgtttccggtaaagcaaaagacattggtctttcgtatgcatctctaataggttcaggtcgagctgggattatagagacaaactttaaagacgagaccgaaacagatctctttggagaacaagcagtcctttgtggcggactgacctctctaattcaaacgggctacgaggtcttggtagaaaatggctatcctcctgaaatggcttattttgaatgcctacacgaggtaaaactcatcgttgacctcatttatgaaggaggtcttcaaaatatgaggtacagcatttccaatactgcagagtatggggattatgtaacaggcccaaaaattgtgaatcagagcacaaaagaaaccatgcagaaaattctaagtgagattcagtctggagactttgccaaagacttcatggatgattgtaactctggtggtgacaagatgaatgaatacagaagaaattcatctgaacactctatagaggcagtgggagaaaaccttcgttcaatgatgccttggatttctgctaataaaattgtcgacaaagctaaaaattaat

SEQ ID NO: 209508 - DNA, 1018 bp, Unknown
  Bacterial polypeptide expressing nucleotide sequence isolated from the Sargasso Sea
atgttttatgaaaaggatactgatacaaatttaataaaagataaaaaaattgccatctttggatatggaagccagggccatgctcatgctttaaatttaaaagatagcggtgtaaaagaagtagttgttgctttgagggaaggttcatctagcaaagctaaagctgagtcaaaaggattaacagtaatgaatttgtctgatgccgctgaatgggctgatgtagtaatgattttaacgccagatgaattacaggcttcaatatataaaaatcatattgaacaaagagttagagagggaacctcaattgcttttgcgcatggattaaacattcattatgatctaatcaaagcaagaaaagatctagatgtatttatggttgcgccaaaaggaccaggtcatttagttagaagtgaatttgaaaaaggtggaggagttccctgcttatttgcagttcatcaaaatggatctggaaaagcaagagatttagcaatgtcttatgcttctgctgttggcggaggtagatctggaataattgaaacaacttttaaagatgaggttgaaactgatttatttggtgaacaaacagttttgtgtggaggtttagttgaattaataaaaaatggttacgaaacattagttgaagctggatatgaaccagaaatggcttattttgaaactgttcatgaagttaaattgattgtagatttaatttatgaaggtggaattgcaaatatgaattactctatttctaatactgcagaatatggagaatatgtttctggacctagaattataaataaagaggaaacaaaaaaaagaatgaaagaagtcttggcagatatacaatcaggtaaatttactaaagaatggatgaaagagcacgaaactggacaaaagaattttttacaaactcgagcaaaacttgcagagcacccagtagaaaaagttggagcaggattaagagctttaatgccatggattgctaagaagaagcttattgatagcgataaaaattaaa

SEQ ID NO: 209509 - DNA, 1018 bp, Unknown
  Bacterial polypeptide expressing nucleotide sequence isolated from the Sargasso Sea
aatgttctatgaaaaagatgctgacgtaaacttaattaaagataaaaaagttgctatttttggttatggtagtcaagggcacgcacatgctcttaatttaaaagatagcggggtaaaagaagtagtcgttgctttaagagatggttcagcaagtaaagctaaagctgagtcaaaaggattgaaggtaatgagtttgtccgatgcagcagaatgggctgacgtttgtatgatcttaactcctgatgaacttcaagcaaccatatataaaaatcatatcgaacaaagaataaaagagggtacaagtttagcttttgctcacggtttaaatattcattatgatttaatcaaagcaagaaaagatttagatgtatttatggttgctcctaaagggcctggacatcttgtaagaagtgaatttgaaaaagggggtggagttccttgtttgatggcggtccatcaagatggcacaggtaaagcaagagatttagctctatcttatgcatcagcgattggaggtggaagatctggaattattgaaactactttcaaggatgaatgtgaaacagatttatttggtgaacaaacagtcctttgcggaggtcttgtagaactaattaaaaatggttatgaaacattagttgaggctggatatgaaccagagatggcatatttcgagtgcttacatgaggtaaaattaattgttgatttgatttatgaaggtgggattgcaaatatgaattactcaatttcaaatacagcggagtatggtgagtacgtttcaggacctagaattattaataaagaggaaactaagaaaagaatgaaagaagtgcttgcagacattcaatctggaaagtttactaagcaatggatggatgagtgtaaaaatggtcaaaagaactttctaaagaccagagaagaattagcaaaacattctatagaaacagttggtacgaaactaagagctatgatgccttggattggtaagaagaaattagtggatagcgataagaagtaa

SEQ ID NO: 209510 - DNA, 423 bp, Unknown
  Bacterial polypeptide expressing nucleotide sequence isolated from the Sargasso Sea
aatgttttatgaaaaagatgcagatgttaatctaattaaaagcaaaaaagttgctatcttcggttatggaagccaagggcacgctcacgcattaaatttaaaagatagtggagtaaaagatattgttgtagcattaagagaaggttcatcgagtgcagctaaagcagaatcaaaaggattaaaggtaatgaatttatctgatgctgcagagtgggcggatgtagtaatgattcttacaccagatgagctacaagcggaaatttataaaaatcatattgaacaacgagtaagagaggggacaagcatcgcttttgctcatggtttaaatgttcattacgatttaattaaagctagaaaagatctagatgtttttatggttgctcccaaaggacctggtcacttagttagaagtgaatatgaaaa

SEQ ID NO: 209511 - DNA, 991 bp, Unknown
  Bacterial polypeptide expressing nucleotide sequence isolated from the Sargasso Sea
atgacccaactcttttacgacaccgatgcagatctaagtcttttaaataataaaacaattgcgataattggatatggatcacaaggtcatgcacatgccctaaatcttaaagatagcggtatggatgtaattgttggattatatagaggaagtaagtctgaaagcaaagctattagtgatggtctacaagtctttagcgtttctgaagcttgcgaaaaagcagactggattatgattctcctccccgatgagtttcagaaagatgtttaccttaaagaaatagaaccaaacttaaaagaaggcaagatactaagttttgctcatggcttcaatataagatttggacttatcaagcctcctagttttgtggatgttgtaatgattgccccaaaaggacctggacacactgttcgttgggaatatcagaatggtcaaggagttccagcactgttcgcagttgagcaggattcttcaggaagtgcaagatcattggcaatggcttacgctaaagggattggcggaacgagagctgggattcttgaaacaaactttaaagaagaaacagaaactgatttatttggcgaacaagcggttttgtgcggaggattatcagaactggttaaatcaggattcgaaactcttgttgaggcaggttatcaacccgaacttgcttacttcgaatgcttacatgaagttaaacttattgttgatttaatggtgaagggaggcttatctcaaatgagagattccatttcaaatactgcagaatatggagattatgtaagtggtaaaagacttatcaatagtgatacaaagaaagaaatgcagaaaattctaaaagatattcaagatggaactttcgctaagaactttgtggaagaatgcgataaaaacaaacccttaatgacaaaattaagagaagagaactcaaaacatgaaattgagaaagtgggtaaaggtctgcgctcgatgttcagttggctgaaataaa

SEQ ID NO: 209512 - DNA, 1480 bp, Unknown
  Bacterial polypeptide expressing nucleotide sequence isolated from the Sargasso Sea
gatggctaactattttaactctctgaatttgcgtcaacaattagcacaacttggccagtgccgttttatggaccgctccgagtttagtgatggctgcaattacatcaaagattggaatattgtaattttaggctgtggtgctcagggccttaaccaaggtctgaatatgcgtgactctgggctgaatatcgcttacgccctgcgccctgaagctattgcccaaaaacgtgcctcatggcaaaaagctacagacaacggctttaaagtcggcacctttgaagagctaatcccgaccgccgatttagtgctgaacctaacacccgataagcagcattccaatgtagtgagcgcagtgatgccgctgatgaagcaaggcgcaactctgtcttattcccacggttttaatatcgttgaagaaggcatgcaaattcgtcctgatatcactgtcatcatggttgcgcctaagtgcccaggcaccgaagtgcgtgaagaatacaaacgcggttttggtgtgccgaccttgattgcagtgcaccccgaaaacgacccgaatggcgatggtttagacatcgcgaaagcctatgcgagcgccacaggcggcgaccgtgctggcgtgttgcaatcctcttttatcgctgaagtaaaatcggatctgatgggtgagcaaacgatcctctgcggtatgttgcagacgggtgccatcctaggttatgaaaaaatggtggccgatggtgttgagcctggctatgccgctaagttaatccaacaaggttgggaaaccgtgaccgaggcgcttaagcacggcggtatcaccaacatgatggacagactgtctaaccctgccaagattaaagcgtttgaaattgcagaagatttaaaagaaatcctgcaaccattatttgaaaagcacatggatgacatcatcagcggtgagttctctcgcactatgatgcaagactgggctaacgatgatgcgaacctactgcgttggcgcgccgaaaccgccgaaacgggcttcgaaaatgcgcctgtttcgagcgaacatatcgacgaacaaacttatttcgataagggtattttcttggttgcgatgatcaaagcgggtgtggaactggcgttcgacactatggtgtctgcggggattgttgaagagtcggcttactatgagtcactgcatgaaacaccgctgatcgctaacaccattgcccgcaaacgtctgtacgagatgaacgtggtgatctcggataccgcagaatacggttgttatctgttcaaccatgccgccgtgccactgctgcgtgactatgtgaatgccatgtcgccagagtatttaggtgcgggtctgaaggacagttctaatagtgttgataatctgcaattaatcgcgattaacgatgcgattcgccacacagctgtggaatatattggtgccgaacttcgtggctatatgactgatatgaaaagtattgttggagcttaa

SEQ ID NO: 209513 - DNA, 676 bp, Unknown
  Bacterial polypeptide expressing nucleotide sequence isolated from the Sargasso Sea
gatgttttatgaaaaagatactgatgcaaatttaataaaagataaaaagattgcaatttttggttatggtagtcagggccatgcccatgctcttaatttaaaagatagcggagtaaaagaagtggtagttgcattaagagaaggatcttcaagcaaagctaaagcagaatctaaaggactaaaagttatgaatctttctgatgcagcagagtgggctgatgtagtaatgattttaacgcctgatgaattacaagcaactatttataaaaatcatatagatcagagaattagaccaggaacttcaatagcttttgctcatggattgaatattcattatgatttaattaatgcaagaaaagatttagatgtttttatggtagcacctaaaggaccaggacatttagttagaagtgagtttcaaaaaggcggaggtgtgccatgtttatttgctgttcatcaaaatggatcgggcaaagcaagagacctagccatgtcatatgcatctgctattggcggaggaagatcgggaattattgaaacaacttttaaagatgaggtagaaactgatttatttggcgaacaaactgttctttgtggtggtttagtagagttaataaaaaatggatatgaaactttagtcgaagcaggttatgaaccagagatggcatattttgaa

SEQ ID NO: 209514 - DNA, 1045 bp, Unknown
  Bacterial polypeptide expressing nucleotide sequence isolated from the Sargasso Sea
atgaaaatttattatgatgatgacgctgatatagaaatcattaaaaagcttaatataactattgtgggttatggttcccaaggacatgcccatgcaaataatttaaaagattcaggcgttaacgtaacagttgctttaagagagggttcatcttcatggaacaaagcagctgaagctggattaactgttatgccagttgctgagtccatacaagatgcagatctagttatgatgttggctccagatgagtttcaaaagggcatttatgataaaagtatccaaccaaatttaaaaagtgatgcaattttagcttttgcccatgggttcaatattcactttgagaaaattgttccagaaaaaggaaatagtgtaattatgattgctccaaaaggaccaggacatactgtcagaagtacttatttaaaaggtggcggagtaccttctttagtggcaatttatcaagatgctatttctaataactcattttctgcaaaagatgtagctttatcatatgcaaaggctaatggcgggactagggctggagttctagaaacaagctttaaagaagaaactgaaacagatttatttggcgagcaagcagttttgtgtggcggcatgacagctttaataaaagctggttatgaaactttagtagaagcaggatatagtccggaaatggcatatttcgaatgtcttcatgaaactaaattaataacagatttaatccaagagggcggaatagctaatatgcactattcgatatctaatactgctgaatatggagattatctaagtggcccaaagattattacagatcaaacaaaaaaggctatgaaagagattttagataacattcaatcaggcaattttgctaatgaatttttagatgattgtaggcaaagcaatgatggatcaggcggaccttttatgaaatctaatagaaaatctacagaagatcatccaatagagaaagttggcaaagagctaaggtcaaagatgaaatttctaaattctgaaaagcttgtcgataaagagaaaaattagt

SEQ ID NO: 209515 - DNA, 1516 bp, Unknown
  Bacterial polypeptide expressing nucleotide sequence isolated from the Sargasso Sea
tatgagtaactacttcaatacattgaatttgcgtcagcagttaaaacagttaggtaaatgccgttttatggccaaagaagagttcgctaaaggctctgacttattgaaaggctggaaagtggtgattgtaggttgtggtgctcagggcttaaaccaaggcctgaatatgcgcgactcaggtctggatatttcttatgccttgcgtgctgaagctatcgccgctaaacgtaagtcgttccagaacgcttctgacaatggatttaaagtaggcacgtacgaagagttaattccaactgcagatttagtattaaacctgacgccggataagcagcataccagtgttgttaaagccgtgatgccattgatgaaacaaggtgccactttggcgtattcgcacggtttcaatattgtggaagaaggcacacaaattcgtaaagacatcacagtagtgatggtggcgcctaagtgcccaggtactgaagtacgtgaagaatacaaacgtggttttggtgtgccaacgctgattgcagtgcatcctgaaaacgaccctaaaggtctaggtttggagattgctaaggcttacgcttctgcaacaggtggtgatcgtgccggggtactggagtcgtcttttgtcgccgaagtgaaatccgatttgatgggcgaacagactattttatgtggcatgttacaaaccggctctattctggcgtacgacaagttagtggctgaaggtgtggagccaggttatgccgccaagttaatccagtttggctgggaaactgtgactgaagccttaaaacacggcggcatcactcatatgatggaccgtttgtcgaacccggcgaaaatcaaagcttatgatttagctgaagaattaaaagtaaccttacgtccgctgtttgaaaaacatatggacgatatcatcagcggtgaattctcccgcactatgatggccgattgggccaatgatgataagcagctgtttggctggcgcgaagaaacccgtcaatccggttttgagaatgcgccggtatccagcgaacaaatcccagagcaggattacttcgaccgcggcattttgtttgtcgctatggtgaaagccggtgttgagctggcattcgaaactatggttgctgcaggtatcgttgaagaatcggcttattacgagtcattgcatgaaacgccgttgatcgccaataccatagcgcgcaaacgtctgtatgagatgaatgtggtgatttcagacactgctgaatacggtaactacctgttcagtaacgcagctgtgccgctgttacgtgatttcgtgaacaagctgagcacagagtatgtaggcaagggtttaagctctgcagctaatggtgtcgacaatatccgcctgattgctgtcaacgaagcaatccgccagcatcctgttgagctggttggcaaaaagttaaggggctatatgaccgcgatgaaaaaatcgtcggttaatagcagagactttccagtctcaccccaagtaccgagtttt

SEQ ID NO: 209516 - DNA, 1135 bp, Unknown
  Bacterial polypeptide expressing nucleotide sequence isolated from the Sargasso Sea
gttaataaattgatgcctttaatgaaaaaagattctatactttcttattcccatggatttaatatagtggaagaagggatggaagttagagatgatataactgtaataatggttgcacctaaatcacctggttcagaggttagagaagaatatttgagaggatttggtgtgcctactttgattgcagtgcatcctgataatgactataaaaatattggtttatctgcatccaaagcttatgcagtatcattaggatctcataaagcaggagttcttgaatcttcatttgtagcagaagtaaaatctgatctaatgggtgagcagactattctatgtggaatgcttcaaaccggttcaattctatcgttcaacagaatgttagaattaggaattgaaccaaagtatgcttcaaaactagtccagaacggatgggaaactattaccgaagcattaaaacatggtggtatcacaaaaatgatggatagattaaccaatattgctaaaattagagcatatgatttatctgaagaactaaaagagatattaacaccactatttaataagcatatggaaaacattctctcaggaagtttctcgactactatgatgagagattgggagaatgatgataatgaattattaaattggagagaagaaacgagtcaaacagtatttgaaaaaacatcttcaactgaccaaaacattgaagaacaagaatactttgataatggtattttaatgattgcttttattaaagcaggtgttgaattagcctatgaaattatggtcaataatggaattaaagaggagtctgcttattatgagtcactacatgagctccctctaatcgcaaatctagtagcaagaaaaaaactatatgaaatgaataacataatatctgatactgcagaatatggttgttatttatttaataatgatgcaatcccactattaaaagacttttttagtaatgttgattctgatataattggaacagatgctttaagcaagagtaatagtgcagttgatgatgaaatattaaaagtcataagtgataatataagagagcattcaattgaaaaaattggttcagaacttagacagcatatgactactatgaaaaatatttattaaa

SEQ ID NO: 209517 - DNA, 1018 bp, Unknown
  Bacterial polypeptide expressing nucleotide sequence isolated from the Sargasso Sea
aatgttttatgaaaaagatactaatgtagatttaataaaagataagaaagtagcaatttttggctatggaagccaaggacatgcgcatgcacttaatctaagagatagcggtgttaaagaagttgtggtagctttaagagaaggttcatcaagtattgaaaaagctgagtctaaaggtttaaaggttatgaatttatctgatgctgcagaatgggcagatgttgttatgattttaactccagacgaattacaagcatcaatatataaaaaccatatagagcaacgtgtaaaagaaggaacatcaattgctttcgctcatggtttaaatgttcactatgatcttataaaagctagaaaagatttggatgtatttatggttgcaccaaagggacctgggcatttagtaagaagtgaatatgaaaaaggtggtggagttccttgtttatttgctgttcaccaagatggttctggtaaagcaagagatttagcaatgtcatatgcgtcagctgttggtggaggtagatctggaataattgaaactacatttaaagatgaagtagaaactgatctatttggagaacaaactgtattatgtggtgggcttgttgaattaattaaaaatggatacgaaactttagttgaagctggatatgaaccagaaatggcttattttgaaactgttcacgaagtgaaactgattgtggatttaatatatgaaggtggaattgctaatatgaattattcaatttcaaatacagcagagtatggcgagtatcagtcaggtccaagaataattaaaaaagatgagactaaacaaagaatgaaagaagttttagcagaaattcaatctggtaaatttacaaaagaatggatggaagaatgcaaaaatggtcaaaaaaactttcttgcaactagagctaaattagcagaacactctgttgaaaaagtaggcgctgaacttcgggctatgatgccttggatttcaaaaaagaaacttgttgatagtgataagaagtag

SEQ ID NO: 209518 - DNA, 1045 bp, Unknown
  Bacterial polypeptide expressing nucleotide sequence isolated from the Sargasso Sea
atgaaaattttttatgatgatgatgccgacatttcaatcattcaacaactaaaagtaactatagttggttatggatctcaaggtcacgcgcatgcaaataatcttcatgagtcaggagtggatgttacagttgctttaagagagcactccacgtcatggaaaaaggctcaagaagctggattaaaagttgccaaagtttcagatgcgatcggtgacgctgatttagttatgatattagcgccggatgaattccaacagggattgtatgaatctgagattaaagctaatttaaagcaaaatgcagttttagcatttgcgcatggttttaatattcattttaaaaaaattgttcctgaagaaaaaacatctgtcattatgattgctcctaaaggtccaggacatacggtaagaagtacttatattaatggcggcggtgtgccatccttgattgcgatatatcaagatggagataatccatataaccatagcgcaagagacatcgccctttcatatgcaatggcaaacggcggaacaagagcaggtgttttagagactacttttaaagaagaaaccgaaactgatctttttggagaacaagctgtcttgtgtggtggcatgactgctttaataaaggcaggatatgaaactttggtagaagctggttacagtcctgagatggcatattttgaatgtttgcatgaaacaaaattaattgttgatctcattcacgagggcgggatagcgaatatgcattattccatttctaatactgcagaatttggtgattatattagtggacctaaagtcattactaatgatacgaaggaggctatgaaaggaattttaagtagaattcaaacaggagaatttgcggataatttcttaaatgattgtcgacagagtaacgatgcaacaggcggtccaattatgaaagaaatgcgaaaaaatactgcttctcactcaatagaagaggttggagccgagcttagatcaaagatgaaatttcttaactcagaacgcttagttaataaagataaaaattagt

SEQ ID NO: 209519 - DNA, 1018 bp, Unknown
  Bacterial polypeptide expressing nucleotide sequence isolated from the Sargasso Sea
aatgttttatgaaaaagatacagatgtaaatttgattaaagataaaaagattgcaatttttggttatggtagccaaggtcatgcgcatgcacttaatctaaaagatagtggtgtaaaagaagtagttgttgctttaagggaaggttctgccagcaaaacaaaagcagaatcaaaaggactaaaagttatgaatttatctgacgctgcagagtgggcagatgtagtaatgattttgactccagatgaactacaggcaactatttataaaaatcacatagaacaaagagttagagaaggaacttcaattgcttttgcgcatggattaaacattcattacgacttaataaaagcaagaaaagatttggacgtctttatggttgcacctaagggcccaggacatttagttagaagtgaatttcaaaaaggtggaggagttccatgtttatttgcagtacatcaaaatggctcaggtaaggcaagagatttagcaatgtcatatgcttcagctgttggtggcggaagatctggaataattgaaacaacatttaaagatgaagtagaaacagatttatttggtgaacaaactgttctttgcggtggattagttgaactaattaaaaatggatatgaaactttggttgaagcgggatatgaaccagaaatggcatattttgaaacagttcatgaagttaaattgattgttgatttaatttatgaaggtggaattgcaaacatgaattattcaatttctaataccgctgaatatggtgagtacgttacaggtccaaaaattattaacaaagaagaaacaaagaaaagaatgaaagaagtattggcagatattcagtcgggaaaatttaccaaagagtggatggatgaatgtaaaaacggtcaaaagaacttcttaaaaacaagagaaaaattagccgagcatccagttgaaaaagttggagcagggctaagagctcttatgccgtggatagctaaaaagaaattaatagatagcgataaaagttaa

SEQ ID NO: 209520 - DNA, 1018 bp, Unknown
  Bacterial polypeptide expressing nucleotide sequence isolated from the Sargasso Sea
atgttttatgaaaaagatacagatgtaaatttaataaaagacaaaaaaattgcaatttttggatatgggagtcaaggacatgctcatgctcttaatttaagagatagtggagttaaagaagtagtagttgctctaagagatggttcatccagtattgcaaaagcagagtcaaaaggtttaaaagttatgaatttgtctgatgcagcagagtgggcagatgtagtaatgatattaacacctgatgaacttcaagctgcaatttacaaaaatcatatcgaacaaagagttaaagaaggaacatcgattgcatttgcacatggtttaaatgtacattatgatttaattaaagctaggaaagaccttgatgtttttatggtagcaccaaaaggaccaggacatttagtaaggagtgagtatgaaaaaggtggaggagtaccttgtttatttgctgttcatcaagatgggtctggaaaagcaagggatcttgcaatgtcttatgcatcagcagttggaggtggaagatctggtattattgaaactacgtttaaggatgaggtcgaaactgatttattcggtgaacaaaccgttttatgtggaggattagttgagttaattaaaaatggttatgaaactttagttgaagctggttacgaaccagaaatggcatattttgaaacagtacatgaagttaaattaatagtagatttaatttatgaaggtggaattgcgaatatgaactactcaatttcaaatactgctgagtatggagagtatcaatcaggtccaagaataattaaaaaagaagaaactaaacaaaggatgaaggaagttttggcagaaattcagtctggtaaatttacaaaagaatggatggatgaatgtaaaaacggtcagaaaaatttccttgcgacaagagctaagttagcggaacattcagttgaaaaagtaggggccgaattaagagctatgatgccatggatttctaaaaagaaattagttgatagcgacaagaagtaga

SEQ ID NO: 209521 - DNA, 1018 bp, Unknown
  Bacterial polypeptide expressing nucleotide sequence isolated from the Sargasso Sea
aatgttttatgaaaaagatgctgatgtaaatctaattaaaaacaaaaaagttgctatcttcggttatggaagccaagggcacgctcatgcattgaacttaaaagacagtggagtaaaagaaattgttgtagcattaagagaaggatcatctagtgctgcaaaagcagagtcaaaaggtttaaaagtaatgaatttatctgatgctgctgagtgggccgatgtagtaatgattttaactccagatgagttacaagcagaaatttataaaaatcatattgaacaaagagtgagagaaggaacaagtattgcttttgctcatggtttaaacgtgcattatgatttaataaaagcaagaaaagatcttgatgtttttatggttgctccaaaaggacctggtcacttagttagaagtgaatatgaaaaaggaggtggagttccttgcttatttgccgtacatcaaaacggttcaggaaaggcaagagacttagcgttatcatatgcctcagcagttggaggaggaagatctggaataattgaaactacatttaaagatgaagttgaaacagatttatttggcgaacagactgtattgtgtggaggacttgttgaattgattaaaaatggttatgaaactttagttgaagcaggttatgaaccagagatggcatattttgaaacagttcatgaagttaaattgattgttgatttaatttatgaaggtggaattgcaaacatgaattattctatctctaatacggctgaatatggcgaatatcaatcaggtccccgagtggttaataaagaagaaactaaaaaaagaatgaaagaagttttggctgaaattcaatcaggaaaatttacaaaagagtggatggatgagtgtaaaaatggtcaaaagaacttccttgctacaagagctaaattagctgagcatccagtagaaaaagtgggtgcagaattaagagctatgatgccatggattagtaagaaaaaattagttgatagtgataaaagttaa

SEQ ID NO: 209522 - DNA, 1030 bp, Unknown
  Bacterial polypeptide expressing nucleotide sequence isolated from the Sargasso Sea
gatgaaaatctattatgataatgatgcagatataaatatcattcagggcataaatgtaaccattattggatacggttctcaaggacatgcacatgcaaataacttaaatgactctggtgtcaatgtaactgttggcttaagagaaggatcttcttcatggagtaaagccgaagctgcaggattaaatgttaaaactgtatctgagtcagttaaagatgctgatttagttatgatcttggcacctgatgaatttcaaaaaagtatttttgataagcacatttcaccaaatttaaaaagtgatgcaattcttggatttgcccatggatttaatatccattttaaaaaaatagttccatcagaagacaatagtgtaattatgattgcacctaaaggacctggccacactgtaagaagtacttataaaaacggtggcggagtgccatctttaatagcaatttacaaagataatattgttgataaaaaatttaatgcaaaagatttagcattgtcatatgcgatggccaatggtggaactagagctggtgttttagaaacatcatttaaagaagaaacagaaacagatctttttggcgaacaagctgttctatgtggtggattaacagccctaataaaagctggttatgaaactttggttgaggctggatatagtccagaaatggcatattttgaatgtttacatgaaacaaaattaataactgatttgatacaagagggcggaattgcaaatatgcattactcgatctcaaatacagctgaatttggagactataaaagtggcccaaaaataattacagaagatacaaaaaaggcaatgaaagaaattctttctgaaatacagactggtaattttgcaaatgaatttctcgatgattgtcgtcaaagtaatgatggaactggcggcccaataatgaagtcaaatagaaaaatgacccaaaatcatccaatcgaacaggttggaaaagagctgcgatcaaaaatgaaatttctcaattctgagaaactcgtttga

SEQ ID NO: 209523 - DNA, 997 bp, Unknown
  Bacterial polypeptide expressing nucleotide sequence isolated from the Sargasso Sea
tttaaaagttaccattgttgggtatggttcacagggtcatgctcatgcaaataacctgcatgagtctggagtagatgttactgtagcattacgagaaggttcttcatcatggtctaaagctgaaaacgctggattaagagtagcaaaagtttcagatgcagtaagcgatgctgatttggtaatgatacttgccccagatgaatttcaacaaggcttgtatgaatcagcaattcaatcaaatttaaaatcaaatgcagttttggcatttgcacatggattcaatatccattttaaaaaaattatcccaggcgatgggacttctgtcattatgattgctccaaaaggaccgggccatactgttagaagtacctacttaagtggtggaggagttccatctctaattgcaatttatcaagatggcaataatccaaataatcatagtgcaaaagagattgctctttcatatgctaaagctaatggtggaacaagagctggtgttcttgagactacgtttaaagaagagactgaaactgatttatttggtgagcaggctgttttatgtgggggtatgactgccttaattaaggcaggttatgaaactttggttgaggctgggtatagtccagaaatggcatattttgaatgcttgcatgaaacaaaattaattgtagatttaattcatgagggcgggattgcaaacatgcattattccatttctaacactgcggaatttggagactatgttagtggcccagaaatcataacagacgacacaaaagaagcgatgagaggaatattaaaaagaattcaaactggcgaatttgctgataattttttaaatgattgtcgacaaagcaacgatggatcgggcggcccaattatgaaagaaaagcgaaaaaaaactgcttatcattcaattgagcaggttggcgcagacctcagatccaagatgaaatttcttcattcagaacgcctggtaaataaagataaaaattag

SEQ ID NO: 209524 - DNA, 820 bp, Unknown
  Bacterial polypeptide expressing nucleotide sequence isolated from the Sargasso Sea
aatgttttatgaaaaagatacagatgtaaatttaataaaagacaaaaaaattgcaatttttggatacggaagtcaaggacatgctcatgctcttaatttaagagacagtggagttaaagaagtagtggttgctctaagagagggttcatccagtattgcaaaagcagagtcaaaaggcttaaaagttatgaatttgtcagatgcagcagaatgggcagatgtagtaatgatattaacaccagatgaactgcaagctgctatttacaaaaatcatattgaacaaagagtaaaagaaggaacatcaattgcatttgcacatggtctaaatattcattacgatttaattaaagctagaaaagaccttgatgtttttatggtagcgcctaaagggccaggacatttagttagaagtgagtatgaaaaaggaggaggggtaccttgtttatttgctgttcatcaagatggatcaggtaaagcaagggatcttgctatgtcttatgcatctgcagttggaggtggtagatctggtattattgaaactacattcaaggacgaggtagaaacagatttatttggtgaacagactgttttgtgtggtggattagtagaattaattaaaaatggttatgaaactttagttgaagctggttatgaacctgaaatggcatatttcgaaacagtccatgaagttaaattaatagtagatttaatatatgaaggtggaattgcaaatatgaactactctatttcaaatactgctgaatatggagaatatcaatcgggtccaagaataattaaaaaggaagaaactaagcaaaga

SEQ ID NO: 209525 - DNA, 613 bp, Unknown
  Bacterial polypeptide expressing nucleotide sequence isolated from the Sargasso Sea
gttagggcagaatatgttagaggagccggtgtcccatgtctttttgcagttaatcagaatccctctggaaatgctcttgaaattgcaatagcttactcttcagcaataggtggaggtagagctggaataatagaaacaacttttaaagaagaatgtgaaactgacttatttggagaacaatcagttttatgtggaggtttaacacatttaattattgctggttatgaaactttggtggatgcaggttatgctccagaaatggcatattttgagtgtcttcatgaagttaagttaattgtagatcttctttatgagggtggtatggccaacatgcgatattctatttccaatacagctgaatacggtgattattctagaggtccaagattaattactgatgaaacaaaaaaggaaatgaaaaaaatcttatcagaaatacaatctggtcaatttgctaaagaatggatggcagagcatagagctggtcaaactaagtttaccacaatgagaaaaaaacatgctgaacatcctattgaaaaagttggtgaaaaattaagaacactaatgccttggatagctgaaggaaaaatggttgataaaagtaagaattaat

SEQ ID NO: 209526 - DNA, 1018 bp, Unknown
  Bacterial polypeptide expressing nucleotide sequence isolated from the Sargasso Sea
atgttttatgaaaaagatactgatgcaaagttaataaaggataaaaaaattgcaatctttggatatggcagccaagggcacgctcacgctttaaacttaaaagacagtggagtaaaagaagttgttgtagcactaagagaaggttcttcgagtattaaaaaagcagaatctaaaggtttgaaagttatgaatctttcggatgctgctgaatgggcagatgttgtaatgattttaactccagatgaattacaagcaactatttataaaaatcatattgagcaacgtgtaaaagaaggaacatctatcgcttttgcacatggattaaatgttcattatgatttgataaaagctagaaaagatttagatgtatttatggtagcaccaaaaggaccaggccacttagttagaagtgaatatgaaaaaggtggtggagtaccatgtttatttgctgttcatcaaaatggatctggcaaagctagagatctagctatgtcatatgcttcagcaattggtggaggaagatctggtataatcgagacaacatttaaagatgaagttgaaacagatttatttggagaacaaacagtattatgtggaggtcttgttgaactaataaaaaatggatatgaaactttagttgaagcaggttatgaacctgaaatggcttattttgaaactgttcatgaagttaaacttattgtggatttaatttatgaaggtggaatagcaaatatgaattactctatatctaatactgctgaatatggagaatacgagtctggcccaaggattataaataaagaagaaacaaaaaaaagaatgaaagaagttttagcagacatccagtcaggtaaatttactaaacaatggatggatgaatgtaaaaatggtcaaaaaaatttcctagccacaagagcaaaactagctgagcatccagtcgaaaaagttggtgctactctaagagaaatgatgccttggattgcaaagaagaagcttgtcgatagtgataagaaataac

SEQ ID NO: 209527 - DNA, 666 bp, Unknown
  Bacterial polypeptide expressing nucleotide sequence isolated from the Sargasso Sea
caagaccagatatggatgtattcatggttgcaccaaaaggtcctggtcatactgtcagatcagaatttaaaaaaggaggaggtgtaccttgtctcgtcgcagtagatagtgataaaacgggaaaggcacttgatattgcattgtcatatgcatcagctattggcggcggcaaagctggaattattgaaacaacatttaaagacgaatgtgaaacagatttgtttggtgaacaaactgttttatgcggcggtgtcgttgaattgattagaaatggatttgaaactttagttgaggcaggttatccacctgaaatggcatactttgaatgtttacacgaagtaaagcttatcgttgatctaatttatgagggtggaattgcaaatatgaactactcaatatctaatactgctgaatatggtgagtatgtatcaggtccaaaaatagttgacggagaaacaaaatctaaaatgaaaaaggttttagaaaaaatccagtcaggagaatttacaagagaatggattaaagaatataaaagtggtgcaaaaaattttgaggcaatgagaagtaaaattgataatcaccaaattgaaaaggtgggcaaagatttaagagctatgatgccctggatttcaaaaaataaattggttgataaggaaaaaaactagt

SEQ ID NO: 209528 - DNA, 445 bp, Unknown
  Bacterial polypeptide expressing nucleotide sequence isolated from the Sargasso Sea
tttggagaacaagcggtccttttgtggaggtttaacatcacttattcaaaccggttatgaagttctggtagaaaatggttatccaccagaaatggcatattttgaatgtcttcatgaagtaaaattaattgtagacctcatttatgaaggtggtcttcagaatatgagatatagcatttccaatactgcagagtacggagattatgtgacaggaccaaagattgtgaatgaaaatacaaaggaaacgatgcagaagatattgactgagattcagtctggagaattcgcgaaagattttatgaatgattgtaactctggtggtgagaaaatgagcgaatatagaaaaaactcatcagaacattcaattgagtcagtgggtgaagagcttcgctcaatgatgccctggatatctgccaataaaattgttgataaagccaaaaactaa

SEQ ID NO: 209529 - DNA, 319 bp, Unknown
  Bacterial polypeptide expressing nucleotide sequence isolated from the Sargasso Sea
tgtgatttaatatatgaaggtggaattgcaaatatgaattattcaatttcaaatacagcagagtatggagaatatgtaacgggtccaagaattattaataaagaagaaacaaagaaaagaatgaaagaagttcttgcggatattcagtcaggcaaatttactaaagagtggatggatgaatgtaagaatggtcaaaagaatttcttaaaaactagagaaaagctggccgatcatccagttgagaaagtaggcgctggattaagagcaatgatgccttggatttctaaaaagaaactagttgatagcgataagaaataaa

SEQ ID NO: 209530 - DNA, 1018 bp, Unknown
  Bacterial polypeptide expressing nucleotide sequence isolated from the Sargasso Sea
aatgaaagtatattatgacaaagatgcaaatatagacaatattaaaaatctgaatgtatctataatcggttatggttcgcaagggcatgcccatgccttaaatctcaaagattcaggtataaatgttacaattggattaagagagaattcatcatctatagatagagcaaaaaatgaaggtcttgaagtattatcccttgaagaagccgttaacaaggctgacattgtcatgattctagctccagatgaatatcaagcatcaatttttaaggatagtattgaaccaaatcttaaagaaaatgctgcacttgcattcgctcatggttttaatattcattatggtcaaatcaaaccaagcactcaacatgacgtctttatgatagctccaaagagccctggtcatttagtaagatcaacttttttacaagggaaaggtgtgccaacattaattgcaattcataataataattcaggcactgcaaaagatattgcattagcttatgcttctgcaatcggtgggggcagagctggtataattgaaactgactttaaagaggaaacggagactgatttatttggcgaacaagctgttttatgcggtggtgtcacagcacttgttaaagctggctttgagactcttgttgatgcaggctatgctcctgaaatggcatattttgaatgcttaaatgaacttaaacttattgtagatctaatgtatgaaggtggaatgactgaaatgaggtactcgatatctaatacagctgaatatggtgatttaaccaaaggcccattcttgatagatgatcatgtaaaagctaagatgaaagttgtactagaagacgttcaaaatggtaaatttgcgaatgacttcgtaaatgagattaagaacgggtcaaaagagtttgacagattaagacaggaagggtcggatcatttaattgaagagacaggtaagaaactacgagatatgatgtcatggatgcaggatagtaagcttgtagatgaaaaaataaaataa

SEQ ID NO: 209531 - DNA, 499 bp, Unknown
  Bacterial polypeptide expressing nucleotide sequence isolated from the Sargasso Sea
ggggtaagcgggagtatattaacttcttttcgagatgaaacagaaaccgatctttttggagaacaagcggttctatgtggcggagctactgcccttgttaaagcgggttttgaaactcttgtagatgcaggttatgaaccagaaatggcatattttgaatgtcttcatgaattaaaattgatcgttgatttgatgtatgaaggaggtatctccaatatgcgatattcaatctcaaatacagctgaatatggtgacttcacaagaggaccaagaattgtaaataattccactaaagatgaaatgaaaaaaatactagctgaaattcaaagtggtgaatttgctaatgaatatattaaagaatataggagtggaaacaaaaatttcaacagcatgagaaaagaaggtgaacatcatgccattgaagaggttggagataagttaagaagcatgatgccctggatatcagctaataaattggttgataaagataaaaattaag

SEQ ID NO: 209532 - DNA, 1006 bp, Unknown
  Bacterial polypeptide expressing nucleotide sequence isolated from the Sargasso Sea
aaagatactgatgtaaatttaattaaagataaaaaaattgcaatttttggttatggaagtcaaggacatgcacatgcattaaatttgaaagatagtggggtgaaagaagttgtagttgctttaagagaaggttcctcaagcattcctaaagctgagtcaaaaggtttaaaagttatgaacttatctgatgcagctgagtgggccgatgtagtaatgattttaactccagatgaattgcaagctgaaatttataaaaatcatattgatcaaagaattagaccaggaacaagtattgcatttgcccatggtttaaatgttcattatgatttaattaaagctagaaaagatttagatgtgtttatggttgcaccaaaaggccctggtcatttagttagaagcgagtatgaaaaaggtggaggtgttccttgtttatttgctgttcatcaaaatggctcaggtaaagcaagagatctagcaatgtcatacgcttcagctgttggtggtggcagatcaggaataatcgaaacaacttttaaagatgaagttgaaacagatttatttggagagcaaacagttttatgtggtggactagttgaattaattaaaaatggttatgaaactcttgttgaagcaggatatgaaccagaaatggcttattttgaaacagttcatgaggtaaagttaattgtcgaccttatctatgaaggtggaattgcaaatatgaattattccatttcaaatactgcagagtatggtgaatatcaatctggtccaagaataataaataaagaagaaacaaaaaagaaaatgaaagaggttttgtctgatattcaatctggaaaatttacaaaggaatggatgaatgaatgtaaaaatggtcaaaaaaactttcttgcaactcgtgctaagttagctgagcacccagttgaaaaagtaggtgcaaatttaagagcaatgatgccttggattagtaagaaaaaattggttgatagtgataagagctaat

SEQ ID NO: 209533 - DNA, 964 bp, Unknown
  Bacterial polypeptide expressing nucleotide sequence isolated from the Sargasso Sea
aatttttggttatggtagtcaagggcatgctcatgctcttaacttaaaagatagtggagtaaaagaagtggtcgttgctttaagagatggttcagcaagtaaagcaaaagctgaatcaaaaggtttaaaagtaatgaacttatcagattcagcagaatgggctgacgtttgtatgattttaactcctgatgaacttcaagcaacgatatataaaaaccatatcgaacaaagaataaaagaagggactagtttagctttcgcacacggattaaatattcattatgatttaatcaaagcaagaaaagatttagatgtatttatggttgctcctaaaggacctggacaccttgtaagaagtgaatttgaaaagggtggtggagttccttgtttgatggcagttcatcaagatggaactggcaaagcaagagatttggctttatcgtatgcatccgctatcggaggtggaagatctggaattattgaaaccaccttcaaagatgaatgtgaaacagatttatttggagaacaaacagttctttgtggaggacttgtagaattaattaaaaatggttacgaaacattagttgaggcaggatatgaaccagagatggcatattttgagtgtttgcacgaagtaaaattaatcgtagatcttatatatgaaggtggaattgcaaatatgaattactcaatctcaaatactgcagagtatggtgagtatgtttcaggacctagaattataaataaagaagaaactaagaaaagaatgaaagaagtgctagaggacatccaatctggaaagtttaccaaacaatggatggatgagtgtaaaaacggtcaaaagaattttctcaagactagagaggaattagcaaaacattctattgaaacagttggtacaaaactaagagctatgatgccttggattggtaagaagaaattagtggatagcgataagaagtaa

SEQ ID NO: 209534 - DNA, 547 bp, Unknown
  Bacterial polypeptide expressing nucleotide sequence isolated from the Sargasso Sea
gaaggcaagagacttagccctatcttatgcctcagcagttggaggaggaagatcaggaattattgaaacaacctttaaagatgaagttgaaacagatttattcggcgaacaaacagtattatgtggaggtttggttgagttaattaaaaatggttatgaaactctagttgaagcaggatatgaaccagaaatggcatattttgaaacagttcatgaagttaaattgattgttgatttaatttatgaaggtggaattgcaaacatgaactattctatatccaatactgctgaatatggtgaatatcaaacaggaccaagagtagttaacaaagaagaaactaaaaaaagaatgaaagaagttctggccgaaattcagtctggaaaattcactaaagagtggatggatgaatgcaaaaatggtcaaaaaaacttccttgctactagagctaaattagctgagcatcctgttgagaaagttggtgcagaactaagagccatgatgccttggattggtaagaaaaaattagttgatagcgataaaagttaa

SEQ ID NO: 209535 - DNA, 887 bp, Unknown
  Bacterial polypeptide expressing nucleotide sequence isolated from the Sargasso Sea
tctaagagatggttcagctagtaaagcaaaagctgagtcaaaaggattaaaagttatgaatttatccgatgcagctgaatgggctgatgtagtaatggttttaacacccgatgaacttcaagcaacaatttataaaaatcatattgaacaaagagttagagaaggaacttcaattgcatttgctcatggtttgaatattcactacgatttaattaaagctagaaaagatcttgatgtatttatggttgctccaaaaggtcctggacacttagtaagaagtgaatatgagaaaggcggtggagttccttgtttgtttgctgtacatcaaaatggatctggtaaagcaagagaattagcaatgtcttatgcctcagcagttggaggaggtagatcaggaattattgaaactacttttaaagatgaggttgaaacagatttatttggtgaacaaactgttctttgtggcggattagtagaattaattaaaaatggttatgaaactttagttgaggcaggatatgaacctgagatggcatattttgaaactgttcatgaagtaaaattaattgttgatttaatatacgaaggtggaattgcaaatatgaattactctatttccaataccgctgaatatggagagtatattactggtccaaaaattattaataaagaagaaacaaagaaaagaatgaaagaagttctgacagatattcaatctggtaaatttactaaacaatggatggatgagtgtaaaaatggccagaaaaactttttaaaaacaagagaaaaactggctgatcacccagttgaaaaagttggagctgtgcttagagctatgatgccttggatttcaaaaaagaaactagtggatagtgataagaaatagt

SEQ ID NO: 209536 - DNA, 511 bp, Unknown
  Bacterial polypeptide expressing nucleotide sequence isolated from the Sargasso Sea
agtaggtggaggaagatctggtattattgaaactactttcaaagacgaagttgaaacagatttatttggtgaacaaactgttttatgtggtggtttagttgagctaattaaaaatggatatgaaactttagttgaagctgggtatgaaccagagatggcatattttgaaaccgttcatgaagttaaattaattgttgatttgatatatgaaggtggaattgcaaatatgaattattcaatttcaaatactgctgaatatggagaatatcaatcaggaccaagagtagttaataaagaagaaactaaaaaaagaatgaaagaagttctgacagaaattcaatctggaaaatttactaaagagtggatggatgagtgtaaaaatggccaaaagaattttcttgctacaagagctaaattagctgagcacccagtagagagagttggtgcggaacttagagctatgatgccttggattagtaagaaaaaattggttgatagcgataaaagttaa

SEQ ID NO: 209537 - DNA, 763 bp, Unknown
  Bacterial polypeptide expressing nucleotide sequence isolated from the Sargasso Sea
tcaacaagaaatttatcaatctcaaatccacgataatataaaaaatggcgctgctttagcatttgctcatggtttaaatattcattttcaacttattacagcaagagaagatttagatgtttttatggtcgctccaaaaggcccaggccatacagtaagaggagagtatcttaagggcggtggagtaccatgtttgctcgcagtagataaaaatgtaagtggtaatgcaaaagaaattggtcttgcttatgcttctgctttgggtggaggtaaatcaggtataattgaaactacatttaaagaggaatgtgaaacagatttatttggtgagcaaacagttctttgcggagggttaatgtctcttgtaagaaacggttttgaaactcttgttgaagctgggtatgcacctgaaatggcgtatttcgaatgtttacatgaagtaaaattaattgttgatctaatgtatgaaggcggcatggctaatatgagatattctatatctaatacagctgaatacggtgattataccagaggtccaagagtagttcctaacgaagctacaaaagctgaaatgaaaaaagttctaagtgaaatacaagatggtactttcacaaaagaatggatggctgaacataaatcagggcaaattaagtttaaacaaatgagagaccaaggtgcaaagcaccaaattgaagaggtaggagctaaattaagatctatgatgccatggatagcatcgaataaacttgtaaaggatatctaa

SEQ ID NO: 209538 - DNA, 637 bp, Unknown
  Bacterial polypeptide expressing nucleotide sequence isolated from the Sargasso Sea
aaaattggtgcacttagtggtccaaatcttgccaaagaaattgctgaaaacaaggttgctggtactgtaattgcttcagaatttgacgaagtgaactttgaaataaaaactatgttgtcatctgatacatttaaggttttttcaagccaagatcttcaaggagttgaattagcaggagccctcaaaaatatttatgcaatttgctgtggaattgcccatgaaaaatctgtaggtgaaaatgccctagggttaattattacaaggagcatggcggaaatgagtagatttgctgttgcaaaaggagctaatccaattacttttttaggtttagcagggatgggagacttgatggcaacatgcacctctaagctttcaagaaattttcagttaggtgaattgcttgctcgagattattcatttacagatgcaaaaaataaagttggacaagttgcagaaggagctcgtactcttgaggttgtttatcatgaagcaaataaaatgaacgttagcatgccactagttaattccctatataaaattctgtatgcaaatgcttcatctgatgaattaattcaagatttactcgaacaccctaatgaagttgatgtagaatttacatatcaggataaattatgag

SEQ ID NO: 209539 - DNA, 821 bp, Unknown
  Bacterial polypeptide expressing nucleotide sequence isolated from the Sargasso Sea
aataaaagctactaccaatcaaaaagacgttttaaaacttagtcatgtgattatttcaattccatcttcatcagttagaggttttttcaagaaaaataaaaatagtgtaggtaattcaacttctttcttaattgcctcaaaaggtttggaaagaggtagctttaagtctttgagtgaaatattacatgaggagcttagcccctatgcaaaactttcagttttatccggaccaaatcttgcatcagagattattgaaggtatgacatcagcttgtgtgattgcatcaaaaaataaaaaattttctaaagaatttttagaaatattagatcaacaaaatttcaaagtttttttaaatgatgatgtcaaaggtattgagttatctggagctttaaaaaatatttacgccattgtttcaggattatccgatgggcttggaaataaaaaaaatactaaagcaatgatcctcacaagaagcttggttgaaatgtctcacctctttcagaggttgaagttaaataaactaactttgataggacttgctggcgtaggagatctgattgctacatcaagctcagaaaaaagcaggaactattctttcggatacctcttaggaaagggcaaatctaggcaagaggcaaaaaaattgataaatcaggtgatcgaaggagaaaaaactttaaaaacagtttacgaaaagatcctcgaattaaatttagagatgccaattgtagaaaagctatacaatattgtttttaaaaagtctccagtaagagattcttttgataaaatgatcatagaatctgatggaaaagatttataaa

SEQ ID NO: 209540 - DNA, 618 bp, Unknown
  Bacterial polypeptide expressing nucleotide sequence isolated from the Sargasso Sea
aagctaaacttgcaatattatctggcccaagttttgctatagaagttgctaaaaaaaaaccaacagcagttacagttgcatctaaaaatcaaaatgaagcaaaaaaattagctaaacttattaattctaaaatatttcgatgttattattcgaatgatattattggtgtgcaatttggcggtattattaaaaatatattagcgattgcatcaggtatagttgaaggtcaaaatcttggtttaaatgcaagggctgcgcttatatcaagaggtttagttgaaatgaaaagaattggtgttgcctatggagctaaagaatttacatttaatggactttcaggactgggagatttgatgctcacttgtaatgcgaatttgtctagaaattttacaacgggcttattaataggtaaaggtaagaaaattaaacaagttataaaatttaaaaaaactgtctcagaaggcgtattgaattcaaaaactatttttaaattgtctagaaaaaaaaaaatagaaatgcctgtttgtgaagctgtttataaaatactatacaaaagaaataaaataaaagagacaataggaaagattttgtctagagatattaaaaaagaaacttaag

SEQ ID NO: 209541 - DNA, 850 bp, Unknown
  Bacterial polypeptide expressing nucleotide sequence isolated from the Sargasso Sea
atgagttatgaaaataatattgctgttttaggagctggtagctggggaactgcaataataaaaatgctttgtgaaaatgttaatgaagttctgtggtatgtaaggaattcagatcatgctaatgaaataattaaattaaaaaggaatccaaaatatttaaaaaatttggatattgacgttaataagctagtaattagtagtgatattgagatgattattcagcaatctaatattataatcttagctattccttctccttatataaatgaaagtcttgaaaaatataaatcaatattaaatcaaaaaataattttttctggatctaaaggagtaatacctgagtctcatttagtaattaccgatcacttaaataaatattacaatattccgtataaaaatttaggtattataagcggaccaactcatgctgaagaaattgcgaatgaaaagctgtcttacttaactattggttcatcaaataaagacatatgtgattttttatctgaaaaattaaagtcttcatatataaaaacatctatttccaaggatgttattggtatagaatattcagctgctttaaaaaatatttattcaattttagttggcatatcaattggtttaggatatggggataattttattagtgttttaattagccattgcagtaaggagatgattaaattcattaagtcaattgataatgtaaaacgtgattttagtcattctgcatatattggagatctactagtaacaacatattcatcatttagtagaaatagaacttttggtaaaatgattggagaaggtcattctgttaatgaatctatttctgaaatgtctatgatgtaga

SEQ ID NO: 209542 - DNA, 888 bp, Unknown
  Bacterial polypeptide expressing nucleotide sequence isolated from the Sargasso Sea
cgagtgaataacataacggtggtgggtgttaccacttggggcgttaccttgggagtgttagccggacaatcctcgaataatgaaatttcgatattaagtagaacagaaattgaggctactaaactttccactgaaaacgaatgcagccgatttttaccaggagttaaatttcctgacggttgcaggttcactcattatgctgacaaggcgctcgaacatgctaatgttgtcatagtggctgtaccttctcataccttcagagaaaatattattcatattgctgatgcaataccttctgatgcgatcttggtgagtgcaactaaaggcttagaaatgcctcaaaaactgagaatgacggaaatagtagcccaagaaatctcacaagagatttgtgatggtatgtgtgttatttctggtcctaatcttgctaaagaaatagtggaaggcaaaccatcatcgtctgttgtagcaagcatcaatgaatctaatgcagagttggtcagagacataatcatgagacctactttcagaatttacacttctaaggatgtgtcaggcgtagagctttgtggaacacttaaaaacattattgccataggtgcaggaatagtagacgggttgggattaggagacaattctaaagccgcctacattacacgaggtattgcagaaatcacgagattaggagttgcccttggcgcttcttctagtacttttgcgggcttggcaggagtgggagatattgtagctactagtttcagtaaattaagtaggaatcgctatttgggagaacaaattgctcatggtaaaacgattaaagaaattactggaaatatgcacaatgtagttgaaggaattcaaactactagggcagcggtagaattgggt

SEQ ID NO: 209543 - DNA, 418 bp, Unknown
  Bacterial polypeptide expressing nucleotide sequence isolated from the Sargasso Sea
atgaaaaatgttatcgctatagccgctggtatagtatacggactggaacttggagagaatgcaagagctgctatacttacaaggggtcttgctgaaactgctaagttggctaaaggccttgggggacaaactgagacagtttttggtcttgcaggcgctggtgatatggcattaagcagcttaagcatgacctcaagaaacttttcttggggtttttcactagctaaaaaaaaaccattcgatgataaactaacagaaggcttaaattcatcaaaaatggctataaaaattgcaaaaaaaattaaaatagaaatgcctattacggagttagtatcaaaggctgataataagaattttgatttgcagactgaggttgaaaatatgatgaaaagacctcccaaactagaatggctttaaa

SEQ ID NO: 209544 - DNA, 578 bp, Unknown
  Bacterial polypeptide expressing nucleotide sequence isolated from the Sargasso Sea
aatgtctagggtggcggaagtaggagtacttggcgctggtgcctggggaaccgcgctagcaaccgttgccgcgcgaaataatcatcgggtagtgttatgggatattgatcctgcgatcgccgactcgataaataaggttcataaacatccatttgctttatccggcgtgaagttaaaccccttgattaggggcaccccccatattgaagagataggtagttgcccattaatcttggccgttgcccccgcccagctaatgcgttcagcattaactcaactagccgaacaccttgagagcacatcccgactaaccctatgttctaaggggatagagaaaaatacaggccaactaatgactagtatagcagaggaaacagcacctgacgctcgacccgtcattctgtctggccccacatttgcggaggaagtggcacttggccttccaacagcgattactcttgctgcgaagagcccaagtgacgctcactacgtagcccagatcatgggcagcgagaagtttcgaacctatgtctcaagtgatcccattggcgcccaggttgcgggcgcaaccaaaaacg

SEQ ID NO: 209545 - DNA, 697 bp, Unknown
  Bacterial polypeptide expressing nucleotide sequence isolated from the Sargasso Sea
atttctgcttcaaaaggcttatcagaagatggcaaaactctaaccaaaatgattgcctcagaaataaaaattgatagctcccaaataggagtaataactggtccaaatttagctactgagatattagccggaaagccagctacaacacttttgtcatttactgatttaaataaagcaaattcaattagagataatttttcaagtaaaaacttcagggtatatagtggagatgatgtggtaggggctgaaattggaggtgcattaaaaaatataattgctatagggtcaggaataatagacaaattggaacttggagataatgcaaaatctgcttttatcacaagaggtttgagagaaattactagattcggaacttattatggagcaaaagaatatactttttatggattatcaggaataggagatctatttactacttgttcaagtagtcttagcagaaactggcaactggggtataatctggcctctggtatgacatacaatgaatttaagactaatacaaaattaactgttgaaggagcaaatacaactaaaattgtaaatatgatctctcaaaaaaagaacatagacatgcctataactaatatgacctataaagttttagaagaaaattatgatccagaaatagctataaaagaattcatgagtagagacctttctcaagagagaaattagc

SEQ ID NO: 209546 - DNA, 576 bp, Unknown
  Bacterial polypeptide expressing nucleotide sequence isolated from the Sargasso Sea
aatgaaaaacaaaaaaatagcggttattggtggaggtagctggggtacagctttatctttacaccttgctgaaaaattcaagcaggtaaacctatgggtttatgaaaaagaactgtgcgagattatgctcaaggaacgagaaaataggtggtttttacctgggattttacttcctcaaaatatcattccagatacttcacttcaaaaggtgctccatgatcaagtgattatattattagtagtgccaacaccaaaaataagagatattacaaatcagttaaaatcatttgtgaatcctgaaaccctaataattaatggaagtaagggtatagaaaatgattccttaatcccatgccataaaataattgaagatagcttaaacattcaatgcaaaattgctacgatatcggggccgacatttgctaaagaagtagcaactaaaatgccttcagctcttctagctgcctctaaatctactaatacggccaaaattattcagaaaatgttttcatcgaataatatgaaggttttcactagcacagatataatgggggtagaaattgggggggctttaaa

SEQ ID NO: 209547 - DNA, 433 bp, Unknown
  Bacterial polypeptide expressing nucleotide sequence isolated from the Sargasso Sea
atgagtaaattgcaaaaagtggctgttttaggaggaggtagttttggaacagttcttgcaaatctagctgcctcaaatggttacaaagtttcattatgggtaagagattctgaacaagctttaagaataaattcagagggcgcaaatacttcttatcatcctgagttaaagctttctgaaaatattttggcatcagatgacttaaacgaggtcgtaaaggatgtttcaattgtatttatagccacaccaagtattatttttgaaaaaattgtaaatcgcttatcaaactatattcatggagatgcatttttaatatcatgtactaaaggtattttagaaaacccatttagacttttatctgaagtaatttctaaagattgcaaaaatccaattggagtcctaagtggacctaatttagcaaaagaaatagcag

SEQ ID NO: 209548 - DNA, 388 bp, Unknown
  Bacterial polypeptide expressing nucleotide sequence isolated from the Sargasso Sea
aatgctattggattgatactaactagaagcatggctgagatgagtagatttgctgttgcgaaaggagctaatccaataacatttctcggtttatcaggaatgggagacttggttgctacatgcatgtctaatttatctcgtaattatcagcttggatttaacataggctcaggaatgaccttattagaagcaaaaaataaggtcggccaagtggcagaaggagttagaacgcttgagattgtaagaaatgaatcatcaaggcttaatattaaaatgcctcttgttgaatcaatgtataatataatttatgaagaagcatcacctgaatcaataattgatgatttgctgaataatcctcatgaagttgatgtagaatttaaacattaaa

SEQ ID NO: 209549 - DNA, 817 bp, Unknown
  Bacterial polypeptide expressing nucleotide sequence isolated from the Sargasso Sea
tttgacctttttaaaaacgaatccgtttattcatgatgttattctagataaacgattaccaaaatttaatttgatttatctttattttttaatgagaaaaataaaaaaactaaaaatttctaaagtttatgatctacaaaactcttccagaactaatttttataaaagaatattatttccaaattcaaatctaaatgtttggtcatcttctgaaacaacattgcccaatgataaaacaaaaaaagaatttgataaaaaatctgttttagagagatttaatcatcaaatgcaaacttcagaaataaatactaaacatacaatgcttcctgatttttcatggagctgtactgatatttctaaaataaaatcagaatataaattagaaaaatatattgttttattcccattctgctcacctcatcttgctcaaaaaaaatggccttactacaatgaactaattgaaaaaataaaaaatcattataacgacgagtataaagttgtagtagctcctggcccaaatgaaattgcagatgcaaaagaaattaataccctatgtgttttagataatggaaaagcactagatatttctcaactatcttctttaataaaaaaaagttcttttgtaatagctaacgatacaggtccagctcacatggctgcacatttaaactcaaaaggattaactttatttggatctcatactacagcttataaagttagtattgaaagagaaaattttaaagcaattcaggttacagatttatcaaaacttaccgcagaaaaagtattcgaaaaacttaccaatcttttaatttag

SEQ ID NO: 209550 - DNA, 573 bp, Unknown
  Bacterial polypeptide expressing nucleotide sequence isolated from the Sargasso Sea
catgaataaaaaaacaatatctgtccttggaggaggtagttggggaactgttctggctaacttagcagctaagaataataatgaagtttttttgtggatgagggattcagagacttgtaggtcgattaatgaagaaaaaattaacttcaaatacttgccaaattattctttagaagaaaatctatatgcaactactgagattgagaagatatcaagttcagatatagtcatttattgcatacctagtgattctttaagagaggtagttgatgagtcattaaatcaccttaaaactaattcttatctaattagtgcgaccaaaggtgtagaacctggaagttttttattaatgagtcagatcgttgaagatataactaaaaacaaccataaagtcggagttttgagcgggcccaatctagcaggtgaaattgcagaagagcatttaactggaacagtaatagctagtttgcatgaagacctttcttctgcattagtagatgcctaccaaactcctttcttccaggtttatgtaaattcagatccatatggagttgaattaggtggagctttaaa

SEQ ID NO: 209551 - DNA, 288 bp, Unknown
  Bacterial polypeptide expressing nucleotide sequence isolated from the Sargasso Sea
aatgaaaatcattttagcttccaaaagtggcgtgagaaaaaaaattttagatgaaaataatattaattgtgaagtaattgtttcaaacgtagatgaggatgagataaagaattctcttctagcagagggcgcagacccacttacaatttcaaaaaatttagctgagattaaatctatcaaagtaagctctaataatcccgataaactagttttaggagctgatagtgtgatatctctagaaaataaattaatcaacaaacctatttccagagaagaagcgatgagcat

SEQ ID NO: 209552 - DNA, 559 bp, Unknown
  Bacterial polypeptide expressing nucleotide sequence isolated from the Sargasso Sea
gcaagcaagcatgcagatctttgtcatctaggaagggaaattctgtcttcaagcacttttaagatatacacaagcgcagatactcaaggtatagagcttgcgggggctttaaaaaatatttatgcaattatatcgggttattgtcattctcttgatgtgggtgagaacgctatcggacttatactgacaaggagcatggcagaaatgagtaactttgctgttagtaagggcgcaaatccaattacttttttaggccttgcaggaatgggtgacttggttgcaacttgcttttcaaaattatcaaggaattatcagtttggttgggccattggagaaggtcttgatattgaggctgcaaaaaataaagtgggtcaggtagcagagggattaaatactattaaaataattcacagcgagatttcttcatctgaaatcaagatgccacttgtatctggtatgcatgaaatattatttaataacggaagcaaagaattactcttggaacagatcataaatagtgaaatttatgttgatgtgaattttgatgtagaatcatagc

SEQ ID NO: 209553 - DNA, 921 bp, Unknown
  Bacterial polypeptide expressing nucleotide sequence isolated from the Sargasso Sea
ctttaaggattaattctgagggagccaatgctacctatcatccagaattaaaactatcagataatattactgctgatgacaatctagcatcggtagttgcagaatcccaatatattttagtcgctacgccaagcattatatttgaggaagtgatatctcgcttagagccattaattagttcctctgtgaccgtgatttcttgcacaaagggaattaagcctgacccctttagaaccatgacaaacattattaatcagcacttaggacatattataggtaacagaattggagcacttagcggcccaaatcttgctaaagaaatagcagaagaaaaggttgcaggaactgtcattgcttcagagaatgagaatatcaacattgagattaaatctatgctgtcttcaaaaacatttaaggttttttctagccaagatactcaaggtgttgaattagctggagccctaaaaaatatatatgccatatgctgcggaattgctcatgcaaaattagttggagaaaatgcattgggattcattgttactagaagcatggcagagatgagtagatttgctgttgccaagggagcaaatccaattacatttttaggtttagcaggtatgggcgatttaatggcaacatgtacatcaaagttatcaagaaattttcagctaggtgagctcattgcagaagatctttcattgatagctgcaaaagaaaaagttgggcaagttgctgaaggcgcaaggactcttgaagttgtttaccatgaagcaaataaaatgaatgtgagcatgccgttggtaaattcgctttacaaaattttatattctgactcatcatctgatcaattaattcaggatttgctcgatcaccccaatgaagttgatgtagaatttacctacaaggaaaaaaaattatgaa

SEQ ID NO: 209554 - DNA, 766 bp, Unknown
  Bacterial polypeptide expressing nucleotide sequence isolated from the Sargasso Sea
catgaataagatcgctatcattggtggtggcgcttggggatatgccttagcgtcagcgatttcaaaaaaaggcttttatccatttatactaacctcttcaaccaaaagagctgaacagattaataatgagtttttattaaggtttaaaagtttagaatcaaaaaatgaacctatagctcactcagaccctgtaaaggtttttggaaatgcttcaataattattttagcaactgaagtcaatcgggtgctttcatttacaaatcaaattaataattattctaaagaaaactgtcatgttttaattgcaagcaaaggttttggacctaatggtgaattattgtcaaatatccttcaagaaggacttaaaaataaaaaaataggagtgttgagtggtcctagttttgcccaagaggttatagattataaaccaacagctgtggttgttgcaggagaactagaaactattgagaaatcaactgaattatttcatacgccagaattcagagtatatggatcaaaagatattattggaacgtctgtttcaggagcaatgaaaaatgttatcgctatagccgctggtatagtatatggactggaacttggagagaatgcgagagctgcaattcttactaggggtcttgctgagactgctaagttggctagaggtcttggaggaaaaactgagacagtttttggtcttgcaggcgctggtgatatggcattaagcagtttgagcatgacctcacgaaacttttcctggggtttt

SEQ ID NO: 209555 - DNA, 585 bp, Unknown
  Bacterial polypeptide expressing nucleotide sequence isolated from the Sargasso Sea
aagataaaacaaaagaagaatttgataaaaaatctgttctggaaagatttaatcatcaacttcagacttcagaaataaataccaagcatacattacttcccgatttttcttggagttgtacagatatatctaaaataaaatctgaatataaattagataaatatattgttttattcccattttgttcaccacatcttactcaaaaaaagtggccttattataatgagctaattgaaaaaataaaaagccagtataatgatcagtacaaaattattttagcacctggtccagatgaaattaatgaatcaaaaaatatcaatgcattatgtgttttagataatggaaaagctttagatatttctcaactttcatcattaattaaagacagttcatttgttattgcgaatgatacaggccccgcacatatggcagcacatttaggagctaaaggtttaactttatttggatctcatacaacagcttacaaggttagtatagaaagagaaaattttaaagcaattcaagttaatgatttagcaaaactatctacagaaaaagtttttgaaaaaattaatttaaactaaa

SEQ ID NO: 209556 - DNA, 748 bp, Unknown
  Bacterial polypeptide expressing nucleotide sequence isolated from the Sargasso Sea
atgaataagatcgctgtcattggtggtggtgcgtgggggtgtgccttagcgtcagcaatattaaaaaaaggttattatccatttatactaacctcttcaacaaaaagagctgaacagattaataatgagtttttatcaaggtttaaaaatttagaatcaagaaatgaacttatagctcactcagaccctgtaaaggtttttggaaatgcttcaataattattttaacaactgaagttaatcgggtgctttcatttataaatgaaattaataattattctgaagagaactgccatgttttagttgctagcaagggttttggacctaatggtgaattattgtcagacattcttcaagaaagaattagtaataaaaaaataggagtattgagtggccctagttttgcccaagaggttatagattataagccaacagctgtggttgttgcaggagaaccagaaactattgagaaatcaactgaattatttcatacgcctgaatttagagtatatggatcaaatgatattattggaacgtcggtttcaggagcaatgaaaaatgttatcgctatagccgctggtatagtatacggactggaacttggagagaatgcaagagctgcaatacttacaaggggtcttgctgagactgctaagttggctaaaggccttggaggacaaactgagacagtttttggtcttgcaggcgctggtgatatggcattaagcagtttgagtatgacctcacgaa

SEQ ID NO: 209557 - DNA, 700 bp, Unknown
  Bacterial polypeptide expressing nucleotide sequence isolated from the Sargasso Sea
gcccgaaccctttagaactatgacagatataattaatcagcatctggggcatttaataggtagtagaattggagctctaagtggtccaaatcttgcaaaagaaatagcagaagaaaaagttgcaggaactgttattgcctctgaagatgagagtataaacattgagattaaatcaatgctgtcctcaagaacatttaaggttttctctagccatgatattcaaggcgtcgaattagctggagccctaaaaaatatttatgctatctgctgtggaattgctcatgcaaaattagttggagaaaatgcattaggattcattgtcacaagaagtatggcagagatgagtagatttgcagtagccaagggagcagatccaattacatttttaggtttagcaggcatgggtgatttaatggcaacctgcacatcaaaactatcaagaaactttcagctaggtgagcttattgcagaagatttttctttgatagatgcaaaagagaaagttgggcaagttgctgaaggcgccaggacacttgaagttgtttatcatgaggcaaataaaatgaatgtaagtatgccgcttgttaattcgttatacagaattttatattctaagtcatcatctgatcaattaattaaggatttgctcgatcaccctaatgaagttgatgtagaatttacctataagaaggaaaaataa

SEQ ID NO: 209558 - DNA, 625 bp, Unknown
  Bacterial polypeptide expressing nucleotide sequence isolated from the Sargasso Sea
cttgaccagtaggcaggcatcctctgcgacacgggtcagtgtacttggcgcgggcagctggggaacgaccatcgcctcactaatggcaagaaatgccgagacgtatctctgggctcggaacccgtctgtcgaagaggaagttaacgagtctcacacaaatcaacgatatttgcccgatgcttcactatcaccgcggcttcaagccacatcgaacctcactgaagcagcgcgaagagcagaggtgctggtgatggcaatcccgtcgcagaattatcgtgaagtccttacgatggctgccccgcacattggagaaggcgtacccattgtcagcctgacaaaaggtcttgaaccgtcaacacgaagacgtatgacggaagtcactgctgaggtctgtcccgggcatgcgtgtggcgtcttaacgggacctaacctggctcgtgaggtgattgctggatttgctgcagcgtgtgtactggcgatgcccgatgagtattcggcgaggacgttgcagccattattccatacacgcgtgttccgggtttaccgcaataccgatgttattggttcagagctggggggcgtgcttaagaatgtcatcgccattgccgcgggtatgggagatggg

SEQ ID NO: 209559 - DNA, 421 bp, Unknown
  Bacterial polypeptide expressing nucleotide sequence isolated from the Sargasso Sea
ggccgctgtgtccgcagccgctgctttcatgagagaagcgggagctaagcgggtgctacctttgcccgtgagtgcgccctttcacacgccattgatgcagcccgcggcaacggtaatggctgaggcttttcaagacgttgcgctgtcagatgcgcaaattccggttatcagtaacgttgacgcacagccccaccgcaaggcgacagatattcgcaggttgctggtgaggcaggtgtcggaacccgtgatgtggactcagtgcgtgatgacgctgctacaggcgggctgtgttcagttcctggaatgtggccccggtaaggtactgaccggcttggtgaagcgcatcagtcgcgacgccagttgcatcgcgctggaggatcccgtggcgctgaccaccgcagtgaaggagtgctcggtatga

SEQ ID NO: 209560 - DNA, 880 bp, Unknown
  Bacterial polypeptide expressing nucleotide sequence isolated from the Sargasso Sea
atttaatttatgggcaaaagaaagcgcagttgtaaacagtattaattcttctcatgaaaatgatattttcttacctaatgttaaactgtctgatttaattgttgcattcaataatcttgagcaaattactaattgtgatttactacttattgtttctcctgctcaatatacaagagaaactttattagaagtttcaaaaactcttaaatctaaaacaccaataatactctgctcaaaaggtattgaaatttcgtccttaagtttaatgagccagatagccgaaagtattttccctgacaatccaattgcaatactctcaggaccgagttttgcaattgatgtagttaataataaaccaacagccgttacattggcctgtaaagatttgaaaataggaaaaaatattgctgaaagtattagtcttcctacttttagaccctatttaagtgaggatttaataggggcacaaattggtggcgctactaaaaatgtaattgccattgctgctggtgtagttgagggacaaaatatgggtgatagtgctcgtgcagctacaatagcgagaggattttctgaaataaaaagattggctattgctatgggtgctaaagaagaaactcttgcagggctatcaggtatgggagatctattgcttacctgtaattcaaaaacttctcgcaattactctttaggtattaaacttggtgagggacaaacgatcgaagaagcaacgaatggcctctcaactattgctgagggaatgtattctgctaaagcaataacaaaattagcagttcaaaataagattgatacgccaataactcaagccgtgaatgatttgatagaggaaaaatactctgttacagacataattgataac

SEQ ID NO: 209561 - DNA, 388 bp, Unknown
  Bacterial polypeptide expressing nucleotide sequence isolated from the Sargasso Sea
aaatgcccgggcagcgctgataacaagagggttggctgagatggctcgcttaaatttagcgaaaggaggaagggctgagacaatcatggggttaagcggtttaggcgatttgagtttaacttgcaccagtcctcaatcgcgcaattactctctggggatagcactgggaaagggcaaagatttagaaaccgtcacaggcgagcgaagctcggttgcggagggggtattttctgccgctgccgtctccactcttgccgccaaacttagaatcgatatgccgatatccgagagcatcaattcagtggtcaatcacggcgcccaagtagaagaagtcatcgcatcattgctctcaaggcaatttagatgggaaactgatgatcggcgttag

SEQ ID NO: 209562 - DNA, 748 bp, Unknown
  Bacterial polypeptide expressing nucleotide sequence isolated from the Sargasso Sea
tatgtctaatattttaatcataaaacatggttctttaggagatatagctcaagcttgtggtgcaattcaagatatatctgaaaatcataataatgatcaaatatacttgttaaccacaaagccatactttgatttatttaaaaaaaacccccatttaacagatgtaatattggacaagagattatccagatttaatctaatttatatttactttttgatgagaaatataaaaaaattaaaaatttctaaggtttatgatttacaaaattcttctagaacaagtttttataaaaaaattttatttccaaattcgaattttaatgtctggtcatcatctgaaacaacacttcctaaagacaaaacaaaagaagaatttgataaaaaatctgttctagagagatttaaccatcaactacagacttcagaaataaataccaaacacacattacttcctgatttttcttggagctgtatagatatatctaaaatcaaattagaatataaattagaaaaatatattgttttatttccattttgttcaccacatctaactcaaaaaaagtggccttattacaatgagctaattgaaaaaataaaaaataaatataatgatcaatacaaaattgtaatagcacctggtccagatgaaatgaatgaatcaaaagatatcaatgcgttatgtgttttagataatggaaaagctttagacatttctcaactttcatcattaataaaagatagttcattt

SEQ ID NO: 209563 - DNA, 743 bp, Unknown
  Bacterial polypeptide expressing nucleotide sequence isolated from the Sargasso Sea
tcttattttagagaaaataagaaatatctaaaaacctttcacctgccaaaaaacataacaccaactcatgatctgaagctttcatgttttggatctgatgctattgtcatgtgcattcctgctcaaaaaacgtctttttttttggagaaatttcacccttttttgccaagaaagcccttaattttatgcgccaaaggtattgaagaaaagactctgcttttgcaatctgatatagtgaaaaattttttacctaagaacgaaatagcaatccttaccggacctagttttgctcaagaaatagcaaatggcaagccaacagcattagcgctagcttgctcagaccaaagaactggccagaaacttcaaactgttttttctaccaaaactattagggtttacttaaacgctgatgttattggctgccaattaggtggttcgttaaaaaatgtaatagcgattgcatgcggtgtagccactggtttaaatttgggagaaagtgctcggatggctctcatgactagaggtttttcagaaacctgtcgtctaggtcttgctatgggaggttcaatggaaacatttctgggattgtctggtatgggagacctagcattgacctgcaattcgccgcattcaagaaacttcaagcttggaattgccctagccaaaaacaaacctttaagtaaacacactactgttgaaggtatcctaacgacgaaggctgcttgtgaactcgctaagaagta

SEQ ID NO: 209564 - DNA, 847 bp, Unknown
  Bacterial polypeptide expressing nucleotide sequence isolated from the Sargasso Sea
ggtttttgattcgaacaatgtaagagcaacttgtgctccaaaagatctcaatgattgtagtcatatttttatcacaactccaagccatgacttcagcaaagttgttgaaaagtttgtattcgaaggagacgaaaaagttgtaataacctgtacgaaaggtcttgaagacagaacctctagactcatgagtgaaattcttctaggtgactttaagctcgatgaaaataaattggtagtactaagcggcccaaatcttgcctcagaaattttaaacaaagaaacgactgctacagtcttagccagcaaaagcaagagcgttttagaagaagtaaacaactttcttaaaactgattattttattccatactatagtaatgacacttccggtgttgaactagcgggagcattaaagaatatatacgcaatagtctcaggctactttaatggaatgaatgttgggcaaaatacaatgggtttcttactaacaaaatctcttgaagaaatgcgcttatacagccaaagtagaggggcaaatctatcaacttttttaggtctagcaggtgtaggagattttttttccacagcactctctcctgattcaaggaatcaccaattcggtaattatttatctaaagggttttcagttgaagagtccttgcagagggtcggagatattgttgagggcttgcgaacatcaaaaattgtctacgaagattgcaagagaaaaaatttgaacttaaaaatacttaaattcctgaatgatgtttacagtgggaaggaggattatgaaggagcaaaaaagctgctgttctctgataaatttcaatctgatgtaagtaaagactag

SEQ ID NO: 209565 - DNA, 514 bp, Unknown
  Bacterial polypeptide expressing nucleotide sequence isolated from the Sargasso Sea
agaaataaatactaaacatacattacttcccgatttttcttggagttgcacatatatatctaaaataagatctgaatataaattagaaaaatatattattctattcccattttgttcaccacatctgactcaaaaaaaatggccttattataatgagttaattgaaaaaataaaaaatcaatataatgatcaatttaaaattgtagtggcacctggcccagatgaaattaatgattcaaaagatattaatgcattatgtattttagataacggaaaagctttagatatttctcaactttcatcattaattaaaaatagttcatttgttattgcaaatgatacaggccctgcacatatggcagcacatttaggagctaaaggtttaactttatttggatctcacactacagcttacaaagttagtattgaaagagagaattttaaagcaattcaagttaatgatttaacaaaactaactacggacaaagttttggaaaaaattaatttaaattaa

SEQ ID NO: 209566 - DNA, 982 bp, Unknown
  Bacterial polypeptide expressing nucleotide sequence isolated from the Sargasso Sea
aatgtcttcttattcaaacatatgtttttatgggggtggtgcttggggccaagctttagctattacacttgcttcccttggaatcaaatcaacacttatagtttctgacaaaatccgggaagtagatattaataatcatatatcaaaaagatttcctgaagctaagttaagccctcttataaaagcatcgatagataaaaatcaaataattaaaacatgtgatttaatttttattacaacagaaagtaaaagggtattagatgcaattaatcaggttgcttttttgtcagataaaaatgttcacgttgttattacatcaaaaggttttgcaacgaacaaaggtgaaacatttagtgaggttgttgaaagtgattttccaaatatgaaattatctatattaacaggaccaacctttgctgacgagatagctaataatcaacctgccgcagctgtgatcgcaaataaggttattgaacaagctaactcaatttgtgaattattccatcattcaaatcttagactatatcctagtaatgatccacaaggagtgtccattgcaggagctgttaaaaatataattgcaattggagctggtattattgaaggtttaaaattaggtgataacgcaaaagctgctttaattacaagaggcatttctgaaacatccgaattaattgaaaaagcaggaggaaattatacttctgcctttggtctggcaggtataggagatatgtctttaacatgcagcggcccacattcaagaaatatggcatatggaatgaaaattgtgaaaaataacaatgagccagcaaaagaacttgtagaaggtttaaacgcaataaatgctactattgcattatctgaaaaactagaattagagttgcctataatgacctctattaaaaaaatactaaataaagaggctaatgtagatgagataattaaaaaactgttatcaagaccaattaaaaatgaaatttaa

SEQ ID NO: 209567 - DNA, 550 bp, Unknown
  Bacterial polypeptide expressing nucleotide sequence isolated from the Sargasso Sea
atgcagatctttgtagtctcggaagagaaattctgtctttcaagcacctttaagatatatacaagcagtgatattaagggcatagaacttgcgggggctctaaaaaatatttatgcaattatttctggttattgtcattctcttgatgttggtgagaacgccatcggacttatattaacaaggagcatggcagaaatgagcaattttgcggtaattaaaggggcaaatccaattacttttttaggccttgcaggaatgggcgaccttgtcgcaacatgtttttcaaagttatcaagaaattatcagtttggatgggcaattggagaaggtcttgatattgaatcagcaaaaaataaagtgggtcaggtagcagaaggattgtatactattaaaatcattcacaacgaggtttcttcatctgaaataaagatgcctcttgtgtcaggtatgcatgaaatattatttaataacggaagcaaagaattactcctggagcagatcataaatagtgaaatttatgttgatgtgaattttgatgtagaatcatagc

SEQ ID NO: 209568 - DNA, 670 bp, Unknown
  Bacterial polypeptide expressing nucleotide sequence isolated from the Sargasso Sea
aatgaatagaaaaactatttctgtcctaggagggggaagttggggcacagtcttagctcaccttgcttcattgaatggaaataaagtaactctgtggatgcgagatgaagaaattgcaaaagaaattaatcaaactcacattaatcaacgatatctgccgaggttaaatctagaatcaaatctcgtagcaacccctcatattgaggaagtatctgattcagacacaataattttttgtataccaagcgacgcttttagggaggtatcgtctttagcagcaaactttattcaagaaagttcttatctgattaccgccactaaaggtgtcgaaaaagatggatttagtttgatgagcaatattcttgaggaatattatcctaagaatcctataggtgtcttaagtggacctaatctagcagaagaaatagccaatcatcacttatctggaacggttatagctagcaaagataaagatctgagaagagagaccattgaagatttatcaacagattattttaaagtttatgagaatgatgatccttatggtgtagaaatgggtggtgcattaaagaacatatatgcaattgcatgcggtatagccgctggattaaattcaggagaaaatactattggcatgattatgacaagagggttaggcgaaatgggacgt

SEQ ID NO: 209569 - DNA, 483 bp, Unknown
  Bacterial polypeptide expressing nucleotide sequence isolated from the Sargasso Sea
agtcattccgggccagccagctgcgcgtctatgccagcgacgacccgcttggcgtggcgatcggcggcaccatgaagaatgtcatcgcgatcgccgccggatgcgccataggcctcggcctcggcgacaacgcgcgcgcggcgatcattacccgcggacttgccgaaatggcgcggctcgccgccgccgaaggcgcggaagccgaaaccatctacgggctgtccggggcgggcgaccttgcgctgtcctgcgctgggccacattcacgcaacatggcctacgggctggcgctggggcggggcgaaacacccgatgcacgccttgccgaaggccggaacacggtgtcggcacttgccgcgcggggccgcgagacaagagtggagcttccgatcaccaatggtgtcgaccgggtcgtgaatggcggcgcgccgcttggcgatgtggtcgcgtcattgctggcacggccagccggatcagaatagg

SEQ ID NO: 209570 - DNA, 907 bp, Unknown
  Bacterial polypeptide expressing nucleotide sequence isolated from the Sargasso Sea
catggtcctgacgattggggtcctgggaggaggtgcttggggaagcaccctggccggcctactggccgaggctggacaccacgttcagatctggcgtcgttgccaaggggcagagggtctgcaagctcttgaaggtgttgagctcctggtcggggctacagctctggttggggtgaaaggaatcgctgaggagatgcgttcctgggcctccagaccgttgctgagttgttcgaagggtttggatccagccagtagcaagacagcgagtgcgctgtggtcggtgtcttgcccccaatggccacttgtggtgcttagtggtccgaacctcgccagtgagcttcaacagggattaccagcggccagcgtgctggcaggccatgacgatgctttattgactgagcttcagaaggaactgagcacagagcagcttcgcttgtatcgcaacaacgatccgctcggtactgaattagctggaggactcaaaaacgtcatggctattgccgctggaatctgtgatggattgcagctgggtgccaatgcccgggcctctttattgacccgtgccttagctgaaatggccacggtgctggatgccatgggtggttgtcaggagaccctctatggcctagccggtatcggtgacctgttggcgacagccacaagccccctgagtcgtaactatcgctttggtgtctatttggccgaaggcctcaatcgtgatgacgctctcaagcgtgtcggagcaactgtggaaggggtgccaacttgtgaagccatcgctgcattagggcaacagcagcagtggtcattgccaatcaccgagaacgtggcctcgctattgcgcgcagagttgtctcccaccgatgcgctcagccaattgatgcgacgcgagctgcgctgcgaatga

SEQ ID NO: 209571 - DNA, 565 bp, Unknown
  Bacterial polypeptide expressing nucleotide sequence isolated from the Sargasso Sea
gatgtttggcgatatcgcccgctttctgctcaataccgtctttacgctgttcggcgcggcgttgctgctgcgcgcatggctgcaggtcgtgcgcatgccgccgtacaatccggtcacgaacgccgtgctgcaggtcaccaactggatcgtgctgcccttgcggcacgtcctgcacagtacccgcaacatcgactgggcgagcctcgccgcggcgctgatcgcggcaatcgtctatgtggtgctgatggtggtgctcacgggcgccgatccgctcacgctggtgccgacgctgctgatcgttgccgtgctgaccgtcatcaagtgggcgttgaatctgatcatctggatgacgattctgatggcgctgctgtcctggctcaatccgcgctcaccggccatgccgatcctgtatcagctgaccgcaccgttcctgaatccgctgcgccgtgtggtgccgcaactcggcggcctcgacctctcgccgattctgctgttcgtgatcgtgcaggtgctgctgatggtggtgacgcgtgcggccgttcagttgacctacttcgtcatctga

SEQ ID NO: 209572 - DNA, 1006 bp, Unknown
  Bacterial polypeptide expressing nucleotide sequence isolated from the Sargasso Sea
tatgatacaggataattatagaaatatttctattgtcggagctggcgcatggggtacagcccttgccgaagtaatgagtcggcaaggtcatcaaattaatttatgggcaaaagaaagcgcagttgtaaacagtattaattcttctcatgaaaatgatgttttcttacctaatgttaaactgtctgatttaattgttgcgttcaataatcttgagcaaattactaattgtgatttactacttgttgtttctcctgctcaatatacaagagaaactttattagaggtttcaaaaactcttaaatctgagacaccaataatactctgctcaaaaggtattgaaatctcgtccttaagtttaatgagccagatagccgaaagtatttttcctgacaatccaattgcaatactctcaggaccgagttttgcaattgatgtagttaataataaaccaacagccgttacattggcttgtaaagatttgaaaataggaaaaaatattgctgaaagtattagtcttcctacttttaggccctatttaagtgaggatgtaataggggcgcaaattggtggcgctactaaaaatgtaattgctattgctgctggtgtagttgaaggacaaaagatgggtgatagtgctcgtgcagctacaatagcgagaggattttctgaaataaaaagattggctattgctatgggtggtaaagaagaaactcttgcagggctatcaggtatgggagatctattacttacctgtaattctaaaacttctcgtaattactctttaggtattaaacttggtgagggacaaacgatcgaagaagcaacgaatggcctctcaactattgctgaaggaatgtattctgctaaagcaataacaaaattagcagttcaaaataagattgatatgccaataactcaagccgtgaatgatttgatagaggaaaaatactctgttacagacataattgataaccttcttaatagaccaataaaagaggaaaactaa

SEQ ID NO: 209573 - DNA, 334 bp, Unknown
  Bacterial polypeptide expressing nucleotide sequence isolated from the Sargasso Sea
aagctagaagagattattccacaatctcaaataatatttttagccactccaagtaaaattattaatgatgttcttgagaggctctcaggtttctcgatggataataagatgataatttcatgcactaagggcattaatgaaaatccttttatgacaatgtcccaaacaatagaaaaacactttaataatcctagtattaaggtaggtgtcttaagcggacctaatttagctagagaaattgcggacaaaaaagtcgctggaacggttatagcaagtaaacatgcagatctttgtagtctcggaagagaaattctgtctttcaagcacctttaag

SEQ ID NO: 209574 - DNA, 829 bp, Unknown
  Bacterial polypeptide expressing nucleotide sequence isolated from the Sargasso Sea
actgtctgatttaattgttgcattcaataatcttgaacaaattactaattgtgatttactacttgttgtttctcctgctcaatatacaagagaaactttattagaggtttcaaaaactcttaaatctgagacaccaataatactctgctcaaaaggtattgaaatctcgtccttaagtttaatgagccagatagccgaaagtatttttcctgacaatccaattgcgatactctcaggaccgagttttgcaattgatgtagttaataataaaccaacagccgttacattggcttgtaaagatttgaaaataggaaaaaatattgctgaaagtattagtcttcctacttttaggccctatttaagtgaggatgtaataggggcgcaaattggtggcgctactaaaaatgtaattgctattgctgctggtgtagttgaaggacaaaagatgggtgatagtgctcgtgcagctacaatagcgagaggattttctgaaataaaaagattggctattgctatgggtggtaaagaagaaactcttgcagggctatcaggtatgggagatctattacttacctgtaattctaaaacttctcgtaattactctttaggtattaaacttggtgagggacaaacgatcgaagaagcaacgaatggcctctcaactattgctgaaggaatgtattctgctaaagcaataacaaaattagcagttcaaaataagattgatatgccaataactcaagccgtgaatgatttgatagaggaaaaatactctgttacagacataattgataaccttcttaatagaccaataaaagaggaaaactaa

SEQ ID NO: 209575 - DNA, 937 bp, Unknown
  Bacterial polypeptide expressing nucleotide sequence isolated from the Sargasso Sea
tatgtctaatattttaatcataaaacatggttctttaggtgatatagcccaagcaagtggtgcaattcaagatatatctgaaaatcataataatgatcaaatatatttattaacaacaaagccatattttgatttatttaaaaaaaatcctcacttaacagatataattctagacaggagattatctagatttaatctgatctatctttattttttgatgagaaaaataaaaaaactaaaaatttctaaggtttatgacttacaaaattcatcaagaaccagtttttataaaaaaattttatttccaaattcaaattttaatatctggtcatcatctgaaacaacgctaccaaaagataaaacaaaagaagaatttgataaaaaatctgttctagagaggtttaatcatcaactacaaacttcagaaataaataccaagcacacaatgcttcccgatttttcttggagctgtaatgatatatctaaaataaaatcagaatataaattagaaaaatatattctactatttcctttttgttcaccgcatcttactcaaaaaaagtggccttattataatgagctaatcgaaaaaattaaaggccaatacaataatcaattcaaaatagcagttgcacctggcccagatgaaattaatgactcaaaacacattaatgcattatgtattttagataacggaaaagctttggatatttcacaactttcatcattaataaaagatagttcatttgttattgcaaatgatacaggtcctgcacatatggcggcccatttaggagttaaaggtttaactttatttggatctcacactacagcttataaagtcagcattgaaagagaaaattttaaagcaattcaagttaatgatttaacaaaactaactacggacaaagttttggaaaaaattaatttaaattaa

SEQ ID NO: 209576 - DNA, 457 bp, Unknown
  Bacterial polypeptide expressing nucleotide sequence isolated from the Sargasso Sea
aatggctggcgcattaaaaaacatttatgcagtaatatgcggaatggctgaatcactaaaagttggcgaaaatgctattggactaatactaactcgtagcatggctgagatgagtcgctttgctgttgcaaaaggtgcaaatccgataacatttttaggattatcgggaatgggtgatttagttgcaacatgcatgtcaactttatcaaggaattatcaacttggttttaatattggatctggcatgtctttatcaaaggcaaaggaaagcgttggtcaagttgctgagggagtaagaactcttgaagttgttttaaaagaatcatcaaaattgaatattaaaatgccactagtcgaatctatgtataatataatttacaataatgcttcaccaaacacactaattgatgatttaattaataatccgagtgaggttgatgtagaatttaattactga

SEQ ID NO: 209577 - DNA, 358 bp, Unknown
  Bacterial polypeptide expressing nucleotide sequence isolated from the Sargasso Sea
ttggagttaaaatgggggggagtgcctgaaaccttttcgggaatggctggtttgggagatctggttttaactggaaccggttccctttcccggaatcatactcttgggttccgaatcggagaaggactgtcacctgaagaaatatttcaaaatcaactaacggttaccgaaggagcggctacttcagtttcactccaatcattaagccttcatcatcaagtagaaatgcctatttgtgaagcagtctatcggattctttaccaagggcaggctcccatggaagcattgactcaacttctggaaagacaaatgcctgaatccgaatccatcgattggggccaaaatagttcagattaat

SEQ ID NO: 209578 - DNA, 745 bp, Unknown
  Bacterial polypeptide expressing nucleotide sequence isolated from the Sargasso Sea
aatgcaaaatcttcatgccaacatatatggtgcaggatcatggtcgcaagctatagcacatgtgcttgtaaagaatataaatcaaattactgtaatttatagaaacgataataattttgtaaagtctggtgaaaataaaaagataaatttttctaatgacttactatcttcaataaactccaataatgaccctttaattgtttgctcaccagtaagctctcttaaagatctaggggagaatttaaaaaaaattaagttttcccgtcctgtgcttttatgctgtaaggggattgagtcaaatactggaaaatttccatcagagattttagaggaatttatttcattggatcaaatcgctatcctaacaggaccttcgttttcggatgaagtacttaacgataaaccaactgctgtaatcatttcagggcaaaaagcagaagttattgagctatttaccacaatgtttcattcgataaattttagagtttacaactcaaatgatgttattgggtgtcaacttggaggagccttaaaaaatattttatcaatagcagttgggatagcagaagggttaaaattaggggctaacgcaaaagctgcattaatttcaagaggtattttagagatgaaatatcttggggataaagttcagtgtgacccactaactattttcgggcttagcgggttaggtgatatagtgctcactgcaaatgacgatttatcacgcaacagatcttttggataa

SEQ ID NO: 209579 - DNA, 823 bp, Unknown
  Bacterial polypeptide expressing nucleotide sequence isolated from the Sargasso Sea
ttaagattacctggctatattctacctcagaatatcatagtgacaaatgatattaatcagatggaaaattgttccataattttaattgctgtacctatgcaacaattaagatctgtagtggagttacatagatcacgtttggaagggaagatactagttgcatgctgcaaaggctttgaggtgtctactggtttaggaccaacttcaatccttgagatggcatcaaataagacagcagtattaactggtccaagttttgctacagatttggcttcagggtttcctactgcgctcaccgttgcttccaaagtagaaggtttggcacagtatatacaaagcgaattgggaacagaaacattaaggctttattggtctgatgacccaattggagctgaatttggcggagctttgaagaatgttatcgctattgggtgtggggttactattggtgctggctatggaagtagctctcgtgccgcattaatgacgcgcgggtattccgaaatcattagtattgccccttattttggtgcaaaaccagaaacgctatcaggcctgtccggcttaggagacttaagtttaacatgcatgtcctctgagtctagaaactaccgatatgggcttgcacttggaaaacagcagtcgtttgataaaaatattacggtagagggcaccagtacttccagtgctataattttaaaggctaaagaatttaaacttgatacgccagtaatggccgcaattaacaaccttgtggtaggtaaagtttcactaactgtggcaatacaaagccttttatcaaggccgcctaagaaagaataaa

SEQ ID NO: 209580 - DNA, 1000 bp, Unknown
  Bacterial polypeptide expressing nucleotide sequence isolated from the Sargasso Sea
atgggcgaaacttcttttttagtttttggtgcaggtgcttgggggacggctctttcgcttcagctgcataagtctggaaatgaggtttttttgagctcatttgatcagacaaatctaaaaaatattgcgtccaccagaataaaccataaatatctgccgggagttaggctgccagatgatattcatgttatggaagcgactaaagatcttcttggcgaaatagactgtgttgtcatatgtgtaaagagtccatatttcagaaaagcgctatcagaattaagccaagcccctgcttcattcaaagtgctttgggcaaccaaaggttttgatctagaaagcggtgcactgttatccaagattgtatctgaatattttgatgctgatattgaacatggtgttttgtctgggcctacttttgctgaagagcttgctctaagcaaaccaactgcaatcacgcttgctacaaatacaatcaatgatccgagtcgattagcatcaaaaatgtcaaatgagaacttaagggtatatatatccgccgacccaattggtgttcagcttggaggaattttaaaaaatattgttgcaattgcatcaggaatttcagatgcaatggaaatgggtgcaaatgccagagctgctttaattactcgtggcgcagaggaaatgaaagccttagggacgagcatgggtgcgaatgaatcaaccttctcgggcttatcaggcattggtgacttggtcttgagctcgacagatgaccaatccagaaataggcagctgggaatacatattggcagaggtggaaaccttgatagcttcagagaagagcacaatggaacgcctgaaggagtccatgctgttagcgcattggtcaatactggaatagtgaatgatgatgactttcctattacttccagagtttacaaaatactgtttgaaggtctgtctgcaaaagaggctggcgcggagcttatgaacaggccgctccgctttgaaaactaag

SEQ ID NO: 209581 - DNA, 820 bp, Unknown
  Bacterial polypeptide expressing nucleotide sequence isolated from the Sargasso Sea
aatgattttagataaaaaatataaagaaactccaatcggagtaattggagcgggtgcttggggaacggcaatttcaaagcttctttgtaaaaacggtagtgatgttaaaatctggtgccatagtcctgagactgcaaaagatataaatactaatcatactaattcaaaatttttgtccgatattaaattacctgaatctcttcaagcaacaattgatttaatagaaatagtaaaatcttgtcgcattttggtttctactgttccttcacatgtcacccgcaaaatagcaaaaataataaatcccaatataacaactaatcattttctagtgatcctcagtaaaggcattgaagaaaattcattggcacttttgagcgaaatatttatggaagaattagatactttaccaaaaatagcagtaatctcgggccctactttcgcaagagaagttgcgatggacttaccttcagctgctttactagcatgcgatgataacaatacaaagattattttacaaaaaatatttcattcagacagatttagattatatttgagtaatgacatgataggagcacaaataggaggggctataaaaaatgttgttgcaattgcttctggaatagcggatggaatgaagttaggtctcaacgctagagctgctctaatttgtagaggcgtagctgaaatgtcacgtttaggagtaaaaatgggcggatctccggaaactttttcaggaatatcaggagtaggtgatctgatcttgacagcaactgggaatctttctcgtaattactcgctaggctataaactgggacaagga

SEQ ID NO: 209582 - DNA, 937 bp, Unknown
  Bacterial polypeptide expressing nucleotide sequence isolated from the Sargasso Sea
tatgtctaatattttaataataaaacacggttctttaggagatatagcgcaagcttgtggtgcaattcaagatatatctgaaaatcataataacgatcaaatatacttattaaccacaaagccatacattgatttatttaaaaaaaatccccatttaacagatgtaatattagacaagagactatctaggtttaatttaatttacctttattttttgatgagaaaaataaaaaaattaaaaatttccaaggtttatgatttgcaaaattcttctagatcaagtttttataaaaaaattttatttcctagttcaaattttaatacctggtcttcatctgaaacaacacttccaaaagatacaacaaaagaagaatttgataaaaaatctgttctggagagatttgaccatcaactacagacatcagaaataaatacaaagcatacaatgctccctgatttttcttggagctgcacagatatttctaaaataaaatcagaatataaattggaaaaatatattattttatttccattttgttcacctcatcttgctcaaaaaaagtggccttattacaatgagctaattgaaaaaataaaaaataaatataatgatcagtacaaaattgtagtagcgcctggcccagacgaaattaatgaatcaaaagatatcaatgcattatgtattttagataatggaaaagctttagatatttctcaactttcttcattaattaaatatagtacatttgttattgcaaatgatacaggtcctgcacatatggcagcacatttaggagccaaaggtttaactttatttggatctcatacaacagcttacaaagtaagtattgaaagagagaactttaaagcaattcaagttaatgatttagcaaaactatctacaaataaagttttagaaaaaattaatttaaattaa

SEQ ID NO: 209583 - DNA, 271 bp, Unknown
  Bacterial polypeptide expressing nucleotide sequence isolated from the Sargasso Sea
aatgagttcacagtcattattagttcaaggtgctggatcttggggaactgcgttggctatggttttatctcgtaattgttatcaaatttatttatgggatactaatttagatacgataaaggcgattagatcaaatagatgcaatgaaagatacctgcctgggcaaaaaattccagaaaatataataccgatcgaatcgattgaggaggcgccggacacaataaataaagttatttgtgcggtaccaagtcacgcagttcgaagtagttga

SEQ ID NO: 209584 - DNA, 961 bp, Unknown
  Bacterial polypeptide expressing nucleotide sequence isolated from the Sargasso Sea
atgacttttggaattattggttccggttcttttggaaccgctctatcgatttctttatcatctacaaataaaaagctaatactttggacaagaaatcaggatgtagtaaactctgttcaggaaataagggaaaatcggttaagattacctggctatattctacctcagaatatcatagtgacaaatgatatcaatcagatgagaaattgttccataattttaattgctgtacctatgcaacaattaagatctgtagtggagctacatagatcaagtttggaggggaagatactagttgcatgctgcaaaggctttgaagtgtctactggtctgggaccaacttcaatccttgagatggcatcaaataggacagcagtattaactggtccaagttttgctgcagatttggcttcagggtttcctactgcgctgaccgttgcttctaaagtagaaggtttggcacagtatattcaaagcgaattgggaacagaaacattaaggctttattggtctgatgacccaattggagctgaatttggcggggctttgaagaatgttatcgctattgggtgtggggttactattggcgctggctatggaagtagctctcgtgccgcattaatgacgcgcgggtattcagaaatcataagtattgctccttattttggtgcaaaaccagaaacgttatcaggcctgtctggcttaggagatttaagtttaacatgcatgtcctctgagtctagaaattaccgatatgggcttgcacttggcaaacagcagtcgtttgataaaaatattacggtagagggcaccagtacttccagtgctataattttaaaagctaaagaatttaaacttgatacgccagtaatggcagcaattaataaccttgtggtaggtaaaatttcagtaagtgtggcaatacagagccttttatcaaggccgcctaagaaagaataaa

SEQ ID NO: 209585 - DNA, 886 bp, Unknown
  Bacterial polypeptide expressing nucleotide sequence isolated from the Sargasso Sea
cttgaaaataggaatcattggatctggaaaatttggtacttctttggcatttaattttgccaaaaactttaaaaaagtttatctttggaacagaacacaaacaaataaaaatgaacttgtagaaaaaataaataacttaaataaagggattttaatcaaaaaattaaatcctaatttgaaaataattaaatctttaaaaaaagttgcggaaaattctgacgtcattttactttgtataaatgcacaaagtatgtttgattttttagcaaaaaactttaattcattaaaaaataaaccactagttttttgttccaagggtattgatacgaaatattgtttatttcaaactgaaattgcagaaaggtttctagacaaaaaactattttctgttctctctggacctggatttgcttcagatattgtgagagaaaaacctatagctctttcacttgcttgtaaaaatgtaaatttaggaaaaaaattacaatatattctttcttctcaaagcattagaatttatttaaataatgatttaataggaacacaattaggaggtgctcttaaaaatgtaatagctattgcgtgtggaattgcagatgcaaacgaattaggagaaggtgcaaagagtgctataattacgagaggattttctgaaataagacaaattggtaaaacttttgggtgtaaaattgaaactctttttggtctttcttgtttaggtgatcttacgttaacatgtaattctaaactttctagaaattataattttggattaaaaattggaaataatataaaaaataaaaaagacaataaagaaacaatagaaggagaaaaaacagctagtgctgctgttttaatttctaaaaaatatcaattagatttacct

SEQ ID NO: 209586 - DNA, 569 bp, Unknown
  Bacterial polypeptide expressing nucleotide sequence isolated from the Sargasso Sea
agcaggcacagtcatagcaagtccaaatgaaagtttaataaatatagttaaatcagttttgtcttctgaaacttttaaaatatattcaagtaaagatatgcaaggagttgaaatggctggcgcattaaaaaatatttatgcagtaatatgcggaatggctgaatcactaaaagttggcgaaaatgctatcggattaatactaactcgtagcatggctgagatgagtcggtttgctgttgcaaaaggtgcaaatcctattacatttttaggattatcgggaatgggtgatttggttgcaacatgcatgtcaactttatcaaggaattatcaacttggttttaatattggatctggcatgtctttatcaaaggcaaaggaaagcgttggtcaagttgctgagggagtaaggactcttgaagttgttttaaaagaatcatcaaaattgaatattaaaatgccattagtcgaatctatgtataatataatttacaataatgcttcaccaaaaacacttattgatgatttaattaataatccaaatgaggttgatgtagaatttaattattgag

SEQ ID NO: 209587 - DNA, 739 bp, Unknown
  Bacterial polypeptide expressing nucleotide sequence isolated from the Sargasso Sea
tatgaataaaaattacaaaatttgcgttctcggtggaggaagctttggaactgtattagcaaacttagctgcatcgaatggacatgatgtatctctatgggttaaagattctgataaagctttaagaataaattctgaaagcagaaatactgaatatcatcccgaactcaaactctctaataatattattgcttctgagaagctagaagaaattattccaaaatctgaaataatatttgtagctactcctagtaaaattattaatgatgtccttgatagactctctgatttctcgatggacaataagatgataatttcatgcactaagggtattaatgaaaaacctttcatgacaatgtctgaaacaattgaaaaacactttaataattccagtatcaaggtgggtgttttaagcggaccaaatttagcaagagaaattgcagatgaaaaggttgctggaacggttatagcaagcaagcatgcagatctttgtcatctaggaagggaaattctgtcttcaagtacttttaagatatacacaagcgcagatactcaaggtatagaacttgcgggggctttaaaaaatatttatgcaattatatcgggttattgtcattctcttgatgtaggtgagaacgctatcggacttatactgacaaggagcatggcagaaatgagcaactttgctgttagtaaaggtgcaaatccaattacttttttaggtcttgcaggaatgggt

SEQ ID NO: 209588 - DNA, 877 bp, Unknown
  Bacterial polypeptide expressing nucleotide sequence isolated from the Sargasso Sea
aatggtggacaatcgaaccaacagttgctacctgcccaatattgtcttacctgaaaatattaatatattttcgaatattgaagactctgttagagatgctaatactgtaattgttgcgttaccaagtgaaactgttcgagatacgttcttacaattaaaaaaaacaataaacagtcaagccggaatatcatgggctagtaagggtcttgaggttaaatcaggactattgattcactcggtttgtgaagaaatttttgggaaaagacatcccatggcagtgatatcagggccttcttttgcagttgaagttgcaaataaaaaaccaaccgcagttacgatcgcctctagttcaaaaaactttagaaaccagcttgcagaggatctatcagatcagaactttcgtgtatacacatcagatgacatcataggcgctgaaattggaggagcgataaagaatataattgcaatcggtgccggtatctcagatggattaaattatggagaaaatgccaagattgcacttattacgagaggattacatgaaatccaaaaactgggtgtcgccttgggcgcgaaaaaagaaaccttctctggtttatctggagcaggagatcttttcttgacttgcacaagtaacctttcaagaaacagaagattgggccttgcgctagcaaatggtagcaatttgtcagagtttgaatcaaaaaccatgcaagttgttgaaggagtaaaagcatctgaagcagtgcacaagttatcaaaaaaaatgagcatttcgatgcctatttgtgaaattatttaccaaattttatttcatcaacttgatccaaaaaaagcagcaattatgttaatgagtagagatcttcaagacgaatag

SEQ ID NO: 209589 - DNA, 520 bp, Unknown
  Bacterial polypeptide expressing nucleotide sequence isolated from the Sargasso Sea
tatggaaatacttggaacagatttttttagagtttacgaaaatgatgatccatatggagttgagatgggaggtgcgatcaagaatatttatgccatagcatgcggcatagctgatggccttaattctggtgaaaacacggttggcatgattatgacaagaggacttggtgaaatgagtagattagcagttgaattaggagcaaatccacaaacatttttaggattatcaggagtcggtgatttaattacaacttgcgcatctcctttaagcagaaatcataaatttggaaaatatatcggagaaggattatcggtagaaagtgcaacacatgaaataggccaaacagtggagggcttaaagactttaaaagtagttaaagttcttgctgatgagagaaatataaacatgccaatagtagattctctgtacaaaatcatctataaaggaaaggatcttaatggttcaattcataatattttgggtgaagaccagattaaagatgtagaattttcaaaataa

SEQ ID NO: 209590 - DNA, 979 bp, Unknown
  Bacterial polypeptide expressing nucleotide sequence isolated from the Sargasso Sea
ttttggactgtattggctaatcttgcagcatcaaatggaagtaatgttgctttatgggttagggactctgagcaggcgttaagaataaattctgaaggggcaaattctatatatcatccagaattaaaactttcagacaatattatggcctcggaagatctttatgaagttgtcaaaaatgcagatttaatttttattgcaacgccaagtaaaatttttgaaaaaattataattagaatttcaaaaattgttaaaagggactgttatgttatttcatgcacaaagggaatattagataaccccttcagaaccatgacagagattatctcaagtaataatatcaaacattttggtgttttaagtggtcctaatcttgctaaagaaattgctgaaaataaggttgctggaacggtaatcgcaagcaacgatcaacaaatgattacatcagtcaaagaggttttatcgtctgatacattcaaaatatattctagtaatgatattcaaggtgttgaattagcaggagcaatgaaaaatatttatgccattacgtgcggacttgcagagtcacttaatgttggagaaaatgctttaggattaattttaactagaagcatggcagaaatgagtcgttttgctgttgcaaaaggcgcaaatcccataacatttcttggattatctggaatgggtgatttagtggcaacttgtacatctgttctctcaagaaattatcagttaggttttaatattggaaaaggtatgaacttaatagatgcaaagaaaagtgtagggcaggttgctgaaggcattaaaactttggaagtaataagaaatgaatcattaaatttaaatattaaaatgccattagttgaatctatgtataatataatttataaagaagactcaccaaatgtattaattaatgatttggtcaacaatccaaacgaagttgatgtagagtttaggtataaagatgaataat

SEQ ID NO: 209591 - DNA, 517 bp, Unknown
  Bacterial polypeptide expressing nucleotide sequence isolated from the Sargasso Sea
aaatatgttcaaggtctattttcaacgaataattttagagtctatacaaattcggatataaaaggcgttgaaattggtgggtcagcaaaaaatgtaattgctatcgcagctgggttttgtgatggtgctgggtatggtgacaatacaaaagctgcgcttataacacgtggtctaaatgaaatatcgctgttaggtaaagagttaggtgcgaagtcaagcactttttttggattagctggaataggtgacttgatggttacatgtaatagtatccatagtagaaataggagactaggtgaattggttggtcggggggaagatttatctaaaatattatcacaaagtcatatggtagcagagggagttaaaacatcatattcaatttatagtttgagagctaagctaaatattgaaatgcctatttgtgaatctgtttatcgcgttttatataataattcaaatcctataaaagaggttgataggttaatgacaagaaatctaagatcagaaaattaat

SEQ ID NO: 209592 - DNA, 739 bp, Unknown
  Bacterial polypeptide expressing nucleotide sequence isolated from the Sargasso Sea
ctactactactacccactactactactaccactactactactactactactactactactactactactactactactactactactagtactactactaccactactactactgctactactaaaacatcagagaggtctcgcaatcgtgctcttcgtcttcaacgtcaatgtcaacctgcagagtctggaccaggtcacgttgccactggcgtctcgattcaggttccagatactcaaccagagtctggaccaagtcacgctgccactgccgtctcgattcgagatattcaaccaaagtctggaccaggtcacggtgttgtctcgattccagatactcaaccagagtctggaccaagtcacgctgccggtgttgtcgcgattccagatattcaaccagagtctggaccaggtcacgctgccgatgccacctcgacgcaggcccgggagatcgaaaactacttcgcaacacccgagtaccgcgacacactcgacgagctgttggagaaagccgtcgagcctcttgacgcacccgggcatggatccggtcatgttgctgtcggtgcttcttcgttgtcatcaagctggaggcctgaagacgcaccagggcatggaccaggtcatgttgccatcgagcctgcttcgtcgtcattcagccggaaacggcgactcgatgagcgcagtagtggcagcgatgatgatagcgatggctcctcggagctcggggctgaccgcactc

SEQ ID NO: 209593 - DNA, 712 bp, Unknown
  Bacterial polypeptide expressing nucleotide sequence isolated from the Sargasso Sea
aatgataaaaacctattggtgggcaacaaaggggtttgacccaagtaatggggatttactgtcatcaatggttgatgaggtgatcggtgcctctacgaaaacagcagtcctctctggaccatcctttgctcaagagttggctggcggaaagccggcggcaataactatggctacagacacaatcaacaattctgctttgctagctgaatcaatgtcaaatgagtctttaaggatctatctttcaagcgatcctgttggagttcagttgggtggtggcttaaaaaatgttgttgcgatagctgccggtatttctgatggtcttggtttaggggcaaacgccaaggctgctttggttacgcggggactggatgaaataacctctctgggcattcttttgggtgcttctgaaaaaacatttatgggtctctctggtgttggtgaccttatgttgagctcttccgacgataaatcaagaaacagaagcttgggtctcgcaataggaagaggcttatcttttaatgatgcaactaagcttcaaaacggaaccccggagggtgcgcacgctataaaaacacttgttgaaaacagcgttattaataataaacagccggttttatattcggtttatgcggccttgtattctggtgctaaattaagcgctatcgtcaaagggctgatgttacgcccaatcaaagaagagggtttacgctaa

SEQ ID NO: 209594 - DNA, 799 bp, Unknown
  Bacterial polypeptide expressing nucleotide sequence isolated from the Sargasso Sea
aatgaaaaatgcttccatggtttttatagcgaccccaagtatagtctttgaacagattattgaacgtattagaaatttattagaagaagattcatatgttatttcatgtacaaaaggcatactaggacaaccatttagatcgcttacagataccataatatccgatgttggtattaatatcggtgtcttaagcggaccaaatttagcgaaagaaattgcagataataaagttgcaggatctgtaattgctagcttagatagtgatttggtagactctgtaaaaacagtgctttcatcagcaacatttaaaatttattctagtaatgatgtgcaaggtgttgagcttgctggcgcccttaaaaatatatatgcaattatatgcggtttagctgaagcaatagaagttggggaaaatgctatagggttgatattaacaaggagcatggctgagatgagtagatttgcggttgcaaaaggcgcaaatccaattacgtttttaggtcttgctggtatgggagatcttgttgcgacttgcacctcgaggctatcaagaaattatcagttgggttataacattggtaagggaatggatttaaataaagcaaaagaagatattggccaagttgctgaaggaataagaactttagatgtcattaaaaatgaatcatcagaattagatattaagatgccactagttgaatccttgtataatataatatacgaagagggacagccccatgcattaattagtgatttagttaaaaatccacatgaagttgatgtagaatttaaatattga

SEQ ID NO: 209595 - DNA, 922 bp, Unknown
  Bacterial polypeptide expressing nucleotide sequence isolated from the Sargasso Sea
ccttagcgtcagcgatttcaaaaaagacttttatccatttatactaacctcttcgaccaaaagagctaaacagattaataatgagtttttatcaaggtttaaaagtttagaatcaaaaaatgaacttatagctcactcagatcctgtaaaagtttttggaaatgcttcaataattattttagcaactgaagttaatcgggtgctttcatttacaaatcaaattaataattattctgaggaaaactgccatgttttaattgctagcaaaggttttggacctaatggtaaattattgtcaaacatccttcaagaaagacttaataataaaaaaataggagtcttgagtggacctagttttgcccaagaggttatagaatttaaaccaacagctgtggttgttgcaggtgaactagaaactattgaaaaatcaattgaattatttcattcacctgaatttagagtatatggatcgaaagatattattggaacgtctgtttcaggagcaatgaaaaatgttatcgctatagctgctggtatagtatacggactggaacttggagagaatgcaagagctgcaatactttcaaggggtcttgctgagactgctaagttggctaaaggcctgggaggacaaactgagacagtttttggtcttgcaggcgccggtgatatggcattaagcagcttaagcatgacctcaagaaacttttcttggggtttttcattagctaaaaaacaaacttttgatgataaattagtagaaggtttaaattcatcaaaaatggctataaaaattgcaaaaaaaattaaaatagaaatgcctattactgagttagtttcaatggctgataaaaagagttttgatttgcagactgaagttgacaatatgatgaaaagacctcctaaactagaatggctttaa

SEQ ID NO: 209596 - DNA, 514 bp, Unknown
  Bacterial polypeptide expressing nucleotide sequence isolated from the Sargasso Sea
gtgtctgagtaaaggtttggagacgagcacgtgcgacatgatgagcgagatcattcccgcgggtctcggacgcgatcaaccgttagccgtgctctcgggtccgacgttcgcggttgagctcatgcaaggctcgccgacgaccatcgtcgccgcgagcgaggacgagcagttggcggtgagcgtgcagcaactcttcggttcgtcgtgtttgcgtgtcaacacgagcacggacgtcacgggcgtggagctctccggcgcgatgaagaacgtcttagcaatcgcggcggggatcgtcgagggtttagagctcgggaacaactccatggcggcgctcgtggcgcaaggcgtggcggagattcgttggctcgcggggaaaatgggcgcgcgtccggagacgctggccggcgtgagcggtacgggcgacatcatgctcacgtggttcgtcaatttgagtcgtaaccgcaccgtgggcgttcggttgggggcgggagaaacgctcgaggaagtgttagga

SEQ ID NO: 209597 - DNA, 628 bp, Unknown
  Bacterial polypeptide expressing nucleotide sequence isolated from the Sargasso Sea
tatgataaacaatattgcgatcatcggcgggggagcttggggcacggctttagcacattgtatcgccttaacggacaaaacaattcgtctatgggctcgtgagcctgaagtggttgaaacaatatcaaaatacaatgaaaataaaatgtttctccctggcataaagttacattctcagataaagccttcatctgaaattttaacagttactaaaaattcagatttagtaattttggtagttccatcgcaatattttaggcatgtatctaacgaacttatgcagtgtataacagatgagaccccaataataatatgcactaaaggcatagagactggaactggcttactaatgagtgaaataatttctaatttttccccccaaaatacaattgctatgctctcaggacctacatttgcttccgaagtagccttaggtaagccaacagcacttgctcttgcttgtggtgataagaatattacccaaaagctatcggaagtatttaataaaaccaatttacgtccttacatatcagatgacattgttggagctgaaattggtggggcagtaaaaaatgttattgcgattgcatcaggagtaactataggtcgaggactaggagacaatgct

SEQ ID NO: 209598 - DNA, 832 bp, Unknown
  Bacterial polypeptide expressing nucleotide sequence isolated from the Sargasso Sea
aatgaaaataggaataattggagcaggcaaatttggactagtccttgcacgtatagctgccgaaaactcaaatgaagttttgattcattcaagacgtacaaatgaagttgaatcacttaatacaaaaaatgaaagcttatcaggattctcttttaatgggatggctatatcagcaacacaagatcttgatcgcttgaatgagtgtgatgcacttttggttactgtagcaagtaaagatttcatagaatcgatcagcaagcttaattacaagacttatgagggtaaatttgtaagttgcgtcaaaggttttgatcaaaaatcaggaaaactgatgaccgaagttttaatcgatgaatttaatattgattcagataatgtgtttgttttgagtggcccgaatttatcgaaagaattgggtaatcaggagcttacaggtactgttgttgctggagaggatgacattttcatcgatgcattatgtaatgctctgaaaacagattattttctgcctttttctagtaatgataggtatggagttgagcttggtggagctttaaaaaatatttatgccatattgtcgggttattttcacaaaaaaggggttggcgagaataccataggtttacttctaactaaatgtttatcggaaatgagtatatatagcaaagcaagaggagctaatcctgcaacatttcttggattagctggcgttggcgatttcttttcaacagcactttcatccgattctagaaattatagattcggtgaattgctcgcagaaggccacaagcctgaaagtgcattggataaagtcggagatacagtgaagggt

SEQ ID NO: 209599 - DNA, 736 bp, Unknown
  Bacterial polypeptide expressing nucleotide sequence isolated from the Sargasso Sea
atgttaattagcactacgaaaggaattgagccgggcaattttaagttaatgagtcagatattgcacgaagagtccccaagttctggtataggcgtgttgagtgggcctaatttggctaaagaaattgcctccaaacaccctacagggacagtcattgccagcaataacgaacaaattcgcgaaactgttaaagatgtccttaggtctgatacttttagggtatataccaacgatgatatgtttgggatagaactaggtggttcacttaaaaatatttatgcgattatcgcaggcctcgcagcctcgattgggacaggtcataatacaaatagtatgcttgtgacacgtgctttagctgagatggcaagattcggccgagagcttggggcagacccaatgacatttcttggtcttgctggtgtaggtgatttggttgtaacttgttcaactcctttaagtcgaaattatcgaattgggcaggctttaggtgagggacgctcaatagaacaggcactaaatgaggttgatcaggttgctgagggagttaatactcttaaattagttaaagaaaaagcggatgatttgggtgtttatatgcctcttgttaacgggctgtacagaatcatatacgatggccagccgattaacgatattgtgtcttcgttaactttgagtgaggaagcgttagatgtggaatttgcagctaaagatgaaaaaattcttaacgaaatttgag

SEQ ID NO: 209600 - DNA, 403 bp, Unknown
  Bacterial polypeptide expressing nucleotide sequence isolated from the Sargasso Sea
agacgggttgggcctagggttgaacgcacgtgccgcactggtcacgcgcgggctggcagagatgacgcgcctgggtctggcgctcggcggtcggccggaaaccttcatggggctgaccggcatgggcgatctgctgctgaccgccaccggtgatctgtcacgcaaccgcacggtcgggatgcagcttgcgcagggccgctcgctcgacgacatcctgcacagcctcggtcacgtcgccgaaggcgtgcgttgtgcgcgtgccgttgcggcgctcgcgcgcgccaagggcgtggacatgccgatcaccttcaccgtctgcgaagtcctgttcgaagggcttcctgctgcgaaagcggtggaacgtctgctacagcgcgacgccaaatccgaatcgacgcgttaa

SEQ ID NO: 209601 - DNA, 552 bp, Unknown
  Bacterial polypeptide expressing nucleotide sequence isolated from the Sargasso Sea
gcaatcgagtacaggatgttcttcatagcgaccgtctgagggtttacaagagcgcagacatttacggggttgagttagcaggcgcgttaaaaaacatctacgcaattatttgcggaatggctaacggtttttctgttggtcagaatacaatagggatgctcttaacacgtgcccttgctgagatgagtcggtttgcggttgcaatgggtggtaatcctttcacttttctgggtttggctggtgtgggagatcttttggtcacttgttcctcgcctttgagtagaaactatcaattgggattaaaaatctctcggggtatgtccgtggaagaggcgataggagagttggggcagttagcggaggggttgaatacgctgaagttagttcattcaaaaaaaaatgatatgaatgtctacatgcccttggttgatggtttgcatcgggttttgtttgacggggacgaaatttggtcggtggtgcggggattaatggaggccccggaggggccagatgttgagttcgctgatccttcgatttggccgtcgagatagt

SEQ ID NO: 209602 - DNA, 835 bp, Unknown
  Bacterial polypeptide expressing nucleotide sequence isolated from the Sargasso Sea
ccatttatactaacctcttcaataaatagagctgaacagattaatgatgagtttttatcaaggtttgaaaatttagaatcaagaaatgaacttatagctcactcagaccctttaaaggtttttggaaatgcttcaataattattttagcaactgaagttaatcgggtgctttcatttataaatgaaattaataattattctgaagaaaactgccatgttttaattgctagcaaaggttttggacctaatggtgaattattgtcaaacattcttcaagaaagaattagtaataaaaaaataggagtattgagtggccctagttttgcccaagaggttatagattataaaccaacagctgtggttgttgcaggagaactagaaactattgagaaatcaactgaattatttcatacgcctgaatttagagtatatggatcaaatgatattattggaacgtcggtttcaggagcaatgaaaaatgttatcgctatagccgctggtatagtatatggactagaacttggagagaatgcaagagctgcaatacttacaaggggtcttgctgagactgctaagttggctaaaggccttggaggacaaactgagacagtttttggtcttgcaggcgctggtgatatggcattaagcagcttaagcatgacctcaagaaacttttcttggggtttttcactagctaaaaaacaaccattcgatgatcaactaacagaaggtttaaattcatcaaaaatggctataaaaattgcaaaaaaaattaaaatagaaatgcccattacggagttagtatcaaaggctgataataagaattttgatttgc

SEQ ID NO: 209603 - DNA, 843 bp, Unknown
  Bacterial polypeptide expressing nucleotide sequence isolated from the Sargasso Sea
tacccgaattaaaatttcctaaaattgtaaattttacaaataatatctcatcagctatacgttcagccaatgtaattgtactagcaataccctcacaatctataagaaaactactcaccgataataaatcagattttaatcaagatcaacttatagtaaacgtgtcaaagggaattgaggtagatactctaatgactgtaagtgaggtaataaatgatgttttaggtactgcttacaataaagctgtaactctttcaggcccaagtcatgctgaagaagtggttcaaaatcatcccacaacattagttgctgcttcctctgatcttgaagctgcgcaaaagattcaagatctatttgcatctgatatgttaaggacataccgaaataaagacattaaaggtgttgaattaggtggttctatgaaaaatgtaatagcaattgctgcaggtatttgtgatgggattggatacggtgacaattcaaaagctgcactaataacaaggggtatggctgaaataacaagattaggtaagaaaatgggtggaaaaagagaaacatttaggggattgagtggttttggagatcttatagttacctgtctgagtagacacagtaggaataggcaaattggacaggcaataggagaaggaaaaaccctaaaagaaattatttcagatatgaatatgatagcagagggaatcgatactgcaaaatcagtccatcaattacaacttaagcataatgtagagatgccaatccacgaagccatatatcaagtcttatttgataataaaaatccgaaaagtgcagttacggagttaatgaaccgcaaggttaagtgaa

SEQ ID NO: 209604 - DNA, 838 bp, Unknown
  Bacterial polypeptide expressing nucleotide sequence isolated from the Sargasso Sea
attaaaaatttgcgttctcggtggaggaagctttggaactgtattagcaaacttagctgcatcgaaaggacatgatgtatctctatgggttaaagattctgataaagctttaagaataaattctgaaagcagaaatactgaatatcatcccgaactcaaactctctaataatattattgcttctgagaagctagaagaaattattccaaaatctgaaataatatttgtagctactcctagtaaaattattaatgatgtccttgatagactctctgatttctcgatggacaataagatgataatttcatgcactaagggcattaatgaaaaacctttcatgacaatgtctgaaacaattgaaaaacactttaataattccagcatcaaggtgggtgttttaagcggaccaaatttagcaagagaaattgcagatgaaaaggttgctggaacagttatagcaagcaagcatgcagatctttgtaatctaggaagggaaattctgtcttcaagtacttttaagatatacacaagcgcagatactcaaggtatagaacttgcgggggctttaaaaaatatttatgcaattatatcgggttattgtcattctcttgatgtaggtgagaacgctatcggacttatactgacaaggagcatggcagaaatgagcaactttgctgttagtaaaggtgcaaatccaattacttttttaggccttgcaggaatgggtgacttggttgcaacttgcttttcaaaattatcaagaaattatcagtttggttgggccattggagaaggtcttgatattgaggctgcaaaaaataaagtgggtcaggtagca

SEQ ID NO: 209605 - DNA, 532 bp, Unknown
  Bacterial polypeptide expressing nucleotide sequence isolated from the Sargasso Sea
cttagttttagcttcagccaagcctagctttttgaaaaaattacaatcagatatttcaatgcaaaactttagactttaccgaacatcagatgttataggtgtagaacttggaggcgcactaaagaatataattgctatagcatgtggtatagcaatcggcgccaagcaaggtgatagtgctagagcagcactgatgacacgtggtttttcagaaatgattacttttgcgaaagcacatggagctaaagaaaaaacactgacaggtttgtcaggtttaggggatttaagccttacttgtaattcagaaaagtctcgtaattttgtttttggcgtatcgcttggctgtcaaaaacctttcaataaaaacacaaccgtagaaggcgttgccacagcatttgccgtaagcaaaaaagcaagctctctaggcctggaaatgcccataacctctgctgtcagcgctttagttgaaggttcggcttccattgaagaggttattaaatctctattaagcaggccaaccaaagaagaataa

SEQ ID NO: 209606 - DNA, 667 bp, Unknown
  Bacterial polypeptide expressing nucleotide sequence isolated from the Sargasso Sea
atgaaacaaagagtgcattacctcatacccgaattaaaattccctaaaattgtaaattttacaaataatatctcatcagctatacgttcagccaacgtaattgtactagcaataccttcacaatctataagaaaactactcaccgataataaatcagattttaatcaagatcaacttatagtaaatgtgtcaaagggaattgaggtagatactctaatgactgtaagtgaggtaataaatgatgttttaggtactgcttacaataaagctgtaactctttcaggcccaagtcatgctgaagaagtggttcaaaatcatcccacaacattagttgctgcttcctctgatcttgaagctgcgcaaaagattcaagatctatttgcatccgatatgctaaggacataccgaaataaagatattaaaggtgttgaattaggtggctctatgaaaaatgtaatagcaattgctgcaggtatttgtgatgggattggatacggtgataattcaaaagcagctctaattacaaggggtatggcagaaataacaagactgggtaagaaaatgggtggaaaaagaaaaacatttaggggattgagtggttttggagatcttatagttacctgtttgagtaaacacagcaggaacaggcaaatggacaggcaatcgg

SEQ ID NO: 209607 - DNA, 472 bp, Unknown
  Bacterial polypeptide expressing nucleotide sequence isolated from the Sargasso Sea
cccgtatggagtagagatgggaggagctttgaaaaatatctacgcgatagcttgtggcattgctgacggcctaaattctggagagaatacggtaggtatgattatgaccagaggcttaggtgaaatgagtaggttggcagttgatctaggagcaaatccgcaaacattcttaggcttagctggagttggagatcttataactacttgtgcatctcctttaagcagaaatcatcaattcggtaaaatgattggaacgggtctgagtgtagacgaagctaaaataaagattgggcaaacaattgaaggtttaaaaacacttaaagtagttaaagaaatctcagatgaacacgaagtggaaatgcccatagtggattctcttttcaaaatcatctataaaggagatagtttagatggctcgatccaaaaagttttgggtaaagacatgattaaagatgttgaattcataaaataa

SEQ ID NO: 209608 - DNA, 832 bp, Unknown
  Bacterial polypeptide expressing nucleotide sequence isolated from the Sargasso Sea
catgtctaaagttggtattataggcgcgggggcttggggcacggctttggcatgtgcgatgaagcgtgctggcaacgaggttatcatttacgctcacgaaaaagagacagcggatgcgattaattctaagcatataaatataacgtttctgccagaggtaactttggattctactataagggctactaattccctggaaaaagcgacaaaggcagatgcagttttattggtttctccatctcagtattttcgaaaaagctgcgagatgttggcaggtatttggaggcaaggtgttccagcaatcatttgtaccaaagggatagaaactcaaacaagttctttgatgagcgagattgttagagagactatgcccctagttagggtagcaattttatctggacccacatttgcaatggaggtagcggatgatcttccaactgcaatgactcttgctacagatgacgaaacgttaggaaagttgttgatggaggttatgacaacaaaacactttagaatataccggtctcgcgatgttataggtgcccaaataggtggtgctgtaaaaaatgtgatcgctatagcctgtggaattgtgaaaggcagaggttttggagaaaactctcgggcagctattgttacaaggggtttggccgaaatggttagattaggtgtggccaagggtgccaggccagaaacgctatccggtctagctggaactggggatttaattctgacttgtagttcaacacaatctcggaatttttcactaggttgtgagctagggtctggagatactttagagaacataatgaaaaaaagggtgtccgttgcc

SEQ ID NO: 209609 - DNA, 640 bp, Unknown
  Bacterial polypeptide expressing nucleotide sequence isolated from the Sargasso Sea
tccgaggcatgaatatgcaatcttgtctgggcctacttttgcggctgagatagcgagggagaaaccaagtgctgtaactcttgcttctaggggttcaaacattcgagatagtttggccaaagcactgggcacgcctcgctttcggatctataaaagcgttgatgttattggcgctgagattggcggtgcggtgaagaatgtccttgctatagcttgtggaattgtagaggggcgtggccttggagacagcgcgcgggctgcaattattacccgtggcctcaccgaaatggctcgcctttccagggccaaaggcggtcgccccgaaactcttatgggtctatcgggaattggtgatttgacgctgacctgcaatgcaatccaatcgcgaaatttttccttgggcgtagcacttggtcaaggtcaagccctaagagaagttctagcaaacagagtttctgtggcggagggtgtggatacggcagctgctgttagtgccttggctgggcaacttggagtggatgcaccaatttgttttgcagttaattctattgttaataagggcgaagacacagactcaacgatctcaaatcttctcgctcgaccagttggaatagattcgcctctcgacgaaggtggctga

SEQ ID NO: 209610 - DNA, 772 bp, Unknown
  Bacterial polypeptide expressing nucleotide sequence isolated from the Sargasso Sea
tatgacttcatattcagttggaacaattggtgcaggtgcatgggggacggctttggcgcaggcgcaggccgttgaaggcggctcgtcgatcctctgggcgcgcgagcaagacgtcgttgattccatcaattccgttcatgaaaacacaccgttcttaccaggcgttccgcttagtgaaaatttaaaggcgaccgcctcgatggaagaggtcgcacagcaagatattttgttgatggtgacgcctgcacaatatatgcgcgcatcacttgagagctttaaaccctatattcgcaaagatcagccagtcgtgatttgctcgaaagggattgaaattgaaacgggtaaactgttggtgccggtggcgcaggaagttttgggtgcaaagcatcctattgccgttatgacaggcccgacatttgccagtgaaattgcacgtaatatgcctgcggcggtgacgattgccgccaaagacgaagccttgggcaagatgttgcaacaggcactgggcgcgcccaaattccgcccttatgtatcaacggatattgtcggggctcagttgggcggcgcggtaaagaacgtgattgccattgcggcgggcattgccagtggccgtgaaatgggtgacagtgcgcgcgcggcgctgattacgcgcggtcttgccgaaacggcgcgtttatgtgttgccatgggcgggcaacgtcagacattacttggcatgtgcggcgttggtgatttgatgctgacatgttcatctatgcaatcacgtaattgt

SEQ ID NO: 209611 - DNA, 703 bp, Unknown
  Bacterial polypeptide expressing nucleotide sequence isolated from the Sargasso Sea
atgtttaacctgtcaaaggggatagaggtagataccttaatgactgttagtgaagtaattaaagatgttttatctgatagttatcaaggtattgtaaccttgtcagggcctagccatgcagaagaagtaattcaaaaacacccaacaactctcgtagcagcatcttctgatctggattctgcgcaaaaggttcaaaatctttttgcaacagatatgttaagaacatatagaaataatgatattaaaggtgtggaattaggagggtccatgaaaaatgttattgcgattgcggcaggtatttgtgatgggattggttatggtgataattccaaagcagcattaattaccagaggaatgacagaaataagtagattgggtacaactatgggtggacaaagggaaacatttaatgggttaagtgggtttggtgatttaatcgtaacatgcctaagtaggcatagtcggaataggcaattaggagaagcaattggtaaaggcaggccactcgaagaaataacctctggaatgaatatggtagctgaaggtatttttactgctaagtcagtacaccagttacgtataaagcatcatgtagaaatgcccatacatgaagctatatatcaagttttatttgagaataagaatccaagaacttcagtgattgagttaatgaaacgaagacttagcgaagagaataattgat

SEQ ID NO: 209612 - DNA, 580 bp, Unknown
  Bacterial polypeptide expressing nucleotide sequence isolated from the Sargasso Sea
atccggcgacgtggtggccagcgacgatcgtgctgtttgtgagatattgcaaaaagtgctcgcgtcaagctattttagggtatatgcaaattatgatcgctttggtgttgagttggccggagcgttaaaaaatatctatgctattgtctccggcattgctgaagcgctgggggcaggtcagaacactaaaagtgttgttttgacaagaggtttggcagaaatgagtaggtttgggcagcaattaggtgcagatcccatgactttcctcggactaagcggtgtcggtgacctatttgtcacctgttcatctccccttagcagaaattttcaggtaggcttagggttaggccggggaaaaacactggcccagtcgatgaatgatgttggtcaggtagcagagggcgtcaacaccacgagactagtgaaagacaaggctgataaaatgggtatctacatgccgattgtttcggcgttatatgagactctgttcaatgatcaatcgatagaacgatctctgcaaattatgatgtcggcggagcaaaataccgatgttgattttatggtgaagcaaaatgagtga

SEQ ID NO: 209613 - DNA, 907 bp, Unknown
  Bacterial polypeptide expressing nucleotide sequence isolated from the Sargasso Sea
ttgtaccgccatgccaaggttcttggcgaaaacgcccacaccgtccatttctggatgcgcgatgaagcccaggcggaggaagttcgccgtacccgtgtgaacaagcgctacatgccggatgtcaccattgaaggcgacgtgcagcccaccacagacctggccgaagcagttgccagggccgaagtggtattggtcgctatcccttccaaggcgttccgctctgtgatccgcgagaatgccgacgcattctgggaagggcagattgtagtcagcctgaccaagggtattgaagaacacggcttcaagctgatgagcgaaatcctgatggaggagcttccacgctgtcgctccggtgtgctcagcggcccgaacctggcggccgagatcgtcaatcgtgagctgaccgccacggtcattgccgccaaggatccggaagttcgccgcacggtgcaggatctgctggggtgcgagtatttccgggtatacgccaacgtagacgtgtatggcgtagagctggccggcgccctcaagaacatttacgccattgtggccggcctggcctcggcgctggagatgggtgaaaacgcccgggccatgctgattacccgagggctggcggaaatgagccgctttgccgtaagccttggggccaacccgatgacctttatggggctggcgggtgttggcgacctgattgccacctgtacatcgaacaaaagccggaactaccggattggttatgcggtgggcaagggcaagcaactggacgaagcggtgaaagagctgggccaggtagccgagggcatctacaccctgaaactggtgcgggagaaatcggaatccatcggcatttacatgccgctggtgcgggggctttacgagattctgtacaacggtgcttcgatca

SEQ ID NO: 209614 - DNA, 840 bp, Unknown
  Bacterial polypeptide expressing nucleotide sequence isolated from the Sargasso Sea
aatgaaagaaaataataaagttgttgtccttggaggaggaagctttggcacggttctagcaaatttagctgcatcaaatggatacgaagtttctttatgggtgagggacgcagaacaggcattaagaattaattcagaaggagcgaatactaattaccatccagaattaaaactctcagataaaattgaagcatctgatgatctaaaaaaagttatcaaagatgcttcggttgtattgattgcaacaccaagttctatttttgaaaatataactaagcgaatagtacctttgatcgataaaaatgcttatgtaatttcatgtacaaaaggaatcctttcaaaaccttttcgtttgttatcagatgtaatctcaaaccagatttctaatgacattggagtactaagtggtccaaatttagcaaaggaaattgctgaaagcaaagtcgctggaactgtcattgctagtcatagtaaagagctaatattatctgtaaagtcaattttgtcatccgacacttttaaaatctattctagtcacgatatggagggagttgaattggcaggagcattaaaaaatatatatgcaatagtttgtggcatggcagaatcaatgaaagttggtgaaaatgcaatcggtctcatattaacaagaagtatggcggaaatgagcagatttgctgttgctaaaggagccgatccaattaccttccttggattatcaggaatgggtgatttagtagcaacatgtacttcaaagttatccagaaattatcaacttggtaactatataggcagtggtttaaatttatctgattcaaaattaaaagtaagtcaggttgc

SEQ ID NO: 209615 - DNA, 1021 bp, Unknown
  Bacterial polypeptide expressing nucleotide sequence isolated from the Sargasso Sea
tatgaacaataaacagagagtttctgtattaggcggtggcagttttggaactgttttggcgaatcttgcagcatcaaatggaagtaatgttgctttatgggttagggattctgagcaagcattaagaataaattctgaaggagctaattcttcataccatccagaattaaaactttcagacaatattatggcatcagaagatctttatgaagttgttaaaaatgcagatttaatttttgtcgcaacgccgagtaaaatttttgaaaaaattatagttagaatttcaaaaattattaaagaggattgttatgttatttcctgtacaaagggaatattagatgatccgtttagaaccatgacagacattattttaagtaataatattaaaaattttggcgttttaagtggccccaatcttgctaaagaaattgctgacaataaggttgctggaacagtaatcgctagcaacgatcaacaaatgattacgtcagtcaaggaagttttatcgtctgtgacattcaaaatctattctagtaatgacattcaaggtgttgaattagcaggagcaatgaaaaatatttatgctattacatgcggactcgcagagtcactggatgttggagaaaatgcattaggattaatactaaccagaagcatggcagaaatgagtcgttttgctgttgcaaaaggcgcaaacccaataacatttcttggattatctggaatgggtgatttagtagcaacttgtacatctgttctctcaagaaattatcagttagggtttaatattggtaaagggatgaacttaacggatgcaaagaaaaatgtaggacaggttgctgaaggcattaaaactttggaagttattagaaatgaatcattaaatttaaatattaaaatgccgctagttgaatctatgtataatataatctataaagatgactcaccaaatgtattaattaatgatttggttaacaatcctaatgaaattgatgtagagtttaggtataaagatgaataa

SEQ ID NO: 209616 - DNA, 928 bp, Unknown
  Bacterial polypeptide expressing nucleotide sequence isolated from the Sargasso Sea
tatgaataaaaattttaaaatttgtgttctcggtggaggcagctttggaactgtattagcaaacttagctggatcgaaagggcatgatgtatctctatgggttaaagattctgacaaagctttaagaataaattctgaaagcagaaatactgaatatcatcccgaactcaaactctctagtaatattattgcttctgagaagctagaagaaattattccagaatctgaaataatatttgtagcaactccaagtaaaattattaatgatgtccttgaaaggctctcagatttctcgatggataataaaatgataatctcatgcactaagggcattaatgaaaaacctttcatgacaatgtcagaaacaatagaaaaacactttaataattctagtattaaggtgggtgttttaagcggacctaatttagctagagaaattgcagatgaaaaggtttctggaactgttatagcaagtaagcatacagatctttgtaatctaggaagggaaattctgtcttcaagaacttttaagatatacacaagcaaagatactcaaggtatagaacttgcgggggctttaaaaaatatttatgcaattatatcggggtattgtcactctctagatgtgggtgagaacgctatcggacttatactaacaaggagcatggcagaaatgagcaaatttgctgtaagtaagggtgcaaatccaattacttttttaggccttgcaggaatgggcgacttggttgcaacctgcttttcaaagttatcaagaaattaccagtttggatgggctattggagaaggccttgatattgaggctgcaaaaaataaagtgggtcaggtagcagagggattaaatactattaaaataattcagagcgagatttcctcatctgaaatcgagatgcctcttgtatcaggtatg

SEQ ID NO: 209617 - DNA, 772 bp, Unknown
  Bacterial polypeptide expressing nucleotide sequence isolated from the Sargasso Sea
atggatgtttcaggtaaagtagctgttctaggtggcggaagctttggcactgttcttgcaaatttagctgcctcaaataataataaagtttctttatgggtaagagattctgagcaagcacttagaataaattctgagggcgcaaatacttcttatcatccagaactcaaactttctaaaaatattgaggcttctgataatcttgaagaagtaatgggtggatcatcaataatctttgttgcaactccaagtcttattttcgaacaaattataaatagaataagtttacatcttgataataacgcaatcattatttcttgtacaaaaggtattcttgatgaaccattcagaacactatcagatgtcttgtctaaaaaacttaataatagaattggtgtattaagcggtccaaatttagcaaaagaaattgctgacaaaaaaatagctggtactgtaattgcaagcactcatgatgaagtgattgataatgttaaatcaatattgtcatccaaaaattttaaaatatattcaagtaaagatgttcaaggaatagagttagcagggtcattgaagaatatatacgcaataatatgtggaatggctgaagcattaaaagttggtgaaaatgctatcggcttaattctaacaagaagtatggcagagatgagtagatttgcagtcgcaaaaggtgctaatccaataacatttttaggccttgctggaatgggcgatcttgttgcaacatgtacttcgaaattatcaagaaactatc

SEQ ID NO: 209618 - DNA, 1012 bp, Unknown
  Bacterial polypeptide expressing nucleotide sequence isolated from the Sargasso Sea
tatgaattctttaaaaaaagtagctgttttaggaggtggaagctttggaactgtattagcaaatttagcagcttcaaatggaaatcaagtttctttatgggtaagagattcagagcaagcccttagaattaactctgaaggagcaaatacctcttatcatcctgaacttagattatctactaatattaaggcttctgaaaatcttgatgaggtaatgcatcaagcatcgattatctttattgctactccaagtcttatttttgaacaaattgtaaaaagaatttcaaatttcttaactgaagaggcgtttattatttcatgtaccaaaggaatacttgataaaccttttagaactctatctgatattctatctgaagaacttaaaaataaagttggagttttaagtgggcccaacttagccaaggaaatagcagataaaaaaattgcaggaactgtaattgcaagttgcgacgacaaacttattgatgctgtaaaagcaatattgtcatctgagcatttcaaaatttattcaagcaatgatattcaaggagtggagcttgctggcgcacttaaaaatatttatgcaattatttgtggtatggctgaatctcttaaagttggcgaaaatgcattaggattaatcttaacaagaagcatggcagagatgagtagatttgcggtagcgaagggtgcaaatcctataacattcttaggactagcggggatgggtgatcttgtagcaacatgcacttctaagttatctcgaaattatcaattaggttttaatctgggtcaaaatatgagcttagatactgcaaaaaaagaagttggccaggttgcggagggtttaagaacactatctgtaataaaaaatgaatcaaaaagtcttaagataaacatgccgctagtgcaatctttgtataatataatctatgaagattctaatcctcatgaattaattaatgatttaattaataatccacatgaagttgatgtagaatttacttattaa

SEQ ID NO: 209619 - DNA, 871 bp, Unknown
  Bacterial polypeptide expressing nucleotide sequence isolated from the Sargasso Sea
catggaaaattccaaaagtgttgcagttctcggaggaggaagttttgggacggttctagcaaatttagcagcatcaaatggatacaacgtttcattgtgggtaagggactctgaacaagctttaagaataaattcggagggagctaacaccacatatcatcctgaattaaaattatctaaaaatataattgcatctgataacttaaaagaggttttaaataacatatctataatttttattgcgacaccaagtattgtgttcgagcaaattgtaatgagagtttctgatcatatagatgaaaaaccatatttagtttcatgtacaaaaggtatccttgatgatccatttagaccattatcagatattatttcatcaaaactcaataatactattggtgttttgagtggcccaaacctagcaaaagaaatagcggatgaaaaaatagcaggtacagtcatagcaagtccagatgaaagtttaataaatatagttaaatcagttttgtcttctgaaacttttaaaatatattcaagtaaagatatgcaaggagttgaaatggctggcgcattaaaaaacatttatgcagtaatatgcggaatggctgaatcactaaaagttggcgaaaatgctattggactaatactaactcgtagcatggctgagatgagtcgctttgctgttgcaaaaggtgcaaatccgataacatttttaggtttatcgggaatgggtgatttagttgcaacatgcatgtcaactctatcaaggaattatcaacttggttttaatattggatccggcatgtctttatcaaaggcaaaggaaagcgttggtcaagttgctgagggagtaagaactcttgaggttgtttta

SEQ ID NO: 209620 - DNA, 844 bp, Unknown
  Bacterial polypeptide expressing nucleotide sequence isolated from the Sargasso Sea
ttgagcgccacaagagttcctagaaaactcagcaaaataaaattacccgacgaagttgaaatcgtaagttcactaaaaagaatagaaaaaaacgagtgtttatttctggcagtaccaacgcaaaatttagccgatttttgtgaaaataataaagtttttttaaatggcagaccgctaattgcttgttgtaaaggtgtggatcagaaaactggattgagaccatcagaaattttgagtgaatactcttcaaaggttgccgtaatgtccggtcccagctttgcaattgatatcgctcaaggcatgccaaccgccctagttttagcgtcagttaaatatgacttcttgaaaaaattacaatccgatatttcaatgcaaaattttagactttaccgaacatcggatgttataggtgtagaactcggcggagcattaaaaaatataattgccatagcatgtggtgtggcaatcggcgcagggcaaggtgacagtgctagagcagcactgatgacacgtggtttctcagaaatggtttcttttgcaaaagcacatagcgctaaagaaaaaacactatctggtttatcaggctttggggatttaagcctaacttgtaattcagaaaagtctcgtaactttgcttttggcgtatcgcttggttgtcaaaaaactttcaacaaaaacacaactgtagaaggcgtcgcgacagcatttgccgtaagtcaaaaagcaaaggctttaggtatagagatgccaataacctcttctgtcagcgccttagtcaagggctctacttccgtagaagaagtaattcgctctcttttaagcagaccaactaaagaagaataaa

SEQ ID NO: 209621 - DNA, 1027 bp, Unknown
  Bacterial polypeptide expressing nucleotide sequence isolated from the Sargasso Sea
atgaataaaaattacaaaatttgcgttctcggtggaggaagctttggaactgtattagcaaacttagctgcatcgaaaggacatgatgtgtctctgtgggttaaagattctgataaagctttaagaataaattctgaaagcagaaatactgaatatcatcccgaactcaaactctctaataatattattgcttctgagaagctagaagaaattattccagaatctgaaataatatttgtagctactccaagtaaaattattaatgatgtccttgatagaatctctgatttctcgatggataataagatgataatttcatgcactaagggcattaatgaaaaacctttcatgacaatgtctgaaacaattgaaaaacactttaataattccagcattaaggtgggtgttttaagcggaccaaatttagcaagagaaattgcagatgaaaaggttgctggaacagttatagcaagcaagcatgcagatctttgtcatctaggaagggaaattctgtcttcaagcacttttaagatatacacaagcgcagatactcaaggtattgaacttgcgggggctttaaaaaatatttatgcaattatatcgggttattgtcattctcttgatgtgggtgagaacgctatcggacttatactgacaaggagcatggcagaaatgagcaactttgctgtaagtaagggcgcaaatccaattacttttttaggccttgcaggaatgggtgacttggttgcaacttgcttttcaaaattatcaagaaattatcagtttggttgggccattggagaaggtcttgatattgaggctgcaaaaaataaagtgggtcaggtagcagagggattaaatactattaaaataattcacggcgagatttcctcatctgaaatcaagatgcctcttgtttcaggtatgcatgaaatattatttaataacggaagtaaagaattacttctggagcagattataaatagtgaaatttatgttgatgtgaattttgatgtagaatcatagc

SEQ ID NO: 209622 - DNA, 1012 bp, Unknown
  Bacterial polypeptide expressing nucleotide sequence isolated from the Sargasso Sea
atgaaagaaaataataaagttgttgtccttggaggaggaagctttggcacggttctagcaaatttagctgcatcaaatggatacgaagtttctttatgggtgagggacgcagaacaggcattaagaattaattcagaaggagcgaatactaattaccatccagaattaaaactctcagataaaattgaagcatctgatgatctaaaaaaagttatcaaagatgcttcggttgtattgattgcaacaccaagttctatttttgaaaatataactaagcgaatagtacctttgatcgataaaaatgcttatgtaatttcatgtacaaaaggaatcctttcaaaaccttttcgtttgttatcagatgtaatctcaaaccagatttctaatgacattggagtactaagtggtccaaatttagcaaaggaaattgctgaaagcaaagtcgctggaactgtcattgctagtcatagtaaagagctaatattatctgtaaagtcaattttgtcatccgacacttttaaaatctattctagtcacgatatggagggagttgaattggcaggagcattaaaaaatatatatgcaatagtttgtggcatggcagaatcaatgaaagttggtgaaaatgcaatcggtctcatattaacaagaagtatggcggaaatgagcagattcgctgttgctaaaggagccgatccaattactttccttggattatcaggaatgggtgatttagtagcaacatgtacttcaaagttatccagaaattatcaacttggtttccatataggcagtggtttaaatttatctgattcaaaattaaaagtaggtcaggttgcagaagggataagaacgcttgaagttattaaaagtgaatctgataagttaggtctgaatatgcctttggtagaatctctttataagattatcaatgaaaaatcatctccaagttcactaattgaagatttaattaaaaatcctcatgaagttgatgtagaatttacacattagg

SEQ ID NO: 209623 - DNA, 1027 bp, Unknown
  Bacterial polypeptide expressing nucleotide sequence isolated from the Sargasso Sea
tatgaataaaaattacaaaatttgcgttctcggtggaggaagctttggaactgtattagcaaacttagctgcatcgaaaggacatgatgtatctctatgggttaaagattctgataaagctttaagaataaattctgaaagcagaaatactgaatatcatcccgaactcaaactctctaataatattattgcttctgagaagctagaagaaattattccagaatctgaaataatatttgtagctactccaagtaaaattattaatgatgtccttgatagactctctgatttctcaatggataataagatgataatttcatgcactaagggcattaatgaaaaacctttcatgacaatgtctgaaacaattgaaaaacactttaataattccagcatcaaggtgggtgttttaagcggaccaaatttagcaagagaaattgcagatgaaaaggttgctggaacagttatagcaagcaagcatgcagatctttgtcatctaggaagggaaattctgtcttcaagtacttttaagatatacacaagcgcagatactcaaggtatagaacttgcgggggctttaaaaaatatttatgcaattatatcgggttattgtcattctcttgatgtaggtgagaacgctatcggacttatactgacaaggagcatggcagaaatgagcaactttgctgttagtaaaggtgcaaatccaattacttttttaggtcttgcaggaatgggtgacttggttgcaacttgcttttcaaaattatcaagaaattatcagtttggttgggccattggagaaggtcttgatattgaggctgcaaaaaataaagtgggtcaggtagcagaggggttaaatactattaaaataattcacagcgagatttcttcatctgaaatcaagatgccacttgtatctggcatgcatgaaatattgtttaataacggaagcaaagaattactcttggaacagatcataaatagtgaaatttatgttgatgtgaattttgatgtagaatcatag

SEQ ID NO: 209624 - DNA, 1027 bp, Unknown
  Bacterial polypeptide expressing nucleotide sequence isolated from the Sargasso Sea
aatgtctaaatcaaaatctcattctattggagtgataggtgcgggttcttgggggactgctctttcttgtttaatggctgatgataatccagctatttatctttgggcatatgagagagaaactgtaaaagacataactaatagtagagaaaatagagtttttctacctggcatcagaattcctgataatgtgaaggctatatcagaaattgaaaaattgatggagaattgtaaaatacttatgattgtaactcctgttcaaaatacacgatctataataaaacaaataaaaaaccttgttaaacctgatcacaagtttgttcttgcaggaaaaggtattgaaaaaaaaagcagttgcttgctaagtgaaattatagaggaggaacttggtacttcaaaaaatgtagctattctctcgggaccaacctttgctttagaagtggctcaaagaaaaccaactgcagctgttgttgcctcatccgatccaaaattggctaaaatagtgcaaagtattctgcataaaaatcgattcagaatttatcagagtaaagatattaagggtgttcaattggctggagcgataaaaaatgtaatatccatagctggaggcattgctgatggaatgcgattaggacttaatgcaagagctgctttaatctgtagaggcttagaagaaatgaaaagattaggagttaaattgaatggacaaccagagactttttcaggattggcgggtttgggagatctaatcttgactgcaactggttcactttccaggaatcatgaattaggtttccgaatcggtgaaggtatttcacctaaagatttgctgaagaatcaattcaatgtagtagagggggtacctacctcaatatctctccaggaactatgccgagagcaacaagtagaaatgccgattagtgaaaatgtatatagtattcttcatgaaggtttggaccccaatgatgctctttttcagcttttggaaagaaagatacctagtcctgaaattaagcgtaaagattaa

SEQ ID NO: 209625 - DNA, 563 bp, Unknown
  Bacterial polypeptide expressing nucleotide sequence isolated from the Sargasso Sea
catgaaaatatctattgctggcgcgggggcgtttgggtctgcaatagcatcagttttcgctaaaggtgggcactcgactaagcttttttcaccaactaactttaaagaattaagcgccacaagagttcctaggaaactcagtaacataaaattaccccccgaagttgatatcgtaagttcattagaaaaaacagaaaaaaacgagtatttatttctagcagtaccaacacaaaatttagcatctttttgcaaagagaataaatcttttttaaatgacagaccgctaattgcgtgttgtaaaggtgtggatcaaacaaccgggctgagaccgtcagaaattttaagtgagcactcttcaaaagttgccgtaatgtctggcccaagctttgcgattgatatttccaaaggcatgccaaccgccttagttttagcttcagccgagcctggctttttgaaaaaattacaatcagatatttcaatgcaaaactttagactttaccgaacatcagatgttgtaggtgtagaacttggcggcgcacttaagaatataattgctatagcat

SEQ ID NO: 209626 - DNA, 1009 bp, Unknown
  Bacterial polypeptide expressing nucleotide sequence isolated from the Sargasso Sea
atgagcgagaaacaggattttaaaaatatttctattgtaggtgctggtgcatggggaacggctcttgcagaagttatgagtcggcgaggtcatcaaattaatttatgggcgaaagaaaattctgttgtgaacagtattaattctaaacatgaaaatgatgtttttttacctaatgttaaactctctaatttaatagtggcatttaataatcttgaacaaataacaaaatgtgatttgctacttgttgtttctccagctcagcatacaagagaaacattattagaagtttcaaaaactcttaaatcagaaactccaataatactctgttcaaagggaattgagatttctaccttaagtctaatgagccaggttaccgaaagtatttttcctaaaaaccccattgctatactttcaggaccgagttttgcaattgatgtggttaacaataaagcaacagctgttacattggcctgtaaagatctagaaatagcaaaaagtattgctgaaaatattagtcttcctacttttcgtccttatattagcgaagatgtaataggtgcccaaattggtggtgccactaaaaatgtaattgctattgccgctggtgttgttgaaggacaaaagatgggcgatagcgctcgagcagctacaattgctagaggtttttcagaaataaaaagattagctatatctatgggaggcaaagaagaaactcttgcaggcttatctggaatgggagatctacttctaacctgtaattcaaaaacttctcgtaattattctctaggtattcagctcggtgagggaaaatcaatcgaagaagcaacaaatggcctttcaacaattgctgaaggtatgtattctgctaaggcaataacgagtttagctgaagaaaatggggtagatatgccaataactttagccgtaaatgatttaatagagaaaaaatactctgtaacagacataatagataacctccttaacagaccaataaaaaaggaaaactaat

SEQ ID NO: 209627 - DNA, 813 bp, Unknown
  Bacterial polypeptide expressing nucleotide sequence isolated from the Sargasso Sea
gatggatagatcaaagaaagttgttgttctaggaggtggaagctttggaactgttcttgcaaatttagcagcttcaaacggttaccaagttactttgtgggtaagggattcggaacatgcactaagaattaattcagaaggcgctaataccatctatcaccctgaactaaaattatctgaaaatattcaagcctctgattctttggaggatgtgatgaaaaatgcatcaatagttttcatagcaacccctagtatagtttttgaacaaatcattgaacgtattagacatttattacaagaagatacatatgttatttcatgtacaaagggcatactaggaaatccgtttagatctctatcagaagtcataacatcaaatattaataatactgtaggtgttttaagtgggccaaatctagctaaagaaattgcagataataaggttgctggatctgtaattgctagctcagataatgatttaattgattctgtaaaaactattctttcatcagatacatttaaaatatactcaagtgatgatttacagggtgttgaacttgctggtgctcttaaaaatatctatgcaattatatgtggtttggcagaagcaatagatgttggtgagaacgctatagggttaatattaacaaggagtatggctgagatgagtagatttgctgttgcaaaaggagcaaatccaattacatttttaggccttgctggtatgggggatcttgttgcaacctgcacctctaaactatcaagaaactatcagttaggatataaccttggcaaaggaatgagcatagatga

SEQ ID NO: 209628 - DNA, 446 bp, Unknown
  Bacterial polypeptide expressing nucleotide sequence isolated from the Sargasso Sea
cgctttaaaaaacatatacgctttagcttgtggtatagcctttggtcttaattcgggtgaaaatacaataggaatgattatgacaagaggtcttggagaaatgagtagactggctcataaaatgggagccaacccaatgacatttctaggcctatctggtgtaggagatctcattacaacttgtgcatctcctttgagtagaaatcataaaatgggggagctgataggtcaggggcattctgtagaagatgctaaatcaaaaataggacaagctgtggaaggcctgaaaactctagaggctgtaaagaaaaaatctttagaagttggtataagcatgcccatagttgattcactctatagtgttatatttgaaggtactggtttcgattctatagagaaaattttaggcaatgaccagcctaaagatgtagaattcttaaattaac

SEQ ID NO: 209629 - DNA, 160 bp, Unknown
  Bacterial polypeptide expressing nucleotide sequence isolated from the Sargasso Sea
gatgaaccaaagtaatgcttcaatgactgtgattggtgccggctcgtacggcaccgctcttgccatcaccctggcaagaaatggccatcaggttgtcctgtggggccatgatccgaaacatatcgaaacccttgagcacgatcgctgcaacgtcgcgttc

SEQ ID NO: 209630 - DNA, 658 bp, Unknown
  Bacterial polypeptide expressing nucleotide sequence isolated from the Sargasso Sea
aatgagtgaagttatttcttcagaaatgactagttttaataatatcgtttcgctttatgggccaagtcacgcagaggaagtaataaacaaccaaccaactaccttagtttctgcatcagatgacctagatatagctaagaaagttcaatctattttttcatcagataatttacgtgtttatgcaaatcaggatattattggagttgagctaggggggtcattgaaaaatgttattgctatagcaacaggaatatgcgatggaatcggttttggtgataatacaaaggctgcgttattaacgagaggaatggcagaaataattaggctaggtgaaaaaatgggcgcaaacccttctactttttcaggtttaagtggagttggagatttaattgcaacgtgtttgagccatcatagtagaaatagatttattggtcagtcaattggtgaaggtaagaatctagatgagatcttaaattcgatggatatggttgcagaaggagtcaatatgtcaagatctatcgatgatttatctaaaaaatataatatcgatatgccaatatcaaaggcagtgtataaaattttatttgataataaagatccaaaagatatggtagttggattaatgactagagacttaattcaagaaaaaaataattaa

SEQ ID NO: 209631 - DNA, 1012 bp, Unknown
  Bacterial polypeptide expressing nucleotide sequence isolated from the Sargasso Sea
atgatctcattaaataaagtagcagttcttggaggtggaagctttggaacagtgctagcaaatcttgcagcatctaatggattcaatgtttctctttgggttagagattcagaccaagctttaagaattaattcagagggtgcaaatacttcttatcatccagaattaaaactatctgaaaatattgtggcttcagataatttaaatgaagttcttgagaatgctgaaattatctttattgcaacaccaagtattattttcgagaagattgtagatagaatatctgaatttatagatcctgattcttttataatttcatgtacaaaaggcattctagacgatccttatagatctctatctgagattatttcattaaaattaaaaaataaaattggagttttaagtggaccaaacttagctaaagaaatagctgaaaataagcttgctggaactgttattgcaagttcagatgataatttattgattaaagtaaagtctgctctatcttctaaacatttcaagatatattcaagcaaagatatgcaaggagtagagcttgcgggggctttaaaaaatatttatgcagttgtatgcggtatggcagaatctcttgaagttggtgaaaatgctataggattgatactaactagaagtatggctgagatgagtagatttgctgtagcgaaaggagctaatccaataacatttctcggtttatcaggaatgggagacttggttgctacatgcatgtctaatttatctcgtaattatcagcttggatttaacataggctcaggaatgaccttattagaagcaaaaaataaggtcggccaagtggctgaaggagttagaacgcttgagattgtaagaaatgaatcatcaaggcttaatattaaaatgcctcttgttgaatcaatgtataatataatttataaagaagcatcacctgaatcaataattgatgatttgctaaataatcctcatgaagttgatgtagaatttaaacattaaa

SEQ ID NO: 209632 - DNA, 574 bp, Unknown
  Bacterial polypeptide expressing nucleotide sequence isolated from the Sargasso Sea
acaattatcgggaactgttatagcaagtgaagataaagcccttcagaaaaatgtagtagatgttcttggatcggattcttttagagtttatgaaaatgatgatccttacggcgttgaaatgggaggcgcaataaaaaatatctatgctatagcttgcgggatagctgatggccttagttctggtgagaatacagttgggatgataatgacaagaggtttgggtgaaatgagtagactggcagtggagttaggagccaatcctcaaacatttttaggattatctggagtgggtgacttaattacaacctgtgcatccccattaagtagaaatcataaatttggtaaatatattggcgaaggacttactgtagaaagtgctaaaaagaaaataggtcaaacggtagaaggtctaaagactctaaaagtagtaaagactttatctgatgaaagaaatattaatatgccaatagtagattctctatacaaaatcatctataaaggagggaatctgaatggttctattcaaaatattttgggtgaggacttaattaaagatgtagaattttctaaatag

SEQ ID NO: 209633 - DNA, 534 bp, Unknown
  Bacterial polypeptide expressing nucleotide sequence isolated from the Sargasso Sea
taaaaaaaatgttagtgaaatactttgaaacagatttttttagagtttacgaaaatgatgatccatatggagtcgagatgggaggggcgatcaagaatatttatgccatagcatgcggcatagctgatggccttaattctggcgaaaacacggttgggatgattatgacaagaggacttggtgaaatgagtagattggcagttgcattaggagcaaatccacaaacatttttaggattatcaggagtcggagatttaattacaacttgcgcatctcctttaagtagaaatcataaatttggaaaatatattggagaaggattatcggtagaaagtgcaacagatgaaataggccaaacagttgaaggcttaaagactttaaaagtagttaaagttcttgctgatgagagaaatataaagatgccaatagtagattctctgtacaaaatcatctataaaggaaaggatcttaatggttcaattcagaatattttgggtgaagaccagattaaagatgtagaattttcaaaataaa

SEQ ID NO: 209634 - DNA, 595 bp, Unknown
  Bacterial polypeptide expressing nucleotide sequence isolated from the Sargasso Sea
tacagggactgtaattgctagtaacattgaagagattcgcgaaactgttaaggaagttctcagatctgatacgtttagagtatataccaacgatgatatgtttgggattgaattgggggggtctcttaaaaatatctacgcaattattgcaggtctagcggcctcgattggtatgggccataacacaaacagtatgcttgtcacacgtgccttagcagaaatggctcgctttggccgtgagttgggggctgacccaatgacatttctgggtcttgccggtgtgggtgatttagtagtaacgtgttccacgccattgagtaggaattatcgaattggacaagcccttggggaagggcgttctatagaacaggctttgactgaagttggtcaagttgccgaaggggtgaacacccttaaattggttaaagaaaaagcagatgagttgggtgtttatatgcccttagttaacggactttatagaatagtttatgataatcaacctataaaaaatatcgtgtcttcacttacattgagcgaggaagcgttagatgtcgaattcgcggctaaagatgaaaaagttcttaacggaaattga

SEQ ID NO: 209635 - DNA, 859 bp, Unknown
  Bacterial polypeptide expressing nucleotide sequence isolated from the Sargasso Sea
aatagtcgctaccttcccaatattacttttcctgaaaatattgatatattttcaaatattgaagactctgttaaagatgctaatactgtaattgttgctttaccaagcgaaactattcgagatacgttcttacaattaaaaaacacaataagcagtcagaccggaatatcatgggctagtaagggtcttgaggttaaatcaggactattaattcactcggtttgtgaagaaattcttgggaaaggacaccccatggcagtgatatcagggccatcttttgcggttgaagttgcaaataaaaaaccgactgcagttacgatcgcctctagttcaaaaaactttagaaaccaacttgcagaagacctatcagatcagaactttcgtgtatacacatcagatgacatcataggcgcagaaattggaggagcgattaagaatataattgcaatcggtgccggtatttcagatggattaaattatggagaaaatgccaagattgcacttattacaagaggattacatgaaatccaaaaactgggtgtggccttgggggcgaaaaaagagaccttttctggtttatctggagcaggagatcttttcttaacttgcacaagcaatctttcaagaaacagaagattgggccttgcgctagcggatggtagcaatttgtcagagtttgaatcaaaaaccatgcaagttgttgaaggtgtaaaagcatctgaagcagtgcacaagttatcacaaaaaatgaacatttcgatgcctatttgtgaaattatctaccaaattttatttcatcgacttgatccaaaaaaagcagcaattatgttaatgagcagagatcttcaagacgaataga

SEQ ID NO: 209636 - DNA, 991 bp, Unknown
  Bacterial polypeptide expressing nucleotide sequence isolated from the Sargasso Sea
actgctataggcaacattgtggccgcgaacggccacgctaccagcctgtggatgcgcgatcctgaccaagtcgcagaaagcctaactaatcaagagaacacacgatatctgccggggcatcccttagagagtctgctggttccgactgacgatcttgaaagcgctgctgccgatgcggaaattatattcgtgacggtgcctagttatgggttcagggatatctgccgccaattggcgccatttgtcagaaagtcggacctactggtgagtggcacgaaaggaatagagccggttggtttcagacttatgagtcagctgatcgctgagcataccacctctgaacatattggtgttttgagtggtccaaatttcgcggaagaaattgccgagaagcattacacgggcagcgttcttgctagtgagagtgcgcaggtaagagcaaaggttcaggaagtgatgcgtagtgaaacttttcgtgtgtatcccagccaggatatctttggagtagagcttggaggagcgttaaagaacatatatgccattgtttgtgggatggcggtaggacttaacgttggtcagaatacgatcggtatgataattacacgctctctggcagaaatgagccgatttgctgtttcgatgggagctaacccatacacgtttttaggactctccggtgttggcgatttattagtgacctgtacgtctcctctgagcaggaattatcagctcggtttaaaaatagcgcagggccaaacttttgaggaagcctccgatgaccttggtaagttggctgaaggcgcgaataccttggagcaagttttccaaaagagtaaagagcgaggagtttatatgcctctggttcatggtctttatcagattctattttccaacgaagaaacaaatttaatatttaaagcgctgatggagagacaggaagaaatcgatgtggaatttgctgacccgacgtattggcagggtgatccttaag

SEQ ID NO: 209637 - DNA, 538 bp, Unknown
  Bacterial polypeptide expressing nucleotide sequence isolated from the Sargasso Sea
ctgcccggcatcaccctccccccctccctcacgctggcccatggcgactttgctgcgctatggaccggcgccgacctcgtcatcgtggccacacccatggccgctttgcgcggcatgctgcagaccctgcacggctgcgctgcgcccgtggcctggctgtgcaaggggtttgaagccgtgcctgcggggaccgacccggcatcttttgggctgctggcgcacgagatacaagcgcagatagctcctgatttaatagcaggcgtattcagcggccccagctttgcgcaagaagtggcgctgggccagcccaccgccctggtggcagccagcccccatgcgcaggtgcgcgatgcgctggtcagtgccttccacagccccagcgtgcgcgtgtatgccaacgaggacatcgtgggcgtggaggtgggtggcgcggtgaaaaacgtgctggccattgccaccggcctgtgcgacgggctggcgctggggctgaacgcccgcgccgcgctcatcacgcgcggcctggccgagatgacgcggc

SEQ ID NO: 209638 - DNA, 638 bp, Unknown
  Bacterial polypeptide expressing nucleotide sequence isolated from the Sargasso Sea
ggtacaagagctaggagatgatgttcctctggctgtgctttcaggacctacgtttgcaaaagaaatggcaatgggattaccaactgctatttcggtatcgtcgacttctaaagactttgctaagcaattagctgaccttttacactgtggccgctcatttagggtgtataacaatgatgactttattggaatacagcttggtggcgcagttaaaaatgtcattgcgattggcgcaggtatgtctgacggttttggcttcggtgccaacgcacgtactgctttaatcactcgcggtttagctgagctatgccgtttaggttgtgcattaggtgcccgttcagatacctttatgggtatggccggccttggtgacttgatcttaacctgtacagataaccaatctcgtaaccgtcgctttggccttgctcttggcaagggtgaaggcgtagaagctgcgattgaatctattggtcaggttgttgaaggctatagaaataccaaagaagtgtatttacttgctgagcgcacaggtattgaaatgccaataacggagcaaatttaccaagtactttatgaaaataaagatgtaaaagaagctgcgatggcactacttggccgtgagcaaaaatctgaataat

SEQ ID NO: 209639 - DNA, 760 bp, Unknown
  Bacterial polypeptide expressing nucleotide sequence isolated from the Sargasso Sea
ctgctggcggagaacggccagcgcgtcctgcagtggatgcgtgaccccgagcaggccgagcagatgcgtcagagcggcgagaacccgcgctatctgaagggcgtcaagctgcatggcggtatcgagccgaccagtgacctgagcggcgtgctgcagcaggccgagctggtgctggtcgcattgccttccagcgccctgcgcgatgccctgcaaccggtggcggcgcagttggcgggcaagatgctgatcagcaccaccaagggcatcgaagccaagaccttcaagctgatgagccagattctcgaagagatcgcccccgccgcgcgtatcggcgtgttgtccgggccgaatctggccaaggaagtggccgatcacgccctgaccgccacggtgatcgccagtgaagatgaagaactgtgcctgcgcgtgcagcaggctctgcatggcagaaccttccgtgtctacgccagcgccgatcgtttcggtgtcgagcttggcggcgcgttgaagaacgtctacgccatcatgtccggcatggcggcggcgctgggcatgggtgagaacaccaaaagcatgctgatcacccgtgccctggcggaaatgactcgtttcgcggtcaagctcggcgccaacccgatgaccttcctcggcctcgctggtgtcggcgacctgatcgtcacctgttcgtcaccgaaaagtcgcaactatcaggtcggcttcgccctgggtgaaggcctcagcctggaagacgcggtgcagc

SEQ ID NO: 209640 - DNA, 726 bp, Unknown
  Bacterial polypeptide expressing nucleotide sequence isolated from the Sargasso Sea
acgaaatcactaagcagcttggcgatttcaaaggcatcgccgtgtctgtcaccaagggcattgaacaccaaaccggccggaccatgggcggccttattgaggccgacgcgcccaacgcaactcccgtcgccttatccggaccttcactcgccgccgaagtggcccgcggcatccccacagcattggtgtgtgccagcgaaaacgtaaccgccgccaagacggttcaagactggttccatcgtcccacccttcgcatgtacaccagcacggatgtactcggggtggaactgggcggcgccctgaaaaatgtcatggccattgccgcaggggtttgtgacggcctaaaattgggcgataatgctaaggcggccttgatcacgcgcggcctcaacgaaatgcgccgactaggaacggcggctggtgcactccccgagacattctccggtctcagcggcatgggcgacttaacagtaacctgtttttccaggcaaagccgcaaccgaacactgggtgatcgcatcgcacgtggtgaatcgctggaaaccgtattggcatccgcaactgccgaaggttatccgacatcgcgttccgccaaggcgctggcggcgcgcctggaagtatcgacgccgatcattgatgaagtctacgcgatgctctacgaggggaaagacgtccatcaggcggtaaacgacctactcacccgcaatccgagggctgaggcttaaa

SEQ ID NO: 209641 - DNA, 584 bp, Unknown
  Bacterial polypeptide expressing nucleotide sequence isolated from the Sargasso Sea
catgaagtcgaattcggtttcagcgtcggtttcagtattgggggcggggtcttatggcaccgcccttgctttttgccttgccagaaatggtaaccccacattactttggggtcgcgatgaaaagcacgttgccgagatgaacaccaaccgagaaaacgctcgctatcttccaggcgcgacatttcctgatgcgttggttgttaatgccaacctagaagaagtggtcgctgccagccaagacatcttagtggtagtacctagccatgcttttgcggctatgcttcaaagtttgaaacccttgcttaaaccgcatcagcgtattatttgggcaaccaaagggctagagcctaaaaccggtcgtttacttcgtgatgtagcagaagaaattctgggaaccgactatccgctagcggtgctttcaggccccactttcgctaaagagatggtagcaggcttgcctactgctatttcactgtcttctaccgacgataccttaagtgacgagtttgcagcaaaactgcactgtgcgaagtcatttcgcgtgtacaagaactcagacttcacgggtgtacagctgggcggtg

SEQ ID NO: 209642 - DNA, 652 bp, Unknown
  Bacterial polypeptide expressing nucleotide sequence isolated from the Sargasso Sea
tatgagcgatgttataaaggatgttataaaaaacaaatcaaatattgtaactctatctggccctagccatgcagaagaggtaatcgatgaaaaaccaactgcagttgtatcatcatcaaagaatttagcgttagctaagtatgttcaaggcctgttttcaactaataaatttagagtttatactaatacagatatagaaggtgttgaaattgctgggtcagcaaaaaatgtaattgcaattgcagctgggttttgtgatggtgttggatatggtgacaatacaaaagctgcacttataacacgtggtctaaatgaaatatcgctgttaggtagaaagttaggtgctaaatcaaaaactttttttggattagctggtatcggtgatttgattgttacatgcaatagtatacatagcaggaatagaaggctaggtgaattagttggccgaggtgagattttatctgaaatattatcgcagagtcatatggtcgcagagggagttaaaacagcagattcaatttatagtttgagaactcagcttaatatagaaatgcccatttgcgaatctgtctatcgcgtcctatatagtaattcaaaccccataagagaggttgataaactaatgacgagaaatctaagatcagaatattga

SEQ ID NO: 209643 - DNA, 709 bp, Unknown
  Bacterial polypeptide expressing nucleotide sequence isolated from the Sargasso Sea
taagttaattattaacctgtcaaagggtatagagatagataccttaatgaccgtcagtgaagtaattaaagatgttttatctgatagttatcaaggcattgtaaccttgtcaggacctagccatgcggaagaagtaattcaaaaacacccaacaaccctcgtagcagcatcttctgatctggattgtgcgcaaaaggttcaaaatctttttgcaacagatatgttaagaacatacagaaataatgacattaaaggcgtggaattaggaggggccatgaaaaatgttattgcgattgcggcaggtatttgtgatggtatcggttatggtgataattcaaaagcagcattaatcactagaggaatgacagaaataagtagattgggtacaactatgggtgggcaaagggaaacatttaatgggttaagtgggtttggtgatttaattgtaacatgtctaagtaggcatagtcggaataggcaattaggagaagcgattggcagaggcagatcacttgaagaaataacctctaaaatgaatatggtagctgaaggtatttttactgctaagtcagtacaccagttacgtataaaacattgtgtagaaatgcccatacatgaagctatatatcaggtattatttgaagataagaatccaagaacctcagttgttgagttaatgaaacgaagacttagcgaagagaataactga

SEQ ID NO: 209644 - DNA, 755 bp, Unknown
  Bacterial polypeptide expressing nucleotide sequence isolated from the Sargasso Sea
aatgaccaatattgtagtcatgggagctggaagctggggcagcgcaatcgccacggccctgatgcgggctaagcagaaaaacagtaaaaccaagcatgttacagttttggctcgtcgtcaggagagtgttaatgcacttgccgcgggacgctgtttatacctccccgaaaatccaccagcaatgtctattgccgccaccactgatccaacgtgtcttgatgatgctgatctgatctttgttgcggcgcctgtattagcaaatcaggcgagctttttgatgatccatgatcgacaaagcgatcagcaaaaaaatcagagcatagccacaattgtgttatgtgctaaaggaattggcaagaacgatgacggcaatgcgatgctactcaccgaacttgcagccaacattttacccgaacacccacttgcagtattttctggacccagctttgcagatgaggtgtttacggggttacctgccgcattggtaacggctagccatacgcctgcagccgccattcaaattcaggatgcatttgaaggcagcaatttacgcctatatagcaatgatgatccgattggcgttgcacttgcgggtgcaatgaaaaatgtgattgctattgccgctggctgtgcagttggagctggatttggtgacaatgccaaggcggcaatccttacacgcggccttgcagaaattgcgcgctttgccatcttaatgggggcaaagcccgatacgatttttggccttgccgggg

SEQ ID NO: 209645 - DNA, 562 bp, Unknown
  Bacterial polypeptide expressing nucleotide sequence isolated from the Sargasso Sea
gcatcaaaatcaccagagataacaaaaatagtccagcaaatattttcctcgcattatttaaaggtatttactagtgaagatattttgggagtagaaattggtggtgcattaaaaaatgtaattgctattgcaactggaatttctgatggcctaggtttaggattcaacacaagggcagcattaatcacaagaggattggtagaaatagcgcgaattggtaccgagcttggtgcaaaaccagaaacttttaacggcctttctggattaggggatctagtcctcacctgcacgggtgaccttagtagaaaccgatatttagggatccaattaggaaagggtaaatcactggatgatattacaaaaaaattgagaaccgtagccgaaggtatttcaactgtcaaatccgcctataaactcatccataaattaaatatccaagcatctattatggaagaaacatttaaagttctacatgaaaataaatctccgaaaaaagcccttggtgatttgatgaaagtagagatctccaatgaattttcagggattaaaggtctagcatgaa

SEQ ID NO: 209646 - DNA, 658 bp, Unknown
  Bacterial polypeptide expressing nucleotide sequence isolated from the Sargasso Sea
gtcagtgaggtgataaatgacgtattagatggtcagcataagagcctggtaacactttccggtccaagtcatgctgaggaagtcataagcggccacccaaccacattggttgcagcctcaaaagacgttcaatcagctaaaataattcaaaacttatttgcaactgaaaagttaagaacatatctgaacagagatataaggggagtcgaactaggcgggtccatgaaaaatgtaattgcaatagctgcaggcatttgtgacggcataggatatggagataattctaaggcagccttaatgacaagaggtatgatggaaataactcgcttgggtgaggccatgggagcgagggttaaaaccttcaggggtttaagtggttatggagatcttatcgttacttgcctaagtaaacatagtaggaatagacaattagggcaattaatcggtgagggtaaaattcttgaagatattacctcagatatgagtatgatagctgagggtatatttacagcaaaatcagtacatcaattacagttaaaacacaatgttgaaatgcctatacatgaggctatataccaagttttgttccagaaaaaggatcctaaaaattctgtggcagaattaatgacccgcagattgagcgaagaattgaattaat

SEQ ID NO: 209647 - DNA, 790 bp, Unknown
  Bacterial polypeptide expressing nucleotide sequence isolated from the Sargasso Sea
gtcattggggctggaagctggggcagcgcaattgccacagccctgatgcgggctaaacagaaaaatagtaggaccaagcagatcactgttctagctcgtcatcaggagagtgttgatgcccttgccgagggacgctgtttatatctgcccaaaaatccgccagccatgtccattgctgccactactgatccagcctgtcttgatgatgctaatttgatttttgttgccacgcctgttgtggcaaatcaagcaaacttggtaatgataaatgatcgacaaaacaacccgcaaaaaaacgagcaccaaaatcaaagattagccacaattgttttatgtgctaaaggaattggtaaggccgatgatggaaacgctatactgcttaccgaacttgcagcaaatattttacccgcccatcaacttgcagtattttctggacctagctttgcagatgaagtgtttaccgggttacctgccgcattggtaacggctagtcatacgcctgcaactgccattcaaattcaggaggcgtttgaaggcagtaatttacgcctatatagcaatgatgatccgattggcgtcacacttgcaggtgcaatgaaaaatgtgattgccattgccgctggctgtgcagttggagccggatttggtgacaatgctaaggcggcgatcctgacacgcggccttgcagaaattgcgcgttttgccgctttaatgggggcaaagcccgatacgatttttggtcttgccggagttggtgatcttgcgctcacctgtgcgggaccacactcac

SEQ ID NO: 209648 - DNA, 754 bp, Unknown
  Bacterial polypeptide expressing nucleotide sequence isolated from the Sargasso Sea
cctgacccgcacgattgccgcgcacggcggcgtgcgcaacgtgatctggctgtgcaaggggttcgaccccgaaaccagcgcactgccgcacgccatcgtcgccgatgtgctgaaggcgtctggccgtaccgacctcgctgtcggggtgctgtcggggccgagtttcgccaaggaagtcgcgcagggtttgccgtgcgccatgacggtcgcctcgaccagcgatgcgctgtgcaagctcacgcagcgcggttttcaccatcacgcgatgcgcgtgtatgcaagcgatgacctcgtcggcgtggaagtgggcggtgccgttaagaacgtgctcgccattgcgacaggcgccgccgacggcctgggcctcgggctgaacgcgcgcgccgcactggtcacgcgcgggctggccgagatgacgcgcctggggttggcgctcggtggtcggctggaaacattcatggggctgactggcgtgggcgatctgctgctgaccgccaccggcgatctgtcacgcaaccgcacggtcgggatgcagcttgcgcagggccgcacgctcgacgacatcctgcacagcctcggtcacgtcgccgaaggcgtgcgttgtgcgcgtgccgttgcggcgctcgcgcgcgccaagggcgtggacatgccgatcacctttaccgtctgcgaagtcctgttcgaagggcttcctgctgcgaaggcggtcgagcgtctgctgcagcgcgacgccaaatccgaatcggcacgctag

SEQ ID NO: 209649 - DNA, 757 bp, Unknown
  Bacterial polypeptide expressing nucleotide sequence isolated from the Sargasso Sea
tctcagagtgttcgtggggtattattaaatgctcaaaattcaattggtacatcaaaatgtattatcaatattgcaaaaggtattgagaataatagtttgatgacaatgagccaggttataaaggacgttttaaaaaataaatcaaatattgtgactctatctggtcctagccatgctgaagaagtaatcgataaaaatccaactgcaatagtagcatcatctaaaaatttgggtctcgctcagtatgttcaaagtcttttttcaacaaacaaatttagagtttatacaaataccgatataaaaggagttgaaattggaggatcaacaaaaaatgtaattgcaattgcagctggattttgtgatggtactggatatggtgataatacaaaagccgcgcttataacgcgtggtctaaatgaaatatctctattgggtaaaaagctgggagctaaatcaaaaactttttttggattagctggtataggtgacttgattgttacatgcaatagtgttcatagtagaaataggaggttaggtgaattagttggtcgaggtgaaaatttatcaaaaattttatctcagagtcatatggttgcagaaggtgttaaaacagcagattcgatatatagtttaagaaccaaacttaatatcgaaatgcctatctgtgaatctgtatatcgcgtcttatatgaaaattcaaaccccactagtgaagttgataagcttatgacgagaaatctaaggccagaatattaat

SEQ ID NO: 209650 - DNA, 487 bp, Unknown
  Bacterial polypeptide expressing nucleotide sequence isolated from the Sargasso Sea
gatgaacgcacttaatgctgcaatgactgtgatcggtgccggctcatacggcaccgctcttgccatcactctggcaagaaatggccaccatgttgtgctctggggccatgacccgaaacatatcgcgacgctgcaacatgaccgctgcaatgccgctttccttcctgacgtccctttccctgacacgctgcatcttgaaagcgatctgtctgccgcgctggctgccagccgcgacattctggttgtggtgccaagccatgtctttggtgaggtcctgcgccagattaagccgctgatgcgttcggatgcgcgcctggtctgggcgacgaaaggccttgaggctgaaaccggtcgtctgctgcaggatgtcgcgcgcgaagcgctgggcgacacaatcccgctggcggtgatttccggcccgaccttcgccaaagagctggcggcagggctgccgacggccatttcgctggcgtccacggagccgcaa

SEQ ID NO: 209651 - DNA, 181 bp, Unknown
  Bacterial polypeptide expressing nucleotide sequence isolated from the Sargasso Sea
gcgctcatcacccggggcttggtagagatgcagcgcctgggcgccgcgctcggggccgacgccaagaccttcatggggatggccgggctcggggatctggtgctgacctgtaccgacaaccagtcgcgcaaccgtcgcttcgggctggccctcggggccggtaaggatgtgaacaccgcca

SEQ ID NO: 209652 - DNA, 289 bp, Unknown
  Bacterial polypeptide expressing nucleotide sequence isolated from the Sargasso Sea
tggtttaggtgacttggtactaacatgtactgacaaccagtcgcgcaatcgccgttttggtttggcattaggccaaggtaaagatgtgatgacggcgcaagacgagatcggtcaagtcgttgaaggttatcgcaatactaaagaagtgtttactttagccaaacgtctaggggtagaaatgcccattaccgagcaaatctatcaagtgctttaccaaggaaaagcgccagttgaagccgcaaaagagttactcagtcgagataaaaagtcagagacactcaaaaaatag

SEQ ID NO: 209653 - DNA, 817 bp, Unknown
  Bacterial polypeptide expressing nucleotide sequence isolated from the Sargasso Sea
tttgtataccagcgacgcttttagagaggtatcgtcactagcagtaaactttattcaagaaagttcatatcttattactgcaactaaaggtgtcgaaaaagatgggtttagtttgatgagcaatattcttgaggagtattatcccaagaatcctataggtgtcttaagtggacctaatctagcagaggagatagccaatcatcacttatctggaactgttatagccagcaaagataaagacctgagaagacagacaattgaagatttatctacagattactttagagtttatgagaatgatgatccttatggtgtagaaatgggtggtgcattaaagaacatatatgcaattgcttgcggtatagctgatggtttaaattcaggagaaaatactattggcatgataatgacaagagggttaggggaaatgggacgtttggcgactgatttaggcgctaatcctcaaacttttctaggtttggctggagtaggagatctcattacaacttgtgcatctcctttgagtagaaatcatcagtttggaaaatttatcggtgaaggtttatctgttgatgaagcaaaattaaaaattggccaaaccatagaaggattaaaaaccttgagggttgttaagaacatatcagataaaaatcatgttgagatgccaattgtggattctctgtacaaaataatctataaaggtgatagtcttgatggatcaattcaaaatgtcttgggtcaagacatgataaaagatgttgaatttgtaaaaaaaaaaatatgtcagaaaaagaagaagataaagttattgatgtag

SEQ ID NO: 209654 - DNA, 601 bp, Unknown
  Bacterial polypeptide expressing nucleotide sequence isolated from the Sargasso Sea
ctttctggacctactcacgctgaagaagttattgataaaaatccaactgcaattgtgtcgtcatctaaaaatttagcacttgctaaatatgttcaaggtctattctcaacgaataattttagagtctatacaaattctgatataaaaggcgttgaaattggtggatcagcaaaaaatgtaattgcaatcgcagctgggttttgtgatggagctgggtatggtgacaatacaaaagccgcgcttataacacgcggtttaaatgaaatatcgctattaggaaaaaaattaggcgcgaagtcaaaaactttttatggattagctggcataggtgatttgatcgttacatgtaatagtatccatagtagaaataggaggctaggtgaattggttggtcggggagaaggtttatctacaatattatcaaaaagtcatatggttgcagagggagttaaaacagcatattcaatttataatttgagtaaaaagctaaatattgaaatgcctatttgtgaatctgtttatcgcgttttgtacaataattcaaatcctataaaagaggttgataaattaatggcaagaaatctaagatcagaaaattaat

SEQ ID NO: 209655 - DNA, 772 bp, Unknown
  Bacterial polypeptide expressing nucleotide sequence isolated from the Sargasso Sea
ttgaaatcagtaacatttttaggttgtgggtcttggggaggtgcactaggtaagttactttctgaaaaagggattgatgttacaatgtggcaccgaaaagctgaagttgttagtcatctaatcaatactcaaaaccactatttaatacctgaattaattttcccatcaaatgttaattttacaaacgacatctcatcagcgataaagtcttctgaaattattgttttggccttaccatcgcagtcaattagaaatgtcatcacaaaaaacaagtcatcttttaataaaaatcacataattgtaaatatttcaaaaggtatagaaattgatacattattaacagtcagtgaggtaatagatgatatattaaatggctgtcataagagtgtggtaacactttccggtcctagtcatgctgaggaagtcatacgtggtcatcccaccactttggttgcggcgtcaagcgatgttcaaacagctgaaataatccaaaatttatttgcaactaaaatgttaagaacttatttaaacagggatataagaggagtcgaactaggcgggtccatgaaaaatgtaattgcgatagctgcgggcatttgtgatggcataggatatggagataattctaaggccgctttaatgacaagaggtatgatggaaataactcgcttgggtgaggcgatgggagcaaaggttaaaaccttcagaggcttaagtggttatggagaccttattgtcacgtgtcttagtaaacatagcagaaatagacaac

SEQ ID NO: 209656 - DNA, 768 bp, Unknown
  Bacterial polypeptide expressing nucleotide sequence isolated from the Sargasso Sea
catgacacgacagcaacccatcgcggtactcggcggcggcagtttcggtaccgcgatcgccaatctgctggccgagaatggtcaccacgtcctgctctggatgcgcgatgcggagcaggccgaaagcatccggacgctgcgacagaacccgcgctatctgaaaggcgtcgagatccgtgcgcaggtcgagccgaccaccgatctgtcgtcgaccctcgatgcctgcgagctgatcttcgttgcgctgccgtccagcgcgctgcgccaggcactgcagccgttcgcggcgcagctcggcggcaagatgctggtcagtaccaccaaaggcatcgaggcggacggcttcatgctgatgagccagattctcgagcagatcgcgccgcaagcgcgcattggcgtgctgtccggaccgaacctggcgcgagaagtggcggagcacgcgttgaccgcgactgtggtggcgagccaggacgaagccttgtgccggagtgtgcagcaggtgctgcatggccgcaccttccgtgtctatgccagctccgatcgcttcggcgtcgagctgggcggggcattgaagaacgtctacgcgatcatggcgggtatggccgcagctctgggcatgggcgagaacacccgcagcatgcttatcacccgcgctcttgcggaaatgactcgtttcgccgtgaagctgggcgccaatcccatgacctttctagggctggcaggggttggcgatctgatcgtgacctgcacctcgcccaagagtcgcaa

SEQ ID NO: 209657 - DNA, 558 bp, Unknown
  Bacterial polypeptide expressing nucleotide sequence isolated from the Sargasso Sea
gggttgcgggtacctgtccgaaatttaccgctgagctagtggaattgctgcacagccctaaacgcttacgtgtttacgctaacgacgactttatcggtctgcaattaggcggcgcggtgaagaacgttattgcgattggcgcggggatgtccgacggtattggctttggtgccaacgccagaacggcgttaatcacccgcggtttagtcgagttaacccgtttaggcgaagccttaggcgccagcactgccacctttatgggcatggctggattaggcgatctagtgttgacttgtaccgacaaccaatcccgtaaccgccgctttggtttagccttaggtaaaggctgcgatgtggataccgcccaggccgaaatcggccaagtggttgaaggttatcgcaatactaaagaagtgtttaccctagcgaagcgcatgggcgtcgaaatgccgatcaccgagcaaatctaccaagtgttataccaaggcaaagcgcccttggatgccgctaaagaactgctcagcagagaaaagaaatcagaaacgccagcgcaataaa

SEQ ID NO: 209658 - DNA, 1009 bp, Unknown
  Bacterial polypeptide expressing nucleotide sequence isolated from the Sargasso Sea
atgaataaaaacaaaatatcagttcttggaggagggagctggggtacagttctagcacatttggcatcactcaatggcaacgaggttaccttatggatgcgcgatgaagaagtcgctaaagagataaataacactaatatcaatagtagatatttacccaatttatctttaggttctaatttgattgctacttcagaaatggcggatatatctgattcaggaataataattttttgtattccaagtgatgctttcagggatgtgtctggtttagcatccaactatataaaagaagaatcttttttggtgactgcaacaaagggagtcgagaaagatggttttagtctcatgagtaatatacttacagattcctttcctaggaatgccataggtgttctgagtggaccaaatcttgctgaagagattgcttcaaatcatttatccggaacggtgatagctagcgaaaataaaattttggtccaaactattattacaagtctctctactgagttttttagagtatatgagaatgatgatccgtatggagtagagatgggaggagccttaaaaaatatatacgctattgcttgcggtatagccgatggactagattctggagaaaatactgtaggaatgataatgactcgaggtttaggtgagatgggtcgtctagcctcagcattaggagctaaccctcagaccttcttaggtttggcgggagtgggtgatttgataaccacgtgtgcttcccctttaagtagaaatcatcaatttggtaagttgataggaaaaggcatgtcagttgatgatgcaaaaaaacaaataggacaaactatagaaggtttaaagaccctgaaagtggttaaaatcatttcagatgaacataaagtaaaaatgcccatagtggattctctatacaaaatcatctataaagggaatagtcttgatggctcgattcaaaatgtactgggtcaagatatgataaaagatgtcgaatttataaaataaa

SEQ ID NO: 209659 - DNA, 1000 bp, Unknown
  Bacterial polypeptide expressing nucleotide sequence isolated from the Sargasso Sea
atgaacgctgcaattgctgtgttaggggcgggctcgtatgggaccgcccttgctatttcgctggcacgtaatggtaatccaactctgttgtggggccggaacgctgatgatattcgtgtgatgaccgaacagcggatgaatcagcgctatttgccggacatccgtttgccggattctttggctgtgactgatgatctggcgtatgcagtagggtcatgccgggatattttattgtccgtgcccagtcatgcttttgctgacaccttaagagatattaagccttttcttcagcataatgcccgtgtcgcctgggcaacaaaaggtttagagcctgaaactggccgcttgctacaagatgtcgccaaagaaattctcggtgaagaagtgtccttagctgtgttgtcaggtccaacctttgctaaagaattggccaaaggtttgcctacagctatttctttatcctccacagatcctgaatttattaccaccttatccgacttattgcattgcactaaaacattcagggtttataccaatcctgattttattggcgtgcaactcggtggtgcggtgaaaaacgttattgctataggtgccggtatggctgacggtattggctttggtgctaatgcccgtacagctttaattacccgtggtttaacggaaatgtgccgtttaggttgtgccttaggtgcgaaaaaagaaacctttatgggcatggcgggtttaggtgatttagttttaacttgcacagacaaccagtcccgcaacagacgctttggtttgttgttaggtgaaggcaaaggcgtagacgaagccatgacaaccataggtcaggtggtggaaggttaccgtaatgccaaggaagtctttaatctggcgcaacgtgtcggtgtagaaatgcctattaccgagcaaatttaccaggtgttgtatcagggcaaagatgcgcgtttggcggcgatggatctgctaggccgcgaaaaacgcgacgaataaa

SEQ ID NO: 209660 - DNA, 1009 bp, Unknown
  Bacterial polypeptide expressing nucleotide sequence isolated from the Sargasso Sea
aatgaaattaaagaaagtagtaacaatttttggcgctggtagttggggaacagctatcgctaaaaatatctcaagaaatggatataaggttcatttgtgggccaaagaaaaagaagttgtagagtcaatcactaagtttagagaaaatagagtttatttaccaggaataaagctacctagtattattattcccacactatctttagataaagcactctttaaatctgattttttaattttttcaattcctactcaattcatcagagagtctctttctgtaatgaaaaatatgattaacaaagattcaatcttaataaatacgtcaaaaggtattgaacagtccagtatgaagccaattttttctatcttcaaagatgtattacctagagtaaataagagatatgtcaccatatctggtcctagttttgcatatgatgtagcaagtgggttgccaacctctgtaactttggcagcatctaattctttacttttaccagttgcaatgaaaatatttgaaaatcaaaattttaaaacttatacaagtaaagatattgttggagtagagcttggaggttctttaaaaaatgttattgcaattggtgcagggattttagatggaattaagtccagtgaaagcacaaaggcggcttttattactagaggtttaaatgaaataaaaacattatccaagtttttaggtgcaaaaaacgatactttcatgggactttcaggaataggagatttaatgcttacggcttatggggagcaaagcagaaatagatcattgggttttaatattggtaaaggtaaaaaaataaagacaatattattatcaaataaaactgttgcagaaggtttttatacatcaaaagcaatatatgaattaactaaaaaatataagattcattccccaataattgaatcaatatataagattttatatagaaattctaatccaaataatattataaaaaaccttttaaaaaatgatggaatagtcgatatttag

SEQ ID NO: 209661 - DNA, 1018 bp, Unknown
  Bacterial polypeptide expressing nucleotide sequence isolated from the Sargasso Sea
atgaaaaactctgccgatatcacggtgttaggggcgggctcttatggcaccgcccttgccatctctttagccagcaatggtcataagaccttgttgtgggggcacgatcctgcccatatgcagacgctcgctcaggataaatgcaaccaagcgttcttgccgggtattgcctttcctgagtgtttatatatcgaagccgacttagccaaagctttagcggccagcaataatgtgctgattgtcgtacctagccatgtgtttggctcggtattggcccaagcaaaacctttgttacgccaagatgctcgcatcgtatgggcgaccaaaggactcgagcctgaaaccggacgtttgctgcaagatgtggcccgtgatgtgttaggcgagcaatatccgctggcggtattgtcaggaccgacgttcgcgaaggaattagccatgggattacctacggcgatttcggttgcgggcacttgtccgaaatttaccgctgagctagtggaattgctgcacagccctaaacgcttacgtgtttacgctaacgacgactttatcggcctgcaattaggcggcgcggtgaagaacgttatcgcgattggtgcggggatgtcagacggtattggctttggtgctaatgccagaacggcgttaatcacccgtggtttagtcgagttaacccgcttaggtgaagccttaggcgccagtactgccacctttatgggcatggctggattaggcgacctagtgttaacttgtaccgacaaccaatcccgtaaccgccgctttggtttagccttaggtaaaggctgcgatgtggataccgcccaggccgaaattggccaagtggttgaaggttatcgcaatactaaagaagtgtttaccctggcgaagcgcatgggcgtcgaaatgccgatcaccgagcaaatctaccaagtgttataccaaggcaaagcgcccttggatgccgccaaagaactgctcagcagagaaaagaaatcagaaacgccagcgcaataaa

SEQ ID NO: 209662 - DNA, 1000 bp, Unknown
  Bacterial polypeptide expressing nucleotide sequence isolated from the Sargasso Sea
atgaaagtagccgttctcggcgccggtgcttggggcaccgcgctcgcgggccatctggccgcgcggcacgatacgcttctgtgggcgcgcgatgccgcgctcatcgccgggctgcaggcccggcacgaaaattcccgctatctggacggcatcgtgctgcctgacgcgttgcgctacgacgccgatctcggcgccgcgctcgcgcatggcgccgcggacgacgcactgtgcgtgatcgccgcgcccgtggccgggttgcgcacgctgtgtcacgcgatgcgcgacgcaggctgcgtgcctgcgcatgtcgtctgggtctgcaagggcttcgaggccgacacgcatctgctgccgcaccaggtgatcgcggccgagttgcccgaacagcacagcaacggcgtgctgtcggggccgagcttcgctcgcgaagtcgggcagtcgctgcccgtcgcgctgacggtggcgagcacgtccgccgaatgccgcgagcgcacgctcgccgcgttccatcacggcgcgatgcggatctatacgggcgacgatgtggtcggcgtcgaggtcggcggcgcggtgaagaacgtgctcgcgatcgcgaccggcatcgccgacggtctcggcctcgggctgaacgcgcgcgccgcgctgattacgcgcggcctcgccgaaatgtcgcggctcggcgtcgcgctcggcgggcgagcggaaaccttcacgggcctcacgggcctcggcgacctgatcctcaccgccacgggcgacctgtcgcgcaaccgcacggtcggcctgcaactggcggccggccgcacgctgaacgatatcctcggcgcgctcggccacgtggccgaaggcgtgcgctgcgcgcaggccgtgctggccatcgcgcgcgcgcagtcgatcgaaatgccgatcaccgaagccgtgtgcggcgtgctgttcgacggcatcgcgccgcgcgacgcagtcagcggcctgctgcggcgcgacgcgcgcgccgagtaac

SEQ ID NO: 209663 - DNA, 860 bp, Unknown
  Bacterial polypeptide expressing nucleotide sequence isolated from the Sargasso Sea
gcttggtattgccttccccgagtgtttacatatcgaagccgacttagccaaagccttagcggccagcaataatgtgctggttgtggtacctagccatgtgtttggctcggtattggcccaagcgaaacctttgttacgccaagatgctcgcatcgtatgggcgaccaaaggactcgagcctgaaaccggacgtttgctgcaagatgtggcccgtgatgtgttaggcgagcaatatccgctggcggtattgtcaggaccgacgttcgcgaaggaattagccatgggtttacctacggcgatttcggttgcgggcacctgtccgaaatttaccgctgagctagtggaattgctgcacagccctaaacgcttacgcgtttacgctaacgacgactttatcggcctgcaattaggcggcgcggtgaagaatgttatcgccattggcgcggggatgtccgacggtattggctttggtgccaacgccagaacggcgttaattacccgcggtttggtcgagttaacccgcttaggcgaagccttaggcgccagtaccgccacctttatgggcatggctggattaggcgacctagtgttgacttgtaccgacaaccaatcccgtaaccgccgctttggtttagccttaggtaaaggctgcgatgtggataccgcccaggccgaaatcggccaagtggttgaaggttatcgcaatactaaagaagtgtttaccctagcgaagcgcatgggcgtcgaaatgccgatcaccgagcaaatctaccaagtgctataccaaggcaaagcgcccttggatgccgccaaagaactgctcagcagagaaaagaaatcagaaacgccagcgcaataaa

SEQ ID NO: 209664 - DNA, 1009 bp, Unknown
  Bacterial polypeptide expressing nucleotide sequence isolated from the Sargasso Sea
aatgaatagaaaaactatttctgtcctaggagggggaagttggggcacagtcttagctcaccttgcctcattgaatggaaataaagtaactctgtggatgcgagatgaagaaactgcaaaagaaatcaatcaaactcacattaatcaacgatatctgccgagcttaaatctaggatcaaatctcgtggcaacccctcatattgaggaagtatctgattcagacacaataatattttgtataccaagcgatgcttttagagaggtatcgttactagcagcaaactttattcaagaaagttcatatcttattaccgcaactaaaggtgtcgaaaaagacgggttcagtttgatgagcaatattcttgaagaatattatcctaagaatcctataggtgtcttaagtggacctaatctagcagaagaaatagccaaccatcaattatctggaacggtcatagctagcaaagataaagatctgagaagagagactattgaagatttatcaacagattattttagagtctatgagaatgacgatccttatggtgtagaaatgggtggtgcactaaagaacatatatgcaattgcatgcggtatggctgatggtttaaattcaggagaaaatactattggtatgatcatgacaagagggttaggagaaatgggacgtttggcgagtgatttaggcgctaatcctcaaacttttctaggcttggcaggagtaggagatcttattacaacttgtgcatcacctttgagtagaaatcatcaatttggaaaatatatcggtgaaggtctatctgttgaggaagctaaacaaaaaattggccaaaccattgaaggattaaaaaccttaagggttgtaaagaacatatcagataaaaatcaagttgagatgcctattgtggattctctgtacaaaataatctataaaggtgatagtcttgatggatcaattcaaaatgtcttgggtcaagacatgataaaagatgttgaatttgtaaaataa

SEQ ID NO: 209665 - DNA, 1018 bp, Unknown
  Bacterial polypeptide expressing nucleotide sequence isolated from the Sargasso Sea
atgaaaaactctgccgatatcacggtgttaggggcgggctcttatggcaccgcccttgccatctctttagccagcaatggtcataagaccttgttgtgggggcacgatcctgcccatatgcaaacgctcgctcaggacaaatgcaaccaagcattcctgcctggtattgccttccccgagtgtttacatatcgaagccgacttagccaaagccttagcggccagcaataatgtgctggttgtggtacctagccatgtgtttggctcggtattggcccaagcgaaacctttgttacgccaagatgctcgcatcgtatgggcgaccaaaggactcgagcctgaaaccggacgtttgctgcaagatgtggcccgtgatgtgttaggcgagcaatatccgctggcggtattgtcaggaccgacgttcgcgaaggaattagccatgggtttacctacggcgatttcggttgcgggcacctgtccgaaatttaccgctgagctagtggaattgctgcacagccctaaacgcttacgcgtttacgctaacgacgactttatcggcctgcaattaggcggcgcggtgaagaatgttatcgccattggcgcggggatgtccgacggtattggctttggtgccaacgccagaacggcgttaattacccgcggtttggtcgagttaacccgcttaggcgaagccttaggcgccagtaccgccacctttatgggcatggctggattaggcgacctagtgttgacttgtaccgacaaccaatcccgtaaccgccgctttggtttagccttaggtaaaggctgcgatgtggataccgcccaggccgaaatcggccaagtggttgaaggttatcgcaatactaaagaagtgtttaccctagcgaagcgcatgggcgtcgaaatgccgatcaccgagcaaatctaccaagtgctataccaaggcaaagcgcccttggatgccgccaaagaactgctcagcagagaaaagaaatcagaaacgccagcgcaataaa

SEQ ID NO: 209666 - DNA, 1027 bp, Unknown
  Bacterial polypeptide expressing nucleotide sequence isolated from the Sargasso Sea
catgcgcatagcgatcataggtggcgggaattttggtaccgctataggcaacattgttgccgcgaacggttacgataccagcttgtggatgcgggatcctgatcaagtcgcagaaagcctaattcatcgagagaacacacgatatctgccggggcatcccttagagggcctgctagttccgactgacgatcttgaaagcgccgctgccgatgcggaaatcatattcgtgacggtgcctagttatgggttcagggatatctgccgccaattggcgccatttgtcagaaagtcggacctacttgtgagtggcacgaaaggaattgagccggttagtttcagacttatgagtcagcttatcgctgaacataccccctctgaacatattggtgttttgagtggtcctaatttcgcagaagagattgccgataagcactacacgggtagcgttctagctagtgagagtgcacaggtaagagcaaaggtccaggaagtgatgcgtagtgaaacttttcgggtatatccgagccaagatatttttggagtagagcttggaggagcgttaaagaacatatacgcgattgtttgtgggatggcggttggacttaatgttggccagaatacgatcggtatgataattactcgctctctagcagaaatgagccgatttgccgtttctatgggagctaacccatacacatttttagggctctccggtgttggcgatttattagtgacctgtacgtctcctctgagtaggaattatcagctcggtttaaaaatagcgcagggccaaacttttgaggaagcctctgatgaccttggtaagttggctgaaggcgcgaataccttggagcaggttttccaaaagagtaaagagctcggagtttatatgcctttagctcatggtctttatcagattctattttccaacgaagaaacaaatttaatatttaaagcgctgatggagagacaggaagaaagcgatgtggaatttgctgacccgacctattggcagggtgatccttaa

SEQ ID NO: 209667 - DNA, 1000 bp, Unknown
  Bacterial polypeptide expressing nucleotide sequence isolated from the Sargasso Sea
gatgaacgctgcaattgctgtgttaggggcgggctcatatgggaccgcccttgccatttcactggctcgtaatggtaatccaactctgttgtggggacgcaacgcggatgatatccgcgtcatggccgagcaacgggttaatcaacgttatttgcctgatatccgcttgcctgattctctggctgtgactgacgatttggcgtatgccgtgagctcttgtcgggatatcttattgtccgtgccaagccatgcttttgcagacaccttaaagcaaataaaaccttatttgcagcctgcagctcgtgtggcttgggcgactaagggtcttgaaccagaaaccggtcgtttactgcaggatgtcgccaaagaaattctgggtgaagacatctctttagctgtgctgtcaggcccgacttttgccaaagagctggctaaaggtttaccaacagcgatttctttgtcctctaccgaccccgaatttatcgccgctttatccgatttattgcattgcactaaaaccttcagggtttataccaatcctgactttatcggcgtacagctcggtggtgcagtgaaaaatgtcattgctataggcgctggtatggccgacggtataggtttcggcgccaatgcccgtacagcattgatcactcgtggtttaacagaaatgtgccgtttaggttgtgctttgggcgcaaaaaaagaaacctttatgggcatggctggtttaggcgatctggttttaacctgtacagataatcaatcccgcaacagacgtttcggtttgttgttaggtgaaggcaaaggcgtagacgaagccatgacgaccataggtcaggtggtggaaggctatcgcaatgccaaagaagtctttaatctggcacaacgtgttggtgtagagatgcctattaccgagcaaatctatcaggtgttgtatcagggtaaagatgcccggttagcggcgatggacttactcggccgcgaaaaacgcgacgaatag

SEQ ID NO: 209668 - DNA, 1012 bp, Unknown
  Bacterial polypeptide expressing nucleotide sequence isolated from the Sargasso Sea
atggaaaattttaaaaaagttgctgtgcttgggggaggaagtttcggaacagtcttagcaaacttggctgcctcaaatgattataaagtttctttatgggtaagagatgctgagcaagcattaaggattaactcagagggagcaaatacttcatatcatccagaattaaaactctctgataatatacaagcaactgaagatctaaatgaagtaatgagagatgcttcgattatttttattgcaacgccaagtattatttttgaacagattatgaatcgtatttctgaattaatagataataaagcttatgtaatatcttgtacaaaaggcatattagagaatccatttaggtctatgactgatgttattcagaataaaattaagaatgatgttggtgtgctaagcggcccaaatttagccaaagaaattgcacagaataaaattgctggaactgtcatagcatctaataatgaggacttaataaaattagttaaagatactttgtcttctaagacatttaaaatcttttctagcaatgatatacagggggttgaacttggaggggctttaaaaaatatctatgcaattatttgtggcttagctgattctcttgaggttggagaaaatgctttaggtttgattctaacaagaagcatggctgaaatgagtagatttgcagtagcaaagggggctaatccagtaacatttcttggcctttcaggaatgggtgatttagtagctacttgcacatcaactttatccagaaattatcagctagggcataatttgggcataggaatggatttagatgatgcaaaagacaatgttggtcaggttgcagaaggcattagaacgcttgaggtaataaggaatgaatctataagcttagatttgaagatgccacttattgagtctttatataatataatatataaaaaatcatccccagattcattaattaatgatttaattaataatcctcatgaagttgatgtagaatttaaattatgaa

SEQ ID NO: 209669 - DNA, 1006 bp, Unknown
  Bacterial polypeptide expressing nucleotide sequence isolated from the Sargasso Sea
atggccgaccagatcgctatctcggtcttgggggcggggtcttatggctccgcccttgccatttctctggcgcgcaacggtcatccgaccctgctgtggggtcacgaccccgcccatgtcgccgagctggaacaagaccgctgcaacaaggcttttctgccggatgtcccttttcctgccgatctgcagctgaccgccgatctgcaacaggcggtacaagccgcccccgtgctgctgctggtggtgccaagccatgtgttcggccaggtactggcccaggtcaaacccttcctgcgcccggatacccgtatcgcctgggcaaccaaggggctagagccggacagcggccgtctgctgcaagacgtggcgcgcgaggtgctgggtgacgagatgccgctggcggtgatctccggccccaccttcgccaaggagctggccgccggtctgccgacggctatctcggtggcgtcgacccacgacgacttcgccgacgatctctccctgctgctgcactgcggccgttcgttccgggtctataccaatccggacttcatcggtctgcaactgggcggggcggtcaagaacgtcatcgccatcggtgccggtctctccgacgggctgggttttggcgccaacgccaggaccgcgctcatcacccggggcttggtagagatgcagcgcctgggcgccgcgctcggggccgacgccaagaccttcatggggatggccgggctcggggatctggtgctgacctgtaccgacaaccagtcgcgcaaccgtcgcttcgggctggccctcggggccggtaaggatgtgaacaccgccatgaccgagatcggccaggtggtggaaggctatcgcaacaccaaggaggtgcatctgctggcggcccgctgtggcgtcgagatgcccatctgcgagcagatcttcaaggtgctgtacgaaggcaagaatccgaaagaagcggccatcgctttgctgtcgcgagacaagaaggacgagtgat

SEQ ID NO: 209670 - DNA, 1018 bp, Unknown
  Bacterial polypeptide expressing nucleotide sequence isolated from the Sargasso Sea
atgaagtcgcattcggtttcagagtctgtttcagtattaggggcggggtcttacggcaccgcccttgctttttgtcttgccagaaatggcaaccccacactgctttggggccgtgatgaaaagcacattgccgaaatggaagcgaaccgagagaatgctcgttatcttccaggcgcaacatttccagatgccctagtggtaaatgccaacttagaagaagtggtagccgccagccaagatattttagtggttgtacctagccatgcatttgcggctatgcttcaaagcttaaagccattgcttaaaccgcatcaacgcattatttgggcgaccaaaggacttgagccaaaaacgggccgtctgcttcgcgatgtggcagaggaaatactgggtaccgactatcccctagccgtgttatcaggccctacttttgctaaagaaatggtagcaggcttacctactgcaatttcgctgtcttccactgacgatacgctgagtgacgaatttgcagcaaagctgcattgcgcaaagtcgttcagagtatacaaaaactcagactttactggcgttcagcttggtggtgcggttaaaaacgttatcgctataggcgcgggcttagccgatggccttggctttggtgcaaacgcgcgaacggcgctgatcacccgaggtttagcagagcttacccgtttgggcgtgaagttaggagccaacccagagaccttcatgggcatggcaggccttggcgatttagttttgacttgcaccgacaatcaatcgcgcaatcgtcgctttgggctggctttgggtcaaggcaagagtgtcgatgttgctattgacgaaatcggacaagtggttgagggatatcgcaacacagaagaagtgcacattttatctaagaaagtaggcgtagaaatgcctatttgtgaacaaatttatgctgtgctttatcacggaaaatcccctaaagaggcggccttagctctgcttggtcgagacctcaaaaaagaagcctagt

SEQ ID NO: 209671 - DNA, 305 bp, Unknown
  Bacterial polypeptide expressing nucleotide sequence isolated from the Sargasso Sea
aaaattatccattgctaaagaaggttcaataattattaatacatctagagggggattaattgacgaacaagaggtatttaatttagtaaatgaaaataaattatattctggaggttttgatgtatatgaaaaagaacctcccgaaatgaatgaagagaaaaacagaagtaaagtaattacccttcctcatctgggagcatcgactaaagaagctcaagctagagctggccaacaacttgtggagaatattaaaaatattttaaatgaagatttgagttcagtagtaaataaaaatttaaaataac

SEQ ID NO: 209672 - DNA, 982 bp, Unknown
  Bacterial polypeptide expressing nucleotide sequence isolated from the Sargasso Sea
tgcgctggccatgatgctgtccctgtctcgccatgttccgcaggcccacgcgggaatgcgagacggaaagtgggatcgaaagaaatacgtcggcaacgagctctacaaaaagactctcggcgtggtcggcctcggcaagatcggctcccacgttgcccgtgtggcgcgtgccatggggatgcaggtgatcgcctacgaccctttcatcgccgccgatcgcgccaagcagatgcaggtcagcctcactcagctggatgagctgttccggacggccgactacatcaccctccatatcccgcgcacccctgacaccgaaaacctggtgaatgccgagctgctgcgctcgatgaaatcgaccgccaggatcgtcaactgtgctcgtgggggaatcgtcgacgagtcggatctggctgaagcggtggacaacggcgtcatcgctggtgccggcttggatgtgtacgcaagcgaaccactggctgccgattcacctctgcgatccgtggaacggggcctggtgctgaccccccacctcggagcctccaccgaagaggcccaggaaaatgtcgccatcgatgtggcggaacagattcgcgatgtcctgctcgggctgccggcccgcagtgccgtgaatattcccggcctgagcgcggagatcatggaacggctcaagccccatctgcagctgtcggaaacgctgggcctcctggtcagtcagctggctggcgatcaggtgcaggaactggagcttcgtcttcagggtgaattcgccaaccatccctcccagccgctggtgattgcggcgctcaagggaatgctgagttcagccctgggggacagcatcaactacgtgaatgcctctctggaagccaaagcccgcgggatcaatgtgctggaagtgaaggacgaatcgagccgggatttcgccggtggctccctgcaactcacctcccgcggagctcagggcggtcacagcgtgaccgga

SEQ ID NO: 209673 - DNA, 940 bp, Unknown
  Bacterial polypeptide expressing nucleotide sequence isolated from the Sargasso Sea
tggtcttggtaagattggtagagaggtaatacagcgtagtaaggcatttaatatgcagattttaggctatgatccatttattccagatgatttttttagagaagatgaattgaagatatgtgatttagaatatttaataaaaaaatcagattacattacattgcatatacctttaacaaatgacaccaaaaatctttttgattacgataatcttataaaaatgaaaaaagaggcaaggattataaatgttgctagaggtgggataattaatgaaaatgatctgtcaaaagttcttaaggaaaagagaatatctggggcagctttagatgtttttgaatctgaacccctagatagggataacccattgttatcttcgccaaatattatattaacaccgcatttgggtgcttcaactaaagaggcaaaagaaggggtaagtatatcaatatgtaatcaggttaaaaattttttaattaatgaagagctggagaatgcaatcaacatgccctttaagaattttgcgcaacttaaggaaatggccccatttttgcagctatctgaattacttggtggtatccacagtcaagttgctgatggccctatcaaaaaagtagctattaattgttatggaagtataaatgatacgaaacctatagggcttgcattcttgaggagtttacttcaaagcagggtgcccgaaagggtgaactacattaatgcagatgctcttgcaaaagagttgggtatggaggttggtattaatttttccacatctgattcaaattactcaaatttaatatctactatagttagttctgataaagaggttctaatagagggtagtgtgtttgatgataatctacctagattggtcaatatttttggctataaaatggaagttaatcccagcggcactttattgtttattcagaatgatgat

SEQ ID NO: 209674 - DNA, 844 bp, Unknown
  Bacterial polypeptide expressing nucleotide sequence isolated from the Sargasso Sea
agtttacggatatgacccctttgtttcaactgagagagctcaacaaatacaagttaaattatctgaacttgaagatttattcaaagaatctgattatgtaactttgcatttgcctcgcaccccagaaacagagaatttagtaaatatagacgtccttaaaagtatgaaaagtagcgcaaaattaattaattgtgctcgaggaggtttaattaatgaagaggcattagcagaagctttaaataaatcattgattgcaggtgctgcaatagatgtcttttctaaagaacctttggaatctgattcaccacttttgaaggttgaaaagaatcttatccttaccccacacttaggggcatctactcgggaagcacaagaaaatgtagctgttgatgttgcagagcaaataagagatgtcttgcttggtttatctgctagaactgcagtaaatattccaggtttgagccctgatattatggatagtctaaaacctcatttgcaattggctgaaacaatgggtctccttataagccagctttcaggtgggcagatacagaaactagaagtaaagcttcaaggtgaatttgttcaacatccttctcagccattaataatagctagtctaaaaggccttctaagtaaagctttgggagataggattaattatgttaatgcttcgctagaggcagattcaagaggtatttcggtagtcgagaataaagatgaggcaagacctgaatttgctagtggatcgcttcagttaaccacttatggagataatggcgaccatagcgtagcaggaagtatttttgctgatggggaattaagaattattagtattgatcaa

SEQ ID NO: 209675 - DNA, 685 bp, Unknown
  Bacterial polypeptide expressing nucleotide sequence isolated from the Sargasso Sea
caactctgtaagtgttgcagaacatgtaatgacaatgattttaaatctaacaaaaaatatagttaattatgataagttagtaaaaaatgggaattttgtaaaaaaaaatgaaattggtgattttttcgagctctttaacaaaaaaatcctcattttaggctttggaagaattggaagggccctagcaaaaagatgtctgggttttgaaatgaaggtttatgtatatgatccatttgttccagaagaagaaataaataaatataattgtattactattgataaaagttcaggttttaaaattgctgactacattagtattcatctacccttaaataaggacactaaaaaattgatttcttacaatgaatttaaaatatttaaaaaaaatacaattttaattaataccgcaagaggtggtatagtagatgagaaagctctctatgaggctttaaaaaataatgatattctgggagcaggtctagatgtgtatgaagaggaacccttgaatgatagtccactcttctccttaaataatattattttaacaccacataatgcagctcttactcttgaatgcagaaaaagaatgtcaattgaatcatgtatgaatgtttttaattatttaaaaaataaaaatgaattaaataaaaataatatagttaattttagtaatttaaatttttaa

SEQ ID NO: 209676 - DNA, 915 bp, Unknown
  Bacterial polypeptide expressing nucleotide sequence isolated from the Sargasso Sea
gaaatttgttgggaatgagctttataagaaaaaattaggtgtagtgggtttagggaaaattggtgctcatgtagcgaaagttgctaatgcattaggaatggaagtttacggatatgatccctttgtctcaactgaaagagctcaacaaatacaagttaaactatctgaactagaggatttatttcaacaatccgattatgtaactttgcatttacctcgcacaccagagacagagaatttagtaaacatagaggttcttaaaagtatgaaaagtagcgcaaaattaattaattgtgctcgaggaggcttaattgacgaagaagcattggcagaagctttaaataaatcattgattgcaggcgctgcaatagatgtcttttctaaagaacctttggaatctaattcaccacttttgaaggtagaaaagaatcttattcttaccccacacttaggagcatctactagggaagcacaagaaaatgtagctgttgatgttgcagaacaaatcagagatgtcttgcttggtttatctgctagaactgcagttaatataccaggtttgagccctgatattatggatagtctaaaacctcacttgcagttggctgaaacaatgggtctcctcataagccagctttcaggtggacagattcaaaaactagaggttaagcttcaaggtgaatttgttcaacatccttcccaaccattaataatagccagtctaaaaggccttctaagtaaagctttgggagataggatcaattatgttaatgcttctctagaagcggattcaagaggtatttcagttgttgagagtaaagatgaggtaagacctgaatttgctagtggatcgctgcagttatccacctatggagataacggcgaccatagcgtagcaggaagcatttttgctga

SEQ ID NO: 209677 - DNA, 770 bp, Unknown
  Bacterial polypeptide expressing nucleotide sequence isolated from the Sargasso Sea
tgagctcgatggaaaaactcttggtattattggattaggatcgattggatcgatggttgcccaggcatctcagactcttggaatgaaattgataggttatgatccatacatttcgatagagagtgcatggaggcttcctcgtgaggttaaaaaagctgaaacaatggacgagcttttacagcattcagactatgtttctttgcatgtacctcttggagaggaaacaagaaacttaatcaataaatcaaatctcaacaaatttaaaaaaggagcgaggcttataaacctctcaagaggtggaattgtaaatactaatgatgtaattaaagagcttgaaactggtaatttaggaagatttgttactgatttcccaactctagaacttataaaacgttcagctgaaaagaatgatgtagtgcttttacctcacctgggggcaagtacaaaagaagctgaagtaaactgtgcagttatggctgcaaatcaaatggtcaactatctccgacatggaactatcgttaattcggttaattttcctagaatttctctgtcaagaggaacccatcatcgcttagtgataataaatcataatgaaccagggatgattagtaaaattactgactctattgctgcatgtgatataaatatcgctgaaatgacaaataagagtaaggatgagattgctataaacttgattgatctagaatgtgaggctagtcctgagcttatccggcagcttgaatctgtagagcatgtattaagcgtaagag

SEQ ID NO: 209678 - DNA, 924 bp, Unknown
  Bacterial polypeptide expressing nucleotide sequence isolated from the Sargasso Sea
tcaaagtttaatggaacagaaattacaaataaaattttaggtctaataggatgtggaaatgtaggttctattgtagctaatagagcaattggtttgaaaatgaaagttatagcgtttgacccattcttaaacaaaaaaagagctgaagaaattggtattgagaaagttacattagatgatcttttaaaaaaatcagatataatttcactacacacacccttaactaatgaaacaaaaaacattatatctgctgacacaattaagaaaatgaaaaaaggtgcaaaactcgtgaattgtgcaagaggtggattagttgatgaatatgtatgtcgtgcggccttggagagtggacatctatcaggggctgcatttgatgtttttactgaagaacctgcaacaaataatatactctttgaagctccaaattttattgccacacctcatctaggtgcatctacaaaagaagcccaagaaaatgtagctgtgcaaattgcagaacaaatgtcagactttctaatatcaggggcaatttctaatgctttaaactttccaaatgttactgctgaagaagcgcctattctaaaaccatacattaagttatcttatttgttaggttcatttttaggacaagtttctccagagggtataaaaagtgtaagtctagaattggaaggaaaggcatatcatataaaagatgaacctattttggcaaatgctttagtggggatcttagagccaagttcagctacagttaacaacgtgaacgcacttaaaatagtttctggaagaggtattaatgtttcttcaacaaaacacgaaaggagatgtgattacgaaactctattaaccttatcaattttacatgaaagaggtgaaagaaaaatttctggcacgttaataggtgggtacatgccaagaatagtt

SEQ ID NO: 209679 - DNA, 734 bp, Unknown
  Bacterial polypeptide expressing nucleotide sequence isolated from the Sargasso Sea
tcttattcttacccctcacttaggagcatctactcgcgaagcacaagaaaatgtagcagttgatgtagcagaacaaattagagatgtcttgcttggcttgtctgctagaactgcagtaaacattccaggtttgagccctgatatcatggacagtctaaaacctcatttgcagttggctgaaacaatgggtctgcttattagtcagctttcaggtggtcagatacagaaactagaagtaaagcttcaaggtgaatttgttcaacacccatcccagcccttaataattgctagtttaaaaggccttctaagtaaagctttgggagataggatcaattatgtgaatgcttctctagaagcagattcaagaggtatttcagtagtcgagagtaaagatgaggcaagacctgaatttgctagtggatcacttcaattaaccacttatggagacaatggcgaccatagcgttgcaggaagcatttttgccgacggggaattaagaattattagtattgatcaataccctgttaatgtatcaccaagtagatatatgttggttactaggcatagagatatgcctggcattattggcaagcttggttctttattgggtagcaacaatgtaaatattgcttcaatgcaagttgggcgcaaaattgttagaggagaagctgttatggttctaagtattgatgatccaattcctaataaattgcttgataccattatgaagtgag

SEQ ID NO: 209680 - DNA, 761 bp, Unknown
  Bacterial polypeptide expressing nucleotide sequence isolated from the Sargasso Sea
ctttgtttcaactgaaagagctcaacaaatacaacttaaactttctgaactagaggatttatttcaacaatccgattatgtatctttgcatttgcctcgcacaccagagacagaaaatttagtaaatatagacgtgcttaaaagtatgaaaagtagcgcaaaattaataaattgtgctcgaggaggcttaattgacgaagaggcattagcagaagctttaaataaatcattgattgcaggtgctgcaatagatgtcttttctaaagaacctttggaatctgattcaccacttttgaaagttgaaaagaatcttatccttaccccacacttaggagcatcaactcgggaagcacaagaaaatgtagctgttgatgttgcggaacaaataagagatgtcttgcttggtttatctgctagaacagcagtaaacataccaggtttgagccctgatattatggatagtctgaaacctcatttgcagttggctgagacaatgggtctgcttataagccagctttcaggtggacagattcaaaaactagaggtgaagcttcaaggcgaatttgttcaacatccttcccagccattaataatagcaagtcttaaaggccttctaagtaaagctttgggagataggattaattatgtgaatgcttcgctagaagcagattcaaggggtattttagtagtcgagaataaagatgaggcaagacctgaatttgctagtggatcgcttcagttaaccacttatggagataatt

SEQ ID NO: 209681 - DNA, 432 bp, Unknown
  Bacterial polypeptide expressing nucleotide sequence isolated from the Sargasso Sea
ccaataaaataaagacttacgttacagactttcctaatgaagaaatgatcaaccacaaagacgtccttgttatgccccacctaggtgcatctacaaaagaggctcagataaattgtgccgtgatggttgctaatagtatcaaatcatttcttgaatctggcaatatacttaactctgttaactttccagacgtaaaattaagcctcaaatctccacatcgactaacaataacaaataagaatgttcctaacatcattgggcaattcacatcgattcttggtaattcagagattaatatcgatgacctatcacataaggttttagctgatattggttatactatacttaatgttgataagtcagtaccagaaagtgttttacatgagatatctaatatagatggtgtcatgaagactaatctattattttagt

SEQ ID NO: 209682 - DNA, 595 bp, Unknown
  Bacterial polypeptide expressing nucleotide sequence isolated from the Sargasso Sea
atagctgttgctaataattcagtaaaaaacaatgaatgggaaagatccgaatttatcggtgttgaattatataaaaagcaattaggactgattggttttggaaaagttgcaaaactagtttcaaaaagaatgcaaagctttgatatgaaaatagttttttatgatccatttatagacagttcaactgaaaatgaagaaaaagtagagcttgaagaattattaaaaacttcagattttatttcaattcatgttccaaagaataaggaaacaataaatctagtttctaaagaaaaattatccattgttaaagaaggttcaataattattaatacatctaggggtggattaattgatgaacaagaggtatttaatttagtaaatgaaaataaattatattctgctggttttgatgtgtatgaaaaagaacctcctgaaatgaatgaagagaaaaacagaagtaaagtcattacccttcctcatctcggggcatcgactaaagaagctcaagctagagctggccaacaacttgtggaaaatattaaaaatattttgaatgaagatttgagttcagtagtaaataaaaatttaaaataac

SEQ ID NO: 209683 - DNA, 451 bp, Unknown
  Bacterial polypeptide expressing nucleotide sequence isolated from the Sargasso Sea
tatgaaaatagttttttatgatccatttatagacagttcaactgaaaatgaagaaaaagtagagcttgaagaattattaaaaacttcagattttatttcaattcatgttccaaagaataatgaaacaataaatctagtttctaaagaaaaattatccattgctaaagaaggttcaataattattaatacatctagggggggattaattgatgaacaagaggtgtttaatttagtaaatgaaaataaattatattctgctggttttgatgtgtatgaaaaagaacctcctgaaatgaatgaagagaaaaacagaagtaaagtcattacccttcctcatctcggagcatcgactaaagaagctcaagctagagctggccaacaacttgtgaagaatattaaaaatattttgaatgaagatttgagttcagtagtaaataaaaatttaaaataa

SEQ ID NO: 209684 - DNA, 940 bp, Unknown
  Bacterial polypeptide expressing nucleotide sequence isolated from the Sargasso Sea
caatgcaaatgctgtaaaagagcttgtgatatgcggcatgttgctctcctcgcgaggtataattgatggcattgagtttgcaaaaaaacttgatcttaaagatcccgaggtactaaataaagcaatggaagctcaaaaaaagagctttgcaggtaatgagctcgatggaaaaacacttggaattattggattaggatcgattgggtcgatgcttgctcaggctgctcaaacacttggaatgaaattgattggatatgatccatatatttcaatagagagtgcatggaggcttcctcgagaggttgaaaaagccgatacaatggacgaactcttgcaatactctgactatgtttcacttcatgttccactagcagaagaaacaaaaaaccttatcaataaatcaaatcttaacaaatttaaaaaaggagcaagactgatcaatttatcaagaggcgggatcgtaaatagtgcagatgtaataaaggaacttgaaactgggaatttaggagggttcgttactgatttcccgactcctgaacttataaagcgctctgttgataagaatgatgtggtgcttttacctcacttgggggcaagcacgaaagaagctgaaataaattgtgctgttatggctgcaaatcagatggtcaattacttaaaacatggcacgatcgttaactctgtgaattttcctagaatttctttgtcgagaggcactcatcatcgtcttgtgattatcaatcacaatgaaccagggatgattagcaaaattacagattctattgctgcatgtgatattaatattgcagaaatgactaacaaaagtaaggataagatagctatcaatttgattgatctagagatagaggccagttcagagcttattcggcaccttgaatctgtggagcatgtattgagcgtaagatcgctgagtatatga

SEQ ID NO: 209685 - DNA, 843 bp, Unknown
  Bacterial polypeptide expressing nucleotide sequence isolated from the Sargasso Sea
gatgttaaggctgctacgcaaaaaggagttcttgttgttaattctcctggggggcaacacaatagctgctgctgaacatactatagctatgatgttggctttatctagacatattccaattgctaatagtagtactttgtcaggtaaatgggaaagaaagaaatttgttggtaatgagctttataagaaaaaattaggtgtagtaggtttaggaaaaattggtgctcatgtagcgaaagttgctaatgcattagggatggaagtttacggatatgatccctttgtatcaactgaaagagctcaacaaatacaagttaaactatctgaactagaggatttattcaaacaatccgattatgtaactttgcatttgcctcgaactccagagacagagaatttagtaaatatagaggtgcttaaaagtatgaaaagtagcgcaaaattaattaattgtgctcgcggaggtttaattgacgaagaggcattagcagaagctttaaatgaatcattgattgcaggcgctgcaatagatgtcttttctaaagaacctttagaatctaattcaccacttttgaaggttgaaaagaatcttatccttaccccacacttaggagcatctactcgggaagcacaagaaaatgtagctgttgatgttgcagaacaaataagagatgtcttgcttggcttatctgctagaacggcagtaaatataccaggtttgagccctgatattatggatagtctaaaaccgcatttgcagttggctgaaacaatgggtctacttataagccaactttcaggtggacagatacagaaactagaagtaaagcttcaaggggaatt

SEQ ID NO: 209686 - DNA, 788 bp, Unknown
  Bacterial polypeptide expressing nucleotide sequence isolated from the Sargasso Sea
ccccgatctgaaaatgattgccagggtagggatcggtcttgacggagtcccgcttcatgagtgcaggaaaagaggaattcgagtcagttggactccggatgcagtaactcgtgcagttgctgaactgaccgtgggtcaaatgttaagcagcagccgctttgtccgcatgcttgatgcgggtattcgaaagcaaaaatggtcccgtcctgctgggagaggaatccgtgaatcgatcatcggcctgatcggattcggccgcatcggttcttcggtggccagacttctcggatcattctcccccgaacaaatcctagtgaaggacattgtcgataagacttctgagatccaggctctccagcaggaaggtttgaatatcagaagcgcaggtctggaagagatcctcaagagttctcatatcatttcgttacatgttcctctttggaaagaaacacggcatatgattggggtccatgaattggaaatgatgcgccaagacgcaatgctgatcaacaccgcccgaggaggcattgttgatgaaaccgctttgagagatggtcttgaaaaaggttttatcgcgggagcggcgattgatgtttttgaaaaagaaccctattccggtcccttatctttgatggaaaactgtatcttgacgccacatttaggatcctgcaccctcgagtgtcgagcaagaatggaatctgaatccctcaatgaagccattcggttcttgcagggcgattctattttgcaggaagttccggatgcagaatacgtttaccaggaatagt

SEQ ID NO: 209687 - DNA, 627 bp, Unknown
  Bacterial polypeptide expressing nucleotide sequence isolated from the Sargasso Sea
tttttgcttcagataaacttactagatcaaatggatttgattcaaaaagtaatcttccagatttttttgaattatatgaaaaaaaaatattaatacttggatttggaagaattggtaaagcattagctaaaagatgtttgggttttgaaatggaagttttagtttatgatccattcattgataataaaaaaataatatcttgcggatgcaagcctgtaagcaaaactcagggctttaaaattgcagattatattagtattcacttacctctaaatgaaaatacagaaaatttaatttctgacgatgaatttaaattatttaagaaaaatctcattcttattaatacagcaagaggtggaatagttgatgaaagcgctttgtataatgcattaaagtcaaataaaattttaggggctggtattgatgtttttgagcaagaaccaccaactcaaaatcataagttattttctttagaaaatattattttaactcctcacaattccgctttaacactagaatgtagaaagagaatgtcacttgaatcatgtatgaatatttttaattacttaaaaaataaaagtaatttaaataaaagtaatataattaattttagtaatctagattagt

SEQ ID NO: 209688 - DNA, 847 bp, Unknown
  Bacterial polypeptide expressing nucleotide sequence isolated from the Sargasso Sea
tataatcatatcaaaacagctgatggatggattataagaagtgggaccactctagattctgatataattcaaaaagctgataatttatctgtaataggtcgtgcgggcgttggggtggacaatataaatatttcagcggctaccaggcgtggtattgttgttatgaatacaccagatgcaaatacgataagcgcagctgagcatacaatggcacttattttagcattgtcaaggaatgtaagctctggacatgatggattatcaaaaggtgagtggaaccgtcatttattaattggttctgaattaaatggtaaaacaattggtatagttgggcttggtaagattggtagagaagtaatgcatcgtagtaaggcatttaatatgcaaattttaggctatgatccatttatcccagatgatttttttagggatgacgcactggaggtctgtgatttagaatatcttataaaaaattctgattacattacattacacatacctttgacagaagacaccaaaaatctttttgattacgataatcttataaaaatgaaaaaagaagctagaatcataaatgttgcaagaggtgggattattaatgaagatgatctatcaaaagtgcttaaagagaaaaaaatctctggtgcagctctagatgtttttgaatctgaacctttgaataataatagcccattaatatcttccccaaatattattttaacaccgcatctgggtgcttcaaccaaagaggcaaaagaaggtgtaagcatatcaatatgtaatcaggtaaaaaattttttaatcaatgaagaactagataatgcaatcaacataccttttaagaatt

SEQ ID NO: 209689 - DNA, 979 bp, Unknown
  Bacterial polypeptide expressing nucleotide sequence isolated from the Sargasso Sea
atcatcatttaatggtgttgaagttactaataaaatttttggtttaattggatgtggaaatatcggatccattgtagcaagtagagccattggattaaaaatgaaagttctagcttttgatccatttttaaaagaagaaaaagcaaaagaattaggtgtaaaaaaagtggatttggatgaattattgagattatcagatgttatttcattacacacacctctaactgaggagacaaaaaatataatttcagcagatgcaatcaataaaatgaaaaaaggatcaaggttaattaattgtgctaggggagggttagtagatgagaacgcatgtcgtgctgccttagaaaataatcatttagctggagctgcctttgatgtttttgtagaagaaccagctcataataatgttttatttaaagctccaaattttattgctactccacatcttggagcttccacaaaagaagcacaagaaaacgtcgctcttcaaattgctgaacaaatatcaaattttttaaatgatggtgctgtttcaaatgcactgaatttccctactcttacagctgaagaagcgcctctattgaaaccatatataaggctttcatatttgttaggtacttttttaggtcaggtgacatctgaaaatatcaagaatattagattagaaatggagggtaaagctgcgtctttaaaagacgaaccaattatagctaatctcttaactggaattttagaaccaaactttaatgctattaataatgtgaattcaagagaaattgcaaactcaaaaggattagatttttcaactgtaaaacatgacagacgatgtgattatgaaactttactaacagcatctataaaacatgaaaaaggcattagaacaatatcaggaacactaataggtggatatatgccaaggatagttagcatccaaaatattccaattgagtcaagtttccctaatactgctttgtactaa

SEQ ID NO: 209690 - DNA, 895 bp, Unknown
  Bacterial polypeptide expressing nucleotide sequence isolated from the Sargasso Sea
aaaataactgttgattataaacccggaattcaaaattcagaattattaaaaattattaaaaattatgatggattagctgtcagatctaacactcacgtaacaaaagaacttttagaaaaagctgaaaaactaaaaataatcggtagagcaggtatagggactgacaatatagataaagatgctgcaaccgaaaaaggtgttattgtaatgaatactccatttggtaatgcagttactactgctgagcatactatagcaatgataatgtctcttgtaaggatgatacctttggctgatttttcaacaagacaaggaaaatgggaaaaatcaaaattcaatggtatagaaataactaacaagatattaggtttagtaggctgcggtaacgttggttcaattgtagctaatagagcaattggattaaaaatgaaagttttagcgtttgatccttttttaaataaaaaacgagctaaagaaattggtgttgagaaagttacattagatgagcttttaaaaaaatcagatattatttcactgcatacaccgttaactgatgaaacaaaaaacattatatctgcagaagctattaataaaatgaaaaatggtgcaaaacttgtaaattgtgcaagaggtggtttagttgatgaatatgtttgtcgagctgctcttgaaagcggtcatctttcaggtgctgcttttgatgtattctccgaagagccagcaacgagtaacatactgtttgaggcacccaattttatcgcaacacctcatcttggtgcttccacaaaagaggcccaagaaaatgttgctgttcaaattgcagaacaaatgtctgattatcttgtttctggagctattaccaatgctctaaactttccaagtggtaactgctgaa

SEQ ID NO: 209691 - DNA, 844 bp, Unknown
  Bacterial polypeptide expressing nucleotide sequence isolated from the Sargasso Sea
ttccataattcaagattatgatgctttaatgattcgctctggaactcaagtgaccgaagaaattattaactcttcaagtaaactgagaattattggaagagcaggagttggagttgataatgtagatgttaaagctgctacgcaaaaaggagttcttgttgttaattctcctgggggcaacacaatagctgctgctgaacatactatagctatgatgttggctttatctagacatattccaattgctaacagtagtactttgtcaggtaaatgggaaagaaagaaatttgttggtaatgagctttataagaagaaattaggtgtagtaggtttagggaaaattggtgctcatgtagcgaaagttgctaatgcattaggaatggaagtttacggatatgatccctttgtatcaactgaaagggctcaacaaatacaagttaaactatctgaactagaggatttattcaaacaatctgattatgtaactttgcatttgcctcgtacaccagagacagagaatttagtaaatatagacgtacttaaaagtatgaaaagtagcgcaaaattgattaattgtgctcgaggaggcttaattgatgaagaggcattagcacaagctttaaatcaatcattgattgcaggtgctgcaatagatgtcttttctaaagaacctttagaatctaattcaccacttttgaaggttgaaaagaatcttatacttaccccacatttaggagcatctacacgggaagcacaagtaaatgtagctgttgatgttgcagaacaaataagagatgtcttgcttggtttatcggctagaactgcagtaaatattccaggtttg

SEQ ID NO: 209692 - DNA, 790 bp, Unknown
  Bacterial polypeptide expressing nucleotide sequence isolated from the Sargasso Sea
gaaaaaggaattattgtcatgaatacacccgatgtaaatacagtatctgctgctgagcatactatcggtattatgttatctctagctaggaatatttcaattggcagtcaaagacttaatgctggaaattgggatcgtaataatttaattggaactgagcttcgaaataaaacaatcggcatagttggtttaggtaagattggtagagaagtgatgaatagatgtttatcatttggtatgcgagtaattggttttgatccgtatataaaagatgatctatttagcccagatgatgttactttaacagacctagacactcttacaaaagaatctgactttataactttgcatgttcctaaacttgattctactaataatctctttgatttaaaaagacttaagatgatgaaatcaacagctatgattataaatgttgctcgtggaggaattattaatgaagaagatttatcaattgcagttaaagagaggataatctcaggtgcggctatagatgtttttgttgatgaacctatcgatacaaatcatccttttattaatattgataatattctgatgactccccatcttggtgcatctacaaaagaggctaaagaaggtgtgtctgtaacaatttgtgaattagtaagagattatttattaaacaataagctttcaagtgcattaaatattccaattagtgatatgaatatattgaagcaaattcaacctcatttattacttgcagaaaagatgggcattattcagggtcagctagcccaagagccgattc

SEQ ID NO: 209693 - DNA, 797 bp, Unknown
  Bacterial polypeptide expressing nucleotide sequence isolated from the Sargasso Sea
ttcaccacttctaaaagtggaaaagaatcttattcttacccctcatttaggagcctctacccgagaagcacaagaaaatgtagctgttgatgtggccgaacaaatcagagacgttttacttggtttgtcagctcgaactgcggtaaacattccaggtttgagtcctgatattatggatagcctaaaacctcatttgcagttggctgaaacaatgggtctgcttataagccagctttcaggggggaaaattcaaaaactagaggtaaagcttcaaggtgaatttgttcaacatccctctcaaccactaataatagctagtttaaaaggtctattaagtaaggctttgggagataggataaattatgtcaatgcttctctagaagccgaatccagaggcatttcagtggttgagagtaaagatgaggcaagacctgaatttgctagtggatcgcttcaattaactacttatggagataatggtgaccatagagtagcaggaagcatttttgctgatggagaattaagaattattagtattgatcaatatccagttaatgtatcaccaagtagatatatgttggttactaggcacagagatatgccaggtattattggcaagcttgggtctttattgggtagcaataatgtaaatattgcctccatgcaagttgggcgcaaaatcgttagaggagaagctgttatggttctaagtattgatgatccaatacctaatgagttgcttgacactattattgaagtagagggaattactagcgctaatccagttactttataaa

SEQ ID NO: 209694 - DNA, 1174 bp, Unknown
  Bacterial polypeptide expressing nucleotide sequence isolated from the Sargasso Sea
tatgtataaatttaagacgtttaataatatttcagaacaagcgttgtcgttgcttacaaaagcaaaatttgagtacgatgatattgaaccagacgcaatattaattagaagtcatacgttaattaattatgattttaataaaaacttaaaatgcattgctagagcaggtgcaggattcaacaatatcccagtagagcttgcaacaaaaaatggaatagtagtctttaatactccaggagctaactcaaatgcagtcaaggagttagttatttgtgggatgcttctttcttcaagaggaattattcaaggaaatgcgtttgcaaaatcgttaattggtaaagatgaaactgaaataaataatttaatggagaaagaaaaaaagatttttaaaggcaacgaactcaaaggaaaggttcttggaatagttggtttagggtctgttggctcactcttagctcaagccgcttcaatccttgatatgaaaattattggttacgatccatacatatctgtagatgcagcatggatgctaccgaaagaggttgaaaaagccgaaaatttagaatttttgttaagtaattctgactacatatcactgcatgtaccgctatcaaatcttacaaagaatttagtatcaaaaaaacttctagataacgtaaaaacaaatgccaaattaataaatttatctcgtggaggcgttgttaataattttgatgtaattgatgctttaaaaaataaaaaattaagttcttatgtgactgattttccaactccagagttgatagatagatctgtgcataatggagatgtaatcctattacctcatttaggcgcaagtacaaaagaggctgaaataaattgttcaatcatggctgcagagcaaacaaaagattttcttgaaaacggattaataatcaattctgttaattttccaaatgtaaaattaggcagaacaacccaatttagaattgttatagttcataaagatgagcctggcgttttagggaaaatcacaagtgaagttgcacacaataatttaaatattacagatatgatcaataaaagtagagacgaaattgcaatcacattaattgatttgaatgaaaatccatcacaagaattacttaaaaaaattcatgataatgaaaacgttttaacagtaagagtctgttaa

SEQ ID NO: 209695 - DNA, 904 bp, Unknown
  Bacterial polypeptide expressing nucleotide sequence isolated from the Sargasso Sea
aatgtacaaagtcctaaaactaaacaacattgctgatgaaggcctaagcgtgttcgacttagatcaatttcattgtggagatgatgtaactaatccggatgcgattatactgcgttcttttgatatgcatgatatggatataccaaaagaacttaaagcggttggaagagcgggctcaggagtaaacaatattccaattgaaaaatatactgaacaagctattcctgttttcaacgcacccggtgcaaattctaatgccgttaaagagctagttttagcctctattcttatctccgcaagaaatatacatagtgctattaaatatgtcgaatctgtaaaagattcagatgaccttaagagtgatatcgaacagggtaaaaaagcatatgtgggttttgaattaccaaccaaaacattgggtgtcattggattaggacaaattgggataaaagttgcaaatgctgcccatgatcttggaatgaatgtgattggttacgatccactgattaccgtcgataatgcaattaatcttcagcctggagtccagaatgttaatgaattaaaagaattgcttaatgagtccgatatcataactatccatattcctcataaaaaagaaactgagaattttattggtgagaacgaaattaaacagttaaacgatggggctataattattaacctatctagagaagccatagttgactcaatcgctgtattgaaacactttgaaaccagcaaaataaaaacttatgttacagatttccctaatgaagaaatgatcaaccacaaagatgtacttgttatgcctcatttgggtgcatcaacaaaagaagctcaaataaattgtgctgtgatggttgctaagagcatcaaatcatatcttgagactggaaatatactt

SEQ ID NO: 209696 - DNA, 940 bp, Unknown
  Bacterial polypeptide expressing nucleotide sequence isolated from the Sargasso Sea
aatgaaaatacttatttgtgacaaattagataaaattacgattgaagaattacaaaaattaggtacatgcatcgacgtctctcaagacaaagataaaagtaaaaaaatcaaagaaaacattattgatgctgaaattgttctagtcagaagtgatacccaaattaataaagaattattagatgtaagcaagaaattaaaaattataggtcgtagcggagtaggaacagacaatattgatatagaggaagcgtcaataagaaatatttatgtaacgaatactcctgaggcaaatgttatttcagccgctgagctcacaattggtttactaatatctgctgcaagaaatataactgttgctaataattcagtaaaaaacaatgaatgggaaagatccgaatttatcggagttgaattatataaaaagcaattaggactgattggttttggaaaagttgcaaaactagtttcaaaaagaatgcaaagctttgatatgaaaatagttttttatgatccatttatagacagttcaactgaaaatgaagaaaaagtagagcttgaagaattattaaaaacttcagattttatttcaattcatgttccaaagaataaggaaacaataaatctagtttctaaagaaaaattatccattgctaaagaaggttcaataattattaatacatctagagggggattaattgatgaacaagaggtatttaatttagtaaatgaaaataaattatattctgcaggttttgatgtatatgaaaaagaacctcctgaaatgagtgaagagaaaaacagaagtaaagtaattacccttcctcatctaggagcatcgactaaagaagctcaagctagagctggccaacaacttgtggagaatattaaaaatattttgaatgaagatttgagttcagtagtaaataaaaatttaaaataa

SEQ ID NO: 209697 - DNA, 721 bp, Unknown
  Bacterial polypeptide expressing nucleotide sequence isolated from the Sargasso Sea
cgaggcgctgggcatgcacgtggccttctttgatgtggtcaacaagctgcccctgggcaatgcgcggcaggtgcaacacctgcacgacctgctgggccagagcgacatcgtgagcctgcacgtgcccgagctgccgtccaccgagggcatgatcggcgccgccgaaatcgcggccatgaaacccggcggcatcttcatcaacgccgcgcggggcacggtggtggatattgaggctctggctgcggccctccaggccaagaagctgctgggcgccgccatcgacgtgttcccggtcgagccgcgcaccaacaaggacgagttccagtcgcccctgcgcgggctggacaacgtgatcctgaccccgcacatcggcggctccaccatggaggcgcaggccaacataggcctggaggtggccgaaaagctggtgaagtacagcgacaacggcaccagcacctcatcggtcaacttcccggaggtggcgctgcccgcccaccctggcaagcatcgtctgctgcacatccaccgcaacgtgccgggcgtgctgtccgagatcaaccgcatcttctcggacaacgccatcaatgtgtcggcccagtacctgcagaccaacgagaagatcggctatgtggtgatcgacatcgacgctgcctcgtccgacctggcgctggacaagctggcccgggtgagcggcaccctgcgcagccgcgtgctgttctga

SEQ ID NO: 209698 - DNA, 733 bp, Unknown
  Bacterial polypeptide expressing nucleotide sequence isolated from the Sargasso Sea
aagaaaaaattaggtgtagtaggtttagggaaaattggtgctcatgtagcgaaagttgctaatgcattaggaatggaagtttacggatatgatccctttgtctcaactgaaagagctcaacaaatccaagttaaactttctgaactggaggatttattcaaacaatccgattatgtaactttgcatttgcctcgcacaccagagacagagaatttagtaaatatggaggtgcttaaaagtatgaaaagtagcgcaaaattaattaactgtgcccgaggaggcttaattgatgaagaggcattagcagaagctttaaataaatcatttattgcaggtgctgcaatagatgtcttttctaaagaacctttggaatctaattcaccacttttgaaggttgaaaagaatcttatccttaccccacacttaggggcatctactcgggaagcacaagaaaatgtagctgttgatgttgcagaacaaataagagatgtcttgcttggtttatctgctagaactgcagtaaatatcccaggtttgagtcctgatattatggatagtctaaaacctcatttgcagttggctgaaacaatgggtctgcttataagccagcattcaggtggacagatacagaaactagaggttaagctgcaaggcgaatttgttcaacatccatcccagccattaataatagctagtctaaaagggcttcttattaaagctttgtggagatagg

SEQ ID NO: 209699 - DNA, 1174 bp, Unknown
  Bacterial polypeptide expressing nucleotide sequence isolated from the Sargasso Sea
atgtctacatataaagtttataacaatattgctgaagagggtattaaatgtctttctgatagcggatttaaagaagatacaaacaatccagaggctttgttgataagaagtcatattatagatgaatctgactttaatgaatcattgagatgtatatgtagagctggagctggtgtgaatcatatccctataaatatggccactgaaaggggtgtagttgtctttaacactccaggcggaaatgctaatgcagtcaaggagctagtaatatgtggtttattgttatcatcaagaggaataatacaaggtcatacatttacccaaggtcttaatagtaaaaattcaagcgacttaactaatttagttgaaaataataaaaaaagatttaaaggtagtgagctaaaaggaaaaacaattggaataattggactaggttctataggttcacttttagcacaaacagttgaaaatatgggtatgaaaataattggctatgatccaaatatttcaatagattctgcttggcaacttccaaaagatgtcgaaaaggcagaagacttaaaatacttactatcaaattctgattatatttctattcatgttcctttagttgaagaaacaaaaaatttaatttcaaaagataatattaaatacattaaaaaaggggcaaaattaatcaatttatctagagagtcgattgtaaataacttagacatattatctgctcttgaaagtaagaaaattagttcttttgtgactgattttccaacaccagaattagtaaatagatcaatagattattcagatgtaattcttcttcctcatctgggagcaagtacaaaagaagcagaaataaattgtgcaatcatggctgccgagcaagcaaataattttctaatcaatggagagataattaactccgttaattttccgagagtaagacttagaagaactacaaaaaatagactagtaatcattcataaagatgagccaggtttaattggaagtattactggagagttagcatcaaaaaacattaatatttcggatatgattaataaaagcagtaacgaaatagcaataaccttaatcgatattgaaatagaaccatctaaaaacttattaagtaatataaataaaattgataaagtgttgagtgtgcgttgttgctaat

SEQ ID NO: 209700 - DNA, 1063 bp, Unknown
  Bacterial polypeptide expressing nucleotide sequence isolated from the Sargasso Sea
ggatttgacccgtttgttaaccaagaaatgtttaatcaaaaagaaattaaaattgtagaactagatgaattaacaaggaatgccgattttataacgattcatgttcccctaaatgataagaccagagatctgtttaattttaatcgattgaaatcaatgaaaaaaacgtctcgaataatcaatgtttctaggggaggaatcattaacgaacaagaccttgccaaagcgctaacaaataaagaaattgcaggggctgcgatagatgtatttgcgcaagagcctgtcgaaaaagataatcttcttattgatgcacctaatattcttttaacgccgcatttgggagcttctacaaaagaggctaaagaaggcgtgagtatttctatttgtgagcagttaagggattatttacttgaggaaaaactcagcaatgctataaatatgccaatttcagatttatctactatgaaggagatccagtcaagcttagatcttgcagaaacaatggggcgattgcaagaacaattaaaccctgaatctatcaaaaaaattcaagttgaatgctcgggttcattagaagactcaaaacctatagcattagcttttctcaaaggttttttgagtagaagaattccagaaagaataaactatataaattctgaagcgcttgctattgatcttggtatcaaaattgaacatagctatacaaatgatagtggttcatataccaatttgatcagaacccgtgtttcagggatgtctaaaccttctcgaattgcaggatctatttttggtcaaaatgaaccaaggttagtcaatattcttggatttgatattgacgtcaagccgtatggatatatgttatttgcaaaaaataaagatattcccggcgttattggcaaagttggcactgctcttggagattttaatgtaaatattggaggatttattcttagtcgggctgaaaaaggtcaagctttctcagtggtcagagttgataatatggtttcagatgaaaatttatctgagctacgcaagataccagaaattatatcgttaaaacagc

SEQ ID NO: 209701 - DNA, 1335 bp, Unknown
  Bacterial polypeptide expressing nucleotide sequence isolated from the Sargasso Sea
gaggaatagttgtgatgaataccccagatgtaaatactatatctgcagctgaacatactatagcgatgatgcttgctttatctagaaatatttctattggggatcttgaaataaaacaaaaaaaatggaataggcatttacttgttggttctgaaataaagaacaagacccttgggattgttggattaggaaaaattggcaaagaggtgatgaagaggtgtctaccatttggaatgaacgtaattggatttgacccgtttgtcaaccaaaaaatgtttaatcaagaagaaattaaaattgtagaactagatgaattaacgaggaatgccgattttataacgattcatgttcccctaaatgataagaccagagatctgtttaattttaatcgattgaaatcaatgaaaaaaacggctagaataatcaatgtttctaggggaggaatcattaacgaacaagatcttgccaaagcactaacaaataaagaaattgcaggggctgcgatagatgtatttgcgcaagaacctgttgaaaaagataatcctcttattgatgcacctaatattcttttaacgccgcatttgggagcttctacaaaagaagctaaagaaggggtgagcatttctatttgtgagcagctaagggattatttacttgaggaaaagctcagcaatgctataaatatgccaatttcagatttatctattatgaaggagatccagccaagcctagatcttgcagaaacaatgggacgattgcaagatcagctaaatcctgaagctatcaaaaaaattcaagttgaatgctcgggttcattagaagattcaaaacctatagcgttggcttttctcaaaggttttttgggtagaagaattcctgaaagaattaactatataaattccgaagcgcttgctattgatcttggtatcaaaatcgaacatagctatacaaacgatagtggctcatataccaatttgatcagaacccgtgtttcagggatatctaaacctactcgaattgcaggatctatttttggtcaaaatgaaccaagattagtcaatattcttggatttgatattgatgtcaagccgtatggatatatgttatttgcaaaaaataaagatgttcccggggttattggcaaagttggcactgctcttggagattttaatgtaaatattggaggatttattcttagtcgcgctgaaaaagatcaagctttctcggtggttagagttgataatatgatttcagatgaaaatttatctgagctacgcaagataccagaaattatatcattaaaacagcttacctgcgatgaatattccagttgat

SEQ ID NO: 209702 - DNA, 994 bp, Unknown
  Bacterial polypeptide expressing nucleotide sequence isolated from the Sargasso Sea
ggctcaggtgttaacaatattccaattgataaatatactgaaaatgcaattccggtatttaatgctcctggcgctaattctaatgcagtcaaagagctagttctagcctctatattaatcactgccagaaatatacataacgccatcaaatatgttgaatcagttaagcactcagagaatctaaaagatgatattgaaaatgggaaaaaagaatatgttggttttgagttaccaaaaaaaactcttggtgtaattggtttaggtcaaataggtgtaaaagtttccaatgcggcatatgatcttggaatgaatgtaattggttatgaccctcttatcactgttgataatgcgatcaatcttcagcctggcgttcaaaaagtaagtgacctgaaagaattactaaaaatctcagatattattactattcacataccttacaaaaaagaaactgaaaacttcattggtgacagtgaaatcaaaacactcagagatggagctattattatcaatctatctagagaagcaattgtagactctgatgctgttttacaacatcttgattcaaataaaattaagacttacgtaactgattttcccagtgaggcaatgattaatcatgaaggtgtccttgtaatgccgcatttgggtgcgtctacaaaggaagctgaaataaattgtgctgtaatggtcgcaagcagtcttaaatcttatcttgagactggcaatatacttaattctgtgaatttccctgatgtgaaattaggtatcaattcaccgcatcgactcacaattacaaataaaaatgtgccaaatatcatagggcagtttacatccatcttgggtaatgcaggaatcaacatcgacgatctctcacataaggtattagatgaaattggctatactatcctaaatgttgataaaccaattacagaaattgttttacatgagatatctaatatagaaggtgtcatgaaaactaatatacttttttaag

SEQ ID NO: 209703 - DNA, 1106 bp, Unknown
  Bacterial polypeptide expressing nucleotide sequence isolated from the Sargasso Sea
aatgtttaattttaaaagttttaataatatcgccgaagatgggttgaagattttaggcgacaataattttaaagaggtctctgataatcccgatggcttgttgttaagaagttatgcactaacaaaagaagattttggagataacttaaaatgtatagctagggcgggggctggcgtaaataatatcccaatagatgaagcaaccaaacaaggaatagttgtatttaatacaccgggcgcgaatgcaaatgctgtaaaagagttagtgatatgcggtatgctactctcctccaggggtataattgatggcattgagtttgcaaaaaatcttgatctcaaagatcctgatggactaaacaaagcaatggaagtccaaaagaagacttttgcaggcaatgaactccatggaaaaactcttggtattatagggttgggatctattgggtcgatgcttgctcaggcagctcaaactcttgggatgaaattgatagggtatgatccatatatttcaatagagggagcatggaggcttcctcgtgaggttgaaaaagctgaaacaatggacgagctattgcagcattcagactatgtctctttgcatgttcctcttgtggaggagacaaaaaacctcattaataaattaaatcttaaaaaatttaaaaaaggagcgaggctgattaacctttctagagggggaattgtaaatactaatgacgtaattaaagatcttgaaactggtaatttaggaagatttgtaactgatttcccaaccccagaacttataaaacgctcagctgaaaagaatgatgtggtgcttttgcctcacttgggagcaagcacaaaagaagctgaagtgaactgcgcagttatggctgcaaatcaaatggtcaactatctccaacatggaactatagttaactcagtcaattttcctagaatttctctttcaagaggtactcaccatcgcttagtgataataaatcataatgaaccggggatgattagtaaaattactgattctattgctgcatttgatatcaatattgccgaaatgacaaataagagtagggatgagattgctatcaatttgattgatttagaatgtg

SEQ ID NO: 209704 - DNA, 883 bp, Unknown
  Bacterial polypeptide expressing nucleotide sequence isolated from the Sargasso Sea
aggaataattcaaggccattcttttacaaaatctttagatgttgctgtgccttcagaactggcaaatttggtagaaacaaataaaaaaaattttaaagggacggaacttaaaggaaaaacaattggaataattggacttggttcaattggttctttagtagcacaatctgtagatagcttgggaatgaaaataataggatatgatccaaatatctcaatagatgctgcatggcaactgcctaaagaagttgaaaaagctgaaaatttaaaatatctactatcaaactctgattatatatctgttcatgtgccattattagatgatactcaaaatcttatttcaaaagatgcaattaaatatattaaaaaaggtgcaaaattaattaatttatcgagaggtgcaattgttaataatagcgatgtcctgcatgcacttgaggctaataaaattggttgttttgtaactgattttcctacacccgaattagtaaaaaggtctaatgaattttcagatgtaattttacttccacatcttggtgccagcactaaagaggctgaagtaaattgtgccattatggcatctgagcaagcaattaggtttttaaaagatggagaaataactaactcagtgaactttcccaaaataaaactcggcagaacaactaaacataggttagttataattcacaaagatgagcctggcgttattggaagcattacaggtgaaatcgcctcaaataatatcaatattccagatatgattaataaaagcagggatgaaattgctataacagtaatagatttagacgagaagccaagtcaaaatttattaaatagtttaaaaaatatttctagtgttcttaatgtaagaatttgcaaataa

SEQ ID NO: 209705 - DNA, 1165 bp, Unknown
  Bacterial polypeptide expressing nucleotide sequence isolated from the Sargasso Sea
aatgtacaaagtcctaaaactaaacaacattgctgaagaaggcctgagcgtattcgacttagatgcttttcattgtggtgatgatgtaactaatccagatgcaattattctccgttcttttgatatgcatgatatggatattccaaaaaatctcaaagcagtcggaagagctggctcaggtgttaacaatattcccgttgataaatataccgaacaagctattcctgttttcaacgcacccggtgcaaattctaatgccgttaaagagctagttttagcatctattctaatttctgcaagaaatatacatagtgctattaaatatgttgaatctgtgaaagattcagatgaccttaagaatgatatcgaacagggcaaaaaagcatatgtgggttttgaattaccaaccaaaacattaggtgtaattggattaggacaaattggtgtaaaagttgcaaacgctgcccatgatcttggaatgaatgtaattggatacgatccactgattaccgtcgataatgcaatcaatcttcagcctggagtccagaatgttaatgaattaaaggaattgcttaatgagtccgatatcatatctatccatattcctcataaaaaagaaaccgaaaattttattggtgagaatgaaattaaacagttaaacgatggggctataattattaacctatcaagagaagccatagttgactcaaccgctgtattgaagcaccttgaaaccagcaaaataaaaacttatgttacagatttccctaatggagaaatgatcaaccacaaagatgtacttgttatgcctcacttgggcgcatcaacaaaagaggctcaaataaattgtgctgtgatggttgctaagagcatcaaatcatatcttgagactggaaatatactcaactctgttaactttccaaatgtaaaattaagcattaaatccccgcaccgacttacaataacaaacaaaaatgtacccaatatcattggtcaattcacatcaatacttggtaattcagaaattaatatcgatgacctatcacataaggttttggatgatattggttatactatacttaacgttgataggttagttccagaaagtgttttacatgaaatatctaatatcgatggcgtcatgaaaaccaatctattattttag

SEQ ID NO: 209706 - DNA, 508 bp, Unknown
  Bacterial polypeptide expressing nucleotide sequence isolated from the Sargasso Sea
aaacgatggggctataattattaacctatctagagaagccatagttgactcaatcgcagtattgaaacaccttgaaaccagcaaaataaaaacttatgttacagatttccctaatggagaaatgatcaaccacaaagatgtacttgttatgcctcatttgggtgcatcaacaaaagaagctcaaataaattgtgctgtgatggttgctaagagcatcaaatcatatcttgagactggaaatatacttaactctgttaactttccaaatgtaaaattaagcattaaatccccacaccgacttacaataacaaataaaaatgtacctaatattattggtcaattcacatcaatacttggtaattcagaaattaatatcgatgacctatcacataaggttttagatgatattggttatactatacttaatgttgataagttagttccagaaagtgttttgcatgaaatatctaatatcgatggcgtcatgaaaaccaatctattattttaa

SEQ ID NO: 209707 - DNA, 1042 bp, Unknown
  Bacterial polypeptide expressing nucleotide sequence isolated from the Sargasso Sea
tggggaatttaaatgtgttgctcgagcaggttccggcacaaacaacatccctatagatgaggcaaccaaacaaggaatagttgtatttaatactccaggagcaaatgcaaatgctgtaaaagagctagtgatatgcggcatgttgctttcctctcgaggtataattgaaggcattgagtttgcaaaaaaacttgatcttaaagatcccaagggacttaataaagcaatggaagctcaaaagaagagctttgcaggtaatgagctcgatggaaaaacgcttggaattattggattagggtcgattgggtcgatgcttgctcaggctgcacaaacacttggaatgaaattgatcggatatgatccatatatttcaatagagagtgcatggaggcttcctcgagaggttggaaaagctgaaacaatggacgagctgttgcagcattctgactatgtttcacttcatgttcctcttgcggaggaaacaaaaaaccttatcaataaatcaaatctaaacaaattcaaaaaaggagcaaggctgatcaatttatcaagaggcgggattgtaaatactgctgatgtgataaaagaacttgaaactgggaatttaggaagatttgttactgatttcccaactcctgaactcataaagcgttctactgaaaagaatgatgtggtgcttttacctcacttgggggcgagtacaaaagaagctgaagtaaactgcgctgttatggctgcaaatcagatggtcaactacctaaaacatggcacaatcgttaattctgtgaattttccaagaatttctttgtcgagaggcactcatcatcgtctagtgataatcaatcacaatgaaccaggtatgattagcaaaataactgattctattgctgaatgtggtattaacattgctgaaatgactaataaaagtaaggataagatagctatcaatttgattgatctagagcttgaggccagttctgagcttattcagcagcttgaatctgtggagcatgtgttgagcgtaagatcgctgagtatatga

SEQ ID NO: 209708 - DNA, 721 bp, Unknown
  Bacterial polypeptide expressing nucleotide sequence isolated from the Sargasso Sea
cgaaagcctgggaatggacgtctatttctacgacgtggtttccaaactgccgattggtaacgccacgcaagtgggcacgctacaggaactgctgaacatttccgatgtggtttccctgcacgtaccggagactccggcaaccaaatacatgttcaaggccgagcagtttgcccagatgaagccgggcagcattctgatgaacgcttcccgcggtaccgtggtggatatcgacgccctggccgatgcgctgagctccggtaaactgctgggcgcggccatcgacgtattcccggtggagcccaagtccaacgacgaagaatttgtctcgccactgcgcgagttcgacaactgcatcctgactccgcacgtgggtggctcaaccattgaagcccaggaaaacatcgggcgcgaagtggccgagaagctggccatgtacagcgacaacggcacctccgtctcttcggtgaacttcccggaagtggcgctgccgtcgcacccgaaccagcaccgcctgctgcacattcacgagaacgtgccgggcgtaatgtcggaaatcaaccaggtgttctccgaaaacggcatcaacgtctgtggccagtacctgcaaaccaaggaagatattggttatgtggtggtcgatgtggacaaggcctacggtgagctggcgctggaaaagctccgccaggtaaaaggcactattcgctgccgcgtactgttctga

SEQ ID NO: 209709 - DNA, 1579 bp, Unknown
  Bacterial polypeptide expressing nucleotide sequence isolated from the Sargasso Sea
atgatacaaattcttgttacagatcctctatcagatgctggtatttcagttttagaaaatgctaaaatcaaagttgttgttgattcgaacgctaataaacaagatttattaaaaatagttccagaaattgatggatggataattagaagtggaactataattgataaagatttaatacatgcagcaaaaaaattacaagtaattggacgcgcgggtgttggagtggataatattgatttaccagcagcaactcaaaaaggaattattgtaatgaatacgccagatgtaaatactgtatctgcagctgaacatacaattggtattatgctatcactggctagaaatatatctattgctaaccaaagacttaattctggaaaatgggatcgcaataatcttgttggaactgagcttaggaataaaacgattggtatagttgggcttggtaaaattggtagggaagtgatgacaagatgtttatcatttggtatgcgagtgattggctgtgacccatatataactgataatatttttagctcagatgatgttagattaactgacttggatactctgactaaagaatctgattttatttcagttcatgtgcctaagcttgattctactaataacctatttgatttagaaagaattaaattgatgaaatctacatctatgataataaatgtagctcgtggtggaattattaatgagcaagatcttgcttttgcggttaaagaaggaataattgcaggtgctgcagtagatgtttttgttaatgaaccaattgaaaaagatcacccatttattaatattgataatattcttataacccctcatcttggtgcatcgaccaaagaagctaaagaaggtgtttctgtaacaatttgtgaattagttagagattacttaatcaataataagctttctagtgcattaaatattccaatcactgatatgaatattttaaaacaaatacaacctcatctattgctctccgagcgaatgggtataattcaaggacaattagcccaaggtgctattgaaaaagtgaaagtaaatgttcaaggaccattcgatgattttaaaccatttatgttggctttcattaaggggctattgaatgatcgtataccagacagggtaaattttattaatgcagaattacttgcaaaagaaagaggtatagttattgaatatggagccaataatgaagaaggttcttatgctaatttgattagtacaagtgtaatatttgataataaggaaagattattagatgggagtgtatttgatggaaatcaactgagattggtaaatattcttggctatgatatggatataaaccccacaggtcaccttttattcgtaaataacgaagatgtcccaggtgtaataggaaaagttggaacattattaggacaacataaaattaatattggtgcatatatattaagtgattccgaaaaaatggatgaagcatttgcagttataaggttagactcagaagtcccatcttctgtgattgaattattaatacaaataccagaaattttatctgttcaacaaattaattgttaaa

SEQ ID NO: 209710 - DNA, 931 bp, Unknown
  Bacterial polypeptide expressing nucleotide sequence isolated from the Sargasso Sea
aatgaaaattttaatatgtgatagcttagaaaaagatgtcatagatattttcagtaaaataggtgaagtaacaaatatttctgataatgaaaataaagaagatcagatatctaaaaatattttagacgcagaagtagttgtaataagaagtgccacaacaattactaaagaattaataaactctgctaaacaattaaaagtaattgctcgatgtggagttggtgtagataatattgatttagaacaagcctctaaaaacaatatttatgtcactaattctccaaatgctaatatcatttcagttgcagaacttacaatcggactaattatttctgcagccagaaatatccatacatcaaataactcacttaaagcaggcgaatggaaaagacaaaaatttactggcactgagctttatgacaagcagttaggtcttattggctttggtaaagcagctaatgaggtagcaaaaagactttctgcttttggtatgaaaatagtcttttatgatccttatattgaggaatctaaaaatgaagcaaccaaagtagatttagaccatttaatgcaaacttcagatgtaatttctattcatgttaataaaactaaagaaacagaaaatttaatcgattccaaagcactaaatatgatgaaaaaaggcggaatcatagtgaacacatctcggggaggtattgtggatgagaaaagtctttttgcattagtagatgataaaaaaataatttttggagcccttgacgtttatgaaaaagaacctccaatagttgatgaatttttatcaaattcaaatattgttactactcctcatcttggcgcttcaacaaaagaggctcaactaaaagcaggtaaacaaactgcagaaaatgtaaaagatattttgaatggtgatctaagtagcgtcataaataactaa

SEQ ID NO: 209711 - DNA, 790 bp, Unknown
  Bacterial polypeptide expressing nucleotide sequence isolated from the Sargasso Sea
aacattgaatttctcaagacctctcttcctgaagacgagttaattgagaaaattaaagacgcccactttgttggtattcgctcgcgtactcaaattacagagaaggtagttgaagcagcacaaaagcttgtggctatcggttgtttctgtattggcaccaaccaagttgatcttgaagccacccaacgccgcggcattcccgtgtttaacgcgccattttctaacactcgttcggttgcagaacttgtacttggccaaattatccttttacttcgccaggtgccgagtaaaaatgccaaggctcaccgtggtgagtgggaaaaaacggcagtcggctcatatgaagcccgtggtaagacacttggtatcattggttatggtcatataggcacacagctgagtattcttgctgaacacctaggtatgcgcgttcagtttttcgatatcgaagacaagcttgtgctaggtaattctgcccaagtaaaatcgcttgaaaagctgcttaatacctctgacgttgtttcacttcacgttcctgaaacaccacaaactcaagatatgattggtgaaaaagaactgtctcaaatgaagaaaggcagcattttgattaacgcgtctcgcggtactgtggtagatatcgatgcgcttgcgaaggcattggaaagcggccaactaaacggcgctgctattgatgtattcccggttgagcctaaatctaatactgaagaattcgagtcgccgcttcgcgcgttcgataatgtcattctgaccccgccatgtgggcggcagc

SEQ ID NO: 209712 - DNA, 829 bp, Unknown
  Bacterial polypeptide expressing nucleotide sequence isolated from the Sargasso Sea
atgagcaaagtttcattagagaaggataagatccgaattttgttgttggaaggtgttcaccaaagtgctttggaaacactaaaaagcaatgggtatagcaatattgaatttctcaaaacttctcttcctgaagacgagttaattgagaagattaaagacgcccactttgttggtattcgctcgcgcacacaaattacagagaaagtggttgaagcagcgcaaaaactcgtggccattggttgtttctgtattggtaccaaccaagttgatcttgaagccacacaacgtcgcggcattcccgtgtttaatgccccattttcaaatactcgttcggttgcggaacttgtacttggccaaattattcttcttcttcgccaagtaccaagcaagaacgccaaggctcatcgtggcgaatgggaaaagaccgcagtaggttcttacgaagcacgtggcaaaacgcttggtatcatcggttacggccatattggaacacagcttagtattcttgctgagcacttgggtatgcgtgttcaattttttgatattgaagacaagcttgtactaggtaattctgcgcaagtaaagtcgctagaaaagctgcttaatacatctgatgtagtttcacttcacgttcctgaaaccccacaaactcaagatatgattggtgaaaaagaactgtctcaaatgaaaaaaggcagcattcttatcaatgcatctcgtggtactgtggttgacattgatgctctagctaaggcattggaaagcggccatcttaacggcgctgccattgatgtattcccagtgagcctaagtcgaatactgaagaatt

SEQ ID NO: 209713 - DNA, 961 bp, Unknown
  Bacterial polypeptide expressing nucleotide sequence isolated from the Sargasso Sea
agacgcggcagcgaaacgcgggattcccgttttctttgcgccgttctcaaatacccgctccgttgccgagctggtcattggcgaactgctgctgatgctgcgcggcgtaccggaagctaacgcgaaagcgcaccgcggcgtgtggaacaagctggcggtaggcagttttgaagcgcgtggcaaaaaactggggatcatcggttacgggcacatcggtacgcagctgggtattctggctgagtctctggggatgcacgtctatttctatgatatcgaaagcaaactgccgctgggcaacgctacccaggtccagcacctctccgacctgctgaatatgagcgatgtggttagtctgcatgtgccggaaaacgcctccaccaaaaatatgatgggcgcgcaagagctggcgctgatgaaacccggcgcgctgttgatcaacgcctcgcgcggtacggtcgtggatatcccggcgctgtgcgatgccctggcgcgtaagcatctggcgggcgcggcgattgatgtgttcccgaccgaaccggcgaccaacagcgatccgttcagctcgccgctgtgcgagtttgacaacgtgatcctgacgccgcacatcggcggctcaactcaggaagcgcaggagaatatcggtctggaagtggccggtaagctggcgaagtattccgataacggttcgaccctttcagcggtgaacttcccggaggtttctctgccgctgcacggcggtcgtcgtttgctgcacatccacgaaaaccgtcccggcgtgctgaccgctatcaaccagatctttgccgcgcagagtatcaacatcgcagcacagtatctgcaaaccacgccgcagatgggctacgtggttattgatattgaggccgaagaagatgtggcccagcaggcgctgcaggccatgaaggcgattccgggcaccattcgcgcccgtctgctgttctga

SEQ ID NO: 209714 - DNA, 1231 bp, Unknown
  Bacterial polypeptide expressing nucleotide sequence isolated from the Sargasso Sea
atggcgaaacattcgctggacaaggataagatcaagatcctgttgttggaaggcgtccaccaatctgcggtcgatgtatttgaacgtgctggatacaccaatatcgagtatcacaaagcctccttaggtgatgaagccctgctcgagtccatcaaagatgctcactttgttggtattcgttcccgtacccaattaacggctgaggtattgaagcgtgccgaaaaactgattgcgattggttgtttctgtatcggtactaaccaagtggatctggcgaccgccgaattgctcggtatcccagtatttaacgcaccattctctaatacccgcagcgtggctgaactggtattaggtgaaatcattatgctgatgcgcggtatccctgaacgtaatgctatcgcccaccgtggtggctggatgaagacggccgccggcagttacgaagtccgtggcaaaaccttaggtgtgataggttatggccacatcggtacacagctcgggatcctagctgaaaccttagggatgcgcgtggtgtttttcgatatcgaagacaaactaccattaggcaatgcccaacaaatccattcgatggaacaattactggcacaatccgatgtgatcagtttgcacgtccctgagacggcgcaaaccaaagatatgatcagcaccgccgaatttgcggccatgcgtaaaggcagcatctttatcaacgcctcacgcggcactgtggtcgatattgatgccctaacggttgcccttaaagagcgtcaccttgcgggcgcggccatcgacgtattccccgtcgagccacaatcgaatgatgatgaatttatcagcccattacgtggtttagataacgtgctgctgactccgcatgtgggtggcagtactgccgaagcgcaggaaaacatcggtatcgaagttgccggtaagttagccaaatactctgacaacggttcgaccgtgtctgcggttaacttccctgaagtgtcgctgccaatgcacaaaggcatttcgcgcttactgcacattcaccaaaaccgtcctggcgtgctgatcaaaatcaacaaagccttctctgaaaaaggcattaacattgccgctcagtacctgcaaaccacagctgaaatcggttatgtggtgatggaagtcgatactcaccaagccgaagaggccttggttgaacttaaggccattgaaggcacactgcgcacccgcgtattgttctaat

SEQ ID NO: 209715 - DNA, 1231 bp, Unknown
  Bacterial polypeptide expressing nucleotide sequence isolated from the Sargasso Sea
catggcgaaacattcgcttgacaaggataagatcaaaatcctgttgttggaaggcgtccaccaatctgcggtagatgtgtttgaacgcgcgggatacaccaacattgagtatcacaaagcctcgttaggtgatgaagccctgcatgaatccatcaaagatgctcattttgttggtattcgttcccgtacccaactcaccgccgatgtattaaaacgtgccgaaaaattaattgcgattggttgtttctgtatcggcactaaccaagtggatctggcgaccgccgaattactcggtatccccgtttttaacgcaccattctctaatactcgcagcgtggctgaactggtattaggcgaaataatcatgctgatgcgcggtattcctgaacgtaacgctatcgcccatcgtggtggttggatgaaaactgccgcaggcagttacgaagtccgtggcaaaactttaggcgtgataggctatggccatattggaactcagctggggatcctggcagaaaccttaggcatgcgtgtggtgttcttcgatatcgaagacaaattgccattgggtaatgcccagcaaatccattcaatggagcaattgctggcacagtccgatgtagtaagcttgcacgtgcctgaaacgccgcaaaccaaagacatgataagtactgccgaattcgccgctatgcgtaaaggcagcatctttatcaacgcttcccgcggtactgtggtcgatatcgatgcgcttacggttgcactcaaagagcgtcaccttgcgggcgcggcgattgacgttttccccattgagccacaatcgaatgatgatgaatttatcagcccattacgcggtttagataatgtgctactcacgccacatgtgggtggtagcaccgccgaagcacaggaaaatatcggtatcgaagtggcaggcaaattagccaaatactcagataacggttcaaccgtatctgcggttaacttccctgaagtgtctctgccaatgcataaaggtacctctcgcctactgcatatccaccaaaatcgtccaggcgtgctgatcaaaatcaacaaagccttctctgaaaaaggcattaacattgccgctcagtatctgcaaacaacggcagaaatcggttatgtggtaatggaagtcgacactcaccaagcagaagaagccttggttgagcttaaagccattgaaggcacactgcgtactcgcgtgttgttctaa

SEQ ID NO: 209716 - DNA, 1234 bp, Unknown
  Bacterial polypeptide expressing nucleotide sequence isolated from the Sargasso Sea
catgactgccaagttttcactggacaaggataaaatcaaggtactgctgctggagggggttcaccccaacacggtggaaacctttcgtgccgcaggttacaccagtgtggagtatctgaagacctctctctccgaagaagatctgatcgagcgcattcgtgacgtgcatttcgtggggctgcgctcgcgcacccagatcaccgagaaggtgctggatgccgccaacaagctggtggccatcggctgcttctgcatcggtaccaaccaggtcgagctcgacgccgcccatctgcgcggtatcccggtgttcaacgcccccttctccaatacccgctcagtggccgaactggtgctgggcgagatcctgctgctgctgcgcggcatcccggagaagaacgccaaatgccatcgcggtgtgtgggaaaagctggccaaccgctcggtggaagcccgtggcaagaagctcggcatcatcggctacggccacatcggcacccagctcggcatcatcgccgagagcatcggcatgaaggtctactactacgacatcgagaacaagctctcgctcggcaacgccatccaggtgccgagcatggtcgagctgctcaacatgtccgacgtcatcagcctgcacgtccctgaaaccgcctccaccaaggatctgatcggtgccgagcaactgcgcatgatgaaaccgggcgccatcttcatcaacgcctcccgcggtaccgtggtggatatcgatgccctggccgacgtcatcaagagcggccacatctccggcgccgccatcgacgtcttccccagcgagcccaagtccaatgacgaggagttcctcaccccgctgcgcgggctggacaacgtgatcctgaccccccacatcggcggctccacccaggaagcccaggagaacatcgggctggaagtggccaacaagctggtcaaatactcggacaacggctccaccctctccgccgtcaacttccccgaggtctccctgcccggccacaagggctccagccgcctgctgcacattcaccgcaaccagcccggcgtgatgaaccagatcaaccagatcttcgccgacgaggggatcaacatcgccggtcaatacctgcagaccagcagccacatcggctacgtggtgatcgacgtggagaccgagcacagcgagaaggcgctggccaagctcaaggagatcggcggcaccatccgtgcccgtatcctgcactga

SEQ ID NO: 209717 - DNA, 1207 bp, Unknown
  Bacterial polypeptide expressing nucleotide sequence isolated from the Sargasso Sea
atggaaaaattttcgctgcccaaagacaagatcaagatcctgttactggagggtttgcaccaaagtgcggtgcaaagctttaagaatcagggttacagcaacattgagtatttaaaaacctctttggatgaagctgagctgattgaaaaaatccgtgacgtgcattttattggtattcgctcacgcacccaactgaccgaaaaagtgctggatgcggccactaaactggccgctattggctgcttctgtattggcactaatcaggtggatttagacgctgccctgatgcgtggtattccggtctttaacgcgccgttttctaacacccgctctgtggctgaactggtattaggccaaatcattatgctgctgcgtggtattcctgagcgcaatgcggcggcccaccgtggtgaatggcaaaaaactgcaactcagtcctttgaagcccgtggtaaaaccttaggtattataggttacggccatattggtactcagttgagcatcatggcggaaaacatcggtatgcgtgtacagttttacgatatcgaagacaagctggtgttaggtaatgccacacaagtcgattttggcactttgctgaaaacctcagacgtagtgacgttgcacgtgcctgaaaccgctcagactaaaaatatgatcggcgaagctgaattggatctgatgaaacaaggcagcattttgatcaacgcttcacgcggcactgtggtcgatattgacgctttagcagccgtgatgaaagcgaagaaactagccggtgcggcgatagacgtattccctgtagaaccgaccagcaatgatgaagaatttatcagcccgctgcgcgaattcgacaatgtgatcctgacgccacatattggcggttctacccaggaagcgcaggagaatatcggttttgaagtagcaggcaagatggtgaaatacagcgacaacggttcgactttgtctgcagtgaatttccctgaagtgtcactgcctgagcacaaaggccgttcacgtttactgcatatccacaaaaaccagcctggtatgctgaccaaaatcaacgaagcttttgccaaacacggcatcaacatttcgggtcagtatctgcaaaccaatgccgaaattggttatgtggtgatcgatatagattctcaggatcgcgatctggctttaaatgagttaaaggcgatcccagggacgtagc

SEQ ID NO: 209718 - DNA, 1228 bp, Unknown
  Bacterial polypeptide expressing nucleotide sequence isolated from the Sargasso Sea
atggaaaaattttcgctgcccaaagacaagatcaagatcctgttactggaaggtttgcaccaaagtgcggtgcagagctttaagaatcaaggctacagcaacattgagtatctgaagacctctttggatgaagctgaactgattgaaaaaatccgtgacgtgcattttattggtattcgttcacgcacccaactgaccgaaaaagtgctggatgcagcctctaaactggcagcggttggttgcttctgtatcggtaccaatcaggtggatttagacgctgcgttgatgcgtggtattccggtattcaacgcgccgttttccaatacccgctctgtggctgaactggtgttaggccaaatcattatgctgctgcgtggtattccggagcgtaatgccgcagcgcaccgtggtgtctggcaaaaaactgcaactcagtcgtttgaagcccgtggtaaaaccttaggcattattggttacggccatatcggtactcagctgagcatcatggcggaaaacatcggtatgcgtgtgcagttttacgatatagaagacaagctggtattaggtaatgccacacaagtcgattttggaactttgctgaaaacttcagatgtggtgactttgcatgtgcctgaaacagctcagaccaaaaatatgatcggcgaagctgaactggacttgatgaaacaaggcagcattctgatcaacgcttcacgcggcactgtggtcgacatcgatgcattagctgcagtgatgaaagcgaaaaaactggccggtgctgctattgacgtattcccggtagaacctaccagcaatgatgaagagttcttatctccgctgcgcgaattcgacaatgtgatcctgacgccacatattggtggttcaactcaggaagcgcaggaaaatatcggctttgaagtagcaggtaagatggtgaaatacagtgacaacggttctaccttgtcagcggtgaatttcccagaagtctccttgccagaacacagaggccgctcacgtttactgcatatccacaaaaaccaacctggtatgctgaccaaaatcaacgaagcctttgctaaacacggcatcaacatttcgggtcagtatctgcaaaccaatgcagaaattggttatgtagtcatcgacatcgattcactggaccacgaactggccctgaatgagttgaaggcgattccggggacgttacgcgcccgggtcttacactaat

SEQ ID NO: 209719 - DNA, 1012 bp, Unknown
  Bacterial polypeptide expressing nucleotide sequence isolated from the Sargasso Sea
agttattggcgctggctctgctggctgtgtcatctttaatcgcttaagcgaagataaaaacaaaaaaattctcattttggaggctggaggaaatgataaatcagttaccgtaagtatgcctgcagccttatctattcccatgaattccgaacgattcaactggggtctaaaaactgaacctgaaccagggttagataatcgaattatgaaccttccaagaggaaaaggactaggaggttcgtcttcaataaatgggatgtgttatgttcggggaaatccaatggattatgaactttggtcggcaaagggagcaaaaggttggcattggggaaatgtattaccctattttaagaaacttgaacactcatcggaagatggtgagtttcgcggcaatgatggccctctatccgtaaaaaagggagaagctaaaaacattctctacaatacattcgttcaagcaagcaaagaagctggatatgctgtaagtgaaaatatgaatggcctccaacatgaaggcatgggccctatggaaatgtctgtcaaaaatggtgttagagcaagtgctgcaaaaagttatctataccctgcactaaagcgtggaaatataaatgtaattaccaaagctaatgtggaaaaaatcctcttccaaaataaaaaagctaaaggtgtattgttttctagatacggaaaaaaaataaccgtaaaggcaggaaatggagttattttatgtgccggatccataatgtcacccaaaatattaaagctttccggaatcggccgcgctaacgagttaaaaaatcatgctattgaaataattttggaaagaaaagaggtgggaaataatcttatggaccaccttgaattatatattcaacaagaatgcgttaagccaataactctatatcaatacctgaatcctttttataaatctctgattggattacagtggttactatttaaaaagggtccaggagccacaaatcattttgaaactggagggcatattagaagt

SEQ ID NO: 209720 - DNA, 916 bp, Unknown
  Bacterial polypeptide expressing nucleotide sequence isolated from the Sargasso Sea
aatgaaattcagccataaatatatcattgttggcgctggaagtgcaggttgtgttttagcaaataaactttcagaagatcctaaaaattctgttcttttgattgaggccggtccaatggattcttcatactctatcaagatgcctcttgcagcaagttcattgtttaagagtaaaaaatatgggtggtgctatgaaactgagccagaaaaaaatttaaataatcgaacaataaattggccaagaggaaaaacgttaggaggaagtagctccattaatggaatgttatatattcgcggtcaagctgatgattataacaattgggaacaattaggaaataatggttggggctatcgcgatttactaaaatattttattgctttggagaataatcaaaatcatgaagatcaatttcacgggaattttggccctttgtgggtcgaaacatttcaacctattcttgatgcatctaaagaatttttaaaggcatgttcagaatttggtttcaaaaataataatgattttaatggaacagatcaggaaggatttggacaatatcaagtaaatattaaaaatggaaaaagatttagcgctgctgatgcatttttaaaaccaatatcaaatcgtgcaaatttagatatcttaacaagtaccttagttgaaaaaattatcatctcaaataaaaaagtaataggtgtaaagatttcaaataaaaaattttcaggagtaataggatgttcatctgaattaattctcagtgggggaagcattaactcacctcaaatacttatgctatctggaattggaccaaaaaatcatcttaagaaatatcaaatagctctagttcatgacttacctggagttggtcaaaatttacaagatcatcttactgtgaatttaagttacaaggtcaatgaa

SEQ ID NO: 209721 - DNA, 980 bp, Unknown
  Bacterial polypeptide expressing nucleotide sequence isolated from the Sargasso Sea
agcatttactagaaaaattttacacaaaaatggaaaagcttttggtgttgaatttgacaataacggtgaagttcaagaggtttattcaagcaattcagtaattgtaagttgtggagcgattaaatcaccacaaattttgatgttatctgggataggtccagcagaccatcttcgatcaatggatattgaagcaagagaaaacctatctggcgtaggaaaaaatttacaagatcatttacttgttgcaactggttttgagtgtactaaaaatgtaactattcataaaattactcaacctcaccaaaaactttttgcaggccttaaatggttattaacaagaaaaggtattgtagcatctaatatatgggagatgggtggacagatttttggaaatcacaatgtaaaatatcctaatttacagtatcattttgcacctgcatttaataaatatgaaggcagaaaaattattctttctcaaggctttcttcttcagtgtgatcagttaaggccaaaaagcaaaggctctgttcaactcaaatccaataatccttatgaaaccccaaattcattttttaattatctttctcatccacatgatttaaaggaattaagagaagcatttaaaaaaatgattgaattaatttctcagccagcctttgatgaatttagaggtaaaagaattaaaccttctcctgacgttaaaagtaattcagaaattgatagctggatacgtgagactgcaattacagattaccatccatcggggacgtgtaaaatgggtaatgagcctgactcggtagtagatgaaaaactaaaagtccatggctttgaaaatttatacgtagtagacgcttctattatgcctgaagttgtcagtggaaatttgaatgcaccaacgcaaatgattgctgaaaaagcatctgattttatattgggaaaaaaacctttaaaaccaataaatgctaaatttcactttcaaa

SEQ ID NO: 209722 - DNA, 688 bp, Unknown
  Bacterial polypeptide expressing nucleotide sequence isolated from the Sargasso Sea
tgcaaaactcccgacactctttatacttatacaaaactaattccaaaagttttagctggtattcaatggtttttatctagatcaggaccttgttctaaatcttttttagaagctggtgggtttgcaaaatcttcccctgagagagaaatagcaaatatacaatttcatttttttccatcatttgttattgatcatggtttagttaatcctagttcacatgggtatcaacttcatgcaagtccaaatcatccaaaaagtagaggacaaataactctgaattcttctaacccttatgattatccaaaaatcttattcaattatttagaagatgaagacgatttaaaacaaactagagaatgcattcatgttgcaagaaaaatcttatctcaaccatctttagcaaaacattcaggtaaagaagttggcccaggttctgataaacaaaacgatgatgaattggatgaatatattagatcaaaagcggaaactgcttatcatccatgtggtacttgtaaaatgggtgttgatgatatggcggtagttgatgaaaatttaaaagttaaaggaatgcagaatttaagagttgtggatgcttcagttatgcctgagatccctagtgcaaacttaaatgcccctactctaatgattgctgaaaaagcttctgatctaatattgaataatatttaag

SEQ ID NO: 209723 - DNA, 1007 bp, Unknown
  Bacterial polypeptide expressing nucleotide sequence isolated from the Sargasso Sea
agaacccaattgcgataatagacaaatggtttatccaagaggcaaaacattaggaggaagttcttcaattaatggaatgctatacattagaggacaatctaatgactatgactattggagacaactaggtaatgttggttggtcatgggaagatgttcttccctattttaaaaaatcagaagatttccagtttggtgaaaacgaatttcatggatcaggtggtcctataaaagttgaaaaaataagagcaacattcaaagttttagatttatttttagaggctgctgaagagtttggatacaaaaaaactgatgattttaataatggaaataatgaaggaatgggttatttcccttttactattaaaaatggctttagatgtagcactgcagtcggatacttaaatccaattaaaaaaagaaaaaatttaaaaattgtcacaaatgcacatattaaaaatattcagtttgaaaataaaaaagcaataagtgttaattactggattaataataatttagttaatgttaaatcaaataaagaaataattttaagtgctggaactattggatctcctcatattttacaagcttcaggtatcgggccaggggaaattttaaaaaaaaatagtattgatgttataaaagatcatcaaagtgttggtcgaaatcttacagatcatttgatgttaagacctgtatataaaataaagaacttagaaactttaaacaatgtttattatagtgttacaaaaaaaatacttactggattgcaattcttttttttaagaaaaggacctttaacagttggtgctagttatgtttgtggttttgtaaaaagtgattctcatttagagacaccaaacttgcaatttcatatttctccagcaagtacggatcaattaggaaaatcatcacttcataaatttcctgcttttactccaactataactaatgtcagacctactagtcgtggatcgattgaattaaattcacctgatacaagagtat

SEQ ID NO: 209724 - DNA, 931 bp, Unknown
  Bacterial polypeptide expressing nucleotide sequence isolated from the Sargasso Sea
atgaaatttagccacaaatatatcattattggtgcaggaagtgcaggttgtgtcttagcaaataaactttcagaaaatcctgagaactctgttctcttaattgaggctggtccaatggataactattcatcaattaaaatgcctttggccgctagctcattatttaagaataaaaaatatggttggggctatgaaacccaaccagaaaagaatctaaacaatagaactattaattggccaaggggtaaaactcttggaggtagtagctctatcaatggaatgctatatattagagggcaagccgaagattatgaagcttgggaaaaggctggaaataaaggatggggctaccgcgatctaatgaaatattttgttggtcttgagaataatcaaaatcaccaggatcaatatcatggaaattttggtcctttgtgggtagaaacatataagccaattctaaaagcttcctattcatttttaaatgcttgtaaacaatctgggttagttcaaaacaatgatttcaatggcaatgaacaagagggctatggccaatatcaagtaaatataaaagatgggcaaagatttagtgcggctgatgcatttttgaaacctgtgctcgatagaacaaatcttgaattgttaacgaatgctttagttgaaaaaattatcatatcaaacaaaaaagcaattggtgtgaaagttaaatttaaaaatgaggttcatgtgattggatgcacatccgagataattctttgcggaggaagtatcaactcccctcaaatattaatgctatctggtattggacctaagaaacatcttaaagaacatcaaatatcactaatacaggatttacctggtgtgggacaaaacctacaagaccatttaacagttaacataagctataaaattaataaattacaaacctttagcg

SEQ ID NO: 209725 - DNA, 817 bp, Unknown
  Bacterial polypeptide expressing nucleotide sequence isolated from the Sargasso Sea
ttacaagtatcaggaattggaaatcctgagcttttaaaaaatttaggaattgatgtcattcatcaattaaatggtgttggagaaaatttacatgatcatttgatgtttagaccaatctataaaattaacggcattaaatctttaaataaaaaagttaatagcttgtttggaaaattaatgattggtttagaatatatttttaaaagaagtggtccaatgactatgggtgcaagccaattatgcatgtttgcgaaaagtgatccatctttggaattaccagatttacaatggcatgttcagccaatgagtatggacactcttgctgcaacaaaaaatcatgattttcacgcttttacccctactgtttcaaatgttagaccaacaagtagaggttatgtgcgagtagttgataaagactcaagaacttatgcaaaaattaaacaaaactatctttctactgatcacgatagaatggtagctgccaaagggctaaaattaactagaaagatagtaatggaatcagaaacttttaaaaaatattcaccagaggaatataggcctggtattcatattaatgatgatgaggagcttgtcaaagaggcatctaattttgcacaaaccatctttcatcctgtcggtacatgtaagatggggcaagatgaaatgtcagttgtagatgaaaaattaaaagttagaggaatagaaaatcttagagttattgatgcatcaataatgccaaacattacctcaggaaatactaacgcacctacgattatgattgcagaaaaaggtgctgacatgatactacagcaataat

SEQ ID NO: 209726 - DNA, 601 bp, Unknown
  Bacterial polypeptide expressing nucleotide sequence isolated from the Sargasso Sea
tgtttctaaatcattcttagaagctggtggttttgcaaaatcttcaccggaaagaaaagttgcaaacattcaatttcatttttttccatcttttgtaattaatcatggtcttgaagatcctaaatcgcacggttatcagttgcatgcaagtccaaaccacccaaaaagcagaggtcatataacacttaactcatctgatccatatgattatccaaagattttatttaactatctaaaagaagaagaagatttaatccaaactagagaatgtattcatgttgctagaaaaattttatcacaaccagctttaatagaacatgcgggaaatgaagtaggacctggttctaatgctcaatcagacgatgaattagatgattatataagatcaaaggcagatactgcgtatcacccatgtggtacatgtaaaatgggtgtagatgaaatggcagtagttgatgagagtttaaaagtaaaagggatacaaaacctaagagtcgtagatgcttcaataataccagaaattccaagtgcaaatttaaatgcgcctgtgattatgatagcagaaaaggcctctgatataattttaaattcatataattaa

SEQ ID NO: 209727 - DNA, 626 bp, Unknown
  Bacterial polypeptide expressing nucleotide sequence isolated from the Sargasso Sea
aatggaaatctttgattatataattcttggtgggggatcagctggttgtgttctggcaaatagactgtctgcaaatcctaaaaataaagttttgcttcttgaagctggtggtaaagatacttatccatggatccatattccagttggttactttaaaacgatgcataatccaaaagtagattggtgttttaaaactgaacctgatgaaaaaatgaacaatagatcgattagatatccaagaggtaaaacgcttggaggaagttcctctatcaatggtcttttgtggataagaggacaaagtgaggattataatatttggcgccagttaggtaatacaggctggggttggaatgatgttctgccctattttttaaaatcagaaaataatgaattaggtaaaggtgagtttcacaatgacagtggtccgattacagtagcaaataaaaaaattaatttaaagctacttgatgaatttcaaaatgccgctgaagaatatggaataccgaaaacaaatgattttaatactggagataatactggtgtaggtttttttcaatttacaacaagttttaataaaactggtttaaagttaagatgtagtgccgcaaaaggatattttaatccag

SEQ ID NO: 209728 - DNA, 841 bp, Unknown
  Bacterial polypeptide expressing nucleotide sequence isolated from the Sargasso Sea
tggccgacaaattcctattccccgaggcagagtcctcggaggatcaagctccatcaatggtatgctttatgttagaggacaggcgttagactttgatgtctggggacaattgggaaatcgtggctggtcatattcagatatattaccttattttaaaaaatcagagaactttgagcgtgggaatgacgagtttcgtggaactgacggacttctaaatgtggccgatatgtatgaaaaacacgaattgattgatgcatttatcgatgctggcgttgagttaggttatccccgaaaccccgattataatggttctaaacaagatggttttggctactatcaaataacccaacggaatggacgtcgggaaagtacagctcgtgcctttttaaaccctgctaaaaatcgaaaaaatctaactgttgaatctcgcgcccatgttacaaaaattatttttaataaaaaaagggcggcaggcgttgaatattcaattgatgggataaaaaagactgcagacgtaaacaacgagataatattgacagctggagcagttcaatccccccaaatacttgaactttccggaatagggcagcctgaattactgaaaagccatgggatttctatacagcacgaacttccaggagttggtgaaaattatagagaccattacgctgcaaggatgaactggcgggttaataaaccaattagtctaaatgaggaaacccgcggattaaatctagtcaaagaagtttttaaatatgcgttaacacgacgaggcgcacttacatggacggcgggtgtcggtcatgctttcatgaagaccagaccagagttagaaacccca

SEQ ID NO: 209729 - DNA, 908 bp, Unknown
  Bacterial polypeptide expressing nucleotide sequence isolated from the Sargasso Sea
ggtattggttcatgttcgaggcaatgctatggattttgaaaattgggggcaacttgggcttagcaattggaactatgaaagtgttcttccatattttaaaaaatctgaatctattgagggactagatacagaatatagaaatactgatggtccacttaaactctcaagaacagaaaatggaaatatattatctaaagtctatcttgaagccgcaaaagaagctggctacgaaattaataacgatatgaatggttataagcaagagggttttggcttaatggatactacaatctttgatggaaaacgacaaagcactagtgttacttatttacatcctatcaaacaaagacaaaacttaacactgataacaaatatccaagtgttaaaaataataattgaaaactcagttgcaattggcgttgaaataaaaaataaaaataagttaaaaaaaatctttgcagataaagaagtacttttatcagctggagcaatcaattctccccaaatcctgatgctctcaggaatcggtcctgaagaagagttaaaaaatcataatattaagataatatcagctctaaatggtgttggtaaaaacttacaggaccatttggagacatatgttcaatatgaatgtacgaagcccgttactctatacagctcatttaatcctatcaatatggcactcattggtatgcagtggtttttatttaaaaaaggtattgccgcacattcaaatttagagattggtggattcataagaacaaatgaaatggttgactatccaaatatgcaatatcatttttttccctctctagttattgaccatggacgtcaaaacccaagctgtcatgcatttcaagctcatgtaggtcctatgagacctacaagtagaggctttgtaaactaaa

SEQ ID NO: 209730 - DNA, 381 bp, Unknown
  Bacterial polypeptide expressing nucleotide sequence isolated from the Sargasso Sea
aatttaattatcttaagcatgaagacgatttaaaacaaatgagagaaggtgtgggaattgctaaaaaaatattatctcaaaaagcactaaaagaatatgtaggcactgaaattaggcctgggaaaaatgtatctaatcaaaatgagttagatgaagttattaaaaatacatctgaatctgcctatcatccgtcatgcacaaataaaatgggtgatgacaaaacttcagttgtagaccaaaacttaagggttcatggaattcaaaatttaagggttattgatgcttctgtaatgccagatattgttagtgctaatttaaatgcatcaactattatgattgctgaaaaagcttacgaccaaataaagagtagcgttagttaga

SEQ ID NO: 209731 - DNA, 424 bp, Unknown
  Bacterial polypeptide expressing nucleotide sequence isolated from the Sargasso Sea
tctaaagaagattatttaccaagtatagatccaaaatatttaagtgatgaaagagatattcatgatttatattcagcttttgattttattagaaaattttcaaataacagacatttaaaagaaataattgatacatcggtaaataccactcctatgaatgcaagtaatgaagcattacttgatcactttaaatcaaatgctggcactgtttatcatccttgtggaacatgtcgtatgagtaaagatattaattcaggcgttgtctcagaaaaactaaaagttcatggtattaaaaatttatggatagtggatgcttctattatgccaaatattacatcaggaaatatcaatgctcctgttatgatgctatcatatttatctagtaaaattattatagaagaattaaaacaacgatataaatgaa

SEQ ID NO: 209732 - DNA, 772 bp, Unknown
  Bacterial polypeptide expressing nucleotide sequence isolated from the Sargasso Sea
aatggaaatctttgattatataattcttggtgggggatcagctggttgtgttctggcaaatagactgtctgcaaatcctaaaaataaagttttgcttcttgaagctggtggtaaagatacttatccatggatccatattccagttggttactttaaaacgatgcataatccaaaagtagattggtgttttaaaactgaacctgatgaaaaaatgaacaatagatcgattagatatccaagaggtaaaacgcttggaggaagttcctctatcaatggtcttttgtggataagaggacaaagtgaggattataatatttggcgccagttaggtaatacaggctggggttggaatgatgttctgccctattttttaaaatcagaaaataatgaattaggtaaaggtgagtttcacaatgacagtggtccgattacagtagcaaataaaaaaattaatttaaagctacttgatgaatttcaaaatgctgctgaagaatatggaataccgaaaacaaacgattttaatactggagataatactggtgtaggtttttttcaatttacaacaagttttaataaaactggtttaaagttaagatgtagtgccgcaaaaggatatttaaatccagtaaaaaagaggtcaaatcttaagattgttgtaaaagctcacgtgcaaaaaataaattttgacggaaagaaagctattggcgctagctattataaaggtgataagcttgttgaagtaaaagctaataaagaaataattttatctgct

SEQ ID NO: 209733 - DNA, 994 bp, Unknown
  Bacterial polypeptide expressing nucleotide sequence isolated from the Sargasso Sea
agctggtggaaaagatacatacccatggatacatataccagttggatattacaaaactatgcataatccaaaagtggattggtgttttcatactgaaaaagataaatcaatgaatgatagatctattagatatccaaggggtaaaactttgggtggtagctcctctataaatggactgctatggattagaggtcaaagccaagattataataattggagacaacaaggaaataatggttggggatgggacgatgtcttgccctatttcataaaatcagaaaataacgaattaggaaaaagtgaatttcataatgattctggtccaattgtagtttcaaataagaaaatcaaactcaaaatgttagatgaattcatcaatgcagcaaatgaaataggtattccaaaagtggatgattttaatacaggtaataactttggagttggttattttcaatttactacaacacgtaataaatttggattaaaactaagatgtagtgcggctaaaggatatctaaatcctgtaaaaaatagaaaaaatttagaaataatagtagatgctcatgttaaaagaattgtttttgaagataatagagcaattggcatagagtatttcaaagatgataaactaataaattctagagcaaatagagaagtaatattatcagcaggttcaatcggatctcctcatattctacaaacatcaggtattggtgacttagatagtttaaaaaattttggtattgatggggtaaaatatttgaaaggtgttggaaaaaacctacaagatcacttaatgtttagaccagtttataaagttaaaaatctcgagtctcttaataaaaaaataaatagtttatttggaaattttttaattggtttagaatatgtacttcagcaaagcggccctatgactatgggagcaagtcaagtatgtggttttgcaaaaaaagatagttcgagggagaccccaaatttacaatttcatgtgcaa

SEQ ID NO: 209734 - DNA, 192 bp, Unknown
  Bacterial polypeptide expressing nucleotide sequence isolated from the Sargasso Sea
tttctcctgttggcacatgtaaaatgggccaagatgaaatggccgtagttgatgaaacacttaaagttaaaggtttaaataatctaagagtaattgatgcatcaataatgccaaatataacttccggtaatactaatgcacccacaataatgattgcagaaaaaggtgctgatatgatacttagaagttaat

SEQ ID NO: 209735 - DNA, 322 bp, Unknown
  Bacterial polypeptide expressing nucleotide sequence isolated from the Sargasso Sea
aaaattatgctagaaactgaaacttttaaaaaatatgaaccagaagaatatagcccaggacttcatattacagatgatgaggagttagtaaaagctggtagtgactttactcaaactatttttcatccggtggggacatgtaaaatgggcaaagatgaaaatgctgttgtaaatgataagttatatgtacatggacttcaaaatctaagagtgatagatgcatcgattatgccaaatattacttcgggaaatacaaatgctccaactataatgattgcagaaaaaggtgcagattttattttaaataaccaaatcaaatgac

SEQ ID NO: 209736 - DNA, 847 bp, Unknown
  Bacterial polypeptide expressing nucleotide sequence isolated from the Sargasso Sea
tatgcatcaaggagaaagagctggtgtttcaaaatattatttagatccagtaaaaaatagaaagaatcttaatattttaaaaaattcatatgtagaaaaaatattatttgatggaaaaaaagcaataggtcttcaagttaaaattaaaaacaaagttcaaaaaatttatgcaaaaaaagaagttatcttaagtggtggttcaattaactcacctcaattattaatgttatcaggaatcggcgatgcaaaccatttgaaagaaaatggaatagaagttgttaacgatgttaaaggtgtaggtaaaaaccttcaggatcacttagaaacttatattcagcaagaatgtaaaactccaaatactttgtacacttatacaaaattagttccaaaggttttggctggtattcaatggtttatgtttaaatctggaccttgctccaaatcctttttagaagcaggtggatttgcaaaatcctcacctgaaagagaaatttctaatattcaatttcatttctttccatcatttgtaattaatcatggattagagcaacctaaatctcatggttatcaattacatgctagtccaaaccatccaaaaagtagaggacaaattactcttaattcatctaatccatatgaatatccaaaaatattatttaattatttgcaagatgaagatgaccttcaacaaacaagagagtgtattcatgttgcaagaaagatattatctcaacctgcgctagtcgaacacgcaggaaaagaagttggaccaggaatagaagctcaatcagatgatgaattaaatgaatatattaggtcaaaagcagatactgcttatcatccatgt

SEQ ID NO: 209737 - DNA, 322 bp, Unknown
  Bacterial polypeptide expressing nucleotide sequence isolated from the Sargasso Sea
atggacgaatttgattacatcattgtaggcgcagggtcagcaggttgtgttttagcaaatagacttactagcaaaaaagaaaataaagttttgctactcgaggctggaggtaaagataattatccatggatacacattccggttggatattataaaacaatgcacaaccctaaagttgactggtgtttccatacagaaaaagatgaaaccatgaataatagatcaattagatacccaagaggtaaaactttaggcggaagttcttctattaatggtcttttatggataagaggtcaaagtaatgactatgataattggagac

SEQ ID NO: 209738 - DNA, 649 bp, Unknown
  Bacterial polypeptide expressing nucleotide sequence isolated from the Sargasso Sea
tatcaagctattgagggatcaaaatggtttttatttaaaaaaggtagattagcaaactcacatttagaattaggagggtttgttaaatctgacaaatcatataatcatccaaatttacaatttcatttttttccatacttagttattaatcatggtttagaaaatcctaattttgaagcttttcaatttcatgtttgtccaaatagaccaaaaagtagggggtttgttaaaattaaaacaaataactataaagatgatcctaaaatacaatttaattatcttaagcatgaagacgatttaaaacaaatgagagaaggtgtgcggattgctaaacaaatattatctcaaaaagtactaaaagaatatgttggcactgaaattaggcctgggaagaatgtatctaatcaaaatgagttagatgaagttattaaaaatacatctgaatctgcgtatcatccgtcatgcacaaataaaatgggtgaggacaaaacttcagttgtagaccaaaacttaagagttcatggaattcaaaatttaagagttattgatgcttctgtaatgcctgatattgttagtgctaatttaaatgcaacaaccattatgattgctgaaaaagcttacgaccaactaaatagcatcgctggttaga

SEQ ID NO: 209739 - DNA, 922 bp, Unknown
  Bacterial polypeptide expressing nucleotide sequence isolated from the Sargasso Sea
aatgaattttgactacataattgttggagctggtacagcaggatgtgttcttgcaaatagattaagtgaaaatgggaaatttaatgttgccttgtttgaagcaggtggatcgagtgatatttggaaagttaatatgcctttggcaattctatatgcaatgcacgatcccaaatataattataaatattattcagaaccagaacctaatttaaataacagaagattattttgtcctagaggtaaaatggtaggtggatgttccgctcataatgggatggtttatgttcgaggaaacaaaaacgactatgagagatgggcatcatttggtttaaaatcatggtcttatgaaaatgtcttaccattttttaaaaaaattgagacatggtctgaaggagagaatgaatttagaggtggaaaaggaattttaccagtaaatcaatccaaaaaccaaaatccattgtttagcgcttttattaacgcttctgttgaagcggggtataaaaaaaataatgacatgaacggagaagatcaagaaggatttggaatgtatgatattacaattcataaaggtcaaagggctagcgcttctaaatattatctagagcccgcaaaaaaaagaaaaaatttaaaagtttttaccaattcttttgctgaaaggattatttttgaaggaaaaaaagcagttggaatagaggtaaatattaaaaataaagttacaaaggtttatgctaacaaagaaattgttttgagtggcggttcaatcaattcaccacaactattaatgttatcaggtgtaggacctgaaaaagatttaaaaaataaaggaattaatgttgtacactctttagagggagtgggtcaaaatttacaagatcatttagaaacctacattcagcaagaatgtaagactaaagatacactt

SEQ ID NO: 209740 - DNA, 835 bp, Unknown
  Bacterial polypeptide expressing nucleotide sequence isolated from the Sargasso Sea
gatgaaatgatgaataaccggtcaattaattatcccagaggaaaaactttaggaggaagttcttcaataaatggtttgctttatattagaggacaagaacaagattacaatatgtggagacagcttggcaatgtaggttggggttggaaagatgttcttccttattttttaaaatctgaaaaccaagaaagaggaaaaaatgagtttcatggagttggcggtccaatcactgtggaggatcaaagaattcaattagacatattagatgtttttatgaatgcagccgaagaggtgggaataccaaaagttgatgatttcaataaaggagataattttggatgcggttattttcaagtaacagaaaaaaaaggacttagatgtagtgcggccgttggatatttaagaccaattaaaagtcgaagaaacttaaaaattataacgcgagcacatgtaaaaaatattgattttgataaaaaaacagctgttggaatttcatattggagaaataatcaattaataaaagcaaaagcaaaaaaagaagttatattatcagctggatctataggatcacctcatattttgcaggtttctggtattggtgatccttctaaaattaaaaatcatggaattgaaattttacataattctcctggagtaggtaaaaatcttcaagatcacataatgatgagaccagtttataaagtaaaaaatataaaaacactaaataaaaaagttaatagtttttttggtaaaatgttaattggactggaatatattctatttagaaaaggtcctatgacaatgggcgctagccaactatgtggattgcaaaaag

SEQ ID NO: 209741 - DNA, 757 bp, Unknown
  Bacterial polypeptide expressing nucleotide sequence isolated from the Sargasso Sea
aatggctgagggatatgattatataattgttggtgctggctcggctggttgtgtgttggctaaccgcttgagtgaagatgcaaattccagggttttactgctcgaggctggtggccgcgatttagacccccttattcatataccaattgggatgggaaagatttacgaacaccgtcttcatgattggaagtacgtgtcagaggttgaacccaatttaaataacagggtcctgcaagttaagcgcggaaaggtgttgggaggctcttcttcaattaacgtaatggcatatacgaggggccacccgggtgactttgatcgttgggctcaaaagggcgcgctaggttggactcatgcagattgcttgccctatttcaagcgatgtgagggttgggaagagggaggcactgaaagccgaggcggcgatgggcctttgggtactagctgggcaacaacgaaagacccactttttccggcttggattgaagcagcgaaagctgccggactaccggtaacggaggattataacggtccccagcaggagggattcggacgtagccagtatacaataaagaatggcaggcgttgttctacagcagttgcttttctaaagcccgtaatgcatcgctcaaatctaactgttgttactaaagctcttaccagtcggattatcatgcagggtaccaaagccgttggcattgaatatataaagggtggtcaaactattcgcgcagatgtggatcaagaagtgatactctcc

SEQ ID NO: 209742 - DNA, 820 bp, Unknown
  Bacterial polypeptide expressing nucleotide sequence isolated from the Sargasso Sea
gacaaagaacatttaaaaaaatttgataaagaaataataattgataattctaatgttggaagaaatcttcaggatcatcttgggttagattatttatttaaaactcatcatcattcactaaataaatctttaggaacttggccaggtagaattacttctgtattaaagtatatttataataggaaaggaccattatcactaagtattaatcagtctggaggatatgtaaattggaattcaaaacatcattatcccaacttacagatatattttaatccattgacctattctatcactcataaaaataaaagacctcttctaaaaactgacaaatttaatggttttattattggttataattcttgtagaccaaaaagtttgggtagagttgaattgaagactcctaattttgctgatgctccgctgattgatccaaattttctatcgcatgaagaagatatatatgatgttaaatgcgcaattaatttttctcaagttttggcgaatacaaatagtataaaaaaaataagaaatgaaagtgttacgcatgatcttttaaatgctactgaagaagaaatgattgatcactttaaatctaatgcagtttctatttatcacccttgtggtacttgtaaaatggatgaagatcctaaaaagggagttgtttctgaaagattaaaagttcatggaatggagaatctttggattgctgatgcatctgtttttccaaatattacttctggcaatataaatgcccctgtaatgatgcttgctaatcttggaagtaaatttattattgaggatttaaataagatttaat

SEQ ID NO: 209743 - DNA, 232 bp, Unknown
  Bacterial polypeptide expressing nucleotide sequence isolated from the Sargasso Sea
tacagcttatcatccatcctgcactaataaaatgggtgttgatcaaatgtctgttgtggatgaagaggctagagtttatggtgttgaaaatctaagagtaatcgactcatctatcatgccagatattttaagtgggaatttaaatgcaggtactattatgatagccgaaaaagttgcagatatgattttaggtaaagaagaaaaaccaattgatgctccctttttctactaa

SEQ ID NO: 209744 - DNA, 274 bp, Unknown
  Bacterial polypeptide expressing nucleotide sequence isolated from the Sargasso Sea
acctcaggaatacagaccaggtactcatattacagatgatgaagaattagttaaagctggcagtgaacatacacaaacaatttttcatcctgttggaacatgtaaaatgggcagtggtgaagacagcgtggtagaccaaagattaaaagttcatggaatagaaagtttaagagtcgtagatgcttctataatgcctaatattacttcaggaaatactaatgcgcctaccattatgattgcggagaaggcatctgacatgatactaaacaaataa

SEQ ID NO: 209745 - DNA, 306 bp, Unknown
  Bacterial polypeptide expressing nucleotide sequence isolated from the Sargasso Sea
ccttacagtcttatagcagtagtgaaacagctcccggtgttcatatccaaacctctgaagagcttgaaagttttgcaagggaacagggcagtatcatttatcatcctgttagtacttgtaaaatgggtgaagatacgatggctgttgtggattccagactgtgtgttcacggaataaaagggttgcgagtggtggatgcctcaattatgccgacagttacaactggaaatacaaatgcaccaacaataatgattgctgaaaaagcatcagatattatcaaagaagatgcacgatcagctttatgat

SEQ ID NO: 209746 - DNA, 619 bp, Unknown
  Bacterial polypeptide expressing nucleotide sequence isolated from the Sargasso Sea
aatgaaatatgatcatataatcataggtgccggttcagcagggtgtgtgttggcgacaagactgacggaagatcctgagatttcagtgctgttgctcgaagcagggccagactatttagacattgattcagctccagacgacgtaaagtttggtaacaatatgtggaaatcagcttatggtcaacatagttggggttacccagcattccctacgaagcacaggagtactcctatgataatccctagagggaaagttgtgggtggttcaagttctataaacggacaggtgatatgcagaggcatccctgaagattatgataattgggcaaaatggggaaattcagaatggtcttttgaaaaagttcttccgtattttagaaaactagagaatgatctggatttcggctctagtgatattcacggttctgatggtcctattcctgttagacgctacaaaagaaaggaattgctgccgtcttttgaacaattctacgaatcatgtataaatcttggatatccagaggatcctgatcaaaatagcccagagtcgtttgggattggaatgagggcattgaataatatagacggagttagaatgagcacgtcgtcacctatctca

SEQ ID NO: 209747 - DNA, 845 bp, Unknown
  Bacterial polypeptide expressing nucleotide sequence isolated from the Sargasso Sea
ttggtcagagggagaaaatcaatttagaggctctttaggtcctcttccaataaatttatcaaaaaactcaaatcctttatttaaagcatttattgaagcagctgctgaagcgggtcacaaaacaaatatagatatgaatggaaaagaacaagaaggatttggtatgtttgatactacaatgcatcaaggtgaaagagcaggtgttgctaaatattatttaaatcctgtaaaaaatagaaaaaacttaagtattttaaaaaattcatttgtagaaaagatattatttgaaggaaaaaaagctgtgggtcttgaagtaaagattaaaaataaagttgaaaagatttatgcaaataaagaagtaattttaagcggaggatctataaattcccctcaattattaatgttatctggggttggtgatgaagcacatcttaaagataatggtattaaagtagtccataattcaaaaggtgtaggaaaaaatttacaagatcatcttgaaacttacatacagcaaaaatgtaaaacgccaaatactctttatacttatacaaaattactacctaaaattttagctggtatgcaatggtttatgttcaaatctggaccatgttcaaaatcatttttagaagctggaggttttgctaaatcctcgcctgaaagaaaagttgctaatattcaatttcatttttttccatcttttgtaataaatcatggacttgaggagccagactcacatggctaccaattgcatgcaagcccaaatcatccaaaaagtagaggagagataactcttaattcatctaatccatatgactatcctaaaattttatttaattattaaa

SEQ ID NO: 209748 - DNA, 878 bp, Unknown
  Bacterial polypeptide expressing nucleotide sequence isolated from the Sargasso Sea
cgatagttgggcgcaattaggaaattcgggttgggggtattcggacgtattaccttattttaaacgctgtgaagaaaagataggtgagggtgatgagctttatagaggtaagagtggaaatctaaaaatcactgaccttgaatggcgccatcccctttgtgacgcctttattaaaggggccaattctatcggaattccaacaaatactgattacaatggcgctaatcaggagggcgtttcctatgtacaacgtaccacatacaataggcgtcgtgtcagctcagccagagcgtttttgaatccagctaaatcaagaaaaaatctgacagtatacaccaacgcccatgttactcgaattttatttgaggcacgacgagctattggtgttgagttaaaacgaggagatagtggtggtcaaactcaacgtatcattgcgaagagagaggtcattttatcaggaggagcaataaattcgcctcaagtactgcaattgtcggggattggacccgcaaatttacttaacgatcttgaaattccgttggtacatgatttgcccggagtgggagaaaatttaagagatcactatgcgccgcgctttacagcgcgagtgaaaaacatcgatactattaatgagaaggcgcggggccctagactatggtgggaggttgctaaatacttgcttggcggtaacagtattgtgaacttgagccccactcttgtctattgtttttggcactcggatgagaatgttaggaataaagacttacagcttacttttacgccagctagttataaggaaggtgttcaatcggagcttgatgaccaacctggattcaccatagcgtcgtggcaacaacgacctgacagcagggggtacg

SEQ ID NO: 209749 - DNA, 505 bp, Unknown
  Bacterial polypeptide expressing nucleotide sequence isolated from the Sargasso Sea
atgaacaaaacatacgatttcatcattgttggaggtggttcggcaggctgtgttttggcaaaccggctcagcgagaatcctgaaaaccaagtattactgctggaagcgggaagaccggattcgatctgggatattttcatccatatgcccgccggactgtcaattcctattggtaaccggttctacgactggatttatgaaaccgaaccggaaccgtacatgaacggtcggagaatctaccagggccgggggaaggttcttggaggttccagcagtatcaacggcatgatcttccaacgaggaaatccacaagattacgaacgctgggcggccgatccaggaatggaggaatgggactactcccattgcctgccatatttcaaaaagatggaaaactgtctggcgggaggagacgatttccgaggggctcagggaccactcaaagtggaaagagaacctgcttcaactccgttgtttcaggcttttttaaggcagtcaacaggca

SEQ ID NO: 209750 - DNA, 559 bp, Unknown
  Bacterial polypeptide expressing nucleotide sequence isolated from the Sargasso Sea
tctcctgaacgtgaaatagcaaatattcaatttcatttttttccatcatttgttattaatcatggtttgataaatccaagttctcatggctaccaattacatgctagtcctaatcatcctaaaagcagaggattaattacactcaattcttctgatccttatgattatccaaaaatattatttaattatttagaacacgaagatgatttaaaacaaacaagagaatgtatccatgttgcaaggaaaattttatcacaaccttctttggtaaaacattcaggcaatgaagttggtcctggatctaataaacaaactgatgaagaattagatgaatacattagatctaaagcagagacagcttatcatccatgtggaacttgtaaaatgggtacagatgaaatgtcagtggtagatgaaactttaaaagttaaaggaatagaaaatttaagagttgttgatgcttcagtaatgccagaaattccaagtgcaaatctaaatgcacctacattgatgatagcagaaaaagcttcagattttattttaaactctcaacgttaac

SEQ ID NO: 209751 - DNA, 425 bp, Unknown
  Bacterial polypeptide expressing nucleotide sequence isolated from the Sargasso Sea
aatgtatgattttataattgttggcgcaggctcagccggttgtgttttagcaaatagactgtcagaaaacccatctaacagagttctgctactagaagcaggtggcaaagacctaaacccaatgattcaccttcctattatgtgtggagctctttttcctcttccattaaataattggcactataatagtgagcctgattcaaatcttgacaatagaaagatatttatacccagaggtaaaactcttggtggttcatcatcaatcaatggaatggtatatattcgaggccataaaagagattatgatatttggcgacaactaggatgtgaaggttggtcatatgatgatgttttaccatacttcaagaaacttgagaatcacattgaaagagatgataaattccatggtaaaaaaggcccgttga

SEQ ID NO: 209752 - DNA, 987 bp, Unknown
  Bacterial polypeptide expressing nucleotide sequence isolated from the Sargasso Sea
tatgaattttgattatataataatcggtggtggatctgccggttgcgtattagccaacagactaagtgaaaattcaagaaataatgttttacttatagaagctggcaaagatagcgatatttggaaagttaatatgccattggcaatactttatgctatgcatgatcctaagtataattataaatattactctgagcctgaaccaaatttgaataacagaaaaattttttgcccacgtggaaaaatgattggtggttgctctgcacataatggaatggtttatgttagaggaaatcctaacgattattcaagatgggctaaaatgggacttgatgagtggtcgtatgaaaaagttttaccttatttcaagaaaatagaaacatggtctgaaggtggaaatgaatatagaggtggtaatggtattttgccagttaaccagtcaaaaaactcaaatcctcttttcaaagcatttataaattctgctggagaagctgggtacaaaataaattcagatatgaacggtaaagatcaagagggttttggaatgtatgacgtaactatacataaaggtgagagagcaagtgtttctaaatattatttaaaaccagctaaatctagaaaaaatttaaaaattctgactgaaaaatacgtaaaaagaataatattcgatggtaaaaaagcaattggtgtagagattttgggcaaaaacaaaaaagttgaaaaaatttactcaaataaagaaatcattttaagcgcgggtgcaattaactctccacaaatactgatgttatctggaataggtccaggagatcatttaagagaaaatggtatagatgttatccatagcttagaaggtgttggttctaatcttcaagatcaccttgaagtttatattcaacaagaatgtaaaaaacctttaacactttactcttatgtgaataaaattaatatggtcaaagtcgggaatcaatgggtcttatctaaaaa

SEQ ID NO: 209753 - DNA, 628 bp, Unknown
  Bacterial polypeptide expressing nucleotide sequence isolated from the Sargasso Sea
atggatgaattcgattttgtaattattggagcaggctcagcaggatgcgtacttgcaaacagattaagtgcagatccgaataacaaagttcttttgttagaggcaggaggcaaagatacttatccatggatccatatcccagtaggatattttaaaacaatgcataacccaaaagtcgattggtgttttcataccgaaaaagatgaaacaatgaataatagatcaataagatatcctagaggaaaaactttaggtggaagttcttccatcaatggtcttctatggataagaggtcaaagtaatgattatgataattggagacaacaaggaaatgctggttggggttgggatgatgtttttccctattttttaaaatcagaaaataatgaacttggtcctaatgaatttcacaatgataaaggccctattactgtttcaaataaaaaaattaatttagatatgcttgaagagtttcaaaatgctgctgaagaaaccggaataccacgaacagaagatttcaatacaggtgataattttggtattggttattttcaatttactacaagtcgtaataaattattaaaattacgatgtagtgctgccaaaggaatatttaaatcccgctaaa

SEQ ID NO: 209754 - DNA, 470 bp, Unknown
  Bacterial polypeptide expressing nucleotide sequence isolated from the Sargasso Sea
tggtattacaccgactgtagcaaatattagacctacgagtagaggtgaaataaatatagttagtaacaatattaaagattatcctaaaataaaaatgaattatctttcaactgatgatgatagatatgttgcggctcaaggacttaaactggttagaaaaataatgttagaaactgaaacatttaagaaatatgaacctgaagagtatagaccaggattacatattaaagataacgaagaattagttaaagtaggaagtgatcatacacaaaccatatttcatcctgttggaacatgtaaaatgggaaatgatgaaaattctgttgtggatgaaaaattaaaagttcatggaatagaaaatcttagagttatagatgcttcaataatgcctaatatcacatcaggcaatactaatgcacctactataatgattgcagaaaaaggtgctgatatgatattaggaaaataat

SEQ ID NO: 209755 - DNA, 403 bp, Unknown
  Bacterial polypeptide expressing nucleotide sequence isolated from the Sargasso Sea
agataatccaaaaattaaaatgaactatctttcaactcaagacgatagagatgttgccgctaaagctttaaaaatagtgagaaaaattatgttaaatacaaatacattcaaaaaatatgaacctgaagaatatagaccaggtataaatattataaatgacgaagagttagttaaggctgctagtgaacactcacaaacaatctttcatcctgttggtacttgtaaaatgggtataggagatgaagctgtagttaatgcaaacctatctgttcacggattaaaaaatttaaaagttgttgatgcatcaattatgcctaatataacctcaggtaatactaatgcaccaactattatgattgcagaaaaagcatctgatatgataattgaagaaagcaaagcatga

SEQ ID NO: 209756 - DNA, 574 bp, Unknown
  Bacterial polypeptide expressing nucleotide sequence isolated from the Sargasso Sea
tatgtttgctaaaagtgatccatctttagaattacctgatctacaatggcacgttcaaccaatgagtatggacactttaggagcaactaaaaatcacgattttcatgctttcacaccaactgtttcaaatattaggcctacaagtagaggtcatgtgaatatcgtagataaagattccagaacatatgcaaaaataaaaatgaattatctctcaaccgatcatgaccgaatgattgcagctagaggattaaaacttacaagaaaaattgtaatggaatctgaaacatttaaaaaatataaacctgaggaatatagaccaggtattgacattaatgatgatgaggaacttgtaaaagcaggttcagattttgcacaaacaatttttcatccagttggcacatgtaaaatgggtcaagatgatatggctgtagttgatgaaaaactaaaagtaaaaggaattgaaaatttaagagtaattgatgcttctataatgccaaacattacatcaggtaatactaatgcacctacaataatgattgcagaaaaaggtgcagatatgatacttacccattga

SEQ ID NO: 209757 - DNA, 854 bp, Unknown
  Bacterial polypeptide expressing nucleotide sequence isolated from the Sargasso Sea
atttaaaaccatgcacaatccctctgttgattggtgttataaaaccgagcctgatgcttcaatgaacaataggtcaattcgttatccaagaggtaaaacattaggtggtagctcttcgatcaacggactactttatataagaggacaaagcagagattatgatatttggcgacaattaggaaatactggttggggttgggatgatgttctgccatattttataaaagcagaaaaccaagagagaggaaaagataaatttcatggtattggtgggcctctatcagtttctgatcaaagaattcaattaccgttattgaatgaatttcaaaatgctgctgaagagtttggtatccccaagacaaaagattttaatacaggcgataatcatggatgtggttattttcaagttactgaaaaagatggctttagatgcagtactgcagttggatatttaaacccaataaaaaaaagacaaaatttaaaaacgataactaatgcccatgtaaaaaaaattaattttaaaagcaaaactgcgataggaattgaatactggcaaggtgatgatcttaaaaaactaacttgtaataaagaaataattttatcgtctggttcaataggttcacctcagatattgcaaacttctggaataggaaattctcaaaaattaaaagatttaggtatagatgtagtgcaagaattaaaaggtgtaggtgaaaatttacaggatcacttgatgtttagacctatatataaaattcaaggacttaaatctcttaataaaaaggtaaatagtttatttggaaaattaatgattggtctggaatatgtttttaatcgaagtggaccccaatgac

SEQ ID NO: 209758 - DNA, 635 bp, Unknown
  Bacterial polypeptide expressing nucleotide sequence isolated from the Sargasso Sea
aatcctgcaaaaaaaagaaagaatttaaatattttttccaattcttttgtcgaaaaaattatttttgaaggaaaaaaagcaataggcattgaagtaaaaataaaaaataaagttgaaaaagtttatgctgaaaaagaagtaatattaagtggtggctcaattaattctccacaattattaatgctttcaggagttggcaattcagatcatttgaaagaaaaaggaattgatgtagttagtgatataaaaggagttggtaaaaatcttcaagatcatttggaaacatatattatgcaagaatgcaaaacacctgacactctttatacttatacaaaactaattccgaaagttttagctggtattcagtggtttttatctaaatcaggaccttgttctaaatcttttttagaagctggtgggtttgcaaaatcttctccagaaagagaaatagcaaatatacaatttcatttttttccatcatttgttattgatcatggtctagttaatcctagctcacatggatatcaacttcatgcaagtccaaatcatccaaaaagcagaggacaaataactctgaattcttctaatccttatgattatccaaaaatattatttaattatttagaagatgaaga

SEQ ID NO: 209759 - DNA, 862 bp, Unknown
  Bacterial polypeptide expressing nucleotide sequence isolated from the Sargasso Sea
cgaataccaatcgggtacgcaaagcttatcgacaatccggtggcaaattggtgctactcatcggagccggacgagggcacgggcaatcgtcgaataccggtgccgcgaggcaagctacttggcggatctagctcgattaatggcatggtcttcgtgcgcgggcaggcccaggactatgatcattgggcgcaactcggcaaccgtggttggagctacaacgatgtcctgccgatcttcaagaatatggagagttatgatggtggcgatgatgcgtatcgcgggcgcgacggcctcctgcgtgtaacagatacagatcagaagggaccgctctatgatgctctgattgcgggcgccgaatctattgggttgccatacaacccggattacaacggggctcagcaagaaggtatagcgatgacgcagacgacaatctccggtggtcgccggatgagcactgcccgggcttatctggagcccgcccgcaaccggactaacctgcagatcgaaacaggcgcaatgaccgaatgtttgttgcttgaagggaagcgttgtgttggcgtgcgctactctgtggggggatcggttcgcgaggcgcgtgctgggcgcgaagtaatgctgagtgctgggtcgatcaactcgccacagctcttggagctctccggtattggaaatccggaaattttgaaggcatgtggggttgatgttctgcacgaactgccgggtgtgggtgagaatcttcgtgaccattattcgccgcgcatgagataccgcattgcgaaaccggattggacatatgctgtgcacggtcgtggagtgcggttggttgggcaggttctcaaatacatcaccaagggcgaaggat

SEQ ID NO: 209760 - DNA, 724 bp, Unknown
  Bacterial polypeptide expressing nucleotide sequence isolated from the Sargasso Sea
tatgaataattatgattttataattcttggagctgggtcagctggctgtgtacttgcaaatagattatctgaaaatcctagtcataaagtccttcttttggaggctggtggcaaagataattatccatggatacatatacctgtaggttatttcaaaactatgcataacccaaaaacagattggtgttacaaaactgagcctgatgaaagtatgaacaatatctctattaggtaccctaggggcaaaactttaggaggtagttcatcaataaatggattgttatatataaggggccaaaatagagattatgatgtctggcgtcagttaggaaatactggttggggatgggatgatgtgttgccgtattttataaaagctgaagatcaagaaagaggtaaaaatgaattccatggtgttaatggaccactagcagtttctgatcaaagaattcatctcccacttttagatgagtttcaaaatgcagcagaggagtttggaatacctaaaactaaagattttaacactggcgacaatcatggatgtggatactttcaagttacagagaaagatggctttagatgtagtacatctgtaggttatttaaatccaattaaaagtagaaaaaatttagaaattattactcacgcacacgtcaaaaaaataatctttgaaaataaaatagctaaaaaagttgaattttggcaaggagatgaattaaaaaaa

SEQ ID NO: 209761 - DNA, 778 bp, Unknown
  Bacterial polypeptide expressing nucleotide sequence isolated from the Sargasso Sea
tttaaaagacaaagggattgaggttataaatgatttaaaaggtgtaggtcaaaatttacacgatcatcttgaaacttatattcaacaagaatgtaaaaccccaaatactttatatacatatactaaattaattcctaaagtattagctggtatacaatggtttttatttagatcaggtccatgctcaaaatcttttttagaagcaggtggatttgcaaaatcttcaccggatagaaaagttgcaaacattcaatttcatttctttccatcttttgtcataaatcatggacttgaagatccaaatactcatggttatcaacttcatgcaagtccaaatcatccaattagcagaggtcacattactcttgattcctcaaatccatatgattatccaaaaattttgtttaactatttgaaagaggaagaggacttaaaacagacaagagaatgcatacatgtagcgagaaaaattttatctcaaccagcgctttcagaacatgctggaaaagaaattggtccaggttcagaggcgcaatcaaacgaacaattagatgaatatattaaatcaaaagctgatactgcctaccacccatgtggaacatgtaaaatgggtgtagatgaaatggcagtagtagacgaaagtttgagggttaaaggaataaaaaatcttagagtagtagatgcctctattatcccagaaattcctagtgcaaacttaaatgcacctgttttgatgattgcagaaaaagcgtcggacatgattttgaaccagatttaa

SEQ ID NO: 209762 - DNA, 943 bp, Unknown
  Bacterial polypeptide expressing nucleotide sequence isolated from the Sargasso Sea
catgaataatagatcaataagatatccaagaggaaaaactttaggtggaagttcttcaattaatggacttttatggattagaggtcaaaaagaagattacgatatatggaggcagttaggtaacactggttggggttggaatgatgttttgccttattttttgaagtcggaaaataatgaattaggtaaaaatgaatttcataatgacagtggaccaatcagcgttgcaaataaaaaaataaatttgaagttactagatgaatttcaaaatgctgctgaagagtatggaattcctaaaacaattgattttaatacaggggataattttggaattggattttttcagttcactacaagttttaataaagttggattaaagttaagatgtagtgctgctaaaggctatttaaatccagtaaaaaaaagatctaatttaaaaattatagtaaatgctcatgtacaaaaaataaattttgaaggaaaaaaaactacaggagtaagttattatactggagataaattaaatacagtaaatgcaaaaaaagaagtaatcttatctgctggctcaattggttctccacatattttgcaagtttctggaattggagaaagtcataaacttaaaaattttggaatagaagttatacaagaattgaatggtgttggtaaaaatttacaggatcatttaatgtttcgacctgtttacaaagtgaaaaatttaaaatctctgaatcgaaaagttgaaagtttatttggtagacttttaatgggccttgaatatattcttaatcaaagtggtcctgttactatgggggctagccaggtatgtggttttgtaaaaagcgatgcctctcgagctactcctaatttacaatttcatgtttcgcctgttagtacagatatattaggtgttacacccatgcatgattttgaaggaaattac

SEQ ID NO: 209763 - DNA, 409 bp, Unknown
  Bacterial polypeptide expressing nucleotide sequence isolated from the Sargasso Sea
attaaagattatccaaaaattaaaatgaattatctttcaactgatgatgatcgctatgtagctgctcaaggtctaaagctagtaagaaaaataatgctagaaactgaaacttttaaaaaatatgagccagaggaatataggcctgggattcatattacaaatgatgaagaattggttaaagccggaagtgaatatactcaaactatattccatcctgtaggtacatgtaaaatgggacaagatgagaattcagttgttaatgaaagattaaatcttcatggtatagaaaatttaagagtagttgatgcttctataatgccaaatatcacgtcgggaaatactaatgcacccactataatgattgcggaaaaagcgtcagacatgatattaaaagatagtaaatcatgaa

SEQ ID NO: 209764 - DNA, 250 bp, Unknown
  Bacterial polypeptide expressing nucleotide sequence isolated from the Sargasso Sea
tctaatcaaaatgagttagatgaagttattaaatttacatctgagtctgcgtatcatccgtcatgcacaaataaaatgggtgaggacaaaacttcagtcgtagatcaaaacttaagggttcatggaattcaaaatttaagagttgttgatgcttctgtaatgccagatattgttagtgctaatttaaatgcaacaactattatgattgctgaaaaagcttacgaccaaataaatagtaccgttagttaaa

SEQ ID NO: 209765 - DNA, 784 bp, Unknown
  Bacterial polypeptide expressing nucleotide sequence isolated from the Sargasso Sea
ataggagatcccttaaaaattaaaaatcatggtatagaaattataaataattctccaggagtaggaaaaaatcttcaagaccacataatgatgagaccagtttataaagtaaaaaatataaaaacactaaacaaaaaagttaatagtttttttggaagaatgctaattggcatggaatatattttttttagaagaggtcctatgactatgggagcaagtcagctttgtggatttgctaaaagtgatacttctagagatactccaaatttgcaatttcacatccagccaataagcacggataaattaggtggtgctgatttacataattttgatgcatttactcctaccgtagctaatattagaccaacaagtagaggagaagtttatatagctagtgcagatactagagataatccaaaaattaaaatgaattacttatcaacccccgaagatagaaaagtcactgcagatggattaaaattgataagaaaaatagttcttggtacaaaggcttttgcaaaatacaaacctgaagaatttagacctggcataaatattcaagatgatgaagaattagttaaagcggcaagcgactatgctcaaacaatttttcatcctgtgggaacatgcaaaatgggaaatgatgaaaattcagtggttaatgatagattggtagctcatggtcttagaaacttaagaatagtagatgcatctattatgccaaatattacttcaggaaatactaatgcaccaactataatgattgcagaaaaagctgccgaca

SEQ ID NO: 209766 - DNA, 328 bp, Unknown
  Bacterial polypeptide expressing nucleotide sequence isolated from the Sargasso Sea
acatgtagcaagaaaaattttatctcaaccatctttagcaaaacattctgggaatgaagttggtccagggtcagaaaaacaaactgacgaagaattaaatgagtatatcagatctaatgcagaaacagcttaccatccatgtggtacttgtaaaatgggtatagatgaaatggctgttgttgatgaaaatttaaaagttaaaggaatacaaaatttaagagtagtagatgcttccgtgatgcctgaaattcctagcgcaaatttaaatgctccaactttaatgattgctgaaaaagcctcagaccttattttagaccaatctatttaa

SEQ ID NO: 209767 - DNA, 898 bp, Unknown
  Bacterial polypeptide expressing nucleotide sequence isolated from the Sargasso Sea
cacaatcccaaaactgattggtgcttcaaaacagaacctgatgaatcaatcaatggaagatcaataaattaccctcgaggtaaaactttggggggtagctcttctattaatggactattatatatcaggggtcaatcgcgtgattatgatatttggcgacaacaagggaatactggatggggatgggatgatgtccttccttactttctaaaatcagaaaatcaagaaagaggagcaaatgaatttcatggagtcggaggtcctttatctgtttcagatattagaattaagcttgatattttagataagtttcaaaatgctgcagcagaaataggaattccaaaaactaatgattttaatacaggggataattttggttgtgattattttcaagtaaccgaaaaaaatggtttgcggtgcagtacagcagttgcttaccttaaccctgcaaaaaaaagatcaaatttaaaagttgatgtgaaggctcatgttaagcaaataaattttgatggtaaaaaagctattggcatttcttattggaaaaatggagaattaattactgtaaatgccaataaagaagttattttatcagcgggatcaattgggtctcctcatattttacaaacatctggcattggtgatcagaaaaaattaaaagatttaggtgtacctctaattcatcacaacgcaagtattggtaaaaacttacaagatcacttaatgttaaggccagtctataaagtaagaaatatcaaaacattaaataaaacaataaatagtttttttggaaaaatgatgattggcatggaatttgttttttttagaagaggtggtaatgaatatgggtgcaagtcagttatgtgggtttgccaaaaagtgatgaaagtcgagaaactcc

SEQ ID NO: 209768 - DNA, 913 bp, Unknown
  Bacterial polypeptide expressing nucleotide sequence isolated from the Sargasso Sea
ccagacgaaacaatgaataatagatcaattaattacccaagaggaaaaacacttggtggcagttcttcaataaatggtttgctttatataagaggtcaaaaagaagattatcaaatgtggaggcaacttgggaatacaggttggagttgggacgatgttttaccatattttttaaaatctgaaaatcaagagcgaggaaaaagtgaatttcataacacaggtggtccactttcagtttctgatcaaagaattaatttaccattacttaatgaatttcaaaacgcagctgaggaatttggaatcccaaaatctaatgattttaacacgggtgataaccatggatgtggttactttcaagttaccgaaaaaaatggattgagatgtagtgctgcagttggatatttaaatcctgttaaaaaaagaagaaatctaaaagttattgtaaatgctcatgttaaaaaaattaactttgaaggaaaaaaagcgattggagtttcttattttatcaaaaatgaagtttttaattccaaagcaaaaaaagaagttatactttctgcaggcactattggttctcctcaattattacaagtttcaggtattggggacaatactaacttaaaaaagataggggtaaaaactattcaaaatttacctggtgttggaaaaaatttacaggaccatttaatgtttagaccagtatacaaagttaaaaatatcgagtccttaaacaaaaaaattaatagtttttttggaaagatgttaattggaatggagtacgtcttttttagaaaaggtccaatgactatgggagctagtcaattatgtggttttgctaaaagcgacccatctcgagagactccaaacttacagtttcatgttcagcctataagtacagatactttgggatcctcaa

SEQ ID NO: 209769 - DNA, 553 bp, Unknown
  Bacterial polypeptide expressing nucleotide sequence isolated from the Sargasso Sea
ttggaacaatttgactatatagtgataggtgccggctccgctggttgcgtcatagcaaatcgcctgggagaagacccaaaaaaaaagattcttgtacttgaggctgggggaagtgatagatcattaaccataagcatgcctgcagctttgtcggtaccgatgaattcgaaaaggttcaattggggcctaaaaacggaacctgaaccgggattaaataatagaatcatgaatcttcctcgtggaaagggtcttggaggttcatcgtcaattaatggaatgtgttatgttcgtgggaatccaatggattacgagctttggagcgcaaagggcgcgttgggctggcattgggcgaatgtattaccttattttaaaaagctggaaaaagtttcagaaaacagtgatctcagaggtaatgagggtccaataactgtaacaaaggggaattctagaaatatccttaatcttaaatttttggaagcaggagcgcaggctggttaccccctgagtgaaaatatgaacggcattcaacatgaaggcatgagcccccatggaa

SEQ ID NO: 209770 - DNA, 490 bp, Unknown
  Bacterial polypeptide expressing nucleotide sequence isolated from the Sargasso Sea
ctcagacctgagagtagaggctatattgcactaaaatcattggatccttcagtgccaccaattatacaaccaaattattttgcaactcaaaaagatcgagatactcttattaaaggtgtgaaaatgtctcgagaaattatgaatcagtctgcttttgatgaataccgaggtaaagaaataacaccaggtattcatgttcaaacagatgaggaaatagaggaatttattagaaatgccgctgaaacgatttatcatccagttggcacttgtaaaatgggaagtgatgaatttgcagttgtagatgataaattaaaagtaagaggtgtcgaaaatttaagagtagttgatgcgtctataatgccaactctaattggtggaaacaccaacgcacctacaattatgatagctgacaaaatttcagatcatattcttggcaatgaattccttccatctcagcatgttagttacaaagataaaaacgctgcataat

SEQ ID NO: 209771 - DNA, 412 bp, Unknown
  Bacterial polypeptide expressing nucleotide sequence isolated from the Sargasso Sea
atttaattatatgaaacatcccgatgattggattgaatttagaaattgtattaaaattactcggaaaattttaaatcaaccagcgtttaaagatttttatggagaagaaattcaacctggaaagcaaaaaatctctaatgatgatttagataattttatcaaagaggaggctgaaagtgcgtatcatccatgtggcacgataaaaatgggagataaaaatgacccatcatccgttgtggatccaaattgtaaagttattggaattgaaaatctaagagtagtagattcatcaatttttcctagaattactaatggaaatactaatgcacctagtataatggttggagaaaaagcatcagatattattttaggaaaaatgcctctccctagagaaaatctagaacccttctaa

SEQ ID NO: 209772 - DNA, 921 bp, Unknown
  Bacterial polypeptide expressing nucleotide sequence isolated from the Sargasso Sea
aatgaacaatagatccattcgctatcctagaggtaaaactttaggaggtagttcttctattaacggtcttctttggattagaggtcagagtaatgattatgataactggagacagcaaggaaatactggttggggttgggatgatgttcttccatactttttaaaatcagaaaataatgaattaggtaaagatgaatttcataatgataaaggaccaataactgttacaaataaaaaaattaatctaaaaatgttagaggaatttcaaaatgcagctgaggaattcggtattcctagaataaatgattttaatagaggtgataactttggagtaggttattttcaattcactactacacgtaaaaaattattaaaattacgttgtagtgctgctaaaggttatttgaatcctgtaaaaaaaagatctaatttgaaaataatagttaatgctcatgtccaaaagataaattttgagggaaaaaaagctactagtgtaagtttttatagaaatgacaaattaacaactataaaagcaaataaagaaatattgctctctgcaggatctattggatctcctcatattctacaagtatctggtttaggagatgcgcaaaaattaaaaaattatgggatatctattgttcaagaactaaaaggtgtaggaaaaaacttacaagatcatttaatgtttagacctgtttataaagtaaaaaacttaaaatctttaaacggtaaaattaatagtttattcggaaatctactaatagggttagagtatatacttaatcaaagtggaccgatgacaatgggagctagccaggtttgtggatttctcaaaagtgatccatcaagagctactcctaatttacaatttcatgttcaaccaattagtactgatatcttgggagctactaaaatgca

SEQ ID NO: 209773 - DNA, 637 bp, Unknown
  Bacterial polypeptide expressing nucleotide sequence isolated from the Sargasso Sea
atgggcttagaatatttactatttcaaagtggacctgtcacaatgggagctagtcaggtttgtggttttgcaaaaagcgatccttctagagaaacacctaatcttcaatttcatgtatcaccggtaagcacagatattttaggtgtaactccaatgcatgattttgaaggtattacccctacagttgcaaatattagacccacaagtagaggtgaaataaatattgtgagtagtgatagtagagagtatccaaaaatcaaaatgaactatttatctactcaagatgacaggtatgttgctgcccaaggattaaaattagtaagaaaaattatgatggaaaccaaaacttttaaaccttaccaaccagaagaatatagacctggtttaaatattactgatgatgaagaactagtaaaagctgcaagcgactatgctcaaacaatatttcatcccgttggaacttgtaaaatgggaaatgatgatgaagctgtggtaagtgataaactttctgtgcatggtttgcaaaatttaagagttgtagatgcatccattatgccaaatataacttcgggcaatactaatgcacctacgattatgattgcagaaaaagcatctgacatgatattaaaaaaataat

SEQ ID NO: 209774 - DNA, 766 bp, Unknown
  Bacterial polypeptide expressing nucleotide sequence isolated from the Sargasso Sea
aaatagattgtcttctattaaaaataataaagtccttttattagaagcaggaggtaaagatacttatccatggatacacattccagtaggatattttaaaactatgcataatcctaaagttgattggtgttttacgacagaaaaagatgaaacaatgaacaatagatctataagatatcctagaggaaaaactttaggtggtagttcatcaattaacgggcttctgtggattagaggtcagagtaatgattacgataactggagacaacaaggtaactcgggatggggatgggataatgttcttccatatttcttaaaatctgaaaataatgaaattggtaaaaatgaatttcacagtgatgaaggtccaattcaagtatcaaataaaaaaattaatttaaaaatgttagaagagtttcaaaatgctgctgaagaaataggcatacctagaactaatgattttaatacgggtgataattttggtattggttattttcaatttactactagtcgtcaaaagttattaaaattaaggtgtagtgctgccaaaggttatctaaatccagtcaaaaataggtctaatttaaaaataattgttaatgctcatgtgcaaaaaataaattttgaaggtaaaaaagcaattggtgttaattattttactaaagataaattaagtacagtaaatgctaataaagaagtaattttatcagctggttcaattggatcaccacatattttacaagtatcgggaattggtgatagtgaa

SEQ ID NO: 209775 - DNA, 877 bp, Unknown
  Bacterial polypeptide expressing nucleotide sequence isolated from the Sargasso Sea
atgggaaaatttggtttaagtaattggtcttacgataaagtactaccgtattttaaaaaaatagagacttggtctggtggagaaaatcaatttagaggctctttaggtcctcttccagttaatctatctgaaaattcaaatccattatttaaagcatttattgatgcagcagctgaagcaggccacagaacaaatatagatatgaatggtgaagagcaagaaggatttggtatgtttgatactactatgcacgaaggcgaaagagctggtgttgcaaaatattatttaaatcctgttaaaaatagaaaaaatttaaatattttaaaaaattcatttgttgagaaaatattatttgaagggaaaaaggcagtcggccttcaagtaaaaattaaaaataaagtacaaaaaatctatgcaaataaagaggtaatattgagtggaggatctataaattctcctcaattgttaatgttatcaggtattggtgatgaagctcatttaagagataacggcattgaagttgtacataactcaaaaggtgttggaaaaaatttacaagaccatcttgaaacttacattcaacaaaaatgtaagacacccaacactctttatacatacacaaaattaatacctaaagttttagcaggtatacaatggtttatgtttaaatcaggaccttgttcaaaatcatttttggaggctggtggttttgcaaaatcttcaccagagagaaaagttcctaacattcaatttcatttctttccatcttttgtaataaatcatggattagaggatccagactcgcacggttatcaattgcacacgagtccaaatcatccaaaaagcagaggtgagataactctaaattcatcagatc

SEQ ID NO: 209776 - DNA, 586 bp, Unknown
  Bacterial polypeptide expressing nucleotide sequence isolated from the Sargasso Sea
tatgaataattacgattttataatacttggagctggatcagctggttgtgtgctagcaaacagattgtcagaaaatccagcacataaagtccttcttttggaggctggtggtaaagataattatccctggatacatatacctgtgggttattttaaaacaatgcataacccgaaaacagattggtgttacaaaactgagcctgatgaaagtatgaacaatatttctattaggtatcctaggggtaaaactttaggaggaagttcatcaataaatggattattatatataagaggtcaaaatagagattatgatgtttggcgtcagttaggaaatactggttggggatgggatgatgtgttgccttattttataaaagctgaggatcaagaaagaggtaaaaatgaatttcatggagttaatggacctttagcagtttctgatcaaagaattcatctcccacttttagatgaatttcaaaatgcagctgaagagtttggaatacctaaaactaaagattttaacactggcaacaatcttggatgtggatattttcaagttacagagaaagatggttttagatgtagt

SEQ ID NO: 209777 - DNA, 823 bp, Unknown
  Bacterial polypeptide expressing nucleotide sequence isolated from the Sargasso Sea
tgtaagaggaaaccgaaatgattatgaaagatgggaaaactttggattaaagtcttggtcttatgaaaaagttttaccttattttaaaaaaattgaaacatggtctggaggagaaaaccaatacagaggttcactggggccacttcctgttaatcagtctaaaaatgataaccctttgtttaaagcctttataaactcagcctctgaggctggacatacagttaatcctgacatgaatggagaagaacaagaaggatttggtatgtttgatacaacaattcatgaaggtcaaagagctagtgcaacaaaatattatttaaatcctgcaaaaaaaagaaaaaatttaaatattttttccaattcttttgtcgaaaaaattatttttgaaggaaaaaaagcaataggtatcgaagtaaaaataaaaaataaagtggaaaaagtttatgctgaaaaagaagtaatactaagtggtggctcaattaactctccacaattattaatgctttcaggagttggtaattcagatcatttgaaggaaaaaggaattgatgtggttagtgatataaaaggagttggtaaaaatcttcaagatcatttggaaacatatattatgcaagaatgcaaaactcccgacactctttatacttatacaaaactaattccaaaagttttagctggtattcaatggtttttatctagatcaggaccttgttctaaatcttttttagaagctggtgggtttgcaaaatcttcccctgagagagaaatagcaaatatacaatttcatttttttccatcatttgttattgatcatggtttagtt

SEQ ID NO: 209778 - DNA, 596 bp, Unknown
  Bacterial polypeptide expressing nucleotide sequence isolated from the Sargasso Sea
ttgttcaaaatcatttttggaggctggaggttttgcaaaatcttcaccagatagaaaagttgctaacattcaatttcatttctttccatcttttgtaataaatcatggattagaagatccagactcgcacggttatcaattacacgccagtccaaatcatccaaaaagcagaggtgagataacactaaattcatcagatccatacgattaccctaaaattttgtttaattatttaaaagaagaagaagatctaaaacaaactagagaatgtattcatgttgcaagaaaaattctatctcaaccagctcttgcagaacatgctggggatgaagttggaccaggtttcaacgctcagtcagatgatgaattgaatgaatatataagatctaaagctgataccgcttatcacccttgtggaacttgcaaaatgggagtggatgacatggcagttgtagatcaagatttaaaagtaaatggaattggaaatttaagggtaattgatgcatcagttatacctgaaataccaagtgctaatttaaatgcccctaccctaatgattgctgaaaaaggttctgaggctattcttaataattaat

SEQ ID NO: 209779 - DNA, 326 bp, Unknown
  Bacterial polypeptide expressing nucleotide sequence isolated from the Sargasso Sea
tataaatgttgcgaggaaaatcctatcacaacccgctctttcagaacacgctggggatgaagttgggccaggttttgacgctcagtcagatgatgaattaaacgaatatatcagatctaaagctgatacagcttatcatccttgtggaacttgcaaaatgggagtggatgatatggcagttgtagaccaagatttaaaagtaagaggaattgaaaatttaagagtaattgatgcatcagttatacctgaaatccctagcgcaaacttaaatgcccctacccttatgattgctgaaaaaggttctgaagccatccttaataattaat

SEQ ID NO: 209780 - DNA, 945 bp, Unknown
  Bacterial polypeptide expressing nucleotide sequence isolated from the Sargasso Sea
cagatcctaaaataaaagttcttttaatcgaggctggtggcaaggacacttatccatggatcatatttcagtttggttattttaaaacaatgcataatccaaaagttgattggtgttttcatactgaaaaagatgaaaccatgaacaatagatcaattagatatcctagaggtaaaactttaggaggaagttcatcaataaatggtcttttatggataagaggacaaagtaatgattatgataattggaggcaacaaggaaactcaggatggggatgggatgatgtatttccttattttttaaaatctgaaaataatgagcttggtccaaatgaatttcacaatgataaaggtccaataaccgtatcaaataaaaagataaatttagatatgctagaagaatttcaaaatgcagctgaagaaactggaattcctagaacggatgattttaatacaggagataattttggtattggttattttcaatttacaacaagtagaaataaattattaaaattacgttgtagtgcagcaaaaggatatttaaacccggttaaaaacagatccaatcttaagatagttactaaagctcatgtggaaaaaattaattttgaaggtaaaaaagctgttggtgtaaactattttttaaaagataaactaattactgttaaagcaaacaaagaggtaattttatctgctgggtcaattggttcacctcatattttgcaagtttcaggaattggggattctgacaaattaaaaaaccatggaatagaaactattcacgaattgaaaggtgtaggaagaaaccttcaagatcatttgatgtttaggcctgtttataaggtaaaaaatttaaagtcattaaatagcaaaataaatagtttaattggaaatttttttattggcctagaatatgtttttaaacaaaagtggtctctatgac

SEQ ID NO: 209781 - DNA, 288 bp, Unknown
  Bacterial polypeptide expressing nucleotide sequence isolated from the Sargasso Sea
atgaaccagaagaatatagacctggggttcatattacagataatgaagaattggttaaagctggaagtgattatgctcaaactatatttcaccctgttggtacctgtaaaatgggaaaagatgaatactcagttgttaatgagaaactaaagcttcatggtattgaaaatttaagagttgttgatgcttcaataatgccaaatattacatccggaaatactaatgcacccactataatgattgcagaaaaagcatcagacatgatattaaaagatagtaagtcatgaa

SEQ ID NO: 209782 - DNA, 307 bp, Unknown
  Bacterial polypeptide expressing nucleotide sequence isolated from the Sargasso Sea
tatggataattttgattttataattcttggagctggatctgcgggttgcgtgcttgcaaataggctgtcagcaaatcctaaaaataaagttcttcttttagaggcaggcggtaaagataactatccatggatacacataccagtaggttattttaaaactatgcacaacccaaaaactgactggtgttacaaaactgagcctgatgaaagtatgaacaatatctctattaggtatcctagaggtaagactttaggaggaagttcatcaataaatggattgttatatataagaggtcaaaatagagat

SEQ ID NO: 209783 - DNA, 610 bp, Unknown
  Bacterial polypeptide expressing nucleotide sequence isolated from the Sargasso Sea
ttgactgttggagctagttatgcatgtggttttataaaaagcgacccttatcttgaaacacctaatttacaatttcatatatctccagcaagcacagatgttttaggaaaagcttctcttcataaattttcagcatttacaccaactataactaatgtaagaccaaccagcagaggttccattgaattgaaatcccctgatacaagagtgtctcctaaaataaaaatgaattatttatctacaaaagaggatagagaaatagctggcaaatcattaaaaattgttcgtaaaatagtaatgaattcaaaagcttataaggaacacgagcctgaagaattaagaccaggcattaatattactgataatgaaaagcttgccatagaagctggtaaatttgctaacacaatatttcatcctgttggtacttgcaaaatgggaaaagatgaaaatgctgtggtaagtgatagacttgttgctcatggtttgtttaatttaagaattgttgatgcatcaataatgcctcatataacctcaggcaatactaatgcaccaactattatgattgctgaaaaagcagcagacatgataatagaagatagtaaatcatgag

SEQ ID NO: 209784 - DNA, 676 bp, Unknown
  Bacterial polypeptide expressing nucleotide sequence isolated from the Sargasso Sea
atggaaaagtttgattttataataattggggctggttcagctgggtgcgttctagcaaatagattatctgctaatccaaaaataaaagttttattacttgaggcaggtggaaaagatacaaatccttggatacatattccaggaggatattttaaaacaatgcacaatccaaatactgattggtgcttcactacagagaaagaaccaaattgtaataatagagaaatgacatatccaagaggaaaaactttaggtggaagttcatcaattaatggaatgctttatattagaggtcaatcgaatgattatgactattggagacagttaggaaatgttggatggtcttgggaggacgtattaccttattttaaaaaatctgaagattttcaatttggagaaaatgaatttcatggcaaaggtggtccaattaaagttgaaaaaattagagcaacttttaaagttttagatttatttttagaagccgctgaagagtttgggtataaaaaaactgatgattttaattcaggcaataatgagggtatgggatattttccatttacaattaaaaatggatttaggtgtagcacagctgtaggttatttgaatccaattaaaggaagaaaaaacttaaaaataattactaatgcgcacattaaaaatatgaatcgaaaaaaaa

SEQ ID NO: 209785 - DNA, 118 bp, Unknown
  Bacterial polypeptide expressing nucleotide sequence isolated from the Sargasso Sea
attaaaaatttaagagtaattgatgcatcaattatgccaaacataacctcaggaaatactaatgcaccaacaataatgattgcagaaaaaggtgctgatatgatacttacaaattaat

SEQ ID NO: 209786 - DNA, 646 bp, Unknown
  Bacterial polypeptide expressing nucleotide sequence isolated from the Sargasso Sea
attggtttagaatatctgtttaaacaaagtggacccatgactatgggagcaagtcaagtttgtggatttgctaaaagtgatccatcaaaagcgacacctaatttacagtttcatgttcaaccaattagtacagatattttaggagcatcaaaacttcacgactttgacggtatcactccgactgttgcaaatataaggccctcaagcaggggagaaatttcaatagtaagtaatgacagcagagttaatcccaagattaaaatgaattacttgtctacacaagatgatcgaatagttgcggctcaaggactaaaacttgtaagaaaaattatgttagagactgaaacttttaaaaaatatgaaccagaagagtatagacctggtgttcatattactgatgatgaagaattggtaaaagctggtagcgagtttacccaaaccatttttcaccccgtgggcacgtgtaaaatgggaaaagatgataatgcagttgttaatgaaaaattatatatgcatggacttaggaatttaagagtgatagatgcttcaataatgccaaatattacttcaggaaataccaacgctccaacaataatgattgctgaaaaaggtgcagaatttattttgaataatcaaactcaatgac

SEQ ID NO: 209787 - DNA, 538 bp, Unknown
  Bacterial polypeptide expressing nucleotide sequence isolated from the Sargasso Sea
aatttacagtttcatgttcaaccaatcagtacagatattttaggagcttcaaagttgcatgattttgaaggtattactccaactgttgcaaatattagacctactagtagaggtgaaataaatataataagtaatgatagtaaaatttatcctaaaattaagatgaactatttatccactgatgaagataggaaagttgctgcacaaggattaaagataataagaaaaataatgttagagactaaaacatttaagcaatatgagcctgaagaatatagacctggagttcatattactgatgacgaagaacttgttaaagctggctccgacttcactcaaactattttccatcctgtaggcacatgcaaaatgggtcaagacgatatggctgtagttgatgaaaaattaagagttaaaggaattcataatttaagagtaatcgatgcttcaatcatgccaaacataacctcaggtaacactaatgcaccaacaataatgattgctgaaaaaggtgcagatatgatactaggaaattaat

SEQ ID NO: 209788 - DNA, 271 bp, Unknown
  Bacterial polypeptide expressing nucleotide sequence isolated from the Sargasso Sea
gaagaatttagacctggctctcatttaaaggagaaagaggaaatcgtaaaagcttgtagccattatgctcaaacaatttttcatcctgtaggaacttgtaaaatgggaaatgatgaatcggctgttgtatcagataaattgaaagttcacggtctaaataaattgagagtaatagatgcatccataatgccaaatataacgtctggtaatactaatgcaccgactattatgattgctgaaaagggtgcagatatgatattggattcttaat

SEQ ID NO: 209789 - DNA, 789 bp, Unknown
  Bacterial polypeptide expressing nucleotide sequence isolated from the Sargasso Sea
catgaacaatagaaaaatgttttgcccaagaggaaagatgttgggaggaagttcatcacacaacggtatggttcatgtaagaggaaatccaatggattttgaaaactgggctcaaaaagatcttaagtcatggaattataataatgttcttccgtattttaaaaaatcagagtcaattgaaggattagatgaaacttataggaataaaagcggtcctttaaaactatctcgatcttcggaaggcaatgaattgagtaaggtctacctagaagcggcagaacaagccggctatgagataaataatgacatgaatggatataagcaagagggatttggtctaatggacaccactatttatggaggcagaagacaaagtacgagtgtaacttacttgcatccagttattaacagaagaaatcttaccgtcattacaaacacaatagtaaacaaagttatcattgaaaataataaagccgttggggttgaatgtactacaggaagagagagaaaaaaaatacatgctgaaaatgaagtgatattatcagctggagcaataaattcacctcaacttctaatgctttcaggtataggaaatgctgaagaactaaaaaaattagatatatctgttcaacatgacctaagaggtgtaggtgaaaatttacaggatcatcttgaaacttatttacaatatgaatgtacaaagcccgttacactttacacatcatataatccaataagaatggcattcatagggatagagtggtttatttttaaatctggagtggcagc

SEQ ID NO: 209790 - DNA, 320 bp, Unknown
  Bacterial polypeptide expressing nucleotide sequence isolated from the Sargasso Sea
tatggataaatttgattacataattattggtgcaggatccgcaggctgtgtcttagctaatagattaacagcaaatcctgatactaaagttcttttacttgaagctggaggaaaagataccaatccttggatccatatcccggggggttattttaaaaccatgcacaatccagatactgactggtgttttaatactgaaaaagaaccaaactgcgataacaggcaaatggtttatccaagaggaaaaacattgggtggaagctcatctattaatggaatgctttatattagaggtcaatcgaatgattataattattgga

SEQ ID NO: 209791 - DNA, 414 bp, Unknown
  Bacterial polypeptide expressing nucleotide sequence isolated from the Sargasso Sea
tagtcagtaatgacagcagaatatatccaaaaattaaaatgaattatttatctactgatgaagatagaaaagttgcagctcaaggattaaaaattgtaagaaaaataatgttagagactgaaacatttaagcaatatgaacctgaagaatatagaccaggagttcatattactgatgatgaagaattagttaaagcaggttcagattatactcaaacaatttttcatcccgttggaacgtgtaagatgggcaatgatgatatggcagttgttgatgattctttaaaagtaaaaggaatacaaaatttaagagttatagatgcatctattatgcccaacattacctcaggtaatacaaatgctccaacaattatgattgctgagaagggtgctgatatgatattgaacggataat

SEQ ID NO: 209792 - DNA, 686 bp, Unknown
  Bacterial polypeptide expressing nucleotide sequence isolated from the Sargasso Sea
cttaaataaaaaaattaatagtatttttggaaattttttgatcggtttagaatatatttttaatcaaagtggacctatgactatgggcgcaagccaggtctgtggtttcgcaaaaagcgatagctctagagaaacaccaaatttacaatttcatgtacaaccgataagtacagatattttgggtgcaactaaactacatgattttgacggtataactcctactgttgcaaatattagaccaacaagcagaggtgaaataaatataattagtagtaatataaaagattatccaaagataaaaatgaattatctttctacagacgacgatagatatgttgccgctcaaggacttaaacttataagaaaaataatgttagaaacaaatacgtttaaaaaatatgaaccagaagaatatagaccagggttgaatattcaaaatgatgaagagttggtcaaagcaggtagtgattatactcaaactatatttcatcctgttggaacctgtaaaatgggaaaagatgaaaattcggtggttaatgaacgactaaatattcatggtataaaaaatctaagagttgtagatgcttctataatgccaaatatcacttctggaaatacgaatgcaccaactataatgattgcagaaaaagcatcagacatgatattagaagatagtaagtcatgaa

SEQ ID NO: 209793 - DNA, 583 bp, Unknown
  Bacterial polypeptide expressing nucleotide sequence isolated from the Sargasso Sea
tcaagtttgtggttttgtaaaagcgacccatctagagctacacctaatttacagttccatgtgtcaccagttagtactgatatattaggtgtaacacctatgcatgactttgaaggtattaccccaacagttgcaaatgtaagaccaaccagtagaggtgagattaatatcgttagtaatgatagtagagtttatcctaaaattaagatgaactatttatcgactgacgatgatagaaaagttgctgcacaaggtcttaaaattgttagaaaaataatgttagagacagaaacttttaagcaatatgagcctgaggaatatagaccaggtgttcatataacagatgatgaagagttagttaaagcaggttcagattttactcaaacaattttccatccagttggaacctgtaaaatgggacaggacgatatgtctgtagttgatgaaaaattaaaagtaaaaggaattcaaaatttgagagtaatagatgcttcaattatgccgaacatcacctcgggaaatactaatgcaccaacaataatgattgcagaaaaaggtgctgatatgatacttacaaattaat

SEQ ID NO: 209794 - DNA, 706 bp, Unknown
  Bacterial polypeptide expressing nucleotide sequence isolated from the Sargasso Sea
ttggaaacatatattatgcaagaatgcaaaacaccaaatactctttataggtatacaaaattaattccaaaagttttagctggaatacagtggtttttatctaaatctggcccatgttctcaatcttatttagaggctgggggttttgcaaaatcctctcctgaaagggaaatcgcaaatattcaatttcatttttttccatcgtttgttattgaccatggtttagttaatccaaactcacatggctatcaattgcacgctagccctaatcatcctaaaagcagaggattagttacactcaattcttctaatccttatgattatccaaaaatattatttaattatttagaacatgaagatgatttaagacaaactagagagtgtattcatgtagcaagaaaaattttatcacaaccttctttagcaaaacactctggtaatgaggttggtcctggatctgataaaaaaacagatgaggaattaaatgaatatataagatctaaagcagaaactgcttatcatccatgtggtacttgtaaaatgggagtagatgatatggcggttgttgatgaaaatttaaaagttaaaggaatacaaaatttaagagttgttgatgcgtctgttatgcctgaaataccaagcgctaacttaaatgcacctacgctaatgattgccgaaaaaggtgctgacgctattttaaattaat

SEQ ID NO: 209795 - DNA, 673 bp, Unknown
  Bacterial polypeptide expressing nucleotide sequence isolated from the Sargasso Sea
aatgagtgattacgatgtagttatcgtcggtggcggctcagccggatgtgtgctcgcaaatcgcttaagcgaaaacagtgacgtgagtgtccttttaatcgaagctggtagaagagaccaccgatgggactttgtgattcatatgccggcagcactttcctacggcataggtaacaagttttacgattggaaatatgaatctgatcctgaaccaggactcggaggcagaagagtgtctcatgccagaggaaaggttttgggtggctcctcaagtatcaacggcatgatatttcaacgaggtaatcctgccgactatgaacgctgggctacaacaccaggttgtaaagagtggagctattcccactgtctaccttatttccaacgaatggagacttgtcttaacggagcagatagatatagaggagacagcggcccattgatgctggaaagagggcccgcttcgactcctttgttcagagctttttttgatgcagtgcaggaagccggttacgaactaactgaagatgtaaacggataccgacaagagggatttgcttcctttgaccgaaatatttatcagggcagacgaaactctgcttcagttgcttatttgcatcctgtttcctcgcgaacgaatttagatgtcataacaagagcccatgtaacaaaaata

SEQ ID NO: 209796 - DNA, 613 bp, Unknown
  Bacterial polypeptide expressing nucleotide sequence isolated from the Sargasso Sea
agttgaatatccagatctgcaattatgtatttcaccaattgcgatggaaaataattcatggcaacccttaaaggagcatgcgtttcaggtgcatgtcggtttaatgcgtacacatagtcgcggcaagattgaattgcgctcaaataaccctgctgatccaccacgtattttagttaattatttaaaagataagcgtgatagggagttaatgcgtaaaggaattcatttagttcgcgaattattagatcaaccgtcattttctgacttaaaaggtgaagagatttttcctggtgataattgtaagtcagatgctgaccttgataccaaactgaatgcgcacacgactagtcaatggcatttagcttgcacagcgcgtatgggtttaaaaacagacaagtatgcagtagtagataattcaggtaaagttcacggcatcaatagtctaagagttgttgacgcttctatcatgccttttgctccaaatggcaatacaaacgcgcctacaataatgattgctgaaaaaattagtgatgaaatattaggcgctaaacctttaactcgcctagagttacaaacttggcagagctcaaattatcagaccgatcaacggtaa

SEQ ID NO: 209797 - DNA, 361 bp, Unknown
  Bacterial polypeptide expressing nucleotide sequence isolated from the Sargasso Sea
tcgagatattataagtcaaaaagcatttgacgaatatcgtggcaaagaaatattacctggtattgaagttcagtcggatgaacaaatagaaaatttcattcgagaaaaagcagaaacaatctatcaccctgttggcacatgtaaaatgggaagtgatgaaaatgctgttgtcgacgataaattaagagttcgaggagttgaaagccttcgagtagttgacgcttctataatgcctaatttagttggtggaaatacaaatgcaccaacaattatgattgctgaaaaaatagcagatcatattttaggcaatgattttttacctgcattagatctttcccagtcatataaacagtcagcatag

SEQ ID NO: 209798 - DNA, 863 bp, Unknown
  Bacterial polypeptide expressing nucleotide sequence isolated from the Sargasso Sea
atcaagtggttcgattatgacaccttatttattattaaaatcgggtataggtaatccagctgatttaaataaatttaacattcctgttgttataaagagtcctcatgttggcaaaaactttcaagatcatctaggtttagattatctatataaaacttattttccaactctaaataaagatctgggaacttggagcggaagagtaaaatcacttttacaatatatttataatagaaaaggtcctttatctcttagtcttaatcaaggaggagggtatattaattggaattctctcgatccttatccaaatattcaattatattttaatccacttacgtattcagtttcttttaaaaataaaagacccttacttaggactgataaatttaatggattcataataggttttaattcttgtaggcctaaaagtcttggtgaagtaaatttaaaaaaaatggataatgattatttacctagcattgatccaagatatttatcagatgaaagggatattaatgatttatactcaacatttgattttgttcgaaagttttctgcaaataaaaatataaaaaaaatcattaagtctcctgtcaatattgaccctattaagtcaagtgatgaagagttgcttgatcactttaaatcaaaatctacaacagtttatcacccttgtggaacctgtcgtatgagtaaaagtattcaagaaggtgttgtatctgaaaaactcaaggttcacggtctagataatttatggatagttgatgcatccataatgccaaatattacttcaggtaatattaatgctcctgttatgatgctttcacatttatctagtaaaattattatagaagatttaaaac

SEQ ID NO: 209799 - DNA, 240 bp, Unknown
  Bacterial polypeptide expressing nucleotide sequence isolated from the Sargasso Sea
agtctaatgaagacttagatgaaattataagaaatacttcagagtcagcctatcatccttcatgtacgaataagatgggatatgatcaaaattcagtggtagatcagaaaacaaaagttcacggtataaaaaacttaagagtgatagatgcatctataatgcctgatatagtaagcgctaatcttaatgctagcgtagtaatgatggctgaaagggcagcggattttattctggattaaa

SEQ ID NO: 209800 - DNA, 348 bp, Unknown
  Bacterial polypeptide expressing nucleotide sequence isolated from the Sargasso Sea
atcttaaacaaactagagaatgcattcatgttgcaagaaaaatcctatctcaaccagcccttgccgaacatgctggagatgaggttgggccaggcttttatgctcagtcagatgatgaattaaatgaatatattagatctaaagctgatacagcttatcatccctgtgggacgtgtaaaatgggtgtggacgaaatggcagtagtggatcaagatttaaaggtgaatggagttgaaaatttaagagtaattgatgcatctgtaataccagaaataccaagtgcaaatctaaatgcccctactcttatgattgctgaaaagggttctgatgcaattataaataaataat

SEQ ID NO: 209801 - DNA, 400 bp, Unknown
  Bacterial polypeptide expressing nucleotide sequence isolated from the Sargasso Sea
aagggcattcatttggcgcgcgaactacttaatcaacctgctttttcaaacataaagggtgatgaaatctttcctggtgaaaactacaaatcagatgacgaacttgatgcaaaattaaattccaacattacgagtcaatggcacttgtgctgcacggcacgcatggggctaaaaacagataaatatgcagtcgttgataatcaaggcagagttcatggttttaataatttgcgagtcgttgatgcttcgatcatgccttttgctacaaatggaaatacaaatgcaccaacaattatgattgctgaaaaaataagtgacaacatattgggtgatagtcctctgcctcgaattgaattaaaaacctggcaaagtcctaactatcagatgtatcaaaggtaag

SEQ ID NO: 209802 - DNA, 952 bp, Unknown
  Bacterial polypeptide expressing nucleotide sequence isolated from the Sargasso Sea
atatttaacggatttagaacttcatcatctaaagtttttttaaaacctataatcaaacatcctaatttaactatttttactaaaacagaagttttaaaattaaattatgaaaataataaaataataagtttaaagattaagcacaaaaataaagtaatttcagtaaaaccaaagataggtacaatcttatcaagtggagcaataatgacgccttatcttttgctaaaatcaggtataggtaatgccgaagaactaaataattataatatccctatcaatttacacagtcctcatattggtaaaaatttacaagatcatttaggtttagattacttatacaaaacatctatgacgactttaaattatgatctaggtacttggagtggaagaataaaatcaattttaaaatatttatataatagaacaggtccttttgcattaagcctcaatcaaggaggagggtatattaattggaattctttagacccttaccctaacattcaactatattttaacccattaacttattcagtttcttataaaaaaaatagacctttacttaaaactgataaatttaatggttttatcattggctttaattcatgtaggccaaaaagccttggagaagttaaattaagagcatctaaaacagattatttaccaagtatagatccaaaatatttaagtgatgaaagagatattcatgatttatattcggcttttgattttattagaaacttttcaacaaatagacacttaaaagaaataattgattcatcagtaaatattactccaataaatgcaaataatgaagaattacttggccactttaaatcaaatgctggcactgtttatcatccttgtggaacatgtcgtatgagtaaagatattaattcaggcgctgtctctgaaaaactaaaagttcatggtattaaaaatttatggatagtgg

SEQ ID NO: 209803 - DNA, 625 bp, Unknown
  Bacterial polypeptide expressing nucleotide sequence isolated from the Sargasso Sea
tatatatttaagcaaagtggtccaatgactatgggcgccagtcaagtttgcggttttgcaaaaagcgattcatccagagctaccccaaatttacaatttcacgtacaaccaattagcactgatgttctcggtgcatcaaagctacatgattttcatgggatcactccaactgttgctaatatcaggccaactagcagaggcgaaattaatattgttagtaacgacagtagaatttatccaaaaataaaaatgaactatctttcaacagatgacgatagatatgttgcagcacaaggattaaaacttgtaagaaagataatgcttgatacggaaacttttaaaaaatatgaagctgaagagtataggcctggattacatattcaagatgatgaagaattagttaaagctggtagtgattatactcagacaatattccatccagttggcacgtgtaaaatgggtaaagatgataatgcagttgtttcagaaaaattaaaagtgcacgggattgaaaatttaagagttattgatgcttcaatcatgccaaatataacttcgggtaatacaaacgcaccaactattatgattgctgaaaagggtgcagatatgatattgaataattaat

SEQ ID NO: 209804 - DNA, 466 bp, Unknown
  Bacterial polypeptide expressing nucleotide sequence isolated from the Sargasso Sea
gatggaaaaatttgactacattataattggtgcaggctctgcaggttgcgttcttgctaatagactttctgcaaatccaaaaaataaggttttgcttttggaagctggaggaaaagataactacccatggatacatattcctgttggctattataaaacaatgcataatccaaaagttgattggtgttttcatactgaaaaagataaaacaatgaataatagatcaataagatatccaagaggtaaaactttaggaggaagctcttcgattaatggactgttatggataagaggtcaaaggaatgattatgataattggcgtcaacagggtaacagtggatggggttgggaagacgtactaccttattttataaaatctgaaaataatgagttaggcaaaagtgaattccataatgacagtggtcctataatggttgctaataaaaagattaaattaaagatgctt

SEQ ID NO: 209805 - DNA, 352 bp, Unknown
  Bacterial polypeptide expressing nucleotide sequence isolated from the Sargasso Sea
tatggataaatttgattacataattattggcgctggttcagctggctgtgtcttagctaatagattaacagcaaatcctgatactaaagttcttttacttgaagctggtggtaaagacacaaatccatggatacatattccagggggttattttaaaactatgcataatccagatactgactggtgttttaatactgaaaaagaaccaaactgcgataacagacaaatggtttatccaagaggtaaaacattaggtggaagctcatctattaatggaatgctttatattagaggtcaatcgaatgattataattattggagacaactaggtaatgttggttggtcttgggat

SEQ ID NO: 209806 - DNA, 355 bp, Unknown
  Bacterial polypeptide expressing nucleotide sequence isolated from the Sargasso Sea
tttgtatgcaacatttgattttattagaaaattttccgcaaataaaaacataagcaatataattaaatctccagttaacattgatcctctaattgctacagatcatgaattgcttgatcactttaagtctaatgcgacaacaatttaccacccgtgtggaacatgcagaatgagtaaagatattggtacgggcgtagtatctgataaattgaaagttcacggtttagataatttatggatagttgatgcttcaattatgccaaatattacctcaggaaatattaatgcacctgttatgatgttatcacatttatctagcaaaattattttagaagaattaaaacgacaatattga

SEQ ID NO: 209807 - DNA, 538 bp, Unknown
  Bacterial polypeptide expressing nucleotide sequence isolated from the Sargasso Sea
atgaataattacgattttataatacttggtgctggatcagctggctgtgtgcttgcaaatagattgtccaaaaatcctagtcataaagtccttcttttggaggctggtggcaaagacaattatccatggatacatatacctgtaggttattttaaaactatgcataacccaaaaacagattggtgttataaaactgaacctgatgaaagtatgaacaatatctctattaggtaccctagaggtaaaactttaggaggaagttcatcaataaatggattgctttatataaggggccaaaatagagattatgatatctggcgtcagttaggaaacactggttggggatgggatgatgtgttgccctattttataaaagccgaggatcaagaaagaggtaaaaatgagtttcatggagttgatggcccattagcagtttctgatcaaagaattcatctcccacttttagatgaattccaaaatgcagctgaagagtttggaatacctaaaactaaagactttaacacaggagacaatcatg

SEQ ID NO: 209808 - DNA, 240 bp, Unknown
  Bacterial polypeptide expressing nucleotide sequence isolated from the Sargasso Sea
aaaaagaagaaatagttaaagcctgtagtcattatgctcaaactatatttcatccagttggtacttgcaaaatgggaaatgatgagtcagcagtggtttcggataaacttaaagttcatggaattaacaaattaagagttattgatgcatctattatgccgaatatcacatctgggaacactaatgcacctactattatgattgctgaaaagggtgcagatatgatattgagcgcataat

SEQ ID NO: 209809 - DNA, 886 bp, Unknown
  Bacterial polypeptide expressing nucleotide sequence isolated from the Sargasso Sea
cttgggagcagcctctgaggcaggtcatttaattaatccagatatgaatggagaacatcaagaaggatttggtatgtttgatacaacaattcataacggcgaaagagcaagtgttgcaaagtattatttaaatccaattaaaaatagaaaaaatctaaatattttttctaattcttttgtagaaaaaataatttttgaaggaaaaaaagcagttggcattgaagtaaaaactaagaataaagtcgaaaaattttatgcaaaaaaagaattaatattaagtggaggatcaattaattctccacaattattaatgctttcaggtataggagatgtaaatcatttaaaagaaaagggaataagtgtcattcacgatttaaaaggcgttggtaaaaatcttcaagatcatttggaaacatatattatgcaagaatgtaatactccaaatactttgtataaatatacaaaattgatccctaaagtgcttgctggtattcagtggtttttatctaaatctggtccttgctcacaatcatatttagaggctggaggctttgcaaaatcttcacctgaaagagaaatggcaaatattcaattccatttttttccatcatttgtgattaatcatggtttagtaaatccaagttcacatggataccaattacatgctagccccaatcatccaaaaagtagaggatcaattactctaaattcttctaacccttatgattatccgaaaatattatttaattatttagaagatgaagatgatttgaaacaaactagagaatgcattcatgttgcaagaaaaattctatctcaaccgtcattagcaaaacattctggaaaagaagtaggaccaggatctgacaaaaaaactgatgatgaa

SEQ ID NO: 209810 - DNA, 700 bp, Unknown
  Bacterial polypeptide expressing nucleotide sequence isolated from the Sargasso Sea
atggaagaatttgattttataattattggtgctggttctgctggatgtgttctagcaaatagacttacagccgatggaaaaaataaagttttattattagaggctggcggtaaagatacttatccgtggatacatattccagttggttattttaaaacaatgcataatccaaaagttgattggtgttttaaaactgaaaaagatgaaacaatggcaaatagatcaattagatatccaagaggaaaaactcttggagggagttcgtctattaatggtttactttggataagaggacaaagtaatgattatgataattggcgtcagcaaggtaatagtggctggggttgggatgatgtacttccctattttcttaaatcagaaaataatgaattaggaaataataaatatcataatgataaaggccctattgtagtttctaataaacaaataaatttagatatgcttgaggagtttcagaatgctgcagaagaaactggaataccaagaacaaaagattttaatactggagataattttggtattggttattttcagtttactacaagtagaaataaattattaaaattaagatgtagtgcagcaaagggatatttaaatccagccaaaaagagatcaaatttaaaaattgaagttaaagctcatgtgcaaaaaattaattttgagggaaaaaaagcagtcg

SEQ ID NO: 209811 - DNA, 397 bp, Unknown
  Bacterial polypeptide expressing nucleotide sequence isolated from the Sargasso Sea
atgaataattttgattatattattattggcgctggatcagctggatgtgttcttgctaacagaatttcatctaatcctaagaataaagtcctacttttagaggcaggtggtaaagatactaatccatggatacatattcctggtgggtattttaaaacaatgcataatcctgagacagattggtgttttaacacagaggaagagcctttctgtgacaatagaaagatgacttatccaaggggaaaaacacttggaggaagttcctctattaatggaatgctttatattcgaggacaatcaaatgattataattattggagacaattaggaaatgtgggatggtcatgggatgatgtgctaccttatttcaaaaaatctgaagatttccaattggaga

SEQ ID NO: 209812 - DNA, 604 bp, Unknown
  Bacterial polypeptide expressing nucleotide sequence isolated from the Sargasso Sea
aaatctggaccttgttctcagtcatatttagaagctggaggttttgcaaaatcctcttctgaaagagaaataccaaatattcaatttcacttttttccatctttcgttataaaccacggcttagttaacccaagttctcatggctatcaactacatgctagtcctaatcacccaaaaagcagaggtttaattacacttaattcttctgatccatatgattatccaaaaatattatttaattatttagaagatgaagatgatttaaagcaaacaagagaatgtattcacgttgctagaaaaatattatctcaaccttctttgataaagcacgctggaaaagaaatcggtcctggttctgaaaagcaaaatgacgaagagttaaatgaatatataaaatcaaatgctgaaacagcttatcatccatgcggtacttgtaaaatgggtattgatgatatggctgtggtcgatgaaaatttaaaagttataggaatgcaaaatcttagagttgtcgatgcttctgtgatgcctgaaatacctagtgctaatttaaacgctcctactctaatgattgcggaaaaagcatctgatattattttaaattgaa

SEQ ID NO: 209813 - DNA, 886 bp, Unknown
  Bacterial polypeptide expressing nucleotide sequence isolated from the Sargasso Sea
gaaacaatgaataatcgatcaataagatatccaagaggaaaaaccttgggcggcagctcttcaattaatggtcttctgtgggtgagaggtcaaagtgatgattataatatttggagacaattaggtaacaaaggatggggctgggatgatgttcttccttattttttaaaatctgaaaataatgagctaggtaaaagtgaataccataacgacaaaggaccgatatctgtagcaaacaaaaaaataaatttaaaacttttagatgtattccaggacgcagctgaagaatttggaattccaaaaacgagtgattttaataaaggtgataatactggtgtaggtttttttcaatttactactagttttaataatttaggattaaagcttagatgtagtgctgcaaaaggttatttaaatcctgcaaaaaaacgtaaaaatttaaaaattgaggtaaaagcacacgttaaaaaaataaattttgaaggaaaaaaagtagtaagcgtaagttatttttctggtgataatttgaaaactgttaaagtaaataaagaagttatattatcctcaggatcaattggttcaccacaaattttacaagtatctggaattggtgatagtgataaattaaaaaaactaggtattgaagttattcatgaattaaaaggggtcggaaaaaatttacaagatcatcttatgatgaggcctgtgtacaaggttaagaaacttaaatcactaaataaaaaagttaatagtatatttggaagatttatgatgggattagaatacattttaaaacaaagcggacctatgacaatgggtgcaagtcaggtttgtggatttgtaaaaagtgacccctctagggcgacacccaatcttcaattccatg

SEQ ID NO: 209814 - DNA, 777 bp, Unknown
  Bacterial polypeptide expressing nucleotide sequence isolated from the Sargasso Sea
gatttacctggtgtgggcagaatctcaaagaccatcttgagatatatattcaacataaatctaaaaaaaaagaaacattatacaatttgtctacaaattactttagtcaagctattgaaggattaaaatggtttttatttaaaaaaggaatgttggctcattctcatcttgaggttggaggatttgtaaaaacttctgagaaatataaacatcctaatattcaattacatttttttccatctctagttataaatcatggcttaattaatccttcatttgatggttttcaatttcatgctagtccaaatcgaccaaaaagtaggggttttgttgaaataaagtctaataattacaaagacaatccaaaaattcaatttaattatcttcaagatgaagaggatttagagcaaatgcgtgacagtgttaaaattgctaataaaatatttatccaaaaaagtatggagacctatcttggagatcaattaagacctggttatgatatatcaaataaagaactggataatataattcgtgaaactgctgatacagcttatcatccctcttgtactaacaaaatgggtattgataatatgtcagttgtaaaccaagaaactaaagtaaaaggtctagagagtttaagagtgattgattcctctatcatgcctgatattttaagtggcaatctgaatgctggcactataatgattgcagaaaaggcatctgatatgattttaggtaaagaagaaactcctatagaagctgagttttataattagt

SEQ ID NO: 209815 - DNA, 793 bp, Unknown
  Bacterial polypeptide expressing nucleotide sequence isolated from the Sargasso Sea
tgattatgaaagatgggaaaactttggattaaagtcttggtcttatgaaaaagttttaccttattttaaaaaaattgaaacatggtctggtggagaaaaccaatatagaggttcactgggaccacttcctgttaatcaatctaaaaatgataatcctttgtttaaagcctttataaactcagcctcagaggctggacatacagttaatcctgacatgaatggagaagaacaagaaggatttggaatgtttgatacaacaattcatgaaggccaaagagctagtgcaacaaaatattatctaaatcctgcaaaaaaaagaaagaatttaaatattttttccaattcttttgtcgaaaaaattatttttgaaggaaaaaaagcaataggtatcgaagtaaaaataaaaaataaatttgaaaaagtttatgctgaaaaagaagtaatattaagtggtggctcaattaactctccacaattattaatgctttcgggagttggtaattcagatcatttgagggaaaaaggaatagatgtggttagtgatataaaaggagttggtaaaaatcttcaagatcacttggaaacatatattatgcaagaatgcaaaacccctgacactctttatacttatacaaaactaattccaaaagttttagctggtattcagtggtttttatctaaatcaggaccttgttctaaatcttttttagaagctggtgggtttgcaaaatcttctcctgagagagaaatagcaaatatacaatttcatttttttccatcatttgttattgat

SEQ ID NO: 209816 - DNA, 255 bp, Unknown
  Bacterial polypeptide expressing nucleotide sequence isolated from the Sargasso Sea
gtttcaacgctcagtcagatgatgaattaaatgaatatataagatctaaagctgataccgcttatcacccttgtggaacttgtaaaatgggagtggatgacatggcggttgtagatcaagatttaaaagtaaatggaattggaaatttaagggtaattgatgcatcagttatacctgaaataccaagcgctaatctaaatgcccctaccctaatgattgctgaaaaaggttctgaggctattcttaataattaat

SEQ ID NO: 209817 - DNA, 760 bp, Unknown
  Bacterial polypeptide expressing nucleotide sequence isolated from the Sargasso Sea
ggaaacaaaaatgattatgaaagatgggcttcatttggtctaaaatcatggtcttatgaaaatgttttaccattttttaaaaaaattgagacatggtctgaaggagagaataaattcagaggtgggaaaggaattttaccagtaaatcaatccaaaaataaaaatccattgtttagtgcttttattaatgcttctgtcgaagcaggatataaaaaaaatgatgacatgaacggagaagatcaagagggatttggaatgtatgatattacaattcataaaggacaaagggctagtgcctctaaatattatctagagcctgcaaaaaaaagaaaaaatttaaaagtttttaccaattcttttgctgaaaggattatttttgaaggaaaaaaagcagttggaatagaggtaaatattaaaaataaagttacaaaggtttatgctaacaaagaaattgttttgagtggaggttcaatcaattcaccacaactattgatgttatcaggtgttggacctgaaaaagatttaaaagataaagggattaatgttatccactctttagaaggagtgggtcaaaatttacaagatcacttagaaacttacattcagcaagaatgcaaaactaaagatacgctctattcttatgttaacaaaataaatatgcttaaaataggtattcaatggtttctttcaaaaagtggtccatgttctacctcatttttagaagccaggtggtttctgcaaatcttcagaagacaaaagc

SEQ ID NO: 209818 - DNA, 220 bp, Unknown
  Bacterial polypeptide expressing nucleotide sequence isolated from the Sargasso Sea
attagatcaaaggcagaaactgcttatcacccatgtggtacttgcaaaatgggtgttgatgatatggcagtagttgatgaaaatttaaaagttaaaggaatacagaacttaagagttgtggatgcttcggttatgccagaaatacctagtgcaaacttaaatgcccctactctaatgattgctgaaaaagcctcagaccttatattaaattcaatttaaa

SEQ ID NO: 209819 - DNA, 162 bp, Unknown
  Bacterial polypeptide expressing nucleotide sequence isolated from the Sargasso Sea
atggagacgactcagttgttgatgaaaaactaaaagtaagaggaatagaaaatttaagagttatagatgcatcaatcatgcctaatatcacctcgggcaatacaaatgcacctactataatgattgctgaaaaggctgcagacatgatattgaatcaataaa

SEQ ID NO: 209820 - DNA, 355 bp, Unknown
  Bacterial polypeptide expressing nucleotide sequence isolated from the Sargasso Sea
cttatactctatatttgattttattagaaagttttcatcaaacccaaatatttatgatattataaaatctccagtaaatattgatccattaaagtctagtgatgatcagctacttaatcattttaagctaaattcaaattctgtttaccatccctgtggcacatgccgtatgagtaataacattagtacaggtgtggtttctgataaattgaaagttcacggattagataatttatggatagttgatgcatctattatgccaaacataacttcaggtaatatcaacgctccagtaatgatgttatcacatttatctagcaatataattatagaagaattaaaacaaaaatattaa

SEQ ID NO: 209821 - DNA, 427 bp, Unknown
  Bacterial polypeptide expressing nucleotide sequence isolated from the Sargasso Sea
attaaatttaattatatgaaacatcccgatgattgggttgaatttagaaattgtatcaaaattactaggaagattttaaatcaaccatcgtttaaagatttttatggagaagaaattcaacctggagagcaaaaaatctctaatgatgatttagataattttatcaaagaggaggctgaaagtgcttaccatccatgcggcacgataaaaatgggagatgaaaacgacccatcatccgtcgtggatccaaattgtaaagttattggtattgaaaatctaagagtagtagattcatcaatttttcctagaattaccaatggaaatactaatgcacctagtataatggttggggaaaaagcatcagatattattttagggaaaatgcctctccctagagaaaatctagaaccttttaaacatacttaat

SEQ ID NO: 209822 - DNA, 246 bp, Unknown
  Bacterial polypeptide expressing nucleotide sequence isolated from the Sargasso Sea
ttacagatgatgaagagttagttaaggcaggtgcagattttactcaaacaatttttcaccctgttggaacttgtaaaatgggtaatgatgatatggctgttgttgatgattctttaagagtaaagggaattcaaaatttaagagtaattgatgcatcgatcatgcctaacattacttctggcaatactaacgctcccacaattatgattgctgaaaagggtgctgatatgatattgaacggataat

SEQ ID NO: 209823 - DNA, 555 bp, Unknown
  Bacterial polypeptide expressing nucleotide sequence isolated from the Sargasso Sea
aatggaaacatttgattatataattcttggtggaggatcagctggatgtgttctcgcaaatagactatctgcaaattctaaaaataaagttttgcttcttgaagctggtggtaaagatacttatccatggatccatattccagttggttattttaaaacaatgcataatcctaaagttgattggtgttttaaaactgaacctgatgaaacaatgaataatagatcaattagatatccaagaggtaaaactctaggagggagttcttccatcaatggccttttatggataagagggcaaagtgaagattataatatttggcgccagttaggaaatacaggttggggttggaatgatgttctgccctattttttaaaatcagaaaataatgaattaggtaagggtgagtttcataatgacagtggtccaattacggtagcaaataaaaaaattaatttaaaattacttgatgaatttcaaaatgctgccgaagaatacggaataccaaaaacaaatgattttaatactggagataatactggtgtaggttttttttc

SEQ ID NO: 209824 - DNA, 808 bp, Unknown
  Bacterial polypeptide expressing nucleotide sequence isolated from the Sargasso Sea
catgatccaaaattcaatttggaaatattatacagaaccagaaccttttttaaataacagatctttgtattgtcctaggggtaaaatgctgggtggctgctcttctcataatggtatggtttttgcaagaggtcataaagaagattttaatagatgggcatcctatggtcttgatcaatggagttatgataaagttttgccatattataaaaaattagaaacttggtctggagataattattttcgaggctctaatggcccactcaaagtgaataaatctgaaattcataaaaaatttccattatttaattcaattcttaatgctgcgaaagaggctggatataatatttttgatgactcaaatagtgaaaataatgaaggatttggtacatttgatgtaacaattgataaaggtattcgtcaaagtatagctaaagcctacttagaccctattgaaaatagaaaaaatctagaaattattaaaaatacatatgtaaaaaaaataatttttaaaaacaaagttgctgtagggatcgagtatataaaaaatgataaaatcgagaagttttacgctaaaaaagaagtaatacttagtgccggctctatcaattctcctaaaatacttcagctttctggtataggaaatgcccaacatcttaaagatcttggcattgaagtgattaataacttaaaaggtgttggagaaaatcttcaagatcatttagaattttatattcaatacaaatcaaagaaaaaagaaacattatatgatttatcaactaattatatttctcaagctattgaaggt

SEQ ID NO: 209825 - DNA, 206 bp, Unknown
  Bacterial polypeptide expressing nucleotide sequence isolated from the Sargasso Sea
tactgcgtatcacccatgtggcacctgtaaaatgggtgtagatgaaatggcagtagttgatgagagtttaaaagtaaaagggatacaaaacctaagagttgtagatgcttcaataataccagaaattccaagtgcaaatctaaatgcacctgtgattatgatagcagaaaaggcctttgatataattttaaattcgtataattaat

SEQ ID NO: 209826 - DNA, 883 bp, Unknown
  Bacterial polypeptide expressing nucleotide sequence isolated from the Sargasso Sea
gatacttcagaatatatcattgttggtgctggttcagctggctgcgtcttggcagatcgcttaagcgcgtctggcgcggatgttgtgctgcttgaggcaggaccaagtgatcttcatcccatgatccatattcctgctggaattcttcatctcatctcaaacccaaaagtcaattggaattattcttctgagccagaggaaagcagcggtaacaggcgcattcattggccgcgcgggcgtgtgcttggtgggtctagttcgataaatggtatgttatatgttcgtggtaatcctgcggattatgatggatgggcgcagatgggatgtagaggatggtcgttcgatgaagttttaccttattttaagaaatctgaaaattataaaaatggcggcgatgaagagttccgatcgcagggtgggcctttagaagttgaagattacaaaacaattttagatttaacgcacgcttttgttgaggcggcctctcaggcggggcatacaaaaagtaaagatcttaacggagcacaagcagagggtgttggctactcccaaatgaccagaaaagggcggtttcgcggttcaactgctcaaacattccttaaacaagcaagaaaaagactaaatcttcgtgtggaaactaacgcaacggtttcaaagttaatttttgaggataaaaaatgcgtcggtgttaaattttttaagcatggaaaagaaaagtttattaaagctgcgaaagaagtaattctatctggaggagccgtaaactctcctcatatattgcaagtatctggtatagggccgtctgaccacttaatgaatattggtattaatgttgttcatcacttacctggtgtaggtgcaaacccttcagatcactacgtgg

SEQ ID NO: 209827 - DNA, 771 bp, Unknown
  Bacterial polypeptide expressing nucleotide sequence isolated from the Sargasso Sea
aatggataactttgattatgtaataattggagcaggatcagcaggatgtgtattagctaataggctatcagcaaaccctaataataaagttctattgttagaggctggtggaaaagataattatccatggattcacattccagttgggtattacaaaaccatgcataatcctaaagtagattggtgctttcatacagaaaaagatgaaaccatgaataatcgctccattagatatccaagaggaaaaactttaggaggtagttcatctattaatggtcttctttggataagaggtcaaagcaatgattatgataattggagacaacaaggaaataaaggttggggttgggatgatattttaccttatttcataaaatctgagaataatgagctaggaaaaggaaaatatcatagtgataatggaccaataatggtcgcaaataaaaaaatcaaattgaagatgttagatgaatttattaatgcagctgaagaaaaaggtattccaaaaacaaatgattttaatactggtgataattttggtgtaggtttttatcaatttacaacaagtcatagtcactttggtttaaaactaagatatagtgctgcaaaaggatatctaaatcctgttaaatctagaaaaaatttaaaaattattactaatgcacatgttcaaaaaattatttttgaaaatagaaaagcaaaaagtattcaatatgaatatgagaataaaactattgaagtaaaaacaaataaagaaataatactatcagc

SEQ ID NO: 209828 - DNA, 856 bp, Unknown
  Bacterial polypeptide expressing nucleotide sequence isolated from the Sargasso Sea
aagcctgagaaaaatcttaataatcgttcaatacagcatgatagaggaaaagtaattggtggttcatcctcaatcaatggaatggtttatgtgcgaggtcacgctgaggattttaatggatggagtgaacttggttgcgagggttggagttatgctgatgttctgccctattttattagaatggaagcttattctggaggtgacaaagattatagaggtgcagaaggcccattaaagattcatagaccaacacccagagatcccatttcacttgcttttctggaatctggaaaagaaaaaaattatcagactacgaatgatataaatgggttttgccaagaagggtttggtgtttttgacagcacgattaacaaaggtaagcgctttagtgcagcagatgcttatttaaaaccggcaaaaaatagaaataatttaacaatactgtctgaatcccatgttaataagataattttcaaaaataaaattgctgttggtgttgaattttttgataaacaaaaaaacaaagtactggcttatgcttcaaaagaaataatattatctgcaggtgctattggaacaccacacatattaatgctatccggtattggcccagaacaacagttgagagaattaaatgttgatgttgtaaagaatagccctggtgtcggatcaaatctaaatgaccatccagattttgttctaaaatatcggtgcacgaaaccagtttcgctgtggcctaaaacaaagatgattccgagtattattcagggattacgatggtttttattctctgatggtatgtgtgcaagcaatcattttgatgtcattgcatgcattagatcaaatcattccgaag

SEQ ID NO: 209829 - DNA, 755 bp, Unknown
  Bacterial polypeptide expressing nucleotide sequence isolated from the Sargasso Sea
aggagtaggtaaaaatcttcaggatcacataatgatgagaccagtttataaagtaaaaaatataaaaacacttaataaaaaagttaatagtttttttggaaaaatgttaattggtttggaatatgttttttttagaaaaggtccaatgacaatgggagcaagtcagctttgtggatttgcaaaaagtgatccgtcgagagagactcccaacttacaatttcatgttcaaccaataagtacagataaattaggtggtgctaatttacataattttgatgcatttacaccaaccgtagctaatattagaccgacaagtagaggtgaagtatatttagcaagtgcagatactagagataatccaaaaattaaaatgaactacttgtccacgccagaggacagaaaagtaactgctgatggtttaaagttaataagaaaaatagttcttggaacaaagactttttcaaagtatatgcctgaagaatttagacctggtgttgatattcaagatgatgaagatttagtcaaagctgcaagtaactatgctcaaacaatttttcatcctgtaggaacatgcaaaatgggaaatgatgaaaattcagtcgttaatgatagattggttgcccatgggatagaaagcttaagaatcgttgacgcttctattatgccaaatattacttcgggaaatacaaatgctccaactataatgattgcagaaaaagcttctgacatgataatagaagatagtaagacatgat

SEQ ID NO: 209830 - DNA, 850 bp, Unknown
  Bacterial polypeptide expressing nucleotide sequence isolated from the Sargasso Sea
tctgattgtcggtgccggttccgccggatgtgtcctggcgacacgtcttagtgaagatccttcagtaaatgtggtgctccttgaagcgggaggcagtgaccgaagtattattgtgcagatgccttcggcgctttccgtgccgatgaatacccgtcgcttcaactggggattccagactgaagcagaacccggtctggatgggcgtgttcttgactgcccccggggattgggcctcggaggttcttcttcgattaacggcatggtctatgttcgtggacatgccgaggatatcaatcagtgggaatccagcggcgcggccggatggaattatgctgcttgtctgccttattaccagcgcgcggagacttggtatcgcggcgcagatcagtaccgggggggcagcggtccggtcggtgtctgcgcgggaaatgacatgaaactgaacccgttgtatcgggcgtttatcgatgcgggggttgaggcaggttatccctctagtgaggactacaacggatatcagcaggaagggttcggtcaaatgcacatgacggtggatcggggccgtcgtgcatcaaccagccgtgcctaccttaagcccgtgcgccaccggaagaatctgagagtgatcagcgggacgttggcgaccagggtgttgcttgagggcgaccgcgcggtgggcgtagcctatcaaaaagacggcaatgactttgaggtgtttgcccgagcggaagtcattctttccgcaggatctatcggctctcctgccttacttcagcgctccggcattggttctcccgtgatactcgaggcagccggaatcccggttgcgcaccccttggagggcgtcggc

SEQ ID NO: 209831 - DNA, 412 bp, Unknown
  Bacterial polypeptide expressing nucleotide sequence isolated from the Sargasso Sea
tattgataaagactccagaacttatgcaaaggtaaaactaaattatctttctacagatcatgatagaatggttgcagcaaaaggacttaaacttacaagaaaaattgtgatggagtctgaaacctttaaaaaatataaacctgaagaatatagacctggaattaatattaataatgatgaagagttagttaaagctggatcagattatacacaaacaatatttcatccagtaggaacatgtaaaatgggacaagatgatttggcagtagttgatgaaaaattaaaagtaaaaggtgttcagaatttacgagtgattgatgcttctattatgccaaacattacatctggtaacacaaatgcaccgacaattatgattgcagagaaaggtgcagatatgatactagaaagctaa

SEQ ID NO: 209832 - DNA, 894 bp, Unknown
  Bacterial polypeptide expressing nucleotide sequence isolated from the Sargasso Sea
gtcttcacaattaaagaattctgtaattttattagaagctggcccatccagtaaaacctggaaagttgatatgccaagtgcacttctatatgcaatgcatgatccaaaatataattggaaatattatactgagcctgagccgtttctaaataatagatctttatattgtccaagaggtaaaatgatcgggggatgctcttcgcataacggaatggttttcgctagaggtcataaagaggattttgatagatggtcttcaagtggtttaactaattggtcatatgaaaaagttttacctttttttaaaaaattagaaacttggtctcatgatagtaatgtaagaggtcaagaggggccattaaaagtaaataaatcaaacatagataaaaaatatcctctatttaaaaaagttttagaagctgcacaagaagctggatataaaatatttaatgactctaacagtattgataaggaaggttttggaacttttgatgtaacaataaacaatggtgttaggcaaagtgttgctaaggcatatttagagccaatccaaaatagaaaaaatctaagaataataaataatattgatgttaaaaaaattctttttaaaaataaaactgcaattggtgttgaaacgattaaaaaaaatataaccaataattatttagccaataaagaagttatactttgtgctggttcaattaattcacctaaaattcttcaattatccggaataggtaatgaaacgtatcttaaaagcttgggaatagaagttattaataatttagttggggtgggagaaaatttacaagatcatttagagatgtacattcagtataaatctaaaaaaaatgaaacattacatactctagcaacgaattatctttatcaagc

SEQ ID NO: 209833 - DNA, 520 bp, Unknown
  Bacterial polypeptide expressing nucleotide sequence isolated from the Sargasso Sea
atttttttcctcatttgttattgatcacggtttagttaatcctaattcacatggatatcaacttcatgcaagtccaaatcatccaaaaagtagaggacaaataactctaaattcttctaatccttatgattatccaaaaatattatttaattatttagaagatgaagacgatttaaaacaaacaagagaatgcattcatgttgcaagaaaaatcttatctcaaccttctttagcaaaacattcaggtaaagaagttggcccaggttctgataaacaaaacgatgatgaattagatgaatatattagatcaaaggcggaaactgcttatcacccatgtggtacttgcaaaatgggtgttgatgatatggcggtagttgatgaaaatttaaaagttaaaggaatacagaacttaagagttgtggatgcttcggttatgccggaaatacctagtgcaaacttaaatgcccctactctaatgattgctgaaaaagcctcagaccttatattaaattcaatttaa

SEQ ID NO: 209834 - DNA, 229 bp, Unknown
  Bacterial polypeptide expressing nucleotide sequence isolated from the Sargasso Sea
gttagtgaaagcaggtagcgaatatgcacaaaccatttttcatcctgttggaacatgtaaaatgggaagtgatgaaaacgcagttgttgatgataaacttagagttcacggaattaacaatttaagagttatagacgcatcgattatgccaaatattacatctggaaatactaattcaccaacaattatgatagctgaaaagggtgcagatatgatattgaatagctaa

SEQ ID NO: 209835 - DNA, 115 bp, Unknown
  Bacterial polypeptide expressing nucleotide sequence isolated from the Sargasso Sea
caaaatttaagagtgattgacgcatcgattatgccaaacataacatctggtaatactaatgctccgaccattatgattgccgaaaagggtgctgatatgataatgaacagctgat

SEQ ID NO: 209836 - DNA, 548 bp, Unknown
  Bacterial polypeptide expressing nucleotide sequence isolated from the Sargasso Sea
aatggaaacatttgattatataattcttggtggcggatcagctggatgtgttctcgcaaatagactatctgcaaattctaaaaataaagttttgcttcttgaagctggtggtaaagatacttatccatggatccatattccagttggttattttaaaacaatgcataatcctaaagttgattggtgttttaaaactgaacctgatgaaacaatgaataatagatcaattagatatccaagaggtaaaactctaggagggagttcttccatcaatggccttttatggataagagggcaaagtgaagattataatatttggcgccagttaggaaatacaggttggggttggaatgatgttctgccctattttttaaaatcagaaaataatgaattaggtaagggtgagtttcataatgacagtggtccaattacagtagcaaataaaaaaattaatttaaaattacttgatgaatttcaaaatgctgccgaagaatacggaataccaaaaacaaatgattttaatactggagataatactggtgtaggtt

SEQ ID NO: 209837 - DNA, 773 bp, Unknown
  Bacterial polypeptide expressing nucleotide sequence isolated from the Sargasso Sea
agattgtttaattgatcttcctggtgtcggtgagaatttacaagaccatatcgattatataacttcgcatagagttgatagctgggaattgatgggaagcagatcgcttaaattttggcttcgtgctccctttgagcttcttaaatatctattgtctcgcacaggaatgttttcatcttctttagcagaaggaggcgcattcatcaaaacaagtgaagagcttgagatgccagacattcaactacattttgtggtttctatggttgaagatcatggtagaacaaaactttggggtaatggttttagttgtcacgtctgtttattaaggccggaatcaaaaggtactgtaaaaatcccttctaaagatccaaccgctgctcctttaattgatccaaattatttgactgaagaacgagatatgaaagttttaataaaaggctacaaaaaaatgatggaaataatgactacagagcctctaaagaagtttaataatattcgtaatccaataaacattaatgatgacaaagctatcgaaacagccataagaacaagatcagacactatttaccatccagtgggaacatgtaaaatgggtatcgatgatatggctgtagtggatagctctcttagagttaaaggagtgcagaatctgcgcgtagttgatgcatcagttatgccaacacttgtaggcggcaatacaaatgctccaactattatgatcgctgaaaaagcagccgatttaattaaaaaacatggaagcagaagcttttaat

SEQ ID NO: 209838 - DNA, 865 bp, Unknown
  Bacterial polypeptide expressing nucleotide sequence isolated from the Sargasso Sea
tttcaaagaatggaagcaagccacggaggcaattcagagtttagaggaaaatcaggtcctctaaacataactcatggcaaaagagataacccattacacaatgcttttgtaaaagctaccgagcaggcgggatacacctacactgatgactacaatggctttcgacaggagggttttggaccagctgatatgaccgtttggaaaggctctcgtttttcaacagcaaaagcttatttaaagcctgcattagcgaaaaaaaatgtacaactcataacaaaggttctagtcgataaaataatttttcaagaagacaaagctaagggagttgaagtataccatcggggccaaaaaaaaacctttagtgcaaatattggtgtagttttatcagctggcgctatcaatagtccaacaattcttcaaagatcgggtattggagagggcaatgatttaaataatttggggatcaaggttattaaaaacttaccaggtgttggtaaaaacttacaagatcatttagaagtttattttcaagtcaaatgtttacaaccagtaacacttaataaatatttaaatcctttttctaaattacttatcggcatgcaatggatgtttcttaaaagtgggccaggtgcaacaaaccaatttgaaactcttggtttcattcgctctgataaaaacataccatatcctgatatacaatttcattttcttccagtcgcaattagatatgacggaaaggcgcctagcgaaggtcacggttttcaattgcatgtagggccaatgcgttcaaaatctagaggttttgtaaaattaaaatctagtgacccatttgattcaccaactataaaattcaattacatgtctc

SEQ ID NO: 209839 - DNA, 859 bp, Unknown
  Bacterial polypeptide expressing nucleotide sequence isolated from the Sargasso Sea
tactttgtgggaggagcatattggttctccatcaattttgatgcgctctggaatcggctataaggaatatttaaggactaaagatatagattgtttaattgatcttccaggagttggtgaaaatttacaagaccatatagattatatcacctcgcatagggtagatagctgggaattaatggggagtcgatctgtaaagttttggcttcgtgccccctttgagcttcttaagtatttactatttcgtacaggaatgttctcctcttctcttgcagaaggaggtgcatttattaaaacagatgagggactagaagttcctgatattcaactacattttgttgtttctatggttgaagatcatggcaggaaaaaactttcgggtaacggttttagttgtcatgtgtgtttacttaggcctgaatcaaaaggtacagtaaaaattgcttctaaagatccaagagctgcgccattaattgatccaaattatttaactcatgactcagatatgaaagtgcttgttaagggctacaaaaaaatgatggaaataatgagtactgaacctttaaaaaaatttgataatatacgtaatccaataaacgttaatgatgataaagctatcgaaaatgctataagagcgaggtctgatactatttaccatccagttggaacatgtaaaatgggtaacgatgatatggctgtagtggacagttctcttagagttaagggagctcaaaacttgcgcataattgatgcatcagttatgccaactttagtaggaggcaataccaatgctccaactattatgattgcagaaaaagcagccgatttaattaaagaatatggaagcagaagcctttaa

SEQ ID NO: 209840 - DNA, 381 bp, Unknown
  Bacterial polypeptide expressing nucleotide sequence isolated from the Sargasso Sea
gatggaagagtttgattacataattattggagcaggatcagctgggtgcgttttagcaaatcgattatcatctattgattcaaataaagtcctactgcttgaagcaggtgggaaagatacatatccatggattcacattccagtaggatattacaaaaccatgcataatccaaaaacagactggtgttttaaaactgagccagacgaaactatgaataacagatcaatcaactatccaagaggaaaaacattgggaggaagttcatcaataaatggattgttatatataagagggcaagaacaagattataatacttggaggcagcttggaaacgtagggtggagttggaaagatgttctcccctactttttaaaatctga

SEQ ID NO: 209841 - DNA, 790 bp, Unknown
  Bacterial polypeptide expressing nucleotide sequence isolated from the Sargasso Sea
taaaaattgcggaattgaagttatacacaattcaccaggagttggtaaaaatcttcaagatcacataatgatgagaccagtatacaaagtcaaaaatattcaaacattaaacaaaaaaattaatagtatttttggaaaaatgtctattggcctagaatatattctctttagaaaagggccaatgacaatgggagcaagtcaactttgcggatttacaaaaagcgattcttctatggaaacaccaaatttacaatttcatattcagccaatcagtactgataaattgggtgggagtaatttacataattttcatgcttttacaccaactgtagctaatattagaccaactagtagaggtgaaatatatatagctagtgacgacactagagatgatccaaaaatcaaaatgaattatttgtctactcctgaagacagaaaagtaactgcagatggattaaaacttataaggaaaatagttttaaaaactaaagcatttgaaaaatactgccctgaagaatttcgacctggcataagtattcaagatgacgaagagttggttaaagtagcaagcaatcatgctcaaactatttttcatcctgtgggaacttgcaaaatgggaaaggatgaaaattcagtagtagatgatagattagttgctcatggccttgaaaatttaagaatagttgatgcatctattatgccaaatattacttcggggaatactaatgctccaactataatgattgcagaaaaagcttctgacatgataatagaagatagcaagttatga

SEQ ID NO: 209842 - DNA, 289 bp, Unknown
  Bacterial polypeptide expressing nucleotide sequence isolated from the Sargasso Sea
atggaagaatttgactacatagtgattggtgctggttcagctggctgcgttctggctaatagattgacagcaaataaaaataataaagttttacttttagaagcgggtggaaaagatacttatccatggatacatataccagttggttattataaaacaatgcataatcctaaagttgattggtgtttccacactgaaaaagatgaaagcatgaataatagatctataagatatcctagaggaaaaactttaggtgggagttcttctattaacgggcttcttggataag

SEQ ID NO: 209843 - DNA, 199 bp, Unknown
  Bacterial polypeptide expressing nucleotide sequence isolated from the Sargasso Sea
tgcttatcacccgtgtggaacttgtaaaatgggagtagataacatggctgtagttgatgaaaatttaaaagttaaaggaatacaaaatttaagagttgttgacgcttctgtaatacctgaaattccaagcgcaaatttaaatgctcctactttgatgattgctgaaaaagcttctgatcttatcttaaataatctttag

SEQ ID NO: 209844 - DNA, 859 bp, Unknown
  Bacterial polypeptide expressing nucleotide sequence isolated from the Sargasso Sea
aactttgattatataataattggtgcgggatcagctggatgtgttttagccaatagactttcaacaaatccaaaaaataaagttttgcttttagaggcgggaggaaaagataactatccgtggattcatattccagttggctattacaaaacaatgcacaatccaaaagttgattggtgttttcataccgagaaggatgaaacaatgaataatagatcaataagatatcctagaggtaaaactttaggaggaagctcttcaattaatggactgttatggattagaggtcagagtaatgattatgataattggcgacaacagggcaataatggatggggttgggacgatgtattaccatattttataaaatctgaaaataatgagttaggtaaaaatgaatttcataatgatagcggtcccataatggttgctaataaaaagattaaattgaagatgctagaagaatttataaatgcatctgaagaaaaaggaatacctaaagttaatgattttaatacaggtgataacttcggtgtaggttactatcaatttactacaagtcacagtcataaaggattaaaattgagatgtagtgctgcaaaaggatatcttaaccctgtaaagaaaagatctaatcttaaaatcgttacaaacgcccttgttgaaaaaataaattttaatggaaaaaaagctgaaagtataaattattttattaaagataaatcaattgaagttaaagcaaataaagaaataattttatcagcaggatctattgggtctccacatatattacaggtttctggaattggagatagcaataaactaaaaaaatttggcataaatattattaatgaattga

SEQ ID NO: 209845 - DNA, 643 bp, Unknown
  Bacterial polypeptide expressing nucleotide sequence isolated from the Sargasso Sea
attaaaacaatttttagatacctctataatagaaaaggccctctatctctaagcctcaatcaaggaggtggatatattaattggaaatctctagatccttatccaaatattcaattatattttaatccactgacttattcggtatcttataaaaataaaaggccattacttaagactgataaatttagtggttttattataggttttaattcttgtaggcctaaaagtttaggggaagtaaagctaaggctggaaaatgaagaatattatccaagtataaatccaaattatttgagtgatgaaagagatattcatgatttatactcagcatttgattttattagaaaattttcatctaatatacatattaaaaatattattaaagagcccataaatatagacccaatcaaagcaagcgataaggaattgctcgatcattttaagtctatggcaaccactatttatcatccatgcggtacttgccgtatgagtgaagatattaactcaggcgttgtttctgataaattaaaagttcacggtttagaaaatttatggatagttgatgcatccattatgcctaatataacttcaggcaatatcaatgcgccagttatgatgatatcacatttatctagtaaataaa

SEQ ID NO: 209846 - DNA, 517 bp, Unknown
  Bacterial polypeptide expressing nucleotide sequence isolated from the Sargasso Sea
atgaataattacgattttataatacttggagctggatcagctggttgtgtgctagcaaacagattgtcagaaaatccagctcataaagttcttcttttggaggctggtggtaaagataattatccctggatacatatacctgtgggttattttaaaactatgcataacccaaaaacagattggtgttacaaaactgagcctgatgaaagtatgaacaatatttctattaggtatcctaggggtaaaactttaggaggaagctcatcaataaatggattgttatatataagaggtcaaaatagagattatgatgtctggcgtcagttaggaaatactggttggggatgggatgatgtgttgccttattttataaaagctgagaatcaagaaagaggtaaagacgaatttcatggagttgatggacctttagcagtttctgatcaaagaattcatctcccacttttagatgaatttcaaaacgcagctgaagagtttggaatacctaaaactaaagatt

SEQ ID NO: 209847 - DNA, 716 bp, Unknown
  Bacterial polypeptide expressing nucleotide sequence isolated from the Sargasso Sea
tatgtctaagaaaaattatgattttattgttgtcggtggcgggtcagctggttgcgttttggccaataggttgagtgaggacccgtcaaatgaagttctcgtcttggaagctggaagaatggattatatttgggacctttttattcatatgccggcagctttaacgatccctataggaagtaaaagatatgattggtgctatgagtctgatccagaaccttttatgaacgatagaagaattttccatgcaaggggaaaagttctagggggctcaagtagtataaatggcatgatttttcaaaggggaaacccactcgattatgaaagatgggcaaaagaccctgggatggaaacatgggattattttcattgcttgccttattttaaaaaaatggaaaattgcttggccggcggagatgcttatcgaggtgataagggtcctctcgaattggagcgtgggccaggagtgaatcctctttttggtgcctttttaaagtctgttcaagatgctgggtatgaattaacaagtgatgtgaatggagaaaagcaagagggctttgctctttttgatagaaatgtgaggaaaggaaaaaggttaagtgctgcaagggcctattaccatccagtaaaaagaagacctaatttagaattacgctgtcaggtccatacaactaagattttatttgaagggaaaaaagctattggaattgagtacc

SEQ ID NO: 209848 - DNA, 721 bp, Unknown
  Bacterial polypeptide expressing nucleotide sequence isolated from the Sargasso Sea
atgagaccagtttataaagtgaaaaatataaaaacattaaataaaaaagttaatagtttttttggaaaaatgctaattggaatggaatatgttttttttagaaaaggacctatgacaatgggggctagtcagctttgtggatttgcgaaaagtgacccttctagagaaactccaaatttacaatttcacattcaaccaataagtacagataaattaggtggtgctgatttacataattttgatgcttttacacctactgtggcaaatattagaccaacaagcagaggagaagtatacatttctagcgcagatacacgagatgatccgaaaattaaaatgaactatttatctacgccagaagatagaaaagtaactgcagatggacttaaacttattagaaaaattattcttgaaacaaaaacgtttgcaaaatatcaacctgaagagtttagacctggtacagaatttaaaaatgatgaagaattggttaaagcagcaagcaattacgcgcaaacaatttttcatcctgtaggtacatgcaaaatgggaaatgatgaaaattcagttgtaaatgatagactggttgctcacggtcttcaaaatttgagaatcgttgatgcatctattatgccaaatattacttctggaaatacaaacgcacccactataatgattgcagaaaaagctgctgacatgataatagaagatagtagaccatgat

SEQ ID NO: 209849 - DNA, 511 bp, Unknown
  Bacterial polypeptide expressing nucleotide sequence isolated from the Sargasso Sea
catggacactttttaggggcaaccaaaaatcatgattttcatgcattcactcctactgtttcaaatatcagaccaacaagcagaggacacgttagtattgtggataaagactctaggacttatgctaaaataaaacaaaactatttatcaactgaccacgatcgaatggttacagcaaaaggactaaaattaacgagaaaaattattatggagtctgaaactttcaaaaaatatacaccagaagagtatagacctggaacacatataactgatgatgaagaactagtaaaggaagcatcaaattatgctcaaactatatttcacccagtgggaacatgtaaaatgggtcaagatgaaatgtctgtagtagatgaaaaacttaaggttagaggtgttaataatttaagagttatagatgcatcaataatgccaaacatcacgtcaggaaatacaaatgcaccaacaataatgattgcagaaaaaggtgcagatatgatactagagcgataat

SEQ ID NO: 209850 - DNA, 619 bp, Unknown
  Bacterial polypeptide expressing nucleotide sequence isolated from the Sargasso Sea
atggtaaaaatcgatactgaatacgactatatcattgttggagctggatctgctggctgtgtgttagcgaatagattgacctcaaattcaaagaatactgtccttcttcttgaagcgggcggggaagacaaatccttaaccttaaagatgcctgctgctgttttatcgaatcttaaaagtactaaacacaattgggcatttaaaggtgaaccagaacccgaactaaatggtcgtcaacttcaacatgaccgtggtaaaactattggtggctcatcatcaataaatggaatggtctatataagaggaaacacacttgattatgagggttggagacaaatgggatgcgatggatggggatacgcagatgtcttgccatattttaagaaaatggaatgttacagtggaggaggggatgattttcgaggagagtcaggtccaataaaggtacatagaagcattcccaaagatccactttcactagcttttattaatgcaggaaaagaagcgggatataaagaaacagatgatataagcggattttgccaagaaggttttggtatatttgatcggactgtgttcaacggtgagcgatggagcgcatcaaaagggttaccttgat

SEQ ID NO: 209851 - DNA, 823 bp, Unknown
  Bacterial polypeptide expressing nucleotide sequence isolated from the Sargasso Sea
aaaaataatgacatgaacggagaagatcaagaaggatttggaatgtatgatattacaattcataaaggtcaaagggctagcgcttcgaaatattatctagaacctgcaaaaaaaagaaaaaatttaaaagtctttaccaattcttttgctgaaaggattatttttgaaggaaaaaaagcagttggaatagaggtaaatatcaaaaataaagtcacaaaggtttatgctaacaaagaagttgttttaagtggaggttcaatcaattcaccacaactattaatgttatcaggcgtaggacctgaaaaagatttaaaagataaaggaattaatgttgtacattctttagagggagtaggccaaaatttacaagatcatttagaaacctatattcagcaagaatgtaagactaaagatacactttattcttatgttaataaaatgaatatgcttaaaattggtcttcaatggtttctttcaaaaagtggtccatgttctacttcttttttagaagcaggtggtttctgcaaatcttcagaagacaaaagctatccaaatattcaatttcatttttttccagcatttgtaatcgatcatggattagttgatcctgacagacatggttatcaattacacgcaagtttgaaccaacctaaaagtagaggacatattaaattaaatagctcaaatccatacgattacccaaaaattcaatttaattatttaaaagatgaatatgatttaaaagaaacaattaagtgtgttcgtgtagctagaaagattttaagtcaagattcaatgaaaccatacgctggaaaagaatagg

SEQ ID NO: 209852 - DNA, 600 bp, Unknown
  Bacterial polypeptide expressing nucleotide sequence isolated from the Sargasso Sea
tgaccatgggagctagtcaagtttgtggtttcctcaaaagtgactcgtcaagagccactccaaatttacaattccatgttcagccaattagtaccgatatattaggagctactaaaatgcatgactttgatggcatcactcctaccatagcaaatattaggcctacaagtagaggagaagtaaatattgtaagtcatgatagtagagaaaatcctaaaattaaaatgaattacttatctactcaagaagacagagatgtagcagcaaaaagtttaaaaattgtaagaaagataatgttagagacaaaagcctttaaaaaatatgatccagaggaatatagaccaggtatacatattactgatgatgaagaattagttcaagctggcagcaaacatactcaaactatttttcatcctgttggaacttgtaagatgggtaataataacagctctgttgttagcgaaaaactgaaagttcatggaatagaaaatttgagagtaattgatgcatctattatgcctaatattacatctggtaacacaaatgctcctaccattatgattgcagaaaaggcatctgacatgatattgaataaatagt

SEQ ID NO: 209853 - DNA, 832 bp, Unknown
  Bacterial polypeptide expressing nucleotide sequence isolated from the Sargasso Sea
ggtctggaggagaaatttatatagaggagggaaagggcctcttaaagttaatagatcgaaaattgaagaaaaatttcctttatttaaatctgtaatcaatgcagctactgaggcaggttataatacttttgaggattgtaatggtttcaagcaagatggttttggaacttttgacgttacaatagatagtggcaaaagacaaggagtagtaacagcatacttagatgaagtgaaggattataaaaatcttttagtaaaacataatacagatgtatccaaaattattttcaaagataaaaaagctattggtgtggaaattaaaaaaaataataacactgaaatatactattgtaataaagaaattatactttcttcaggttgtataaattctcctaaaatattgcaactttctggtgttggggatgcaaaattattaagcaaaaatggtattgatgttgtaaaaaaccttcctggagtcggaagaaatttacaagatcatcttgagatttatattcagcataaatcaaaaacaaaggacactctgtataatttatcaacaagctattttactcaagctattgaaggaataaaatggtttttattaaaaaaagggatgttaactcactcgcatcttgaagtaggggggtttattaaaacatctgaaaaatataaacatcctaatattcatttgcatttttttccgtctttagtaattaatcacggattaattaacccttcatttgatggttttcaatttcatgcgagtcctaatcgtcctaaaagtagaggttttgttgaaattagatcaaataactatttagaaaaacctaaa

SEQ ID NO: 209854 - DNA, 700 bp, Unknown
  Bacterial polypeptide expressing nucleotide sequence isolated from the Sargasso Sea
acttacattcaacaagagtgtaagacgccgaatacattgtatacctatacaaaactaataccaaaagtattagcaggtattcagtggtttatgttcaggtctggaccatgttcaaaatcatttttagaagcaggtggatttgcaaaatcaaatcttcagagaaaggttgcaaatattcaatttcatttctttccatcatttgtaataaatcatggtctggttgaccctgatactcatggttatcaattacatgcaagtccaaatcatccaaaaagtagaggtcaaattacattaaattcttctgatccatatgaatatccaaaaatattatttaattatttgaaagaggatgaagatttaaaacaaactagagagtgtattcatgttgcaagaaaaatattatctcaacctgctctttcagaacatgctggaagagaaattggtcctggcacagatgcaaaatccgatgatgaattagatgattatataaaatctaaagcagatactgcttatcatccatgtggtacatgcaaaatgggagttgatgatatggctgtagttgatgaaaatttaaaagtaaaaggtattgaaaatttaagagtaattgatgcatcagtaattccagaaataccaagtgcaaatttaaacgcaccagtccttatgattgctgaaaaaggttcagaattagttcttaattgat

SEQ ID NO: 209855 - DNA, 758 bp, Unknown
  Bacterial polypeptide expressing nucleotide sequence isolated from the Sargasso Sea
accttgggtggtagttcttcaataaatggacttttgtggattaggggccaaagtaatgattatgataattggaaacaacaaggaaataaaggatggggatgggatgatgttttgccctactttgtaaaatcagaaaataatgagcttggtaaaagtaaataccatagtgactcaggtccaatcatggttgctaataagaagattaaattaaaaatgcttgatgaatttataaatgcagctgaagagagtggaattccaaaaactgatgattttaatacaggagataattttggagttggtttttatcaattcacaacatcacacagtaagtttggtcttaaattaagatgcagttctgccaaaggatatttaaatccggttaagaatagaaagaatctcaaaattgtaacaaatgcggtcgtacaaaaaattacttttgaaaataaaaaggcagttgctttaagctatatggttggagataaaatatttgaggtaaaatcaaacaaagaaataattttatcagcaggttcaattggatctccacatatattacaaatttcaggagtcggtgatgctcaaaaactgaaaaagcacggtatagatattaaaaaagatcttaaaggagtcggaaagaatctacaggaccatcttatgtttagacctgtttataaggtgaaaaacctaaaatctttaaataaaaaaattaatagtctatttggaaattttttaattggtttagaatatattttcaatcaaag

SEQ ID NO: 209856 - DNA, 734 bp, Unknown
  Bacterial polypeptide expressing nucleotide sequence isolated from the Sargasso Sea
aatggaaaattttgattatataattattggtgcaggatcagcaggatgcgttttagcaaacagactttcatctaatccaaataataaagttttgcttttagaagctgggggcaaagataactatccatggattcatattccagtaggctactttaaaacaatgcataatccaaaagttgattggtgttttaatactgaaaaagatgaaagtatgaataatagatcaataagatatcccagaggcaaaactttaggaggaagttcttcaattaatggtcttttgtggatcagaggtcaaaaagaagattacgatatatggagacaattaggaaatactggctggagttggaacgatgtattgccttattttttaaaatcagaaaataatgaattgggtaaaagtgagtttcataatgacagtggaccaattactgttgcaaataaaaaaataaatttaaaattacttgatgagtttcaaaatgctgcagaagaatatggaattcctaaaacaattgattttaatacaggtaataattttggaattggattttttcaattcactacaagttttaataaatctatattaaaattaagatgtagtgctgccaaaggttatttaaatccaataaaaaaaagatccaatttaaaaattatagtaaatgctcacgtgcaaaaaataaattttgaaggaaaaaaagctacaggagttagttattatattggtgataagctaa

SEQ ID NO: 209857 - DNA, 736 bp, Unknown
  Bacterial polypeptide expressing nucleotide sequence isolated from the Sargasso Sea
atgaataattttgattttataattcttggagctgggtctgccggatgtgttctagcaaatagattatcacaaaatcctaatcatagggttttacttttagaggctggtggtaaagacaattatccatggattcatattcctgtaggttattttaaaaccatgcacaatcctaaaactgactggtgttatagaactgaacccgatgagagtatgaataatatatctattagatatcctagaggtaaaactttaggtggtagctcttcaataaatggtttgctgtatatcaggggtcaaaatagagattatgatatttggagacaattaggaaataccggttggggatgggatgacgttttaccttattttataaaagctgaaaatcaggaaagaggtaaaaatgaatttcatggagtagatgggcccttgtcagtatcagatcaaagaatacatctgccacttttagatgaatttcaaaatgctgcggtagaatttggaataccaaaaacaaaagactttaatacaggagacaatcacggatgtggttattttcaagttaccgaaaaagatggatttagatgcagtacatctgttggatatttgaaaccagttaaaaataggaaaaatttaaaaataattactcatgcccatgtaaaaaaaattaactttgaaaataaaaccgcaaaagaagttgaattttggcaaggagatcaattaaaaaaagttcaagctaata

SEQ ID NO: 209858 - DNA, 547 bp, Unknown
  Bacterial polypeptide expressing nucleotide sequence isolated from the Sargasso Sea
tatggataaatttgattacataattattggtgcaggctcagctggatgtgtgttagctaatagattaacagccaatcctgatactaaagttcttttacttgaagctggtggtaaagacactaatccatggatccatattccaggtggttattttaaaaccatgcacaatccagatactgactggtgttttaatactgaaaaagaaccaaactgcgataacaggcaaatggtttatccaagaggaaaaacattgggtggaagttcctctattaatggaatgctttatattagaggtcaatcgaatgattataattactggagacaattaggtaatgttggttggtcgtgggatgatgttctgccctattttaaaaaatctgaagattttcaatttggagaaaatgagtttcatggttctggagggcctattgcggttgagaaaattagagcaacatttaaggttctcgatttatttttagaagctgctgaagaacacggttataaaagaactgatgattttaacaatggtgataatgaaggaatggga

SEQ ID NO: 209859 - DNA, 937 bp, Unknown
  Bacterial polypeptide expressing nucleotide sequence isolated from the Sargasso Sea
ttaccattttttaaaaaaattgagacatggtctgaaggagagaatgaatttagaggtggaaaaggaattttaccagtaaatcaatccaaaaaccaaaatccgttgtttagagcttttattaacgcttctgttgaagcagggtataaaataaataatgacatgaacggagaagatcaagagggatttggaatgtatgatattacaattcataaaggtcaaagggctagcgcttcgaaatattatctagaacctgcaaaaaaaagaaaaaatttaaaagtttttaccaattcttttgctgaaaggattatttttgaaggaaaaaaagctgttggaatagaggtaaatattaaaaataaagtcacaaaggtttatgctaacaaagaaattgttttgagtggcggttcaatcaattcaccacaactattaatgttatcaggtgtaggacctgaaagagatttaaaagataaaggaattaatgttgtacattctttagagggagtaggtcaaaatttacaagatcatttagaaacctacattcagcaagaatgtaagactaaagatacactttattcttatgttaacaaaataaatatgtttaaaattggtattcaatggtttctttcaaaaagtggtccatgttccacttcatttttagaagcaggtggtttctgcaaatcttcagaagacaaaagctatccgaatattcaatttcatttctttccagcatttgtaatcgatcatggattagttgatcctgacagacatggttatcaattacacgcaagtttgaatcaacctaaaagtagaggacatattaaattaaatagttcaaatccatacgattaccctaaaattcaatttaattatttagaagatgaatatgatttaaaagaaacaattaagtgtgttcgtgtagctaggaaaattttaagtcaag

SEQ ID NO: 209860 - DNA, 730 bp, Unknown
  Bacterial polypeptide expressing nucleotide sequence isolated from the Sargasso Sea
ttggggttttatgattatattattgtgggagctggatcggcaggctgtgtactagcaaatagattaagtgccacaaacgataaaagtgttttacttctcgaggcaggtggaaaggataattacttctgggtacacgtacccataggatacctttatactatgaataacccaaaaactgactggtgtcttgagacagaatctgagttgggtcttaatgggaggagtttatcttaccctagaggaaaagtccttggaggatgttcatctattaatggaatgatatatatgcgtggtcaaagtagagattatgaccattggaggcagttaggcaattatggttggagttgggatgatgttttaccatattttcttagatcggaggattatatccatggctctgatcagtggcatggtgaaggtggcgaatggagagttgaaaatcaacggttgtcatgggaaattttatcagcatttgaagaagctgctgtagaatttggaattccaaggacagatgactttaatcgcggtaataatcatggggttggatattttcaagttaatcaaaaacgaggagttcgttggagtgcatccaaagcatttttaaatcctgtcaaacatcgtaaaaatctaaccattattaccaaagctcatgcttcagcaataaattttaataataaaaagcgcgcctctagcgtcagttttgttaaagaaggttctttatatgaggcta

SEQ ID NO: 209861 - DNA, 984 bp, Unknown
  Bacterial polypeptide expressing nucleotide sequence isolated from the Sargasso Sea
tggtccaggattaggtaacagaataatgaattttcctcgaggtaaagttttaggaggaagctcatctatcaatggattactatatattcgtggtcaatcaaatgactacaattattggcgacaactaggaaatgttggatggagttgggaagatgtgttgccttattttagaaaagctgaaaattttgagcatggtgaaaatgaatttcatggaactggagggcctctttcagttagtaatcagagaatcaaacttaaattacttgatacttttattgaagcagcaaaagaatttggaatacctcatactacagactttaatacgggttcaaatgaagggtgtggatattttcatgttactgagaaaaatggtcttcgatgtagtacagcagttggctatcttaatcccgcaaagaaaagaggtaatttatcaattaaagttaaagctcacattaaaaacattatttttgatggattgaaagctgttggcgttcaatactggcaaaataatgcattaaaaaaaataaagtgtaataaagaaattatactctcagcaggagcaattggatctcctcatattctacaagcttcaggtattggttccccacaattactaaaatcaaaaggtataaagataataaaagataatgagaatgtaggtaaaaatttacaagaccatcttatgttacgtcctgtctatactgtaaaaaatattgatactctgaatcaagtatatcatagttattatagaaaatttttagtaggacttgaatatttattctttcgctccggggcaatgacaatgggcccttcccaattatgtggctttactaaaagtaatccttctttagaaactccagatttacaatttcatgtagctcctttaagtatggatactcttggtgcaactgcacttcatacttttcccgcctttactccaactattaccaatgttagacctacaagtagaggttatgttaatat

SEQ ID NO: 209862 - DNA, 452 bp, Unknown
  Bacterial polypeptide expressing nucleotide sequence isolated from the Sargasso Sea
accaaaaagtcgtgaaactattgaagtggtgtcaaagaattctagtgtttctccaaatattaggcccaactctttagcagatccaaatgacatgcaactaatgagagttggtttgcagttagcaagaaaaattttagaacagagtgcttttgatgatgtacggggagaagaaatttctcctggagcaattgtgttcggaaaagaagcagaagaggaatggataagagaaaatgccacaacagtctggcatccgactagtacttgtagaatgggagaggatgcctcagcggtagttaattcagaacttaaagtatttggaataaaaaatttaagagttgtggatgcttcaattatgccaactataacaacagggaatactgcagcccctactattatgatagctgaaaaggcatctgaccttataaaaaaggatcaaggtatagaactatagt

SEQ ID NO: 209863 - DNA, 257 bp, Unknown
  Bacterial polypeptide expressing nucleotide sequence isolated from the Sargasso Sea
agatctcttggatatcgcccgcaatatcgctcagactatctaccatccaaccagcacctgcaaaatgggatccgacgttacatcagtagtcgacgaacggctgcgggtccatggaatcgcaggattacgtgtagtagatgcctcgataatgccgaccatcgtgtccggcaataccaatgcaccaacaatcatgattgcggaaaaggcctccgacatgattatagaagacgctaaagaccattccgtcgctgcctaag

SEQ ID NO: 209864 - DNA, 924 bp, Unknown
  Bacterial polypeptide expressing nucleotide sequence isolated from the Sargasso Sea
accattaaaaatggaaaacgtgaaagtagtgcaactgcttttttaaaacctgttctgcatagatcaaaccttaaaactattttatatgcactggtggataaaattattttggaaggaaaaaaagcagtaggagtacagtatacaaaaggactaaatacaactcaagtatttgcaaaaaaagaagttattctctctgctggctcttttcagtcgcctcaattgttgatgctttctggaattggagatgtctctgatttaaaaaagcatggtataactatttcgcatgaattaaaaggagttggaaagaatttacaagatcatttattttacccgatatgtgcttatactaaaactcaagagggaattaatcattatatttctccatttcaacagcttggtgcggcttgggattattttgtaaataaaaaaggtgttttttgtgtaagtccactcgaaggaatggcattttttgatcttgatcaaaaaagcagtaaagtaaatttccaattgcatttttcaccaatatgcattggaaatgaatatgggtatgatgcatatgatatttatgattaccctagaacagacggattcacaatattaccaacattattgcatcctaagagtagaggttcagttagcctttgttcttctgacccaagagacgctccgatgattcagccaaattttttaagtgaaaaaaaagatctggatcagcttgtaaaaggggggaatttagtttttaaaataatgaagcataacgcaatgaaaaatcacataaaagcatatggtctgccccataatcaagattctgacgatcaacttgtcgaacatattaaaaaaacactggaaactgtatatcatcccgtaggaacatgtaaaatgggtgtagatccaatggcagtagttgatccttctttaagtgtt

SEQ ID NO: 209865 - DNA, 862 bp, Unknown
  Bacterial polypeptide expressing nucleotide sequence isolated from the Sargasso Sea
atggatgaatttgattttataattattggagcaggctcagcaggatgcgtgcttgcgaatagattaagtgcagattcaaataacaaagttcttttgttagaagcaggcggtaaagatacttatccatggatccatattcctgttggatattttaaaacaatgcataatccaaaagttgattggtgttttcatactgaaaaagatgaaacaatgaataatagatcaataagatatcctagaggaaaaactttgggaggaagttcctccatcaatggtcttctttggattagaggtcaaagtaatgattatgataattggagacaacaaggaaataatggttggggttgggacgatgtatttccttattttttaaaatcagaaaataatgaacttggtcctagtgaatttcataatgataaaggtccgataacagtttcaaataaaaaaattaatttagatatgttagaagaatttcaaaacgctgctgaagagactggaattcctagaactgaggattttaatacaggagataattttggtattggttattttcaatttaccacaagtcgaaataaattattaaaattacgatgtagtgctgctaaaggatatttaaacccagttaaaaatagatcaaatttaaaaattgtaactaaagcacatgtacaaaaaataaattttgagggaaaaaaagcaactggtgtaagctattatcaaaaagaaaaagtagtaacagttaaagctaccagagaagtaattttatcagctggttcgattggatcaccacatattttacaagtttcaggaataggagactcggaaaaattaaaaaaatacggggtaaaaactattcatgaataaa

SEQ ID NO: 209866 - DNA, 859 bp, Unknown
  Bacterial polypeptide expressing nucleotide sequence isolated from the Sargasso Sea
aatggtcttcgttagaggaaatagaaacgactatgaaagatgggaaaattttggattaaaatcttggtcctacgataaaattcttccatattttaaaaaaattgaaacctggtcgggtggtgaaaatcagtttagaggatcattaggcctgcttcctgtagatcaatcaaaaaatgacaatccattgttcaaagcttttttgggagctgcttcagaggcaggacatttaattaatgctgacatgaatggcgaatttcaagaaggatttggaatgtttgatactacaattcacaacggtgaaagggcaagtgtggctaaatattatttaaatcccgctaggaaaaggaaaaatttaagcgtcttcaccaattcatttgtggaaaagataatttttgatggaaaaaaagctataggcattcaagtaaaaattaaaaacaaagtgcagaaaatttttgcaaataaagaattaattttgagcggtggatcaattaattctcctcaattgttgatgctttcaggaatcgggaatgcaaaacacctaagggaaaaaggtgtagaagttattcaagaattaaatggtgttggaagaaatcttcaagatcacttagaaacttacataatgcaagagtgtaaaacaccagatactctatatacttatactaaaataattccaaaagtactcgcaggaatacaatggtttttatctaaatctggtccttgttcacaatcatatttagaagctggaggttttgcaaaatcatcacctgaaagggaaattgcaaatattcaatttcatttttttccatcatttgtaattaatcatggtttagtgaatccaagttcccatggatatcaattg

SEQ ID NO: 209867 - DNA, 444 bp, Unknown
  Bacterial polypeptide expressing nucleotide sequence isolated from the Sargasso Sea
tcagaccaactagcagaggtgagataaatatcgtaagtaatgacagtagaatttatccaaaaataaaaatgaactacctatcaacagatgatgacaggtacgtagcggcgcaaggattaaaacttgtaagaaagataatgcttgaaactaaaatttttaaaaaatatgaagctcaagagtttagaccgggattaaatattcaagatgatgaagagttagttaaagctggtagcgattatactcaaacaatattccatccagttggaacatgtaaaatgggtaaagatgaaaatgcagttgtttcagaaaaattgaaagttcatgggattgaaaatttaagagtaatagatgcttcaatcatgccaaatataacttcaggtaatacaaatgcaccaactattatgattgctgaaaagggtgcagatatgatattgaatgattaat

SEQ ID NO: 209868 - DNA, 867 bp, Unknown
  Bacterial polypeptide expressing nucleotide sequence isolated from the Sargasso Sea
aatgggagaagatcaagaaggctttggaatgtatgatgttaccattcataatggtgaaagagctagtgcttccaaatattatttaaatccagccagaaaaagaaataatttaaaagtatttactgaagcatttgttgagaaaattatatttgatggaaaaaaagcaattggaattgaagttaaaattaaaaacaaagttgaaaaaatatatgcaaataaagaaataatactcagtggtggatcaataaattcaccacaattacttatgctttctggggttgggccagcagatcacttaaaggataaaggaattgaagtaatacatgaccttaaaggggtcggtaaaaatctacaagatcatttagaaacctatattcaacaagaatgtaaaactccagatactttatattcatatgtcaacaaattgaatatggttagaattggaattcagtggtttctaaataaaagtggtccctgctctacatcattcttagaagctggaggattttgcaaatcatcagcagataaagagtatccaaatattcagttccatttctttcctgcatttgtaatagatcacggtacggtggatcccgatcgacatggatttcaattacatgctagtttaaatcaaccaaaaagtagaggacacattacattgaacagttcaaatccttatgattatccaaaaattcaattcaattatcttaaagatgattatgatcttaaagagacaattaagtgtattcacgtagcaagaaaaatacttagtcaaaactctatgcagccttatgctggaaaagaagttggtccaggtgaaaatgctcaaacagacagtcaaatcgaagaatatattagatcaaaagc

SEQ ID NO: 209869 - DNA, 493 bp, Unknown
  Bacterial polypeptide expressing nucleotide sequence isolated from the Sargasso Sea
aatgcatgattttgagggaataactcctactattgctaacataagacctacaagtagaggagaaattaatattacaagtaaagatagtagagataatccaaaaattaaaatgaactatctatcaactcaagatgatagagatgtagcagcaaaagctttaaaaatagttagaaaaattatgttggaaactaaaacatttaaaaaatatgaacctgaagaatataggcctggtataaatattgttgatgatgaagaattagttagagcagcaagtgaacattctcaaacaatatttcatccagttggtacgtgtaaaatgggcataggagatgatgctgtagttaatgaaaaactatctgtgcatggattagaaaatttaagaattgtcgacgcatcaattatgcctaatattacatctggaaataccaatgcaccaactataatgattgcagaaaaagcttctgatatgataattgaagacagtaaaatatga

SEQ ID NO: 209870 - DNA, 336 bp, Unknown
  Bacterial polypeptide expressing nucleotide sequence isolated from the Sargasso Sea
aatggaaaattttgactatgttattgttggagcaggttcagctggatgtgtattggctaatagattaacaaaaaattctaaaattaatgttttgttattagaggcaggtggtaaagattcaaatccatggatacacattcctggaggttatttcaaaacaatgcataacccagaaactgactggtgttttaaaactgaaaaagaaccaaactgcgataatagagaaatggtatacccaagaggaaaaactcttggcggaagttcatctataaatggaatgctatatataagagggcaatcaaatgactataattattggagacagctaggaaatat

SEQ ID NO: 209871 - DNA, 589 bp, Unknown
  Bacterial polypeptide expressing nucleotide sequence isolated from the Sargasso Sea
aatggtattttctaggagcagagacggtctatcaagcccggaccttcagttattatttacacctgccagctattcagaacgtacattgggtaaacttgaacgggaagatggcatgacggtggcagtttgcccggtcagaccagctagtcgaggaacaataatggctgcatcttctgacccatttgttaggccgaaaatacgacccaattatctttcccacccggatgacgtaagagtgttattagcgggtattcatcagacacgagaaattttttctcaatcagccctacagtattatagcagtagtgaaacagctcccggtgttcatatccaaacgtctgaagagcttgaaagttttgcaagggaacagggcagtatcatttatcatcctgtcagtacttgtaaaatgggtgaagatacgatggctgttgtggatcccagactgtgtgttcacggaataaaagggttgcgagtggtggatgcctcgattatgccgacagttacaaccggaaatacaaatgcaccaacaataatgattgctgaaaaagcatcggatatgatcatagaagatgcacgatcagctttatga

SEQ ID NO: 209872 - DNA, 484 bp, Unknown
  Bacterial polypeptide expressing nucleotide sequence isolated from the Sargasso Sea
gcgccagacctatgggggaaatggctttagttgccacatgtgtcttttaaggcctgaatcaagaggaactgtgaaaattgcaagtaaagatccattcgaagatcctttaatagatcccaactacctttcggttcaatctgatattgacactatggtagaaggatataaaagaatgatggaaattatgaatactgatccgttaagcaattataaaaatatcagaaaccctatagacattaataatgatcaggcaatagtcaatgctctaagagaaagatcagatacaatatatcatcctgtaggtacgtgtaagatgggcaatgatgaaatggctgtagtggatagtgagctcagagtgaaaggtgttgaaaatcttagggttgttgatgcttctattatgccgacgcttgtaggtggaaatacaaatgctccttcaatgatgattggtgaaaaagcagctgacatgataaggaactcaaaatga

SEQ ID NO: 209873 - DNA, 685 bp, Unknown
  Bacterial polypeptide expressing nucleotide sequence isolated from the Sargasso Sea
gaatgcaaaacaccaaatactctttacacttacactaaattaattccaaaagttcttgctggaatacaatggttcttgtctaaatctggcccttgttcacaatcgtatttagaggctggtgggtttgctaaatcttcaccacaaagagagatacctaatatacaatttcatttctttccttcttttgtaattaatcacggtttagtcaatcctagctcccatggttatcaattacatgctagccctaatcatccaaaaagcagaggatcggttactcttaattcttctgatccatatgaatatccaaaaattttatttaattacttagaggatgaagatgatttaagacaaacaagagaatgtattaatgttgcaagaaaaattttatctcaaccttctttggctaaacattcaggaaaagaaattggacctggatctgacaaacaaagtgatgaagagctaaatgaatatattagatctaatgctgaaactgcttatcatccatgtggaacttgcaaaatggggatagatgaaatggctgttgtcgatgaaaatttaagagttaagggaataaaaaatttgagagttgttgacgcttctgtgatgcctgaaattccaagtgctaacttaaatgcaccaacccttatgatttctgaaaaggcttctgatcttattttaaactaat

SEQ ID NO: 209874 - DNA, 851 bp, Unknown
  Bacterial polypeptide expressing nucleotide sequence isolated from the Sargasso Sea
tttaggaggaagttcatctattaatggattgctttatattcgtggtcaatcaaatgactacaactattggcggcagttaggaaatgttggatggagttgggaagatgtattgccttattttagaaaagctgaaaactttgagcatggtgaaaatgaatttcatggaactggaggacctctttctgttagtgatcaaagaattaaacttaagttacttgatacatttatagaagcagcaaaagaatttggaatacctcacactacagactttaatactggctcaaacgaagggtgcggttactttcatgttacagaaaaaaatggacttcgatgtagtacagcagttggttatcttaaccctacaaaaaaaagagagaatttatcaattgaaataaaggcgcacatcaaaaaaatcatttttgatggtttgaaagctgttggagttgaatactggcaaaataatgaattaaaaaaaataaaatgtaacaaagaaattatactttcagctggagcaataggatctcctcatattctgcaagcatctggcattggttcaccaaatttattaaaatcaaaagatatagaagtgataaaagataatgaaaatgttggagagaatttacaagaccatcttatgttacgtcctgtttacactgtaaaaaatattgatactctcaatcaattgtatcacagttattatagaaaatttttagtaggactagaatatttattctttcgttccggggcaatgacaatgggcccttcacaattatgcggttttactaaaagcaatccttctttagaaactccggatttacaattccatgtagctcccttaagtatggatactc

SEQ ID NO: 209875 - DNA, 703 bp, Unknown
  Bacterial polypeptide expressing nucleotide sequence isolated from the Sargasso Sea
ctcaatcaacagaacagcgcatggaatgcgattgcttcaggaaattatccgctttggcttgacgcgaagtggaagcctgtcattaccggcaggaattctggctggcttcgtacgcagccgtgagggcctcgtggggccggatattcaatatcacatcgccaatgcgagttttgccaacccggccaagcgtgtctttgacaagtttcccggcatgaccttcggcccctgtcaattgcggccagaaagccgcgggaccgttcacatcaaatccgccgatcctttcgccgcgccagcgatccgcccaaactatctggcaaccgccgaggatgcacgggtgcatgtcgccggcatgcgcattgcccgcaacatcatgcaaagcgagatcatagcgcccctcgtcgaccatgaaataaagcccggcaccaaacttaccagtgatgatgaattgctggcctatgcacgtgagacaggcgtcacgctctatcatccagtatcaacctgtcgaatgggaccatcacctgaacagggcgatgtggtcgatgcgcgcctacgcgttcacggcattactggtctgcgtgttgtcgatgcctcaatcatgccggaacttgtttcgggtaacaccaacgcacccaccatcatgatcgcagaaaaggctgcagtcatgatccgcgaggatgccaccgacacaagaaggacagcctga

SEQ ID NO: 209876 - DNA, 679 bp, Unknown
  Bacterial polypeptide expressing nucleotide sequence isolated from the Sargasso Sea
ctttaataaaaaaattaatagtttcataggaaatgtagccataggttttgaatatttgtttaatcaaagcggtccaatgactatgggagctagccaagtgtgtggttttgctaaaagtgattcatcaagagaaactcctaatttacaatttcatgttcaaccaatcagtactgatgttttaggtgcatctaaacttcataattttgatggaataactcctacagttgcgaacatcagaccaacgagcagaggtgagataaatatagtaagtaatgacagtagagtttatccaaaaataaaaatgaattatctatcaactgaagatgacagatatgtggctgcacaaggtttaaagcttgtgagaaaaataatgctcgaaacagaaacttttaaaaaatatgaacctgaagaatatagacctggtattcatatacaagataatgaagaattagttaaagcaggtagtgattatactcaaacaatttttcatccagttggaacttgcaaaatgggacaagaagaaaatgctgtagttaatgaccgactcaaagtccatggtattgaaaatcttagagtagtagatgcttctataatgccaaatattacatctggtaatacaaatgcaccaacaataatgattgctgaaaaagcatcagacatgatattaggaaacacataa

SEQ ID NO: 209877 - DNA, 910 bp, Unknown
  Bacterial polypeptide expressing nucleotide sequence isolated from the Sargasso Sea
gatgctgggtggctctagttctatcaatgggacggcgtttgtgcgcggacaggcgcaagactttgacacctgggcgcaaatgggcaaccgcggctggacctatcgagaagtcctacctttcttcaaacgaatggagacctatgaagctgcgggagacgacaactatcggggccgtgacgggccaatccgggtcaccgatccggaatggcggcatgatccgctgttttccacagtcattcaagcggctgccgaagttggtattccgcataacccggattacaacggcagtcatcaagatggtattgcgatgagccaggcgactatttcgaaggggcggcggatgagcacggcgcattgttacctcacgccgatccgtcaacgcattaacctcaatattattacccaagcgctgaccgaacgaataatactcgatggcacgcgctgtatgggcgttcgatattctgtcggtggtcgtactcaccaagcatatgcccgcgaagtcattatcagtggtggttccataaattcgccgcaactattggagatgtcgggaattgggcaacccgatctgctgcggaggcacggtattgcggttcgccatgaacttcccggcgttggcgaaaacctgcgagatcactttgcgcctcggacccgatgggaattcggggcgaaagggtacactttcaacgatcggggtcggggacttggactgatccaccaagtattgcgttacgtttttggcggcaaaggcatgtttggaatggttgccgccccgctccgtgctttcgtccgttcacgggatggtttggatgcacccgatttgctactcggatgggtcccaatgctctacgaagccaatcctgagcctaagatttcatctcagtctggcatgacttgctacgcacatccg

SEQ ID NO: 209878 - DNA, 639 bp, Unknown
  Bacterial polypeptide expressing nucleotide sequence isolated from the Sargasso Sea
ttttagctggtattcagtggtttttatctaaatcaggaccttgttctaaatcttttttagaagctggtgggtttgcaaaatcttcccccgagagaaaaatagcaaatatacaatttcatttttttccatcatttgttattgatcatggtttagttaatcctagttcacatggatatcaacttcatgcaagtccaaatcatccaaaaagcagaggacaaataactctgaattcttctaatccttatgattatccaaaaatattatttaattatttggaagatgaagatgatttaaaacaaactagagaatgcattcatgttgcaagaaaaatcttatctcaaccttctttagcaaaacattcaggtaaagaagttggcccaggttctgataaacaaaacgatgatgaattggatgaatatattagatcaaaggcggaaactgcttatcacccatgtggtacttgcaaaatgggtgttgatgatatggcagtagttgatgaaaatttaaaagttaaaggaatacagaacttaagagttgtagatgcttcggttatgccggaaatacctagtgcaaacttaaatgcccctactctaatgattgctgaaaaagcctcagaccttatattaaattcaatttaaa

SEQ ID NO: 209879 - DNA, 879 bp, Unknown
  Bacterial polypeptide expressing nucleotide sequence isolated from the Sargasso Sea
atcccaaacgattttgaaagatggtcatcttttggattagaggattggtcttataataaagtacttccttattttaaaaagattgaaacgtggtcggaaggagaaaatgagtacagaggcggaaatggaatactaccagtaaaccaatctaaaaataaaaatccattatttaaagcttttatagactcagctggcgaggctggctacaaaataaataatgatatgaatggtaaagaacaagaaggatttggaatgtatgatgttactattcacaaaggagaaagggcaagtgtatctaaattttatttaaattcagcaaaaaaaagaaagaatcttaaaatttttacaaaggcttttgtcgaaaggattatttttgatggaaaaaaggccattggtattgaagtgaaaattaaaaataaagtagagagagtttatgcaaataaagaaataattttaagtggtggtgcaataaattctccacaattactaatgctttctggaattggtccaagtcaacatttaaaagataaaggaattgatgtggttcacaacttagaaggagtaggtaaaaacttacaagatcatctagaaacttatgttcaacaagagtgtaaaactaaagacactttatattcttatataaataaaattaatatgataagaattggtattcagtggttcataaatagaagtgggccctgttcttcatcttttttagaagctggaggtttttgtaagtcatcccctgatagaaagtatccaaatattcaatttcatttttttcctgcttttgtgattgatcacggattaattgaacaagatagacatggctttcaaatacatgccagtccaaatcatcctaaaagtagaggtcatata

SEQ ID NO: 209880 - DNA, 862 bp, Unknown
  Bacterial polypeptide expressing nucleotide sequence isolated from the Sargasso Sea
ggatgtgttctggctaatagactttctgcaaatccaaataacaaagttcttttaattgaggcaggtggaaaagatacttacccttggatacatattccagttggttattttaaaacaatgcataatccaaaagtagattggtgttttaaaactgaaccagatgaaacaatgaataatcgatctataagatatccaagaggtaaaactttgggaggaagttcatctataaatggacttttgtggattagaggtcagaaagaagactatgatatttggagacaattaggtaacaaaggttgggcttgggatgatgttttaccttattttttaaaatcggaaaataatgagctaggaaaaagtgagtttcataatgacaaaggtcccattacagttgctaacaaaaaaataaatctaaaattattagatgagtttcaaaatgcagcagaagaatttggaataccaaaaacaaatgattttaatactggagataattttggaataggtttttttcaatttactacaagttttaataaaatgggattaaaattaagatgtagtgctgcaaaaggttatttaaatcctgttaaaaaaagatcaaatttaaaaatagaagttaacgcacatgttcaaaaaataaattttgaaggaaaaaaagctataggtatcaattattatgtaggagataagttaaatacagtaactgcaaataaagaaataattttatctgctggatcaattggctctccacatatcttacaagtatctggaattggtaatattcaaaaactaaaaaatcttgggatagaaattgtaaatgaatcaaatggtgttggtcaaaatttgcaagaccatttaatgttta

SEQ ID NO: 209881 - DNA, 596 bp, Unknown
  Bacterial polypeptide expressing nucleotide sequence isolated from the Sargasso Sea
tatgggtgcaagtcaactttgtatgtttgctaaaagtgatccatctttagagctaccagatttacaatggcatgttcagcccatgagtatggatacgttaggagcaacaaaaaatcatgatttccatgcattcacgcctactgtttcaaatatcagaccaacaagtagaggacatgttagtatagttgataaagactcgagaacttatgcaaaaataaaacaaaactatctatcaactgatcacgatagaatgattgcagctaaaggtcttaaattaactagaaaaattataatggagtcggaaactttcaaaaaatataccccagaagaatacagacctggcattcatataaatgacgatgaggaattagttaaagaagcctctaattatgctcaaactatttttcacccagttggaacttgtaaaatgggtcaagatgaaatgtctgtagtagatgaaaaacttaaggttagaggtattaataatttgagagttatagatgcatcaataatgccaaacatcacctcaggtaatacaaatgcaccaacaataatgattgcagaaaaaggtgcagacatgatactacaacaataat

SEQ ID NO: 209882 - DNA, 910 bp, Unknown
  Bacterial polypeptide expressing nucleotide sequence isolated from the Sargasso Sea
aatggaaaattttgatttcataattattggagctggttcagcaggttgtgttttagcaaatagatgtcaaaccaattctaataataaagttcttcttctagaagctggaggtaaagacagtaatccatggatacatattccaggtggatattttaaaacaatgcacaatcctgaaaccgattggtgttttaatactgaaaaagaaccaaattgcgacaatagagaaatggtttatccaagaggtaaaactttaggtggcagttcatccattaatgggatgctttatattagaggtcaatctaatgactacgattattggagacagcttggaaatgttggttggtcttgggaagatgtcctgccttactttaaaaaatctgaagactttcagtttggtgaaaatgaattccacggatcaggtggtcctataaaagttgaaaaaataagagcaactttcaaagttttagatttatttttagaagctgcagaggaatttggatataaaaaaactgatgattttaatagtggaaataatgaaggcatgggatattttccatttacagttaaaaatggctttagatgcagtactgctgtaggttatttaaatccagttaaaaaaagaaaaaatttaaaaattattactaaagctcatataaaaaatatcgaatttgaagataaaaaagcaattggagttaattattggaataataataatttagtaaaagttaaagcaaataaagaaatattattgagtgcaggaacgattggctctccacatattttacaagcatctggtattggtccagcagagttattaaaaaaaaataatattgaggttataaaagatcatcaaagtgttggtcgaaatcttactgatcatctaatgctaaggcctgtatataaagtaaaa

SEQ ID NO: 209883 - DNA, 576 bp, Unknown
  Bacterial polypeptide expressing nucleotide sequence isolated from the Sargasso Sea
aatggataattttgattatattattgttggtgctggttcagctggatgtgttcttgctaacagaatttcatctaatcccaaaaataaggtcttacttttagaggcagggggcaaagatactaatccatggatacatattcctggagggtattttaaaacaatgcataatccagagaccgattggtgttttaatacagaggaagagcctttctgtgacaatagaaaaatgacttacccaagaggaaaaacacttggaggaagttcttctattaatggaatgctttatattcgcgggcaatcaaatgattacaattattggagacagttgggaaatgtaggatggtcatgggatgatgtgctcccttattttaaaaaatctgaagattttcaatttggaaaaaatgaatttcatggttctggcggacctttaaaggtagaaaaaattagatctacttttaaagttttagatttatttttagaagcagcagaagaatttggatacaaaaaaactgatgattttaataatggcgataatgagggaatgggatatttccccttaacggtaaaaaatggttt

SEQ ID NO: 209884 - DNA, 512 bp, Unknown
  Bacterial polypeptide expressing nucleotide sequence isolated from the Sargasso Sea
aatggaaaattttgattttataattgttggtgcaggttctgcaggttgtgttttggcaaatagattgtcggctaatcctaataataaagttctacttctagaagcaggaggaaaagatagtaatccttggatacatataccaggcggctattttaaaacaatgcacaatcctgatacagattggtgttttaacactgaacaagaaccaaattgtgataatagacaaatgatttatccgagaggaaaaacgcttgggggaagttcttctattaatggaatgctatatataagaggtcaatctaatgactataattattggagacagcttggaaatgtaggttggtcctgggaggatgttctaccatattttaaaaaatctgaagattttcagtttggtgaaaatgaatttcatggatcgggtggtcctataaaagtagaaaaaatgagagccacgtttaaagttttagatttatttttagaagcagcagaagaatatggttataaaaggactg

SEQ ID NO: 209885 - DNA, 712 bp, Unknown
  Bacterial polypeptide expressing nucleotide sequence isolated from the Sargasso Sea
tttagaccagtctataagataaaaaatatcaaatctttaaataaaaagattaatagtttatttggaaatctactcattggattagaatttatttttaatagatctggaccaatgacaatgggggcaagtcaactttgtttgttcgcaaaaagtgatatatcgagagagactcctaatttacaatttcatgttcaacccataagtacagataagttaggtggagctgcacttcataactttcatgcttttacccccactgttgcaaatatcagacctacaagtcgtggtgaaataaatataattagtagtgatagtagagaaaaaccaaaaattaagatgaattacttatctacaaaggatgaccgaaaagttgctgcagatggattgagattggtgagggatattgtttttgaaactaaaacatttaaaaaatatgatccagaggaattaaggcctggttctcaatttaaatctgatgaggaacttgttcaagagggaagtaaatttactcaaactatttttcatcctgtaggtacgtgcaaaatgggtaatgatgaaaattcagtagttaatgatgaattaaaagttcatggattacaaaatttaagggttatagatgcatctataatgcctaatataacttctggtaatacaaatgcaccaacgataatgattgcggaaaaaggtgccgatatgatactaggaaagtaat

SEQ ID NO: 209886 - DNA, 689 bp, Unknown
  Bacterial polypeptide expressing nucleotide sequence isolated from the Sargasso Sea
tgctgcagaagctggctatgaaatttttgaagattctaatggctttaaacaagatggatttggaacatttgatgtaacaatagatggtggtaaaagacaaagtgtagcaagagcatatttagaagaagtaaaaaattctaataatcttaaagtaaaacacaaaacagatgtttcaaaaataatttttaaagataaaaaagctattggggtagagattaaaaataataataaaactgaagtatattattgtaataaagaaattatactttctgctggatcaataaattcaccaaaaatacttcaattatctggagtaggggatcctaaactattaaagcaaaacaatattgaggtaattcatgaattgcctggagttggaaaaaatttacaagatcatcttgagatatatattcagcataaatcaaaaacaaaagatactctttataacttatctactaattattttacgcaagctattgagggaatgaaatggtttttatttaagaagggaatgttaacatattcacatttagaattaggcggttttgtcaaaacttctgaaaaatataagcatcctaatattcagttacacttttttccttcattggttattaatcatggcctaacgaacccttcctttgatggctttcagtttcatgctagtcctaatcgtcctaaaagtagaggtt

SEQ ID NO: 209887 - DNA, 409 bp, Unknown
  Bacterial polypeptide expressing nucleotide sequence isolated from the Sargasso Sea
gagttcaggcgctgtatccgcttgagccgggaaattatgtcacagcctgctatggcaccatatcgtggaaaggagattcaacccggtgatgatcaaacaagcgacgcccaaattgatgcctttatccgggcgcacgcagaaagtgcttatcatccttgcggcactatgcgcatgggtgcagtggatgaccggtttgcggttgtcgatccgacatgtaaattcataggcattgaccggttgcgtatcgctgattcttcaatctttcctcggatcactaatggaaatctaaatgcgccatcaattatgacgggcgaaaaagcggctgatcatattttgggtcgcacaccattgccacgtgccaatgacacaccgttccaacacccagaatggcagcaaacacagcgctgaa

SEQ ID NO: 209888 - DNA, 552 bp, Unknown
  Bacterial polypeptide expressing nucleotide sequence isolated from the Sargasso Sea
aatggatatttttgattatataattattggtgctggctctgcaggatgtgttttggctaatagattgtcagcaaactcaagaaacaaggttttgctattggaagctggaggcaaggatagttatccatggatacatattccggttggctattataaaacaatgcataatccaaaagttgactggtgttttcatacagaaaaagatgaaagtatgaacaatagatcaataagatatccaaggggtaagactttgggtggaagctcatctataaatggtcttctttggataagaggacaaagtaatgattatgacaattggaggcagcaaggtaacactggatgggggtggaatgatgttcttccttattttataaaatctgaaaataatgaactaggtaagagtgagtttcatagtgacaatggaccgataatggttgcaaataaaaaaattaaattaaaaatgttggaagaatttataaatgctgcagaagaaaaaggtatacctaaagttatagattttaatacaggtaataattttggtgtaggttatta

SEQ ID NO: 209889 - DNA, 757 bp, Unknown
  Bacterial polypeptide expressing nucleotide sequence isolated from the Sargasso Sea
tctacccggcgtcggtaaaaaccttcaagaccatgttggagtagtcagtcaattttcgtgcaccaagccggtcactctccaccggtcggccggcgtcttggccagaactctagctggactgagatttctgctctttcgggatggtgacgcgtcttatccgccgactgccgcgggagccttttttcggtctagccaagataaagagcttcccgatatgcaaattcatttcgcgtcagttgccattaaagatgtccacgggcgagacgggataagtaagcaacacggtttttcaagtattgtttattgctgtagaccggaaagccggggctgtatcactttgagagatctggacccacacagtgcgccagcgatatatcccaattattttcagtcggaacaggatctgatagacacgagaaatggtttcagacaaactcggcgggtatttatgcaacctgtcttcgatgaatataggggagcacaacttaaacctgaagctgatttagatattaatgatgatcatcagctagatgagtggataaaaagaacaggagagactttgtatcaccccgttggtacctgcaaaatgggctcagattcgatggcggtgtgcaatgaacggggatctgtacataaaatgcaaagtctaagagtagttgacgcctctatcatgcccacgcttatcgcaggtaacacgaatgctccgactattatgattgcagaaaaaatcgcagaagacattcttaacgccaaataa

SEQ ID NO: 209890 - DNA, 766 bp, Unknown
  Bacterial polypeptide expressing nucleotide sequence isolated from the Sargasso Sea
gaataatagatcaataagatatcctagaggtaaaacattgggtggtagttcttcaattaatggtctgctttggataagaggacagagtagtgattatgataattggcgtcaacaaggaaataatggttggtcatggaacgatgtgcttccctattttttaaaatctgaaaataatgaaatgggtaaaagcgaatttcataatgatagtgggccaattatggtttcgaataaaaaaatcaatttaaaaatgttagatgaatttttaaatgcagctgaagaaaaaggaatacctaaagtagatgattttaatactggagataattttggtgttggtttttatcaatttacaacaaatcatagtggtagaggtttaaaattaagatgtagtgctgcaaaaggatatttaaatcctgttaaaaaaagatctaatttaaacataacggttaatgctcacgttcaaaaaataaattttgaaggaaaaaaagcaattagtgttagctactataaaggaaaaaaattgcatactataaaagtaaataaagaaattattttatcagcaggctcaattgggtcacctcatattttgcaagtttcgggcattggagattctagtaaattaaaaaaatatgggattaaccttattaatgaattaaaaggagttggaaaaaatttacaagatcatttgatgtttcgaccagtttataaagtaaaaaacctacaatcattaaacaaaaaaattaatagtctttttggtaatttgttaatt

SEQ ID NO: 209891 - DNA, 304 bp, Unknown
  Bacterial polypeptide expressing nucleotide sequence isolated from the Sargasso Sea
cagaaggcatttgatccctacagaggcgaacaaactaaaccaggaaaagatgtaaatgtagatgacgatgatcaattagatgagtggataaggaatacaggagaaactctctatcaccctgttggaacttgcaaaatgggagaggatgatatggctgttgtaaattccgaccttcaagtccatggtatttcaggattgagagttgttgacgcttccataatgccaactttaatcggtggtaatacaaatgctcctacaataatgattgccgagaaggcggcagattccattagacaatcataaa

SEQ ID NO: 209892 - DNA, 835 bp, Unknown
  Bacterial polypeptide expressing nucleotide sequence isolated from the Sargasso Sea
atggaaaattttgattttattattattggtgcaggatcggctggatgcgtcttagccaacagactttcaacaaatccaaaaaataaagttttacttttagaagcaggaggaaaggataattatccttggatacatatccctgttgggtattacaaaactatgcataatccaaaagttgattggtgtttttatacagagaaagatgaaagcatgaacaatagatcaataagatatcctagaggcaaaacattaggaggaagctcttcaattaatggacttctttggataagaggtcagagtaatgactatgataactggcgtcaacaaggtaataatggctggggctgggatgatgttttaccttactttataaaatctgaaaataatgaactgggtaaaaataaatttcatagtgatagtggtcccataatggttgcaaacaaaaaaattaaattaaaaatgcttgaagaatttataaatgctgcagaagagaaaggtattcctaaagttaatgattttaacactggtgacaattttggagtaggttattatcaatttacaacaagtcatagccatataggtctaaaattaagatgtagcgctgctaaaggatatttgaaccccattaaaaaaagaccaaacctaaaaattattacaaatgcacatgttcagaaaataaattttgaaggaaaaaaagctattagtttaaattatataaacaaagacaaatcaattgaagttaaagtaaataaagaaataattttatcagcaggatctatagggtctcctcatatattacaagtctctggtattggagatagtgaaaagttaaaag

SEQ ID NO: 209893 - DNA, 396 bp, Unknown
  Bacterial polypeptide expressing nucleotide sequence isolated from the Sargasso Sea
gagtttatccaaaaattaaaatgaattatttatcaactgacgaggacagaaaagttgcagcaactggtttaaaaataattcgtaaaattatgttagagacagagacttttaaaaaatatgaaccagaagaatatagaccaggtgctcatataactgatgatgaggaattggtaaaagaaggttcaaattttactcagacaatatttcacccagttggaacgtgtaaaatgggtcaggatgaaatgtcagttgttgatgaaaaactaaaagtaagaggtattgataatcttagagtaatagatgcctctataatgcccaatataacctctggaaacactaatgcacctacaataatgattgcagaaaaaggtgctgacatgatactagagcattaat

SEQ ID NO: 209894 - DNA, 496 bp, Unknown
  Bacterial polypeptide expressing nucleotide sequence isolated from the Sargasso Sea
ggagcaacaaaaatgcatgactttgacggaataactccaactgttgctaatgtgagaccaacaagcagaggggaaattaatatagcaagtaacgacagtagagataatccaaaaattaaaatgaattatttgtctactcaagatgatagagatgttgctgctaaagctcttaaaattgtaagaaatataatgctgaatactgaaacatttaaaaaatatgaacctgaagaatatagaccaggttcgcacattaccaatgatgaggaattagttaaagccgcaagtgatcatgcgcaaactatttttcaccctgttggaacttgtaaaatgggtaaaggagatgaagcagtagtaaatgacaaattgcaaacccatggtatacaaaatttaagagttgtagatgcatctattatgcccaatataacctcaggtaatactaatgcaccaacaataatgattgcagaaaaagcctcggacatgatacttaacaagtaat

SEQ ID NO: 209895 - DNA, 844 bp, Unknown
  Bacterial polypeptide expressing nucleotide sequence isolated from the Sargasso Sea
attggtgttatgaaaacacaatcagacaaaggaatcgcagatagatccataccctggccaagaggaagagttatgggtggatcaagttcgattaacggtcttctttacgttcggggtcagccacaagattttgacatctggtctcaacttgggtgtgctggttggtcttgggatgaagttttaccatattttaaacgttcagaaaattgggagggtactgacgaaactggattgagaggtaaagatggtcctctttctgtacaatcagctcgattgaaacgggatattgtagaccactgggtcgatgcagctgtccgcgcgggttatcaacgcaattatgattataatggctcgacacaagaaggagtgggtcactttcagttgactatgaagggtggtcgaaggtgttcatcagcagtggcatatataaagccgataaaaagtagaaaaaacttaagaattattacaaacgcccagacaaaaaaagtgaatattgttcatggcagagcaacatctgtcgacatagtcataaaaaacaagatggataggatttcagcaagaagagaaattattatttgtgctggttcaataggttcgccgcaaattcttatgctttccggaattggtcctggggaagatctcaaaaatttgggaatagaagttgtaagtgatttggacggcgttggtaaaaacttacaagatcaccttcaggcgcggcctgtatttaaaactgatttatctactataaatacggaaacaagtaattttcttaaaaaggctcttatagggcttcaatatatattaacccagcgaggccccatgactatggctgcaagcttgggaa

SEQ ID NO: 209896 - DNA, 598 bp, Unknown
  Bacterial polypeptide expressing nucleotide sequence isolated from the Sargasso Sea
tatggatagttttgattatgtaataattggagcaggatcagcaggatgtgtattagctaatagactttctgcaaatcctaataataaagttttattgttagaggctggtggtaaagacagttatccctggatacatataccagtcggatattataaaacaatgcacaatcctaaagtagattggtgttttcacactgaaaaagatgaaacgatgaataatcgttctattagatatcctagaggtaaaacattgggaggaagttcatctatcaatggtcttctttggataagaggtcaaagtaacgattacaataattggaggcaacaaggaaataaaggttggggctgggatgatgtcttaccttattttattaaatctgaaaataacgagctaggaaaagggaaatttcatagtgatagcggaccaattatggttgcaaataaaaagataaaattaaaaatgttagatgaatttatcaatgcagctgaagaaaaaggtatccctaaaacagaagattttaatacaggtgataattttggagttggattttatcaatttactacaagtcatagtcattttggtttaaagttaaggtac

SEQ ID NO: 209897 - DNA, 382 bp, Unknown
  Bacterial polypeptide expressing nucleotide sequence isolated from the Sargasso Sea
aatggataattttgattatattattattggcgctggatcagctggatgtgttcttgctaacagaatttcatctaatccaaagaataaagtcttacttttagaggcaggtggtaaagatactaatccatggatacatattcctggagggtattttaaaacaatgcataatcctgagacagattggtgttttaacacagaggaagagcccttctgtgacaatagaaagatgacttacccaagaggaaaaacacttggaggaagttcttctattaatggaatgctttatattcgagggcaatcaaatgattataattattggagacaattaggaaatgtaggatggtcatgggaagatgtgctcccttattttaaaaaaatctga

SEQ ID NO: 209898 - DNA, 601 bp, Unknown
  Bacterial polypeptide expressing nucleotide sequence isolated from the Sargasso Sea
catgacaatgggagcaagccaattatgtatgtttgctaaaagcgatccctcattagaattgcctgatttgcaatggcatgttcaacctatgagtatggatactctaggtgcaactaaaaatcatgattttcatgcgttcacacctactgtttcaaatattaaaccaacaagtagaggtaatgttagtatagtagataatgactccagaacttatgctaaaataaaacaaaattatttatctacagaaaatgatagattaatagcagcaaaagggcttaagttaactagaaaaattattatggagtccaaaacatttaaaaaatattctccagaggaatacagaccaggaattcatttaaatgataatgaagaattagtaaaagaagcatctaatcatgctcaaacaatatttcatccagtaggcacatgtaaaatgggtcaggatgagatggctgtagttgacgaaaaacttaaagtaaaaggtattaaaaatttgagagtaatcgatgcttccatcatgccaaatattacatcaggtaacacaaatgcgcctacaattatgattgcagaaaaaggtgcggatatgatacttacaaattaa

SEQ ID NO: 209899 - DNA, 481 bp, Unknown
  Bacterial polypeptide expressing nucleotide sequence isolated from the Sargasso Sea
tgcggtcaaatctaggggatttgttgccattaagaatgcagatccccaaaactctcctactataaagtttaactatctcagtcactctgatgacctcaaggattttcgaaatgcaattagaataacaagaaatattctagatcagcctgcttttaaagattatgcgggccaagaaattcaaccaaagccaacgttgaagtcaaatagggagttggatgaattcataaagtcgagcgttgagtcagcgtttcacccttgtggtacctgcaaaatgggggatcctgctgataaagagacggttgtaacacccgaatgcaaagttaatggtgtagaaaatctttattgtgcagattcttcaatttttccttctataacaaatggcaacctcaacgccccgagcattatggtaggcgaaaaagcagtagaccatattttaaataagcctttattaccaaaggagaatttagttccttataactag

SEQ ID NO: 209900 - DNA, 607 bp, Unknown
  Bacterial polypeptide expressing nucleotide sequence isolated from the Sargasso Sea
ggacctgttacaatgggtgctagtcaagtttgtggatttgttaaaagtgatatttcaagagctacacctaatctacaatttcatgttcaaccagtaagcacggatatacttggtgtttctaatatgcataattttgaaggtataacacccactgttgcaaatgtaagacccacaagcagaggtgaaataaatgtaataagtggtgatagtagaatttatcctaaaataaaaatgaattatttatcgacagaagatgatagaaatgtagcagcacttggccttaaacttgtaagaaaaattatgcttgaaactgaagtttttaaaaaatatgaaccagaggaatataggccaggtatacatataaatgataatgaagaactggtgaaagcaggaagtgaatatgctcaaactatttttcatccagttggaacatgtaaaatgggtaaagataatatgtcagtggtgaatgacaaactttcagttcatggtattaagaatttaaaagttattgatgcatctataatgccaaacattacttctggaaatacaaatgcgccaactataatgattgctgaaaaaggtgctgacttaatattaggaaaataat

SEQ ID NO: 209901 - DNA, 742 bp, Unknown
  Bacterial polypeptide expressing nucleotide sequence isolated from the Sargasso Sea
gaaaaaattttaccttacttcaagaaaatagaaacatggtcaggtggtgaaaatcaatatagaggttcttttggattacttcctgttaatcaatcaaaaaataataatccattatttaaagcttttttaagcgcttcatcagaagctggttataaaatcaatcaagatatgaatggagaaattcaagagggatttggaatgtttgataccacaatccataatggagaaagagcaagtgtatctaaatattatttaaatccagcaaaaaaaagaagaaatttaaatattttttctaattcttttgttgaaagaattatttttgatgggaaaaaagctgtaggtatagaagtaaaaattaaaaataaaattcataaattttttgctcaaaacgaaataatattaagtgggggttcaattaattctcctcagttattaatgctttcaggaatcggagatgcaaatcatttaaaagaaaaaggaataaatgttgttcatgatctaaagggtgtaggaaaaaatctccaagatcatctcgaaacatatattatgcaagaatgtaaaacgccagatactctctacaaatatacaaaattaattccaaaagtacttgctggaatgcaatggtttttatctaaatttggaccatgttctaaatcatttttagaagcaggagggtttgcaaaatcctctaatgaaagagaaataccaaacagtcaattccatttttttccttcatttgtca

SEQ ID NO: 209902 - DNA, 727 bp, Unknown
  Bacterial polypeptide expressing nucleotide sequence isolated from the Sargasso Sea
atggataaatttgattacataattattggtgcaggatccgcaggctgtgtcttggctaatagattaacagcaaatcctgatactaaagttcttttacttgaagctggcggcaaagataccaacccttggatccatattccagggggttattttaaaacaatgcataatccagatactgattggtgttttaatactgaaaaagaaccaaactgcgataacagacaaatggtttacccaagaggtaaaacattaggtggaagctcatctattaatggaatgctttatattagaggtcaatctaatgattataattattggagacaactaggtaatgttggttggtcatgggatgatgttctaccctatttcaaaaaatctgaagattttcaatttggagaaaatgaatttcatggttctggaggacctattgcagtcgagaaaattagagcaacatttaaagttctcgatctatttttagaggctgctgaagaacatggttataaaagaactgatgattttaacaacggtgataatgaaggaatgggatatttcccatttacaattaaaaatggctttagatgtagtacagctgtaggttatttaaatccagttaagagtagaaaaaatctaaaaatcataaccaaagcacatattaaaaatatagaattcgagaataaaaaagcaaaaaaagtaaattattggattgatggaaaagagttttctgttg

SEQ ID NO: 209903 - DNA, 730 bp, Unknown
  Bacterial polypeptide expressing nucleotide sequence isolated from the Sargasso Sea
gttggaaaaaatctacatgatcatttagaaactatatttcaacaagaatgtaaaactccgaacactttatatacatatacaaaactaattcctaaagttttagctggcattcaatggtttatgtttaaatcggggccttgctctaaatcttttttagaagctggtggatttgcaaaatcttcagctgaaagagaaatttcaaatattcaatttcatttttttccatcatttgtaattaatcatggtttagagcaacctaatgctcatggttatcaattacatgcaagtccaaatcatccaaaaagtagaggtcatattacacttaattcatctgatccttatgaatatccaaagatattatttaattatcttcaagatgaagatgatctaaaacaaacaagagaatgtattcatgttgcaagaaagattttatcacaacctgcccttgctgaacattctggaaaagaagtaggcccaggaattgaagctcagtcagatgatgagataaatgaatatattagatcaaaagcagacactgcatatcacccatgtggcacttgtaaaatgggaattgatgatatggcagtagtagatgaaactttaaaagttaaaggaactcaaaatttaagagttgttgatgcgtcagtaattccagaaattccaagtgctaatcttaatgcaccaacacttatgattgcagaaaaagcttcagatattattttaaattaag

SEQ ID NO: 209904 - DNA, 283 bp, Unknown
  Bacterial polypeptide expressing nucleotide sequence isolated from the Sargasso Sea
ttaaaacatgccgaaaaagaaattgggccaggatctgaaaaaaaatcagatgaagatttaaacgaatatattagatctaatgcagaaactgcttatcatccatgcggaacctgcaaaatgggtattgatgaaatggctgtagttgatgaaaatttaagagttaaaggaatacaaaatttaagaattgttgatgcttcagtaatgccagaaattcctagcgcgaatttaaatgcccccactcttatgattgctgaaaaagcttctgatcttattttaaattgaa

SEQ ID NO: 209905 - DNA, 336 bp, Unknown
  Bacterial polypeptide expressing nucleotide sequence isolated from the Sargasso Sea
aatggaaacctttgattatataattcttggtggtggatcagctggttgtgttctcgcgaatagactgtctgcaaatcctaaaaataaagttttgcttcttgaagctggtggcaaagatacttatccatggatccatattccggttggttactttaaaacgatgcataatccaaaagtagattggtgttttaaaactgaacctgatgaaacaatgaataatagatcaattagatatccaagaggtaaaactctaggaggaagttcttctatcaatggccttttatggataagaggacaaagtgaggattataaatatttggcgccaattaggaaata

SEQ ID NO: 209906 - DNA, 586 bp, Unknown
  Bacterial polypeptide expressing nucleotide sequence isolated from the Sargasso Sea
atgtgttttgcaaaaagtgatagttccagagccactccaaatttacaatttcatgttcagccaataagtactgatattcttggagcaacaaagctacataattttgaagggataaccccaactgtagctaatgttagaccgacaagcagaggtgagattagtatagtaagtaaaaatattaatgataatccaaaaattaaaatgaattacctttcaactgacgatgatcgatatgtagctgcacaaggactaaaattagtcagaaaaattatgcttgaaacaaaaacttttaaaaaatatgaacctgaagaatatagaccaggcttacacattcaagatgatgaagagcttgtaaaagctggaagtgatttcactcaaacaatatttcatccagttggtacctgtaaaatgggaagtgatgaaaatgcggttgtagatgatagattaaaagtccatggcataaaaaatttaagagtggttgatgcctctattatgccaaatattacatcaggtaatactaatgcaccaactattatgattgcagagaaagcttctgacatgatactagaagacaatctatcatgag

SEQ ID NO: 209907 - DNA, 737 bp, Unknown
  Bacterial polypeptide expressing nucleotide sequence isolated from the Sargasso Sea
taatggagaataccaagaaggttttggaatgtttgatactacaattcataacggtgaaagagcaagcgtagcaaagtattacttgaatcctataaaaagtagaaaaaatttaaatattttctctaatgcatttgtagaaaaaattatttttgatggaaaaaaagctattggtattgaagtaaaaattaaaggaaaaattgaaaaagtttatgctgaaaaagaactaatattgagtggtgggtcaatcaattctccacaattattaatgctttcaggtattggagactcaaatcatttaaaagataaaggaattaatgttgttaatgatttaaaaggtgttggaaaaaatcttcaagatcatttggaaacatacattatgcaagaatgtaaaactcctgatactctttacacatatacaaaattggttccaaaagtattagcaggaattcaatggtttttatctaaatctggaccatgttctaaatcatatttggaagctggaggttttgcaaaatcttcaccggaaagagaaataccaaatatacaatttcatttttttccatcatttgtaattgatcatggtttagttaatccaagttctcacggttatcaattacatgctagtcctaatcatcctaaaagtagaggatcaataactcttagatcttccaacccatatgattacccaaagatattatttaactatttagaagatgaagatgatttgagacaaacca

SEQ ID NO: 209908 - DNA, 608 bp, Unknown
  Bacterial polypeptide expressing nucleotide sequence isolated from the Sargasso Sea
tatggtaaaaatcgatactgaatacgactacatcattgttggtgctggatctgctggctgtgtattagcgaatagattgacctcaaattcaaagaattctgtccttcttcttgaagcgggtggggaggacaaatccttaaccttaaggatgcctgctgctgttttatcaaatcttaaaagtactaaacacaattggtcatttaaaggtgagccagaacccgaactaaatggccgtcaacttcaacatgaccgtggtaaaactcttggtggctcatcatcaataaatggaatggtctatataagaggaaactcacttgattatgatggttggagacaaatgggatgcgatggatggggatacgccgatgtcttgccctattttaagaaaatggagtgctacagtggaggaggggatgattttcgaggtgagtcaggtccgttaaaggtgcatagaagcattcccaaagacccactttcattggcttttatcaatgcaggaaaagaagcaggatataaagaaacagatgatataagcggattttgtcaagaaggttttggtatatttgatcggacagtattcaacggtgaacgatggagtgcatcaaagg

SEQ ID NO: 209909 - DNA, 1309 bp, Unknown
  Bacterial polypeptide expressing nucleotide sequence isolated from the Sargasso Sea
tttaaaacaatgcataatccaaaagttgactggtgttttcatactgaaaaagatgaaagtatgaataatagatcaataagatatcctagaggtaaaactttaggaggaagttcttcaatcaatgggcttttatggatcagaggtcaaaaagaagattacgatatatggagacaattaggcaatactggttggagctgggatgaagtattaccttattttttaaagtctgagagtaatgaattgggtaaaagtgaatttcataatgatagtgggccaattactgttgcaaacaaaaaaataaatttaaaattacttgatgagtttcaaaatgctgcagaagagtatggaattcctaaaacagttgattttaatacaggtaataattttggaattggtttttttcagttcaccacaagttttaataaatttggtttaaagttaagatgtagtgctgctaaaggttatttaaatccagtaaaaaaaagatctaatttaaaaattgttgtaaatgctcatgtacaaaaaataaattttgaaggaaaaaaaactacaggagtcaattattatataggtgataaactaaatacagtaaacgcaaaaaaagaagtgattttatctgctggttcaattggttctccacatattctacaagtatctggaattggtgatagtcataaacttaaaaatcttggaatagaaattgtaaatgagttaaatggtgttggtaaaaatttacaagatcatttaatgtttcgaccagtttacaaagtcaaaaatttaaaatctttaaatagaaaagttgagagtttgtttggtagatttttaatggggctagagtatatttttaatcaaagtggtcctgtaactatgggtgccagccaagtatgtggttttgttaaaagtgacgcctctagagctacgcctaatttacaatttcatgtttcgcctgttagtactgatatattaggtgttacacctatgcacgattttgaaggaattactccaaccgtagcaaatataagacctacaagcagaggagaaataaatatagtgagcaatgacagtagagtttatcctaaaatcaaaatgaattatttatctactgatgaagatagaaaagttgcagctcaagggttaaaaatagtaagaaaaataatgttagaaactgaaacatttaaaaaatatgaacctgaagaatataggcctggaactcacataacagaagatgaagagttagtcaaagcgggtgcagattttactcaaacaatttttcatcctgttggaacttgtaaaatgggtaatgatgata

SEQ ID NO: 209910 - DNA, 703 bp, Unknown
  Bacterial polypeptide expressing nucleotide sequence isolated from the Sargasso Sea
agaaacttatatacagcaagagtgtaaaacacctaatactttatatacttatacaaaattaatacccaaagtattagcaggtatacaatggtttctgtttaaatcaggaccatgctctaaatcatttttagaagctggtggatttgcaaaatcctcaccagatagaaaagttgctaatattcaatttcatttctttccttcttttgtaataaaccatgggctagtagatccagatactcatggttatcaattacatgcaagtcctaatcacccaaagagcagaggacaaattactttaagctcttctgatccatatgagtatccaaaaatattatttaattatttgaaagaggatgaggatttaaaacaaacaagagagtgtattcatgttgcaagaaaaatattatctcaacctgctctcttagaacatgctggcaaagaaataggtcctggctcagaagctcaaacagatgatgaattaaatgaatatataagatctaaagctgacacagcttatcatccatgcggaacttgtaagatgggtattgacgatattgctgtggttgatgaaaatttaagagtaaaagggataaaaaatttaagagtcatcgatgcatcagtaattcctgagatacctagtgcaaatttaaatgcacctgtcctgatgattgctgaaaaaggatcagaattagttcttaattga

SEQ ID NO: 209911 - DNA, 1005 bp, Unknown
  Bacterial polypeptide expressing nucleotide sequence isolated from the Sargasso Sea
gaaaattttggactaaaatcatggtcatatgataaaattcttccatattttaaaaaaattgaaacatggtcgggtggagaaaatcaatatagaggttctttaggtttgctcccagttaatcaatcaaaaaatagcaatcccttatttggtgccttcttgaaggcagcttcagaagcaggacataaacttaaccctgatatgaatggcgaatatcaagaaggatttggtatgtttgatactacaatacacaatggagaaagagctagcgtagcaaaatattatttagatcctataaaaaacagaaaaaattttaatgtttttagtaattcttttgttgaaagaattatttttgacggaaaaaaagcaattggaatagaagtaaaaattaaaaataaaattgaaaaagtttacgcaaacaaagaattaatattaagcggtggttcaattaattcacctcaattattaatgctttcaggagttggaaatgcagaccatctaaaagaaaaaggaataagtgttgttcataatcttagaggtgttggaagaaatcttcaagatcatttggaaacatatattatgcaagaatgcaaaacaccagatactctttacacatatacaaaactaataccaaaagtacttgctggtatgcaatggttcttatctaaatccggcccttgctctcaatcatatctagaagctggtggttttgcaaaatcttcttctgaaagagatattgctaatatacaatttcatttttttccatcatttgtaattaaccatggtttagttaatccaagttcacatggatatcagttacatgcaagtcctaatcaccctaagagcagaggctttattactttaaattcttcaaatccatatgattatccaaaaatattatttaattacttagaagatgaagatgatttaaaacaaacaagagaatgtattcatgtagcaagaaaaattctatcacaaccttctttagctaaacatgcggagaagaaa

SEQ ID NO: 209912 - DNA, 751 bp, Unknown
  Bacterial polypeptide expressing nucleotide sequence isolated from the Sargasso Sea
aatgctttttttggaagcagcttcagaagctggatataaaattaacccggatatgaatggaaagtctcaagaaggatttggaatgttcgataccacaattcataatggtgaaagagcaagtgttgctaaatattatttaaatccaataaaaaatagaaaaaatttaaatattttttctaattcatttgtagaaaaaattatctttgatggaaaaaaagccataggtgttgaggttaaaattaaaaataaaattaaaaaattttacgcagaaaaagaactaatattaagcggtggttcaattaattctccgcaattattaatgctttcaggaattggtgacgcgaatcatctaaaagaaaaaggaattggtgttgttcatgatttaaaaggtgttggaaaaaatcttcaagaccatttggaaacatacattatgcaagagtgtaaaactccagatactctttacacatatactaaattaattccaaaagtgtttgctggtgttaaatggtttttatctaaatctggaccttgttcacaatcatatttagaggctgggggatttgctaaatcatcaactgagagagaaacgccaaatatccaatttcatttttttccatcatttgttattaaccacggtctaattaaccctgattctcacggctatcaattacacgctagccctaatcatccaaagagtagaggttctgttactcttaattcatctgacccttaccattatccaaagatacta

SEQ ID NO: 209913 - DNA, 1072 bp, Unknown
  Bacterial polypeptide expressing nucleotide sequence isolated from the Sargasso Sea
tttggtgtgggatacttccaacaaacttcaaactaatggacgtcgactaagtgccgcaactgcatatcttaagaattgtaaacacagaaaaaatttaaagatcatagctaatacagcagtaaatagaataatttttgatggaaagaaagcgattagcgtccaggtcaagagtttgactgaaacgtatgaaattgaaagtagaaaagaaattattttatcggctggcgcagtaggttctccacacatcttaatggtttcgggagtaggatgtggtcatttgttaaaaaaacaagaattacatgtagtaaaagacttacctggtgttggtaaaaatcttcaagaccatctacaggctagaccaatattcaaatgcagggaaaaaacgttaaatactgaaacgaggaatttatttgaattaactcgaattgggttgcagtatcttttttttagaactggaccgatgtctatggcggccagcttaggagtggctttccttaaaactaacggtaacttaaaaaaccctgatattcaatttcatattcaacccttcagtatggataagccatcattaacaggactgcataggttcgatgcttttacgacgtcaataacccagctaagaccagaaagtgtgggcgagatatctattcgaactcctagaattgaagatgatccactaataacacctaattatttatcttctgataaagattgtaaagtccttcttaaaggagtgaaaatcgctcgaaagatagccatgaccgagcctttaaagcatatgatatcaaaagaattttcacctgggctgaatattgggtttaatgatgatgctgcggttttggattggattcgtgcaaatgctgttacgatttatcatcctactggaacttgcaaaatgggaaatgacgatttagcagtagtggatcagagactccgtgtacatggccttttaggtgtaagaatagttgacgcatctataatgccaaaaataacgtctggaaatacaaatgcccctacaataatgataggtgagaaggcctcagacatgatattgcaggatactaatatatga

SEQ ID NO: 209914 - DNA, 985 bp, Unknown
  Bacterial polypeptide expressing nucleotide sequence isolated from the Sargasso Sea
aagagagaatttgtcaattgaaattaaagctcacatcaaaaaaatcatttttgatggtttgaaagctgttggagttgaatactggcaaaataacgaattaaaaaaaataaaatgtaacaatgaaattatactttcagctggagcaataggatctcctcatattctgcaggcatctggcgttggttcaccaaatttattaaagtcgaaagatatagaagtaataaaagacaatgaaaatgttggggaaaatttacaagatcatcttatgttacgtcctgtttacactgtaaaaaatattgatactcttaatcaattgtatcacagttattatagaaaatttttagtagggctagaatatttattctttcgctccggggcaatgacaatgggtccttcacaattatgtggatttactaaaagcaatccttcattagaaactccagatttacaatttcatgtagctcccttaagcatggatactcttggtgcaactgcacttcatacttttcctgcctttactcctacagttactaatgtaagacctacaagcagaggttatgttcgcattgaaaacaatgatactagaatttatcctgaaataaatttaaattatctttctactaaagaagatatagatgtagcagtaagatccattaaacttacgcgtgatattgtattaaaatcaaatgcttttaaaccttatatgcctgaagaaatgagaccaggaaatgatttaagtgatgaagaaataattaaagaaatttctaaatatgccaatacattatttcatcccgtaggcacttgtaaaatgggaaatgacaacaaggctgttgttaatgacagattattagctcatggattagaaggtctaagaatagtagatgcttctgtaatgcctcatattacttcaggtaatacaaatgctcctactataatgatagcagaaaaagcagcggatatgattttggcagatcaaaaaaactag

SEQ ID NO: 209915 - DNA, 598 bp, Unknown
  Bacterial polypeptide expressing nucleotide sequence isolated from the Sargasso Sea
atggaaaaatcagtagacgccgattatttgatcgtcggggcaggatcggcaggttgtgtgctcgcaaaccgcctaactgaaaacaatgaaaatgcggtggtgcttatagaggcaggaggcgctgaccgttggtggaattggaaggtgcacatgccagctgcactggcatacccgcttgctgatgatagttacaattgggcttatttttcagaaccagaaagatatatgaacggccgaaaaatgtactgtccacggggcaggatttggggtgggtcgagttctataaatggaatggcttacgttcgcggtcatgcctttgattacgacagatggtctctttcgaatggttgtgcaggatggtcctattcggaatgcctcccttacttcaaaaaagcagaaagtctcgatatcggcggtgatgattatagaggtgaaacgggaccgcttcgagtaaccgcaggtaaaatggaaaatcctttatatcgagcttgggtagaagcgggaaggcaagctggatatccaataactgtcgatcccaatgggtatcagcaagaggggctaggcaggatggatatgacggttgggaatggcagaaggt

SEQ ID NO: 209916 - DNA, 597 bp, Unknown
  Bacterial polypeptide expressing nucleotide sequence isolated from the Sargasso Sea
tatgaataattatgattttataattcttggagctgggtcagctggctgtgtacttgcaaatagattatctgaaaatcctagtcataaagtccttcttttggaggctggtggcaaagataattatccatggatacatatacctgtaggttatttcaaaactatgcataacccaaaaacagattggtgttacaaaactgagcctgatgaaagtatgaacaatatctctattaggtaccctaggggcaaaactttaggaggtagttcatcaataaatggattgttatatataaggggccaaaatagagattatgatgtctggcgtcagttaggaaatactggttggggatgggatgatgtgttgccgtattttataaaagctgaagatcaagaaagaggtaaaaatgaattccatggtgttaatggaccactagcagtttctgatcaaagaattcatctcccacttttagatgagtttcaaaatgcagcagaggagtttggaatacctaaaactaaagattttaacactggcgacaatcatggatgtggatactttcaagttacagagaaagatggctttagatgtagtacatctgtagg

SEQ ID NO: 209917 - DNA, 1433 bp, Unknown
  Bacterial polypeptide expressing nucleotide sequence isolated from the Sargasso Sea
attgagcaaatcatacgattatataattattggcgcagggtcagctggttgtgttttggcaaatcgtttatcaaaaaacccaaaaaattctgttttattattagaagccggaggaccggatactaatatgaatattcatattccaggtgcctatttaaaaaatcataaaagcaaacaagattggggtttttggactgaagaacaagccaacgttttaaatcggaaaatatatttacccaggggtaaaactcttggtggaagtagttctacaaatgctatggcttatgttaggggcaatgcttctgattataataactggtcaaagctaggaaatattggttggagttataatgatgttttaccctactttaagcgttctgaaaaccatgctcaaattgatttaatggacagcggttatcactctagctcaggagaattagaagttacttttccaaccaagttcaagtcaccttatgtaaagtcttttattgatgcctgttcatcacttggaatttttccaaataaagattacaatggattaaaacaatatggagcaagcttagttcaaagtaccattaaaaatggaaaacgtgaaagtagtgcaactgcttttttaaaacctgttctgcatagatcaaaccttaaaactattttatatgcactggtggataaaattattttggaaggaaaaaaagcagtaggagtacagtatacaaaaggactaaatacaactcaagtatttgcaaaaaaagaagttattctctctgctggctcttttcagtcgcctcaattgttgatgctttctggaattggagatgtctctgatttaaaaaagcatggtataactatttcgcatgaattaaaaggagttggaaagaatttacaagatcatttattttacccgatatctgcttatactaaaactcaagagggaattaatcattatatttctccaattcaacagcttggtgcggcttgggattattttgtaaataaaaaaggtgttttttgtgtaagtccactcgaaggaatggcattttttgatcttgatcaaaaaagcagtaaagtaaatttccaattgcatttttcaccaatatgcattggaaatgaatatgggtatgatgcatatgatatttatgattaccctagaacagacggattcacaatattaccaacattattgcatcctaagagtagaggttcagttagtctttgttcttctgatccaagagacgctcctatgattcagccaaattttttaagtgaaaaaaaagatctggatcagcttgtaaaaggggggaatttagtttttaaaataatgaagcataacgcaatgaaaaatcacataaaagcatatggtctgccccataatcaagattctgacgatcaacttgtcgaacatattaaaaaaacactggaaaccgtatatcatc

SEQ ID NO: 209918 - DNA, 1297 bp, Unknown
  Bacterial polypeptide expressing nucleotide sequence isolated from the Sargasso Sea
tatggaaaattttgattatataataattggtgctggatcagccggctgtgttttggcaaacagattatcagcaaatccaaataataaaattctattacttgaagctggaggaaaagatacaaatccttggatacatatacctggcggatattttaaaacaatgcataaccctaatacagactggtgttttaagaccgaaaaagaacctaattgtgataatagagaaatggtttatccaagaggaaaaactctagggggaagttcctcaataaatggaatgttgtatataaggggacaatcaaatgactataattactggagacaacttggaaatgttggctggtcttgggaggatgttttgccctattttaaaaaatctgaagattttcaatttggtgaaaatgaatttcatggatccggtggtccaataaaagtagaaaaaattagatcaacttttaaagttttagatctttttttggatgcagctgaagaatttggatacaaaagaacagaagattttaatgctggaaataatgaaggaatgggctatttcccttttacaataaaaaatggttttagatgtagtacggctgtaggttatttaaatcctatcaaaaaaagaaaaaatcttaaaatagttacaaaagcacatactaaaaatatagaatttcaaagtaaaaaggctgttggtgttaactattggcataatgataaattggtaaatgttaaagcgaataaagaagtaattttaagcgcaggtactataggatcgcctcaaattcttcaggtatctggaataggacctggtgatttattaaaaaataataatgttgaagtattaaaaaatcatcctggagttggagcaaaccttactgaccatttaatgctaagaccagtatataaaataaaaaatttagaaacacttaacgatatttattatagcgcaataaagaaaataaaaactggtttacaatttttacttttaaggaaaggccctttaactgtgggtgcaagctatgtttgtggatttataaaaagcgattcaagcttagaaacacctaatttacaatttcatgtatctccagcaagtactgatttattaggaaaatcgtctcttcataaatttcctgcctttacaccaacgataaccaatgtaagacctactagcagaggatcaatagaaataaaatcatccgacactagaacttctccaaaaattaaaatgaattatttatccactgatgaagacagagaaattgctggaaaatctataaagatagttcgtgatattgttatg

SEQ ID NO: 209919 - DNA, 1374 bp, Unknown
  Bacterial polypeptide expressing nucleotide sequence isolated from the Sargasso Sea
tatggaaaactttgattatataataattggcgcaggatctgccggttgtgtccttgctaatagattatcttctgtcaaagaaaataaagttttattactggaagctggagataaagatacttatccctggatacatattccagtaggatattttaaaaccatgcataacccaaaagttgattggtgttttaaaactgaaaaagatgaaacaatgaataacagatcaataaggtatccacgagggaaaactttgggtggcagttcatcaataaatggacttctatggattagaggtcagagtaatgattatgataattggagacagcaaggtaatacaggatggggatgggaagatgttcttccatattttttaaaatcagaaaataatgaactaggaaaaagtgaatttcataatgataaaggtccaatacaagtttcaaataaaaagattaatttgaagatgttagaagaatttcaaaatgcagctgaagaaataggaataccaagaactaacgactttaatacaggtgataattttggtattggttattttcaatttactactagtcgtcaaaaattgttaaaattaagatgtagtgctgcaaaaggttatttaaatccagtaaaaaaaagatcaaacctaaaaataatagttaatgctcatgtagaaaaaataaattttgaaggaaaaaaagctattggtgtaaattattttattaatcgcaaattaaatacagtaaaagtaaataaagaagtaattttatctgctggttcaattggatcacctcatatcttgcaagtatcaggtattggtgacaatgataaattaaaaaaaaatggcatagaagtaatccatgaactaaaaggtgtggggaaaaatttacaagatcatttaatgtttagaccggtttataaggttaaaaatttaaaatctcttaataaaaaaataaatagtttatttggaaattttttaattggcttagaatatatttttaatcaaagtggtccaatgactatgggtgctagtcaagtatgtggatttattaagagcgactcatcaagagaaactcctaatctccaatttcacgttcaaccaattagcacagatgtattgggtgcaactaaaatgcatgattttgatggaataacccccactattgcgaacattaggcctacaagtagaggagaaattaatattataagtaaagatagtagagataatccaaaaattaaaatgaactatctatcaactcaagatgatagagatgtggctgcaaaagctttaaaaatagttagaaaaattatgttagaaacaaaaacatttaaaaaatatgaacctgaagaatataggccaggtataaatattattaatga

SEQ ID NO: 209920 - DNA, 414 bp, Unknown
  Bacterial polypeptide expressing nucleotide sequence isolated from the Sargasso Sea
catgaacgaattcgattatatcattataggtgcagggtcagcaggatgtgttttggcaaacagacttacaagtaaggaagagaataaagttttactgctcgaggctggaggtaaagataattatccatggatacacattccagttggatattacaaaacaatgcataaccctaaagttgactggtgtttccatacagaaaaagatgaaaccatgaataataggtcaattagatacccaagaggtaaaactttaggcggaagttcttctattaatggtcttttatggataagaggtcaaagtaatgactatgataattggagacaaatgggaaatagcggatggggatggaatgatgttctaccttattttttaaaatctgaaaataacgaattaggtaaaagtgaatttcataa

SEQ ID NO: 209921 - DNA, 1214 bp, Unknown
  Bacterial polypeptide expressing nucleotide sequence isolated from the Sargasso Sea
aatgaaatttgactacataattattggagctggtacagcaggatgtgttcttgcaaatagactaagtgaaaatggtaaatttaatgttgctttgtttgaagcaggtggatctagtgatatttggaaggttaatatgcctttagcaattctatatgcaatgcacgatccaaaatataattataaatattattcagaaccagagcctaatttaaataataggagattattttgcccaagaggaaaaatggtgggcggttgttctgcacataacggaatggtttatgttcgaggaaataaaaatgattatgagagatgggcttcatttggtctaaaatcctggtcttatgaaaatgttttaccattttttaaaaaaattgagacatggtccgaaggagagaatgaattcagaggtggaaatggaattttgccagtaaatcaatccaaaaaccaaaatcctttgtttggcgcttttattaacgcttctgttgaagcagggtataaaaaaaataatgacatgaacggagaagatcaagaaggatttggaatgtatgatattacaattcataaaggtcaaagagctagcgcttcaaaatattatctagaacctgcaaaaaaaagaaggaatttaaaagtctttaccaattcttttgctgaaaggattatttttgaaggaaaaaaagcagttggaatagaggtaaatatcaaaagtaaagtcacaaaggtttatgctaacaaagaagttattttaagtggaggttcaatcaattcaccacaactattaatggtatcaggtgtaggacctgaaaaagatttaaaagataaaggaattaatgttgtacattctttagagggagtaggtcaaaatttacaagatcatttagaaacctacattcagcaagaatgtaagactaaagatacactttattcttatgttaataaaataaatatgcttaaaattggtattcaatggtttctttcaaaaagtggtccatgttctacttcatttttagaagcaggtggtttctgcaaatcttcagaagacaaaagctatccaaatattcaatttcatttttttccagcatttgtaatcgatcatggattagttgatcctgacagacatggttatcaattacatgcaagcttgaaccaacctaaaagtagaggatatattaaattaaatagttcaaatccatacgattaccctaaaattcaat

SEQ ID NO: 209922 - DNA, 1311 bp, Unknown
  Bacterial polypeptide expressing nucleotide sequence isolated from the Sargasso Sea
tatgaaatttgattatataattattggcgctggatcagctggctgtgttctttcaaatagattgtcagaaaatcaaaacaacaaagttgctgtgttcgaagctggaggaacgagtgatatttggaaagtaaaaatgcctctagcattattatatacaatgcatgatccaaaatataattggaaatactattctgaaccagagccaaatttgaacaatagaagattgttttgccccaggggtaaaatgattggaggatgttctgcgcataatggaatggtttttgtaagaggcaacagaaatgattatgaaagatgggaaaattttggattaaagtcatggtcttacaaaaaagttttgccttattttaaaaaaattgaaacatggtctggtggagaaaatcaatatcgaggttcattgggtcctctcccagttaatcaatcaaaaaatgacaatcctttatttaaagcttttataaattcagcctcagaagctggacatgtagtaaaccctgatatgaatggagaagaacaagaaggatttggaatgtttgatacaacaattcatgaaggccaaagggctagtgctacaaaatattatttgaaccctgcaaaacaaagaaaaaatttaaatattttttctaattcatttgttgaaaaaattatttttgatggaaaaaaagcgataggtatagaagtaaaaataaaaaacaaagttgaaaaagtttatgctgaaaaagaagtaatattaagtggtggttcgattaattcacctcaattgctaatgctttcaggaataggtgatgcagatcatttaaaagagaaaggaattaatgttgttaacgatgtcaaaggtgttggcaaaaaccttcaagaccatttggaaacatatattatgcaagaatgtaaaacacctgacactctttatacttatacaaagctaattccaaaagttttagctggtattcagtggtttttgtctaaatcaggtccttgttctaaatcttttttagaagctggaggttttgcaaagtcttctcctgaaagagaaatagcaaacatacaatttcatttttttccatcctttgttattgatcatggtttagttaatccgagctcacatggatatcaattacacgcaagtccaaatcatcctaaaagcagaggattaataactctgaactcttcaaacccttatgattatccaaaaatattatttaattatttggaagatgaagatgatttaaaacaaactagagaatgcattcatgttgcaagaaaaatcttatctcaaccttctttagcaaaacattc

SEQ ID NO: 209923 - DNA, 1525 bp, Unknown
  Bacterial polypeptide expressing nucleotide sequence isolated from the Sargasso Sea
catgatagattttgattatgtgattgttgggggtggttcagcaggttgcgtattagcaaatagactgactgaagaccctaataaaaaagtatgcttaatagaaacaggtcctgtagataaaagtcctttaatacatgttcctggattgtttgcttttcttgtaaaagaaggtgaagagtcagaatacgcttatcagtataataccgaacctcaaaaaggatttaatagcgttactgtaactgaaggctccgcaagcatgcaggatactcttggaggctcctataaagttccagaatcacaccaagaaaaaagaagaggatttcaaccaagaggaaaaactttaggtggttctagttcaataaatggcatgctttatgtaagaggacatccttgggattatgatcactggtcatctcttggtaatgatggttggtcttatgaggaagtgctgccatattttataaaatctgaatgtaatgaaaggctacaagacgaatatcacgggaataatggtccgcttaacgtagcagaattaaggcatgataatccttttacaagattctttgttgaagctgcaaccaaacactatcctgcaaacaatgatttcaatggaaagaatcaagaaggtgtaggcctttatcaggtaactcaaaaaggtgggcaaagatgtagtgcagcagtggcttatctgaatccagtaaaagaaagaggaaatctaacaatctttaccgaaacaatagtagataaggttgaatttgatggcttaaaggctgttggagttagatgtatcaagaaagataaaactttctctattaaagcaagcaaggaagttttactttgcggaggagcttatggctctccatcaattttaatgcgttcaggaattggcaacaaagaatatttaagaaccaaggatatagattgtttaattgatcttcctggtgtcggtgagaatttacaagatcatatcgattatataacttcgcatagagttgatagctgggaattgatgggaagcagatcgcttaaattttggcttcgtgctccctttgagcttcttaaatatctattgtctcgcacaggaatgttttcatcttctttagcagaaggaggcgcattcatcaaaacaagtgaagaacttgagatgccagacattcaactacattttgtggtttctatggttgaagatcatggtagaacaaaactttggggtaatggttttagttgtcacgtctgtttattaaggccggaatcaaaaggtactgtaaaaatcccttgtaaagatccaaccgctgctcctttaattgatccaaattatttgactgaagaacgagatatgaaagttttaataaaaggctacaaaaaaatgatggaaataatgactacagagcctctaaagaagtttaataatattcgtaatccaataaacattgatgatgacaaagctatcgaaacagctataagaacaagatcagacactatttaccatccagtgggaacatgtaaaatgggtatcgatggtatg

SEQ ID NO: 209924 - DNA, 847 bp, Unknown
  Bacterial polypeptide expressing nucleotide sequence isolated from the Sargasso Sea
aatggaaaaatttgattttattataattggtgctggttctgcaggatgtgtcttagcaaatcgaataattaaaacaggaaagtataaagttttgttaattgaggcagggggtaaagataattacccctggatacatataccggtaggttattacaaaaccatgcataatcctaaaacagattggtgttttaaaactgagcctgatgagactatggaaaatgtctcaattccgtatccaagaggaaaaacattgggaggcagctcctcgatcaatgggcttttatatataagaggtcaagagcaagattatgacttatggagacaactcggaaatgttggttgggcttggaaagatgtcctaccttattttataaaagctgaagaccaagaaagaggtaaagaccaattccatggtgttggaggaccattagctgtatcagatcaaagaattaaattagatattttagatgtttttatgaatgcagctgaggaagttggtattccaaaggtaaatgactttaataaaggagataattttggatgtggttattttcaggttacagagagaaatggattaagatgcagcaccgcagttggttatcttaatcctataaaaaaaaataaaaacttaaaaattgaaacaaactgtcatgttcaaaaaattaatttcgacggaaataacgcagaaagcgttacttattcaaaaggaaataaatcttttactgttagagccgagaaggaaattttactttgcgcagggtcaatagggagcccacatatactccaaacatcaggtgttggagaagcttcaaaaataaaagattgggaattaatattgtcaaagatc

SEQ ID NO: 209925 - DNA, 1621 bp, Unknown
  Bacterial polypeptide expressing nucleotide sequence isolated from the Sargasso Sea
ttgaaaaattttgacatagttatagttggtgctggttcagctggatgtattgtaactaatcaaataataaataatactaatttaaaagttctcttaatagaggcaggtccaagtgataatcaccctgttattcaaattccacttggttatggaatgacttttttccataaaaaaatgaattggaatttttattctgaaaaacaaaaaaaattaaatgatagggaggtatattatccacgaggtaaagtaattggaggttctggatcaattaatgcaatgatatatgctcgtggcttaaaaactgattttgaaaactggaacctaaataaaagttggtcttgggaaaatatcaaagatacatatgaaaaaattgaagtaccaatcaaaggtaaatcaaaaaaaatccctataaataaaatacctgttaatgatgtaagcaatgagcatcattcaatattaaaaaattattttaatgcagcaaatgattttcattttcaatttaatcatcaattaaatagttctattgaggatcaagtaggtaattataatgttaatattattaatggttttagagcttcttcagcaaaaatttttctaaaaccaattaaaaatcatccaaatcttactattttaaccaacactgaagttttaaaattaaattatgaaaatagaaaaatatcaagcttaaaaattaaacacaaaaaaaaaataatagtaattaaacccaacataggcacaatattatctactgggtctataatgactccatatcttttacttaaatctgggattgggaaagcagaggaattacgtcaatacaatatacctgttcaatttaacagccctcatgtaggtaaaaactttcaggatcatttaggtttagactatttatataaaactcacatgccaacattaaatgacgaattaggcacttggactggcagaattaaaacagttttaagatacttttataatagaaaaggacccctatctttaagtctcaatcaaggaggtggatatattaattggaaatctctcgatccttttccaaatattcaattatattttaatccactgacttattcagtgtcttataaaaataaaagaccattacttaagactgataagttcagtggttttattataggctttaattcttgtagacctaaaagtttaggggaagttaagctgagacttgaaaatgaagaatattatccaagtataaacccaaattatttgagtgatgaaagagatattcatgatttgtactcagcatttgattttgtacgaaaattttcatctaataagcacattaaaaatattattaaagcgcccataaatatagacccaatcaaagcaagtgataaggaactacttgatcattttaagtctatggcaactaccatttatcatccttgtggtacttgccgtatgagtaaagacattaactcaggcgttgtttcagataaattaaaagttcacggtttagaaaatttatggatagttgatgcatccattatgccaaatataacttcaggtaatatcaatgccccagttatgatgttatcatatttatctagtaaattaattttagaagaactaaaacaatacaataaatgaa

SEQ ID NO: 209926 - DNA, 622 bp, Unknown
  Bacterial polypeptide expressing nucleotide sequence isolated from the Sargasso Sea
aatggataattttgattacattattattggcgctggatcagctggatgtgttcttgctaacagaatttcatccaatcctaaaaataaagtcttacttttagaggcaggaggtaaagatactaatccatggatacatattcctggagggtatttcaaaacaatgcataatcctgagaccgattggtgttttaatacagaagaagagcctttctgtgacaatagaaagatgacctacccaagaggaaaaacacttggaggaagctcttctattaatggaatgctttatattcgagggcaatcaaatgattataattattggagacaattagggaatgtaggatggtcatgggatgatgtgctcccatattttaaaaaatctgaagatttccaatttggaaaaaatgaatttcacggctctggtggacctttaaaagtagaaaaaattagatctacttttaaagttttagatttatttttagaagctgcagaggaatttggatataaaaaaactgatgattttaataatggtgataatgaggggatgggatatttccctttaacagtaaaaaatggttttagatgtagcactgcagttggatatttaaatccagtaaaaaaatag

SEQ ID NO: 209927 - DNA, 1672 bp, Unknown
  Bacterial polypeptide expressing nucleotide sequence isolated from the Sargasso Sea
gttgcttgcgaagcgttcaagcatctatcgaggacacagacccgtgaagaactcattcgattatcttgttgtaggcggcggctccgcaggcagcgtgctggcgtcgcgtttgaccgaagatcccgatgtgacgctgtgcctcttcgaagccggcggcacgggcgacggatggccggtcaacgttccggccgcgctggtgctgatgatcccgtcccggctgaacaactgggcgttcgagacggtgccgcagaaggggctgcaggggcggcgcggctaccagccgcgtggcaaggcgttgggcggatcgtcggcgatcaatgcgatggtgtacacgcgcggccatcatgccgactacgacgactgggccgcgcttggcaacgaaggctggggctggaacgacgtcttcccgtatttcaagcgaagcgagcataacgagcggctgggcaatgaatggcacgggcgcggcggcccgctgtgggtcagcgacctgaggacggacaatccattccaggcgcgttggctggacgccgcacgcgagtgcggcctgcccgtcaccgacgatttcaacggtgcggagcaggaaggcgtcggcatttaccaggtgacccagaagaatggcgagcgctggagtgcggcccgtgcgtatctttttccgcacatgcagacgcgcggcaacctgacggtggagacgggcgcgcaggtcaggcgcatcgtgttcgacggcaagcgggccgttggcgtcgaagtcacgcgtggcgggaatgtcgagacggtctgggcgaagaaggaggtgatcctttccgccggcgcgtttcaatcgcctcagttgctgatgttgtccggcgtcgggccgaaggacgaactcgctcgtcacggaatccaggtcgtcgccgatctcccgggcgtgggagagaacctgcaggatcacccggacttcgttctcagctacaagacgaacagcctggatgcgctcggcgtatcggtacgcggcgcgatcaagacgctgggcgacatccggcaataccggaactcgcgaaccggtaccctgaccaccaactttgccgaaggcggcgcattcctgaagacgcgtcccgatctggaacgaccggacgtccagatgcacttcgtcgtcggtcccgtcagcgatcacggaaggaaggtacggctcggccacggtctttcctgtcacgtgtgcctgctgaggccgaaaagccgtgggtcggtcaagctgcgaagcgccgatccgctcgatgcgccgttgatcgacccggccttcctcgaacacgatgatgatctcgaggtcctggtcgagggctacaagctgacccggcggttgatggcggcaccggcgatggcccggttcgtgacggaggacctgttcgcgtcccggtcgcgatcggacgacgacattcgtgcgttgctgcgcgagcgcaccgacaccgtgtatcacccggtcggaacgtgccgcatggggaacgacgcgctcgccgtcgtcgattcccagttgcgcgtacggggaacggaaggcttgcgtgtggtggacgcatcgatcatgccgacgctcgtgggcgcaaacacgaacgcgccgacgatcatgatcggcgagaaagcctccgacctgattcggaggatctcccgattcccgtccgcgatgccggaaaccgcggtttga

SEQ ID NO: 209928 - DNA, 607 bp, Unknown
  Bacterial polypeptide expressing nucleotide sequence isolated from the Sargasso Sea
ggtcctatgacaatgggcgcgagtcaagtgtgtggatttgtaaaaagtgatccatctagagcaactcccaatcttcaattccatgttcaaccaattagtactgatattttaggcgcatctaagatgcacgactttgacggaattactccaacagttgctaatgtgagaccaacaagtagaggagagataaatattgctagcaaagacagtagagacaatccaaaaataaaaatgaattacctttctacacaagaagatagagatgtagcagcaaaagcactgaaaattgtaagaaatataatgatgaatactaaaacttttaaaaaatatgaaccagaagaatatagacctggaattcacattactgataatgaagaattagtaaaagctgcaagtgatcatgctcaaactatttttcaccctgttggaacttgtaaaatgggaaaaggagaagaagcagtagttaatgataaattacaagcccatggtctagaaaatttgagagttgttgatgcttctataatgccgaatataacttctggaaacaccaacgctccgacaataatgattgcggaaaaagcctctgacatgatattgaataaataat

SEQ ID NO: 209929 - DNA, 421 bp, Unknown
  Bacterial polypeptide expressing nucleotide sequence isolated from the Sargasso Sea
atggatgaatttgattttataattattggagctggttcggcaggatgtgtgcttgcaaatagattaagtgcaaatccaaataataaagttcttttattagaagcaggtggcaaagatacttatccatggatccatattcctgttggatattttaaaacaatgcataatcctaaagtagattggtgttttcatactgaaaaagatgaaacaatgaataatagatctattcgatatcctagggggaaaacattgggaggaagttcttctatcaacggacttctatggattagaggtcaaagtaatgattatgataactggaggcaacaaggtaatgctggttggggttgggatgacgttttcccttattttttaaaatcagaaaataacgaacttggcccaaacgaatttcataatgacaaag

SEQ ID NO: 209930 - DNA, 187 bp, Unknown
  Bacterial polypeptide expressing nucleotide sequence isolated from the Sargasso Sea
ctggttggaacatgtaaaatgggaaaagatgaaaattctgttgtagatgaaaaattaaaagtacatggtgtagaaaatctaagagtaatagatgcttctataatgcccaatataacttcgggtaatactaatgcacctacaataatgattgcggaaaaaggtgcggatatgatacttagaagttaat

SEQ ID NO: 209931 - DNA, 499 bp, Unknown
  Bacterial polypeptide expressing nucleotide sequence isolated from the Sargasso Sea
ttaggagcatcaaaattacatgattttcatggaattactccaacagttgctaatatcagaccaacaagtagaggtgagataaatatagtaagtaatgatattagaatatatccaaagattaaaatgaattatctctcaacagatgatgataggtatgtagctgctcaaggattaaagcttgtaagaaaaataatgctagagacagaaacttttaagaagtatgaaactgaagagtatagacctggattacatattcaagatgacgaagaattagtaaaggctggcagtgattatgcacaaactatttttcatcctgtaggaacatgtaaaatgggaaatgacgatagttctgtagtatctgatcaactcaaagtacatggtgtttcaaatttaagagttatagatgcctccattatgccaaatataacgtcaggaaatacaaatgcaccaaccataatgattgctgaaaagggtgcagatatgatattgaatggctaat

SEQ ID NO: 209932 - DNA, 340 bp, Unknown
  Bacterial polypeptide expressing nucleotide sequence isolated from the Sargasso Sea
tgcagctaaaggtctaaaattaactagaaaaataattatggagtctgagacttttaaaaagtattcaccagaagaatatagacctggaataaacattaatgatgacgaagaattagtaaaagaagcttcgaattacgctcaaacaatttttcatcctgttggcacttgtaaaatgggtcaagacgaaatgtcagttgttgatgaaaaactaagggttagaggagtgagaaatctaagagtgattgatgcatctataatgccaaatattacgtctggcaatactaatgcacctacaataatgattgcggaaaaaggtgcagacatgatacttaatcattaa

SEQ ID NO: 209933 - DNA, 303 bp, Unknown
  Bacterial polypeptide expressing nucleotide sequence isolated from the Sargasso Sea
ttttagcacaaccttctttggcaaaacactcaggaaaagaaatcggtccaggtgcagaagcgcaatcagatgaagagttgaatgagtatattagatctaaagctgaaactgcttaccacccatgtggtacttgtaagatgggtatagacgatatggctgttgttgatgaaaatctaaaagtaaaaggaattcaaaacttaagagttattgatgcatctgtaatgcctgaaataccaagcgctaacttaaatgcaccgactttgatgattgctgaaaaaggtgcagactcaattttaaattaat

SEQ ID NO: 209934 - DNA, 166 bp, Unknown
  Bacterial polypeptide expressing nucleotide sequence isolated from the Sargasso Sea
atgggtgatgacgacatggcggttgtaaataataatttacaggtgcacggccttgaaggtttgcgggttgtagacgcttcaatcatgcctaccttgattggaggtaatactaatgcacctacaatcatgattgccgagaaggcagcagattccattagacaataat

SEQ ID NO: 209935 - DNA, 211 bp, Unknown
  Bacterial polypeptide expressing nucleotide sequence isolated from the Sargasso Sea
tcacccttgtggtacatgtcgcatgagtagagatattaattcaggtgtcgtatctgaaaaactaaaagttcatggtatagataatttatggatagtagatgcctctattatgccaaatattacatcaggaaatattaatgctcctgttatgatgttatcatatttatctagcaaaattattttagaagaattaaaacaaaaatataaatga

SEQ ID NO: 209936 - DNA, 271 bp, Unknown
  Bacterial polypeptide expressing nucleotide sequence isolated from the Sargasso Sea
aatgagaccaggaaaagatttgaatgatgaagaaattattaaagaaatttctacatatgccaatacgttatttcatcccgtaggcacatgtaaaatgggaaatgacaacaaagctgttgttaatgacaaattattagctcatggtttagaaggattaagaatagtagatgcttctatcatgcctcatattacttctggtaatacaaatgccccaactataatgatagcagaaaaagctgctgatttgattttagcagatcaaaaaaactag

SEQ ID NO: 209937 - DNA, 1099 bp, Unknown
  Bacterial polypeptide expressing nucleotide sequence isolated from the Sargasso Sea
ctctgagcctgatgagggcagtgggtttcgccgcatcgaaatacctaggggcaagttattaggcggctctagctcgatcaatggcatggttttcgtaaggggtcagcgacaggattacgatcattgggcgcaacttggaaataatggatggagctacgaagaagtactcccctatttcaaaaaaatggaagactataaaggccctaactcttcatatcgaggaaaatctgggccattgatcgtaactgacccgatggaaaaaaatgatttctacgatgcaatgtttaaaggcgcggaagaaataggggtacagaaaaacccggactacaatggggcgcaacaggagggtgttgggatgacccaagcaacaatctggaagggcaaaagacaaagcaccgcaatttgttacttaaatcccgtaaaaagccggcaaaatctgactgttttaacagaggcatttgctgaagaattaattatccaaaacaataagtgtattggtgtaagacttaagcataaaggcactacaactattgtcggctgtaattgtgaagttctagtcagtgctggtgcgataaatactccgcaattattggaactttcaggtattggccaagaagatgttttaaagaaagcgggagtgaatgttagattagcactacctggcgtaggagaaaacctccgcgatcactacgcacctcgaatgaaatggagtacgcttaaagggcggtacacctacaacgaccgagcccgaggacttagcattgccctagaagtagcaaaatacttagcaaataaaaaagggtttttggctttgcctgcagccccaatgcgtgcttatgtaaaatccagggaaggacttgcctctccagaccttggtatatcagtcaaccctttcttgataaaaagcggggtttccctagacaaaaaaagcggctttacaatggccgttcattctctgcgaccagagagccgcgggagcgttcatatagtatcaccttcgagcgtcgcccctcccaaaattcaatacaattttctttctaacagaattgatcaagataccttacttgcaggaatgagaattgttcgccaatgggattaa

SEQ ID NO: 209938 - DNA, 944 bp, Unknown
  Bacterial polypeptide expressing nucleotide sequence isolated from the Sargasso Sea
caaaaaaataatatttaaaaataaaatagctaaaggagttgaattttggcaaggagatatattgaaaaaaatcaatgttaatagagaaataatattatcttcaggtgctattggttcaccacaaatcctacaagtatctggaattggaaattcagaaaaattaaaaaatcttggaattgaaatagttcacaatttaaatggtgttggtgaaaatttacatgatcatcttatgttaagacctatttataaaataaatggtttaaaatctttaaacaaaaaaattaatagtctgtttggaaatttaatgattggattagagtatatatttaagagaactggaccaatgactatgggagcaagtcaactttgtatgtttgctaaaagtgactcatcgttagaattgccagatttacaatggcatgttcagccaatgagtatggatacattgggtgcaactaaaaatcacgactttcatgcttttactccaactgtatctaatataaagcctactagtagagggcatgttagtatcgtagataaagactccagaacctatgctaaaattaaacagaattatctatctactgataacgatagaatgattgcagccaagggtctgaaattaactagaaaaataataatggagtctgaaacttttaaaaagtattcacctgaggaatatagaccaggaataaaaattaatgatgacgaagaattagtcaaagaagcttcaaattatgctcaaacaatttttcatcctgttggcacatgtaaaatgggccaagatgaaatgtctgtagttgatgaaaagttaagagttagaggagtaagtaatttaagagtaattgatgcatctataatgccaaatattacatcaggtaatacgaacgctcctacaataatgattgcagaaaaaggtgcagacatgatacttaatagttaat

SEQ ID NO: 209939 - DNA, 673 bp, Unknown
  Bacterial polypeptide expressing nucleotide sequence isolated from the Sargasso Sea
ttctgatactctttatacttatactaaattaattccaaaagttattgctggagtacaatggtttttatctaaatctggtccttgctcacaatcatatttagaagctggagggtttgcaaaatcttctcctgcacgtgaaatagcaaatattcaatttcatttttttccatcgtttgttattgaccatggtttagttaatccaagctcacatggttatcaattacacgctagccctaaccatccaaaaagtagaggattaataactcttaattcatcaaacccatatgattatcctaaaattttatttaattacctggaagatgaggatgatttaaaacaaactagagaatgtattcatgttgcaagaaagattttagcacaaccttcattggcaaagcattcgggaaaagaagttggtccaggaacagaagcacaatcagatgatgaattaaatgaatatatcagatctaaagctgaaacagcttatcacccatgtggtacttgtaaaatgggtgtagacgatatggcagttgttgatgaaaatttaaaagtaaaaggaattcaaaacttaagagttattgatgcatctgttatgcctgaaatacctagtgctaatttaaacgctccaacactaatgatcgctgaaaaaggcgcagacgcaattctaaattaa

SEQ ID NO: 209940 - DNA, 205 bp, Unknown
  Bacterial polypeptide expressing nucleotide sequence isolated from the Sargasso Sea
gccccaaactatttttcatccggtcggcacttgtaagatgggaaatgacgactcagctgtggtttctgataaattaaaagttcatggccttaataaactgagagtgattgatgcctctattatgccaaatataacgtctgggaacactaatgcacctactattatgattgctgaaaagggtgcagatatgatattgagcccataa

SEQ ID NO: 209941 - DNA, 1249 bp, Unknown
  Bacterial polypeptide expressing nucleotide sequence isolated from the Sargasso Sea
atgaattttgattatataataatcggtggaggatctgctggttgtgtattagccaacagactaagtgagaattcaaataataatgttttgcttatagaagcaggcaaagatagtgatatttggaaagttaatatgccattagcgatactttatgctatgcatgatcctaagtataattataaatattattctgagcctgaaccacacttgaataatagaaaaattttttgtccacgaggaaaaatgattggtggctgttctgcacataatgggatggtttatgttagaggaaaccctaatgattactcaagatgggctaaaatgggactcgacgagtggtcttatgaaaaagttttaccttattttaagaaaattgaaacttggtctgaaggtggaaatgaatatagaggtggtgacggtattttaccagttaaccaatcaaaaaactcaaatccacttttcaaagcatttattaattctgctggggaagctggatacaaaataaattcagatatgaacggcaaagatcaagagggttttggaatgtacgatgtgactatacataatggtgaaagagcaagtgtttctaaatattatttaaaaccagctaaatccagaaataatttaaaaattctaactgaaaaatatgtcaaaagaatattatttgacgggaagaaagcaattggtgtagaaattttaagcaaaaataaaaaagttgaaaaaatttactctaataaagaaattattttaagcgctggtgcaattaactctccacaaatactaatgctatctggaataggtccaggagatcatttaaaagataatggaatagatgttattcataatttagaaggcgtaggtgctaaccttcaagatcaccttgaggtatatatacaacaagaatgtaaaaaacctttaacactttactcttatgtaaataaaattaatatggtaagaataggaattcaatggttcttatctaaaaaaggaccttgctcttattcattcttagaagcaggaggtttttgtaaatcctcgccagaacaggaatatcctaatattcaattccatttttttcctgcatttgtaattgaccatggtttagttgaccctgatagacatggttttcaattacatgcaagtccgaatcatccaaaaagtagaggaaatataaaattaaaaagttcaaatatttttgactctccgactattaaatttaattatttagagcatgaagatgatatgaagc

SEQ ID NO: 209942 - DNA, 982 bp, Unknown
  Bacterial polypeptide expressing nucleotide sequence isolated from the Sargasso Sea
gatgaaatttgattatataattattggagcgggatctgcaggatgtgttctttcaaatagattgtctgaaaatccgaataataaagtagctgtatttgaagctggaggttcaagtgatatttggaaagttaaaatgcctcttgcactactttatacaatgcacgatccaaaatataattggaaatattattctgaaccagaaccacatttaaataatagaaggttattttgtccaagaggaaaaatgattgggggttgttctgctcataatggaatggttttcgttagaggaaacagaaatgactatgaaagatgggaaagttttggattaaaatcttggtcttatgataatattttaccttattttaaaaaaattgaaaattggtctggaggcgaaaatcaatacagaggatcgtttggtttactacctgtaaatcaatcaaaaaatagcaacaagttatttaaagcttttttaaatgcttcatctgaagctggtcataaaattaatcctgatatgaatggagagatgcaagaagggtttggaatgtttgataccacaattcacaatggagagagagctagtgtttcaaaacactacttaaatcctgcaaaaaaaagaaaaaacttaaatattttttctaattcatttgtagagaaaattatttttgaaggaaaaaaagctattggtattgaagtaaaaattaaaaacaaaattgaaaaaatatatgcagaaaaagaactaatattaagtggtggatcaataaattctccacaattattaatgttatcaggaatcggagatgcggatcatttaaaggataaaggaattaaagttattaatgatctaaagggtgtcggaaaaaatcttcaagatcatttggaaacttacattatgcaagagtgtaaaacacctgatactttatacacttatactaaattaatcccaaaaagtttttgccggaatacaatggtttttatctaa

SEQ ID NO: 209943 - DNA, 541 bp, Unknown
  Bacterial polypeptide expressing nucleotide sequence isolated from the Sargasso Sea
ttggatcatggaagacaatctccaagctctcattcttttcaagcgcatgtaggaccaatgaggccaacaagtagaggacatgtcaaattaaagtcaaacaatccctcagcttcacccgctataaagtttaattatatgcagacagagcatgatttaaaagaaatgagagatggtattaaaattgcacgggaaatttttcatcaaaaagcttttgataaatatcgaggaaaagaaattaatcccggaataaattcaagctctgagagtgatttaaatgaattcattaaaaataaaggtgatactgcttatcatccttcttgtacatgcaaaatgggaaaagatgagttatctgttgttgatgaagagctgaaagtttatgggattgaaaatttaagagttgtagatgcttcaataatgccaaatatcattacaggaaatctcaatgcaacaactgtaatgatcgctgaaaaggcatctgatctcatccttaaaaaagaaactttacctgatgtagagaccagtttttatagagcaagctagt

SEQ ID NO: 209944 - DNA, 945 bp, Unknown
  Bacterial polypeptide expressing nucleotide sequence isolated from the Sargasso Sea
aatgaatttcgattacatcattgttggagctggatctgctggatgtgttctatcaaatagattatccgaagatcaaaataataaagttgcagtatttgaagcaggaagttctagtaatatttggaaagttaaaatgcctcttgctttgttatacactatgcatgatccaaaatataattggaaatattattcggaaccagagccaaatttaaataatagaagattgttttgtccaagaggaaaaatgattgggggttgttcagcacataacggaatggtttttgtaagaggaaatagaaacgattatgaaagatgggaaaattttggattaaaatcttggtcatataataaaattctcccatattttaaaaaaattgaaacttggtcagaaggagaaaaccaatacagaggatcccttggattgcttcctgttgatcaatcaaaaaatgataatcctctatttaaagctttcttgggagcagcatcagaggcaggttacaaaattaatcccgatatgaatggagaattccaagagggatttggaatgtttgatacaacaattcataatggggaaagggccagtgtagcaaaatattatttgtaccctataaaaaacagaaaaaattttagtgtttttagtaattcttttgttgaaagaattatttttgatggaaaaaaagcaattggaatagaagtaaaaattaaaaataaaattgaaaaagtttacgcaaacaaagaattaatactaagcggtggctcaattaattcacctcaattattaatgctttcaggagttggaaatgcagaccatttaaaagaaaaaggaataagtgtcgttcataatcttagaggtgttgggagaaatcttcaagatcatttggaaacatatattatgcaagaatgcaaaacaccagatactctttacacatatacaaaactaatacc

SEQ ID NO: 209945 - DNA, 670 bp, Unknown
  Bacterial polypeptide expressing nucleotide sequence isolated from the Sargasso Sea
aaatcagttttaaaatatctctataataggagcggaccactttccttaagtttaaatcaaggtggaggatatattaattggaattctcttgatccacatcctaatattcaactatattttaatccattaacgtattcagtttcatataaaaatagaagacctttactgaatactgataaatttaatggttttattcttggctttaattcatgcagacctaaaagtttaggtgaagtaaaactaaagtcatttaaagacagttatttgccaagtattaatccaaattatttaagtgatgaaagagatattcacgatttgtatgcaacatttgattttataagaaaattttctgcaaataaaaacataagcaatataattaaatctccagttaacattgatcctctaattgctacagatcatgaattacttgatcactttaggtctaatgcgacaactatttaccacccgtgtggaacatgcagaatgagtaaagatattggtacgggcgtagtatctgataaattgaaagttcacggtttagataatctatggatagtggatgcttcaattatgccaaatattacctcaggaaatattaatgcacctgtgatgatgttagcgcatttatctagcaaaattattttagaagaattaaaacaacaatattgat

SEQ ID NO: 209946 - DNA, 133 bp, Unknown
  Bacterial polypeptide expressing nucleotide sequence isolated from the Sargasso Sea
tttgcaggtccatggcatccaaggattaagagtagttgatgcttctatcatgccaactttgattgggggtaatacaaatgctccaaccattatgattgctgaaaaggcagcagattccattagacaatcatag

SEQ ID NO: 209947 - DNA, 1639 bp, Unknown
  Bacterial polypeptide expressing nucleotide sequence isolated from the Sargasso Sea
atgccagataactcggatgtgtttgattatgtcattgttggagcaggaactgccggttcgatcctcacgaatagattaagtacagacggtgcccgggtctgtctccttgaagcggggccggaagattaccatcctttcatccatatacctgcgggttacataaaaaatatctattcacgcaaactcacttggaacttcaagtccaagccgacgcaacatactgccaaccgcagctttatacttccgcaaggaagagtgataggaggttcaagttccatcaatgggttgaaccatgttcgaggtcaaccctctgactatgatggatggtcacaacttggcaaccaagggtggagttactccgaagtccttccatatttcaaacgatcggagaaaaggatcggatggggcaatgacgaagtgagggggcgagatggagaacttccggttactgatcttgattttatccaccctacgtgtgaagccttcatcgaaggtgctgcaagtttggggattcctcgaaatcctgactataacagtggtgatctggctggacttggttatttccagcgtaatatccacagagggttacgttatagttcttcaaaagcatttctcaacccagttcgacgcctgcaaaatgtggaggtacgaaccaatgcacaagcatcctcgattatttttgatgggaatcttgcagtgggagtccattatgttcgaggtaatcgaaacggggcaattcatgaagtcagagcccgtcgcgaggtcatcctctgcgctggggccctcaatacaccgaaattacttcagttgtcaggagttggtcctgcagatcttctcaaagaaaggggtatcgaaatccaggccgatcttcgtggagttggcaataacttgcaggatcattatggagttcgcatggtggcccaactcaaaggtgtacgtacctttaataccatggcacaaggttttccacttggacttgagatcctcaagtgggttttcagacgacccagtgttctttcggtcagtccctccctcgttcacctattctggaagtcttcagaacagctcgaattgcctgatctcgaatacgtgatgacccccgccagtttccgtgaaagcactgtgggtttgctggataaagcacccggcatgaccctgggcgtttggcagatgcgtcctaaaagcagaggatatgtgaaggtattatctcgggacatctttgaaccaccagaaatcaatcccaactatctttcagattcctatgatcaggagattcttttgcgctctattaaattgggtcggaaactgatggcaacagctcctttgcagccttatcttgaaggaacaacaaatccacatcagtcgttgcaaacagatgatgaacttctcaactgggcacgccaagaagggataacggtctaccacatggttggcagcgcacggatgggaccagacagcgatcctgaagcggttgtcgattcacagctgagagttaagaaattggagaagcttcgtctcgccgatgcttccattatgccaggtctaatttcaggcaataccaatgcagcggtaatgatgattgctgaaaaagcggcggacatgattctcggaaaaagacttgatccgattgactgttaaa

SEQ ID NO: 209948 - DNA, 324 bp, Unknown
  Bacterial polypeptide expressing nucleotide sequence isolated from the Sargasso Sea
aacaagaaagagtttttttacaaaaggcatttgatccttatagaggagatcaatctaagcctggtactgatgtggatgttgacgatgatgatcaactcgatgagtggattcgaaatacaggagaaaccctttatcatcctgtaggcacttgcaaaatgggtgatgatcatatggctgttgtaaacaataatttacaggtgcatggccttgaaggtttacgggttgtagacgcttcaatcatgcctaccttgattggaggtaatactaatgcacctacaatcatgattgccgagaaggcagcagattccattagacaatcataga

SEQ ID NO: 209949 - DNA, 454 bp, Unknown
  Bacterial polypeptide expressing nucleotide sequence isolated from the Sargasso Sea
aatggaaaattttgattacgttataattggagctggatcggcaggatgcgttttagcaaacagactttcatctaatccaaataataaagttttgcttttagaagcaggaggtagagataattatccatggatacatattccagtaggttactttaaaacaatgcataatccaaaagttgactggtgttttcatactgaaaaagatgaaagtatgaataatagatcaataagatatccaagaggtaaaactttaggcggaagttcttcaattaatggtcttttatggataaggggtcaaaaagaagattatgatatatggagacaattaggtaatactgggtggagctggaacgatgtattgccttattttttaaaatcagaaaataatgaattgggtaaaagtgaatttcataatgacaaaagaccaattactgttgcaaataaaaaaataaat

SEQ ID NO: 209950 - DNA, 758 bp, Unknown
  Bacterial polypeptide expressing nucleotide sequence isolated from the Sargasso Sea
aaatcttcaggatcatcttggtttagattatttatttaaaacgcatcatcattctctcaataaatccttaggaacttggtcaggcagaattacttctgtattgagatacctttataatagaacagggccattatctcttagtattaatcagtctggaggatatataaattggaactcaaagcatcattatcccaatttacagatatattttaatccgttaacttattcaattactcataaaaataaaagacctttactaaaaactgacaactttaatggttttattattggttataattcttgtaggccaaaaagtttaggaacagttactttaaattctcctaattttggtgatactccactgataaatccaaattttctatcacatgaagaagatatatatgatgttaaatgcgcaattaatttttctcaagttttggcgaatacaaatagtataaaaaaaataagaaatgaaagtgttacgcatgatcttttaaattctagcgaagaagaaatgattgatcactttaaatctaatgcagtttctatttatcacccttgtggtacttgtaaaatggatgaagatcccaaaaagggagttgtttctgaaagattaaaagtacatggaatggaaaatctttggattgccgatgcatctgtttttccaaatattacttcaggcaatataaatgcccctgtaatgatgcttgctaatcttggaagtcaatttattattgaggatttaaataaaatttaat

SEQ ID NO: 209951 - DNA, 805 bp, Unknown
  Bacterial polypeptide expressing nucleotide sequence isolated from the Sargasso Sea
atggataattttgattatattataattggtgctggatcagctggatgtgttcttgctaatagaatttcatctaatcctaagaataaagtcttacttttagaggcaggtggtaaagatactaatccatggatacatattcctggagggtattttaaaacaatgcataatcctgagacagattggtgttttaacacagaggaagagcctttctgtgataatagaaagatgacttaccctagagggaaaacacttgggggaagttcttctattaatggtatgctttatattcgaggacagtcaaatgattataattattggagacaattaggaaatgtaggctggtcatggcatgatgtacttccttattttaaaaagtctgaagatttccaatttggaaaaagtgaatttcatggttctggcggacccttaaaggtagaaaaaattagatctacattcaaagttttagatttgtttttagaagctgcagaggaatttggatataaaaaaactgatgattttaataacggtgataatgagggaatgggatattttcctttaacagtaaaaaatggttttagatgtagcacagcagttggatatttaaatcctataaaaagtagaagtaatttaaaaattataaccaaagctcatataaaaaatattgaatttgaaaataaaattgccaaaaaagtaaatttttggactggcgataagttaaatacagttgaagcaaatggcgaaatcattttaagtgctggtactattggatctccacatatttcttcaagcctcaggtttggggcca

SEQ ID NO: 209952 - DNA, 497 bp, Unknown
  Bacterial polypeptide expressing nucleotide sequence isolated from the Sargasso Sea
tattgaccacggtttagttaatccaagttcacatggttatcaattacacgcaagccctaaccatccaaaaagtagaggattaataactcttaattcatcaaacccatatgattatcctaaaattttatttaattaccttgaagatgaagatgatttaaagcaaactagagagtgtattcatgtcgctagaaagatcttggcacaaccttctttggtaaaacattcagggaaagaagttggtccaggaacagaggcaaaatcagatgatgaattaaatgaatatatcagatctaaagctgaaactgcttatcatccttgtggaacttgcaagatgggagtcgatgatatggcggttgttgatgaaaatttaaaagtaaaaggaattcaaaacttaagagttattgatgcatcagtaatgcctgaaataccaagtgctaacttgaatgcacctacattaatgatagctgaaaaaggtgctgatttaattcttaattaat

SEQ ID NO: 209953 - DNA, 322 bp, Unknown
  Bacterial polypeptide expressing nucleotide sequence isolated from the Sargasso Sea
gattgcctctgcgcccgctcttcaagattatgtggtcggagaactagaacctgacggagaggttcgcggtgatgatgagttgctcgattttgccagagcacgcggcaataccgtttatcatcctgtgggaacctgtaaaatgggaagcgacccaaaagcggtggtgaacgagaggcttcgcgtcatcggtatgcaatcgctgtgggtagtagatgcgtcaattatgccgacgttgacttcaggaaatactaacgcgccaacgataatgatagcggaaaaggcagcggatatgattaaagaggacgaaaaagcattaaggtaa

SEQ ID NO: 209954 - DNA, 1606 bp, Unknown
  Bacterial polypeptide expressing nucleotide sequence isolated from the Sargasso Sea
aatggaaaactttgattttataataattggtgcaggatcagctggatgtgttctggctaacagattatctgctaatcctaataataaaattcttcttttagaagctggaggaaaagatagcaacccatggatacatattccaggtggatactttaaaactatgcataacccagaaacagattggtgttttaatacagaaaaagaacctaattgtgataatagacaaatggtttatccaagaggtaaaacattaggtggtagctcatcaattaatggtatgctttatattagagggcaatctaatgactataactattggagacagttaggaaatgtaggttggtcatgggaagatgttctgccctattttaaaaaatcagaggattttcagtttggtgaaaatgaatttcatggatcaggtggtcctataaaagtagaaaaaattagagcaacatttaaagttttagatttatttttagaagctgctgaagaatttggttataaaaaaactgaagactttaataatggaaataacgaaggaatgggctatttcccttttacaataaaaaatggttttagatgcagtacagccgtaggttatttaaatcctgttaaaaaaagaaaaaatttaaaaatcgttacaaatgctcatataaaaaatattgaatttgaaaataaaaaagcgataagcgtaaattattggattaagaacaatttaattaatgttaaagcaaataaagaaataatattaagcgctggaacaattggttcaccacatattttgcaagcatcaggaattgggcctggggaattattaaaaaaaaacaatataaatgtaatcaaagatcaaaaaagtgtaggtcgtaatcttacagatcatttaatgctgagacctgtatacaaaataaagaatttagaaactttaaatgatatttattacagtattccaaaaaaaatacttactggtttaaaattttttttatttagaaaagggcctttaacagttggtgctagttatgcttgtggatttataaaaagtgacccgcacttagaaactccaaatttgcaatttcatatttcgcctgcaagtactgatcaattaggtaaatcatcgcttcataaatttccagcttttactcctactattactaatgttagacctacgagccgtggttcgattgaattaagttctccagatacaagagtttcacccaaaataaaaatgaattatttatctacagatgaagacagagagattgcgggtaaatcattaaaaatagttagaaaaattgttatggaatctaatgcttataaagattatcaacctgaggaattaagaccaggaattaatattactgataatgaagcgttagctaaggaagccggtaaatatgccaatacaatttttcaccctgtaagtacttgtagaatgggaaatgatgaagattctgtagtcaatgatagattagtagctcatggtttagataatttaagaattgtcgatgcttctgtgatgcctcatatcacttcaggaaatacaaatgcacctaccattatgattgcagaaaaagcttctgatatgataatagaagacagtaaatcatga

SEQ ID NO: 209955 - DNA, 1456 bp, Unknown
  Bacterial polypeptide expressing nucleotide sequence isolated from the Sargasso Sea
tttgaataatatagatatagcaattattggtgcaggctctgcaggaagtataatagcaaataaacttcttaatgaaactaattttaatatagctcttattgaggctggaccaaaagataacaatcctattattgatgttcctcttggttatggaatgacattttataataaaaaaattaattggaacttctattcagaaaaacaagataatttattcaaaaggcaaatatattatccgagaggtaaagttttaggtggttctggctcaataaacgcaatggtgtatgcaagaggattagaaacagattatgagaactggggaagcaacaaggaatggagttttgaaaatataaaaaaagtatacagttctatggagcaacaaataaatgatgataaagaatttcttacaaaagaaaaggttcctgtaaataatgtaagtaagcatcatcatccaatattagaatatttttttaatgctagtaatgaaattggtattaaaaaaaatacaaatttaactacatcaattgaaaatcaagtaggtcattataatattaatacttacaagggtactaggcattcatcatcaaaagtatttttaaagcctgtattaaaaaatcctagattaactttactagataatactcaggtaaaaaatctaataattaaagataaaaaaattactggtattaaaattcaaaataaatcatcagaacaaatacttaaactatcccatggagcaattttatgttctggctcaataatgacaccttacttattaatgcattctggtattggtgataaagagtatttaaaacaatttgataaagaaataataattgataattctaatgttggaagaaatcttcaggatcatcttggtttagattatttatttaaaactcatcatcatacactgaataaatctttaggaacttggtcgggaagaattatttctgtattaagatatctttacaatagaaaagggccattatctcttagtattaatcagtctggaggatatataaattggcactcaaagcatcattatcccaatttacagatatattttaatccgttaacttattctatcactcataaaaataaaagacctttactaaaaactgataaatttaatggttttattattggttttaattcttgccggccaaaaagtttaggaacagttacattaaattctcctaattttggtgatacaccactgataaatccaaattttctatcacatgaagaagatatatatgatgttaaatgtgcaattaatttttctaaagttttggcaaacacaaataatattaaaaaaataagaaatgaaagtgttactcatgatcttttaaatgctactgaagaagaaatgattgatcactttaaatctaatgcagtttctatatatcacccttgtggtacttgtaaaatggatgaagatcctaaaaaggga

SEQ ID NO: 209956 - DNA, 949 bp, Unknown
  Bacterial polypeptide expressing nucleotide sequence isolated from the Sargasso Sea
atgcaagcttttgattatctcatagttggtgctggttcagctggatgtgtagtagctaacagattatctgagaatgctaataattctgtagctatatttgaggcaggtggatctagtgatatttggaaggttaaaatgccattagctcttctatatacaatgcatgaccccaaatataattggaaatattattcagaacctgaaccatatttaaacaatagacgtgttttttgccctagaggaaaaatgattggaggatgctcatctcacaatgggatggtttttgtaagaggtaatagagatgactacaccagatgggaaaattttggtttagataactggtcttatgataaagttcttccttattttaagaagattgaaacttggtctgaaggtgaaaatcaatacagaggttcattgggaccccttccagtaaatttatctaaaaattcaaatccattatttaaagcatttattgatgctgcagctgaagcaggtcacaaaacaaatatagatatgaatggtgaggaacaagaaggttttggcatgtttgatactacaatgcatcaaggcgagagagctggagttgccaagtattatttaaaccctgttaaaaatagaaaaaatttaaatattttaaaaaactcatttgtagaaaagatactatttgagggaaaaaaagcagttggtcttcaagtaaagataaataacaaagttgaaaagatttatgcaaataaggaagtcattttgagtggaggatctataaattctccacaattattaatgttatctggtataggcgacgaaaaccatcttagagataatggtattgaagttattcatcactcaaaaggtgttggaaaaaatttacaagatcatcttgaaacttacatacaacaaaaatgtaaaactcctaatacactttacacatacacaaaattaataccta

SEQ ID NO: 209957 - DNA, 385 bp, Unknown
  Bacterial polypeptide expressing nucleotide sequence isolated from the Sargasso Sea
cctaaaattttatttaattatttaaaagaagaggaagatctaaaacaaactagagagtgtatccatgttgcaagaaaaattctatctcaaccagctcttgcagaacatgctggagatgaagtaggaccaggtttcaacgctcagtcagatgatgaattgaatgaatatataagatctaaagctgatactgcttatcacccttgtggaacttgtaaaatgggtgtggataacatggcagttgtagatcaagatttaaaagtaaatgggattggaaatttaagagtaattgatgcatcagttatacctgaaataccaagtgctaatttaaatgctcctaccctaatgattgctgaaaaaggctccgaggctattcttaataattaat

SEQ ID NO: 209958 - DNA, 1624 bp, Unknown
  Bacterial polypeptide expressing nucleotide sequence isolated from the Sargasso Sea
tatggatagaaattttgattatatagtcataggagcaggaagcgctggatgtgtaatggctaatagactttctgaagataaagaaaataccgtcctaagtatcgaagcaggaggaaaagatagaaacttctttattcatatgccatctggatactctcaaatagttcctactaagagtaagcttaattatggttttgaaacggaacctgaggcaacaacaaataatcgtcaactttattggcccaggggcaaagtttggggaggttcttcttcaataaatgcgatggtgtacataagaggccatgcgtatgactatgatttatggagacaattaggaaatactggatggtcatacgaagatgtattgccatattttaagaaggccgagagttttcaaggggatggagatgaagattatcacggctttgatggaccgctaaacgtaaaaaaatcttccagaactgatgatccattattagatattttcatagaggctggctctcaagctggcttccctctaactgaagattttaacggaaaagagcaagaaggcttttctaggtatgagcatactatgaaagatactagttttggtccaagaagatggagttcagctagagcatatctccatcctgcattaaaaagaaaaaatctctccacagaaactaatgtccaagtaaataaaatactcttcgagggtaaaaaagctattggagttgaatatactaaaaatggtcaagtgcttacttgtaaatgcaacaaagagatcatcatttctgctggtgcaattaatagtcctcaaattcttatgaatagcggtataggagattctgatgagttaagtaagcacggaattgatgttgttcatgaactgaagggagtgggtaaaaatcttcaagatcattatggagttttaaattcattttatgcaacacaacctattactttgcatagatcagcaggcctcttgaaaactggagttgcgggtatcagatatttattatttggaacaggtgatgcagcttatcccccaaccagtgctggtgcttttttcaaatctagtccagataaagatatacctgatacgcagttacactttacagccatacaaactccagatttacacggtaggttaggcattgatgaaaaacatggctttactgcagtaatctatatatgcagaccacaaagtagaggttacatagccttgagaagtgcgaaccctagcgatgctccacttatgtatcctaattatctatccgaagaacaagacatgattgatacgagaaatgctcttcgcgaaactagaagagtttttcatcagaaggcatttgatccctacagaggcgaacaaactaaaccaggaaaagatgtaaatgtggatgacgatgatcaactagatgagtggataaggaatacaggagaaaccctctatcaccctgttggaacttgcaaaatgggagaggatgatatggctgttgtaaattccaaccttcaagtccatggcatttcaggattgagagttgttgacgcttccataatgccaactttaatcggtggtaatacaaatgctcctaccataatgattgccgagaaggcggcagattccattagacaatcataa

SEQ ID NO: 209959 - DNA, 440 bp, Unknown
  Bacterial polypeptide expressing nucleotide sequence isolated from the Sargasso Sea
gccaacaagcagaggtgaaataaatatagtgagtagtgacagtagagtttatcctaaaatcaaaatgaattatttgtctactgacgaagataggaaagttgcggcacaaggtttaaaaatagttagaaaaataatgttagagactgaaacatttaaaaaatatgaacctgaggaatatagaccaggagttcatattacagatgatgaagagttagtcaaagcaggtgcagatttcactcaaacaatttttcatcctgttggaacttgtaaaatgggtaatgatgatattgccgttgttgatcattccttaaaagtcaggggaattcaaaatttaagagtaatcgatgcatcaatcatgcctaatattacatctggaaatactaatgctcccacaattatgattgctgaaaagggtgctgatatgatattgaacggataat

SEQ ID NO: 209960 - DNA, 1057 bp, Unknown
  Bacterial polypeptide expressing nucleotide sequence isolated from the Sargasso Sea
atgggatattttccatttacaattaaaaatggatttagatgcagtactgctgttggatatttaaatcctgtaaagaaaagatctaacttaaaaattgttactaaagcacatattaaaaatatagaatttcaaaataaaactgcaaaaaaaataaattattggactggtgaaaaattaaactcagtttcaacaaataaggaaattatattaagcgcaggtacaattggatcacctcacatattacaagcatcaggtgttgggcctggaaaacttttaaaagataacggtataaatattataaaagaacatagtggaattggccaaaatttagttgatcatttaatgttaagaccagtttataaggtaaaaaatttagaaactctaaatgatatttattatagttttacaaaaaaaattataagtggtcttaagtttttaataaccagaagtggtccattaactgttggagcaagttatgtttgtggatttgttaaaagtgatgaatatttagaaactcctaatcttcaatttcatgtatctcctgcaagtacagattaccttggaaaatctgctttacataaatttccagcatttacaccaacgattgcaaatgtaagaccaacaagtcgaggctcaattgaattaaaatcatcagatacaagaattcctccaaaaataaaaatgaattatttatctaccgaagaagatagacagatagctggaaaatccttaaagattgtcagaaaaattgtaatggagtctgaagcttataaagattaccaacctgaagaattaagaccaggaattaatattactgataatgaacaattggcagtagaagcaggaaaatttgctaatacaatttttcaccctgttagcacatgcagaatgggtaatgatgagcaagcagttgtctctgacaaattaaaagttcatgggttagaaaatttaagaattgttgatgcttcagttatgccttatattacatcggggaatactaatgctccaactataatgattgctgaaaaaggcgctgacctaatacttaaaaaataat

SEQ ID NO: 209961 - DNA, 1297 bp, Unknown
  Bacterial polypeptide expressing nucleotide sequence isolated from the Sargasso Sea
ggtaatcctaaatccgattggtgttacgaaacacaatcagacagaggaatcgcagatagatccataccctggccaagaggaagggttatgggtggatctagctcaattaacggtcttctttacgttcggggtcagcctcgagattttgacatttggtctcaacttggttgtactggctggtcttgggatgaagttttgccatatttcaagcgttcagaaaattgggatgggattgatgaaactggattgagaggaaaagacgggcctctttcggtacaatcggctcgactaaaacgagacatagtagaccactgggtcgatgctgctgttacagcaggttatcaacgcaattatgactacaatggctccacacaagaaggagtgggtcactttcagttgactatgaagggtggtcgaaggtgctcttcatcagtggcgtacataacgccaataaaaagtagaaaaaatcttaaaattattacaaacgcccaaacaaaaaaagtgaatattatcgatggaagagcaatatctatcgatatagacataaaagataagttggatacgatttcagcaagaagagaaattattatttgtgctggtgcaataggctcgccgcaaattcttatgctttctggaattggtcctggtgaagatctcaaaaatttgggaatagaggttgtaagtgatttggtgggtgttggtaaaaacttacaagatcaccttcaggctcggcctgtttttaaaactgatttatctaccataaatacggaaaccagtaattatgttaaaaaagctcttatagggcttcagtatatactaactcagcgaggccccatgactatggctgcaagcttgggaacaggttttcttaaaactgaagatcatctggagacaccagatattcaatttcatattcagccattcagtgctgatatgccttctaaaggtgctcatactttctcagcgttcactgcttctgttctacaattaagaccagaaagcacaggatatttaacgttaaagtctccaaactatttggaccatcctgaaatccacccaaattatttagcaacagttacggactgtaaaactattgtaaaaggcgttcagattgctcgtaaaattgcgcagtgcgagccattgaaggcccatgtctcagaggagtatgctccaggctcagaagtacctttggaagatgaagaaggaacactggactgggttcgaaggactgccgttacgatctaccatccgacaggtacctgtaaaatgggaacagatgaaatgtcggtggtttcgc

SEQ ID NO: 209962 - DNA, 432 bp, Unknown
  Bacterial polypeptide expressing nucleotide sequence isolated from the Sargasso Sea
agcagaggaaaataactctgaattcttctaatccttatgattatccaaaaatattatttaattatttggaagatgaagacgatttaaaacaaactagagaatgcattcatgttgcaagaaaaatcttatctcaaccttctttagcaaaacattcaggtaaagaagttggcccaggttctgataaacaaaacgatgatgaattggatgaatatattagatcaaaggcggaaactgcttatcacccatgtggtacttgcaaaatgggtgttgatgatatggcagtagttgatgaaaatttaaaagttaaaggaatacagaacttaagagttgtagatgcttcggttatgccggaaatacctagtgcaaacttaaatgcccctactctaatgattgctgaaaaagcctcagaccttatattacattcaatttaaa

SEQ ID NO: 209963 - DNA, 620 bp, Unknown
  Bacterial polypeptide expressing nucleotide sequence isolated from the Sargasso Sea
tatccatggaaattcaatgatttcttcaactctttctgaagttggaggtttttttaaaacagatccatttttagatagaccagatatacaaaatcattttgtaataggtctcattgatgatcatttaagaaaaatccattatggatatggatattcctgccatgtatgcctgcttagaccttactcaagaggaacagtttccttagcttctgcaaaagtttcagatgatcctattattgatccaaaattttttagtgatttacgtgatttaaaaacattaatcaaaggagcaaaattaactcaagatattttaaattctgcgccactaaataaatataaatcaaaggaaatttacggagtgcataataatcttagtgatttggaatgggagggacatattagaaatagagcagacactatttatcacccggtaggaacatgcaaaatgggtaatgacgagttagctgttgttgacaacaaactaaagatcaagggattaaagaatattcgcgtagcggacgcatctataatgcccaaaattacttctgggaatacgaacgctccaacaatcatgatagcagaaaaatgttcgtcaatgatctttgaagagtattcgtaat

SEQ ID NO: 209964 - DNA, 712 bp, Unknown
  Bacterial polypeptide expressing nucleotide sequence isolated from the Sargasso Sea
atgaaatatgatcatataatcataggtgccggttcggcagggtgtgtgttggcaacaagactgacggaagatcctgagatttcagtgttgttgctcgaagcagggccagactatttagacattcattcagctccagatgatgtaaagtttgggaacaacatgtggaaatcagcttatggccaacatagttggggctacccagcatttcctacgaagcacaggagtactcctatgataatccctagagggaaagttgttggtggttcaagttctataaacggacaggtgatatgcagaggcatccctgaagattatgataattgggcaaaatggggaaattcagaatggtcttttgaaaaagttcttccgtattttagaaaactagagaatgatttggattttggctctagtgatattcatggttctgaaggtcctattcctgttagacgctacaaaagaaaggaattgctgccgtcttttgaacaattctacgaatcatgtataaatcttggatatccagaggatcctgatcaaaatagtccagagtcatttgggattggaatgagggcattaaataatatagacggagttagaatgagcacgtcgttcacctatctcaatatgtctagacatagattgaatctaactgtacgttctgatgtttttgtcaccaaattattgattgaaaacaatcaagcaattgggtgcacag

SEQ ID NO: 209965 - DNA, 293 bp, Unknown
  Bacterial polypeptide expressing nucleotide sequence isolated from the Sargasso Sea
tcagtcagatgaacaaatagaaaattttattcgtgaaaaagctgaaacaatttatcaccctgttggcacgtgtaaaatgggaagtgatgaaaatgccgttgtcgatgataaattgagagttcgaggagttgaaaaccttcgagtagttgacgcttctataatgcctaatttagttggtggaaatacaaatgcaccaacaattatgattgctgaaaaaatagcagaccatattcttggcaatgattttttacctgcattagatctttcccagtcatataaacagtcagcatagt

SEQ ID NO: 209966 - DNA, 280 bp, Unknown
  Bacterial polypeptide expressing nucleotide sequence isolated from the Sargasso Sea
aatggataattttgattttattataattggtgctggatcagcaggatgtgttcttgctaacagaatttcatctaatcctaaaaataaagtcttacttttagaggcaggaggtaaagatactaatccatggatacatattcctggagggtatttcaaaacaatgcataatcctgagaccgattggtgttttaatacagaggaagagcctttctgtgataatagaaagatgacttacccaagaggtaaaacacttggaggaagttcttctattaatggaatg

SEQ ID NO: 209967 - DNA, 1601 bp, Unknown
  Bacterial polypeptide expressing nucleotide sequence isolated from the Sargasso Sea
gattgttggtgctggttctgcaggctgtattgtaacaaatcaaattattaataacacaaattataaaatattattaatagaagcaggtcctagtgacaataatccagttattcaagtacctcttgggtatgggatgactttttataataaaaaaatgaattggaatttttattcaataaatcaaaaaaatttacataatcgtgaaatttattatccacgtggcaaagtattaggaggttcaggttctatcaatgctatgatatatgcaagaggattaagctctgattttgaaaattgggatttaagcactaaatggtcatgggagaatattaaaacagcatatgatcaaatagaatttgcggttaatgaaaatacaaaaagattaccttctaataaaatacctgtaagtgatattagtaaaaaacatcatccaattttaaaaaatttttttgatgcctctaaagattttaattttgcatttaataaaaatcttaaaagctcaatcggaaatcaagtagggaattataatgttaacatatttaaaggttttagaacttcttcatctaaagtatttttaaaaccgataaggaatcatccaaatttaactattcttactaaaactgaagttttaaaattaaattatgaaaataaaaaaatagtaagtttaaatattatgcataaaaataaaaaaatttctgtaaaacctaaaattggaactatcctatcaactggttctattatgtctccatatttattattaaagtcaggcatagggaaagctgaagatttaaaagagcataatatacctgttaatttacataaccctaatgttggaaaaaatttccaagatcatttgggcttagattatttgtataaaacttttgtgccaactttaaataaggatttaggtaattggggaggaagaataaaatcagttttaaaatatctttataacaggagtggaccacttgctttaagtttaaaccaaggaggaggatatattaattggaattctcttgatccatttcctaatattcagctttactttaatcctttaacatattcagtttcttataaaaacagaagacctttacttaatactgataaatttaatggttttattattggctttaatccatgtagacctaaaagtctaggtgaggttaagctacaatcatatcaagatgattatttacctactataaatcctaattatttaagtgatgaaagggatattcatgatctatatgctacatttgattttatgaggaagttctcttctaataaaaatattagtgatattattaaatcccctgttaacattgatcctataaaagctagtgatgatgagttgcttgatcactttaaatcgaatgcaacaaccatttaccacccatgtgggacatgtcgcatgagcaaagatattgccaagggtgttgtatcagataaattgaaagttcatggattagataatctatggatagttgatgcttctattatgccgaatattacctcgggaaatataaatgcacctgttatgatgttatcatatttatctagtaaaattattttagaagaattaaaacaatcttataaatgaa

SEQ ID NO: 209968 - DNA, 255 bp, Unknown
  Bacterial polypeptide expressing nucleotide sequence isolated from the Sargasso Sea
atgtaaatgtagatgacgatgatcagctcgatgagtggattaggcagacaggtgaaactctctatcatcccgtaggaacttgtaaaatgggtgaagatgatatggcagttgttaataacaatcttcaggtgcatggagttcaaggattaagagttgttgatgcttctataatgccaactttgattggaggtaatacaaatgctccaaccatcatgattgctgagaaggccgcagattccattagacaatcatagt

SEQ ID NO: 209969 - DNA, 655 bp, Unknown
  Bacterial polypeptide expressing nucleotide sequence isolated from the Sargasso Sea
aatcattttgatactgttgcatgtgtaagatcagcacctggtgttgagtaccctgacttacaattatgtatttcaccaattgccatgaaagacaatagttgggaactgcttcaagaacatgcatttcaagttcacgtcggtttgatgcgaactcacagtcgtggtaagatcgaattacgatcaaaaaatcctgctgatccgcctcgcattcttgttaattatctcaaagacaaacgtgatagagaattgttacgtaagggcattcatttggcgcgcgaactacttaatcaacctgctttttcaaacataaagggtgatgaaatctttcctggtgaaaactacaaatcagatgacgaacttgatgcaaaattaaattccaacattacgagtcaatggcacttgtgctgcacggctcgcatggggctaaaaacagataaacatgcagttgttgataatcaaggcagagttcatggtttcaataatttgcgagtcgttgatgcttcgattatgccttttgctacaaatggaaatacaaatgcaccaacaattatgattgctgaaaaaataagtgataacatattgggtgataaccctctgcctcgaattgaattaaaaacctggcaaagtcctaactatcagatgtatcaaaggtaag

SEQ ID NO: 209970 - DNA, 214 bp, Unknown
  Bacterial polypeptide expressing nucleotide sequence isolated from the Sargasso Sea
tggtggctcacttttacactgtgttggaacttgttttatgggatctgaaaaagatagtgttgttgataatgaactcaaagttcggggggtcaaaaatttaagagtaattgatgcctcaataatgcctaaaattatttcaggaaatactcaagcagcaacaattatgattgctgaaaaaggatcagatagtattttaagtgaaaacaaaaattag

SEQ ID NO: 209971 - DNA, 370 bp, Unknown
  Bacterial polypeptide expressing nucleotide sequence isolated from the Sargasso Sea
ttacttgtctactcaagatgatagagatgttgcagctaaagcgcttaaaattgtaagaaatataatgctgaatactaaaacatttaaaaaatatgaacctgaggaatatagaccaggttcacacatcactgatgatgaagaattagttaaagccgcaagtgatcatgcacaaactatattccatcctgttggaacttgtaaaatgggtaagggagatgaagctgtagtaaatgataaattgcaagcacatggagtacaaaatttaagagttgtggatgcatctattatgccaaatataacctcaggtaatactaatgcaccaacaataatgattgcagaaaaagcctcggacatgatacttaacaagtaa

SEQ ID NO: 209972 - DNA, 580 bp, Unknown
  Bacterial polypeptide expressing nucleotide sequence isolated from the Sargasso Sea
atgggacagttaacggaggccgattatttagtcatcggagcggggtcagcaggatgtgttcttgcaaatcgattaactgaaaacaacgaaagtacagtaacgctagtggaggcaggaggccctgaccgttggtggaattggaaagtccatatgccctccgctttagcctacccacttgccgataataaatataattgggcttatttttccgaaccagagaaacacttagacggtcgaagaatgtactgtcctcgtggaaaaatctggggcggctcaagctccatcaatggaatggcttatgttcgagggcatgctctagattatgaaagatggtctctcgtcagcggttgtgaagggtggtcgtattcggagtgccttccttattttaaaaaagcagaaagtatcgatatagggggagacgattatagaggcggagtagggcccctccaggtgaccgcgggaaaaatggacaaccccttatatagggcgtggatagatgcggggagacaagcaggatatccagtcactagtgatccgaatggatatcagcaagagggactaggaagaatggatatgacag

SEQ ID NO: 209973 - DNA, 530 bp, Unknown
  Bacterial polypeptide expressing nucleotide sequence isolated from the Sargasso Sea
tcaggtgcacgtcggtttaatgcgtacgcatagtcgtggcaagattgaattgcgctcaaataaccctgctgatccacctcgtattttagttaattatctaaaagataaacgtgatagggaattaatgcgcaaaggaattcatttagttcgcgaactattagatcaaccgtcattttctgatttaaagggtgaagagatttttcctggtgataattgtaagtcagatgctgaccttgatgctaaactaaatttgcacacgactagccaatggcatttagcttgcacagcgcgtatgggtttaaaaacagacaaatatgcagtagtagataattcaggcaaggttcatggcataactagtcttcgagtcgttgacgcttctattatgccttttgctccaaatggcaatacaaatgcacctacaataatgatcgctgaaaaaattagtgacgaaatattagggtctaagcctctaactcgcatagagttgcaaacttggcagagcccaaattatcagactgaccagcgataaa

SEQ ID NO: 209974 - DNA, 280 bp, Unknown
  Bacterial polypeptide expressing nucleotide sequence isolated from the Sargasso Sea
atgaaaaattttgatttcataattattggtgcaggctccgcaggttgcgtactagcaaatagattatctgctaatcctaataacaaagttcttcttttagaagctggaggaaaagatagcaacccatggatacatattcctggtggttattttaaaactatgcacaatccagaaactgattggtgttttaatacagagcaagaaccaaattgtgataatagacaaatggtttatccaagaggtaaaacacttggaggtagttcatcaattaatggaatgc

SEQ ID NO: 209975 - DNA, 1393 bp, Unknown
  Bacterial polypeptide expressing nucleotide sequence isolated from the Sargasso Sea
tatggataattttgattttataattcttggagctgggtcagctggctgtgtacttgctaatagattgtcagaaaaccctaatcataaagttttacttttggaggctggtggaaaagataattatccctggatacatatacctgtgggctattttaaaactatgcacaacccaaaaactgactggtgttataaaactgagcctgatgaaagtatgaacaacatttcaattagatatcctaggggtaaaactttagggggaagttcatcaattaatggattgttatatataagaggtcaaaatagagactatgatgtttggagacaattaggaaatactggttggggatgggatgatgtattaccttattttataaaagctgaagatcaagagagaggtaaaaatgaatttcatggtgtaaatggaccactagcagtttctgatcaaagaattcatctcccacttttagatgagtttcaaaatgcagctgaagagtttggaatacctaaaacaaaagattttaacacaggggataatcatgggtgtggatattttcaagttacagagaaagatggttttagatgtagcacatctgtaggatatttaaatccaattaaaaatagaaaaaatttagaaattattactcacgcacacgtaaaaaaaattatctttgaaaataaaatagctaaaagtgttgaattttggcagggaaatgaattaaaaaaagtagatgctaatagagaaataatattatcctcaggagctattggttcgccacaaatcctacaggtttcaggaattggaagttcagaaaaattgaaaaacctagggatagaaatggttcacaatttaaatggtgttggcgaaaacttgcatgatcatttaatgttgagacctatttataaaattaatggtcttaaatcattaaataaaaaaattaatagtctatttggaaatttaatgattggattagaatatatatttaaaagaactggtccaatgactatgggtgcaagtcaactttgtatgtttgctaaaagtgactcttcattagagttaccagatttacaatggcatgttcagcctatgagtatggatacattaggtgcaactaaaaatcacgactttcatgcttttacacctacagtatctaatataaaacctactagcagaggacatgttagtatcgttgataaagactcaagaacttatgctaaaataaaacaaaactatctatctactgacaatgataggatgattgcagctaaaggtctgaaattaaccagaaaaataataatggagtctgaaacttttaaaaagtattcacctgaagaatatagaccaggaataaatattaatgacgatgaagaattagtaaaagaagcttcaaactat

SEQ ID NO: 209976 - DNA, 763 bp, Unknown
  Bacterial polypeptide expressing nucleotide sequence isolated from the Sargasso Sea
attgatgtggttagtaatataaaaggagttggcagaaacctcaaagatcatttggaaacatacattatgcaagaatgcaaaacccctgacactctttatacctatacaaaattagttccaaaagttttggctggaatacagtggtttttatctaaatcaggtccttgttcaaaatcttttttagaagctggaggatttgcaaaatcttcacctgaaagagaaatagcaaatatacaatttcatttttttccatcatttgttattgatcatggtttagttaatcctagctcacatggatatcaacttcatgcaagtccaaatcatccaaaaagcagaggacaaataactctgaattcttctaatccatatgattatccaaaaatattatttaattatttagaagatgaagacgatttaaaacaaactagagaatgtattcatgttgcaagaaaaatcttatctcaaccttctttagcaaaacattcaggtaaagaagttggtccaggttctgataaacaaaacgatgatgagttggatgaatatattagatcaaaagcagaaactgcttatcatccatgtggtacttgtaaaatgggtgttgatgatatggcggtagttgatgaaaatttaaaagttaaaggaatacagaatctaagagttgtagatgcttctgttatgccagaaatcccaagtgcaaacctaaatgcccctactctaatgatagccgaaaaagcttcagatcttatattaaattctatttaaa

SEQ ID NO: 209977 - DNA, 1183 bp, Unknown
  Bacterial polypeptide expressing nucleotide sequence isolated from the Sargasso Sea
atggaatttgattacattataattggagctggttcagcaggatgtgttctcgcaaatcgtctatcagacagtagcaataatatactaattattgaagctggccccaataacaatagctataaaataaatatgccggcatcaatgctgacaaacttaaaagaaaaaaaatacaattggtcttttaaaggtgaacctgagaaaaatcttaataatcgttcaatacagcatgatagaggaaaagtaattggtggttcatcctcaatcaatggtatggtttatgtgcgaggtcacgctaaggattttaatggatggagtgaacttggttgcgaggggtggagttatgctgatgttctgccctattttattaggatggaagcttattctgggggtgacaaagattatagaggtgcagaaggcccattaaagatccatagaccaacacccaaagatcccatttcacttgcttttctgaaatctggaaaagagaaaaaccatcaaactacgaatgatataaatgggttttgccaagagggttttggtgtttttgacagcacaattaacaaaggcaagcgctttagtgcagcagatgcttatttaaaaccagcaaaaaatagaaataatttaacaatactgtctgaatctcatgttaataagataattttcaagaataagattgctgttggtgttgaattttttgataaacaaaaaaacaaagtactggcttatgcttcaaaagaaataatattatctgcaggtgccattggaacaccacatatattaatgctctccggtattggccccgaaaaacagttgagagaattaaacattgatgttgtaaagaatagccctggtgtcggagcaaatctaaacgaccatccagattttgttctaaaatatcggtgcacgaaaccagtatcgctttggccaaaaacaaagatgattccgagtattattcaaggattacgatggtttttattctctgatggtatgtgtgcaagcaatcattttgatgtcattgcatgcattagatcaaatcattctgttgattatccagatatacaattatgcgtttctccaattgctgttgatgataaaacatggaaaccaatccaggagcatgctttccaaattcatataggtttgatgcaaacgttcagtaaaggtcatgttagattggcagact

SEQ ID NO: 209978 - DNA, 517 bp, Unknown
  Bacterial polypeptide expressing nucleotide sequence isolated from the Sargasso Sea
tttttcctcatttgttattgatcatggtttagttaatcctagttcacatggatatcaacttcatgcaagtccaaatcatccaaaaagcaggggattaataactctgaattcttcaaacccttatgattatccaaaaatattatttaattatttagaagatgaagacgatttaaaacaaactagagaatgcattcatgttgcaagaaaaattttatctcaaccttctttagcaaaacattctggaaaggaagttggcccaggtttagataaacaaaacgatgatgaattggatgaatatattagatcaaaggctgagactgcttatcacccatgtggtacttgcaaaatgggtattgatgaaatggcggtagttgatgaaaatttgaaagttaaaggaatacagaatctaagagttgtagatgcttctgttatgccagaaattcctagtgcaaatttaaatgcccctactctaatgatagccgaaaaagcttctgagttaattttaaataatatttaa

SEQ ID NO: 209979 - DNA, 178 bp, Unknown
  Bacterial polypeptide expressing nucleotide sequence isolated from the Sargasso Sea
aatgggcaaagatgaaaatgctgtagtaaatgataaattatctgttcatggacttcaaaatctaagagtgatagatgcatcgataatgccaaatattacctctggaaatacaaatgctccaactataatgattgcagaaaaaggtgcagattttattttaaacaatcaaatcaaatga

SEQ ID NO: 209980 - DNA, 172 bp, Unknown
  Bacterial polypeptide expressing nucleotide sequence isolated from the Sargasso Sea
tttgcgtgttgttgatgcttcgattatgccttttgcgacaaatggaaatacaaatgcaccaacaattatgattgctgaaaaaataagtgacaacatattgggtgataatcctctgcctcgaatagaattaaaaacctggcaaagtcctaactatcagatgtatcaaaggtaa

SEQ ID NO: 209981 - DNA, 1312 bp, Unknown
  Bacterial polypeptide expressing nucleotide sequence isolated from the Sargasso Sea
tttaggaggaagctcagctattaatggtttgttatttataagaggtcaaagtagagattatgatgtttggcgtcaactgggtaatactggttggggttgggatgatgttcttccttactttataaaagctgaagatcaagaacgtggtaaaaatgattaccatggtgttggagggcctttgtctgtttcagatcaaagaattcaattaccgctgttaaatgaatttcaaaatgcagcagaggaatttggtattccaaaaacgaaagattttaatactggtgataatcatgggtgtggatactttcaagtaactgagaaagatggatttaggtgtagtactgcagttggatatttaaacccaattaaaaatagaaaaaatttaaaaattattactcatgctcatgtaaaaaaaataaatttcgaaaataaaactgctaaaaatgttgagtactggcaagaaaatgctttaaaaaaggttgcagctaacaaagaaataatactctcatctgggtcaattggatcacctcagattttgcaaacttctggggtaggaaattcagaaaaattaaaagacctaggtgttactatggtgcatgaactaaagggagttggagaaaatttacaagatcatttaatgtttagaccaatttacaaagttaatggacttaagtcattaaataaaaaagtaaatagtttatttggtaaattaatgattggtctagaatatgtttttaatagaagtggaccaatgacaatgggcgctagtcaaatgtgtatgtttgcaaagagtgatccttctttagaattgccagatcttcaatggcacgtgcaaccaatgagtatggacactttaggtgctacaaaaaaccatgactttcatgcattcacacccactgtttcaaatataagaccaacaagcagaggttacgtaaatattattaataaggactcaagaatttatgcaaaagtaaaactcaactatctttcaactgactatgatcgtatggttgccgcaaaaggtttgaaacttacaaggaaaatagtaatggagtctgaaacttttaaaaaatataaaccagaagaatataggcctggtattgatattaatgatgatgaagaacttgtaaaagctggatcaaattatgcgcaaactatttttcatccagttggcacatgtaaaatgggacaagatgatatggcagtagttgatgaaaatcttaaagtaaagggattaaataatttaagagtaattgatgcatcaataatgcctaatataacttcgggtaatactaatgcacctacaataatgatt

SEQ ID NO: 209982 - DNA, 2675 bp, Unknown
  Bacterial polypeptide expressing nucleotide sequence isolated from the Sargasso Sea
tgattatccaaaaattttatttaattatttagaagatgaagacgatttaaaacaaactagagaatgcattcatgttgcaagaaaaattttatctcaaccatctttagcaaaacattcaggtaaagaagttggcccaggttctgataaacaaaacgatgatgaattggatgaatatattagatcaaaggcagaaactgcttatcacccatgtggtacttgcaaaatgggtgttgatgatatggcagtggttgatgaaaatttaaaagttaaaggaatacagaacttaagagttgtagatgcttcggttatgccagaaattcctagcgcaaaacttaaatgcccctactctaatgattgccgaaaaagcttcagatcttatattgaatactgtttaagcatggaagaaacttttgttctagctttacaaaatcataaaaaaaataatcttgaggctgctgaagatctttataataaaatattaaaaaaagatcctaatcattttgaatcgatatataatttgagtaaattattagctcagacgaaaagatttaacttagcgaagccattactttataaagcaactaagctcaaacccaattatgaaaaagcacataataatcttgggataattcttacaaaattaaaagaagaacaaaaggcaataaatagttttgaaaaagcaattcaaattgatcctacttataccgatgctcattataatcttggaatcgcgttgcaagaattaggagaacatagaaaagcaatagtttattatgaaaaagcaattcatcttaagcctgattatgctaaagcatataataatcttggtatagcattacaagaattgggagaacataaaaaagcaacaatttattatgaaaaagcaattcaaagccaacccaattatacagatgcccactacaatcttggaagaatattgcaagaactaggagagcatagaaaagcaatagtttgttatgaaaagacaattcatcttaaaactgattacgctaaagcatataataaccttgggatagcattgcaggaattaggagaacatagaaaagcaataaatgtttataaaaaagcaatttcgaatgttcccaacagtataatagtaaatggtctatcagatttacttaaatcaattaaattaggtaatataactgaaactaatagtaacgattttaaggatatagttttatttctatacagaaaaaataatataaatcatgatgatatttttcatatctcaaaattgcttttattttttggagaaaatgaaaatcaaataacaaaagctgttaattcaaactcttctttgttaaagaataaagttataaaaaacttattaaaagaagaactttttcttttaatgctacaaaaatctttaatagctgataaatttttagaaaaattacttactaaacttagaaacgaaataatttttagtttaatcgattcaaatataaatattggtgaagagtcttttgattttattctttcactttcagaacaatgttttctaaatgagtatgtttatgttcagtctaaaaaagaaattagttatgttaatcagttaaataataaaattataaataacaaagatattaatgaagtagagatagccatcttaggatgttatattcctttatattcttcaaaaaaaattattaataaattaataaactacaagtcaaaaaatattttgtttaatgatttaattgctatacatattaaagaacctttggatgaaataaaattagcaaattcaattaaatcttttgataaaattattgatagtgtatctaagaaagtaagggaacaatatgaagaacacccttatcctagatggagatatactaataagtattctcacgccaattttttatttcaattaaatgaagaaataaagcctaatcgaattgaacatagtaataaatttgttaatccaaatgttcttatagcgggttgtggaactggacagcacatagcttcagtggaaagatatctaaacgctaatatacttggaattgatttaagtctaaaaagtcttgcttatgcaaagaggaagtctttagagctagattttaaaaatatagaatttctgcatgcagatattttacaattaaagaatttaaataaaaaatttgatgttatagaatgtgtaggaactctacatcatatgaaagatcctataaaaggactcaaaatattattagatttattaaaacccaatggatttttaaaattaggtttatacagcgaaattgcaagacgaaatgtggttaaagcaagagaatttattaaaagaaaaaaaatcaaaaaaacaactgaagatattcgaaattttcgagaatctattaacaacgaaaaagaagacccgtcactcctgagaatatttaatatcaaagatttttattcaacatcaatggcaagagatttgatgttccacgtccaggaacatcgttttactttgcctgaaatctctaaaattttaacagatttaaatttagaattccttggatttataaatccatcaatcaaaaataaattttcaaaattatttcataaagataaaaaatatatttccttagatagctgggataaatttgaaagaaataatcaagatactttttctaacatgtatcaattctggataagaaaattataaa

SEQ ID NO: 209983 - DNA, 985 bp, Unknown
  Bacterial polypeptide expressing nucleotide sequence isolated from the Sargasso Sea
atgaaatttgattatataattattggcgctggttcagctggctgtgttctttcaaatagattgtcagaaaatcaaaacaacaaagttgctgtatttgaagcagggggatcaagtgatatttggaaagtaaaaatgcctttagcattattatatacaatgcatgatccaaaatataattggaaatattattctgaaccagaaccacatttaaataatagaagattattttgtccaagaggtaaaatgattggaggttgttcggctcataacggaatggtttttgtaagaggtaatagaaatgattatgaaagatgggaaaactttggattaaagtcttggtcttatgaaaaagttttaccttattttaaaaaaattgaaacatggtctggtggagaaaaccaatatagaggttcactgggaccacttcctgttaatcagtctaaaaatgataaccctttgtttaaagcctttataaactcagcctcagaagctggacatacagttaatcctgacatgaatggagaagagcaagaaggatttggaatgtttgatacaacaattcatgaaggtcaaagagctagtgcaacaaaatattatttaaatcctgcaaaaaaaagaaagaatttaaatattttttcaaattcatttgttgaaaaaattatttttgaaggaaaaaaagcaataggcgtcgaagtaaaaataaaaaataaagttgaaaaagtttatgctgaaaaagaagtaatattaagtggtggctcaattaattctccacaattattaatgctttcaggagttggcaattcagatcatttgaaggaaaaaggaattaatgttgttaatgatgttaaaggagttggcagaaaccttcaagatcatttggaaacatacattatgcaagaatgtaaaacccccgacactctttatacttatacaaaattagttccaaaagttttagctggtattcagtggtttttatctaaatcag

SEQ ID NO: 209984 - DNA, 918 bp, Unknown
  Bacterial polypeptide expressing nucleotide sequence isolated from the Sargasso Sea
ctgttggagttgaatattctaaaaatggtcaagttttaacttgcaaatcaaacaaagaaataatcgtttctgctggtgctattaatagccctcaaatcctgatgaatagcggtataggagatgcagaagaattaagtaaacatggtataaatatcgtgcatgaactaaaaggtgtaggtaaaaatttgcaagatcattacggagttttaaattctttttactccactcagccgataactctgcatagatctgcaggactattgaaaactggaattgcaggaattaggtatttactatttggaaacggcgatgctgcttatcctcctacaagtgcaggagcttttttcaaatctagcccagataaagatatacctgatacacagctacattttacatctatacaaacccctgatttacatggcaggcaaggtatagatgataaacatggattcactgctgttatttatatctgtagacctcaaagtagaggacacatttcgcttaagagtgccaatccaagtgatgcaccacttatgtaccctaactatttatcagaagaacaagacatgatagataccagaaatgcctttcgcgagactagaagagtttttcatcaaaaagcattcgatccttatagaggagagcaaactaaacctggtaagaatatagatgtagaagacgatgctcaattagatgattggataagggaaacaggtgaaaccctctatcatcctgtaggaacttgtaaaatgggtgaagatgatatggcagtcgttaatagcaatcttcaagttcatggagtgcagggattaagagttgttgacgcttctataatgccaactttgataggagggaatacaaatgctccaactatcatgatcgctgaaaaggcagcagattccattagacaatcatagt

SEQ ID NO: 209985 - DNA, 960 bp, Unknown
  Bacterial polypeptide expressing nucleotide sequence isolated from the Sargasso Sea
aaatcaattgtcatgtaaaaaagattaactttgagggaactaaagcctctagtgtttcattttggaaaaatggacaaattcatacagtgaaagcgaacagagaaattttattaagtgctggttctattggttctgctcagattctacaagtttctggtgtaggtgatgctgaaaagttaagaaagttaggaataaaaattataaaggaactaaaaggtgttggtcaaaatcttcaagatcatctaatgtttagaccagtttataaagttaaaaatattaaatctttaaataaaaaaattaatagtctatttggtaatttattaattggtttagagttcatatttaatagatctggaccaatgactatgggtgctagtcaactttgtttatttgcaaaaagtgacaattcaagagaaactccaaacttacaatttcatgtccagccaataagtactgataaattaggcggagcagcacttcatgattttcatgctttcactccaactgttgcaaatattagaccaacaagtagaggtgaaatcaatattgtaaacagtgacagtcgagaaaacccaaaaataaaaatgaattatctatcaactgaagatgatagaaaagttgcagcagatggtttgagattagttagagaaattgtattaaaaagtgagacattaaagaaatatcaacccgaagagttaagaccaggatttgaatttaaatctgatgaagagctcgtggaagaaggaagtaaatttactcaaactatttttcatcctgtgggtacatgtaagatgggtaatgatgattattctgttgttaatgataagctagaagttcatggaatacaaaatttaagaattatagatgcctccataatgcctaatatcacatctggaaatacaaatgcaccaacgataatgattgcagagaaaggtgcagatatgatactagaaaaataat

SEQ ID NO: 209986 - DNA, 844 bp, Unknown
  Bacterial polypeptide expressing nucleotide sequence isolated from the Sargasso Sea
tctggggtcaattggatcacctcaaattttacaaacttccgggattggtaattcagaaaaattaaaagaccttggtgtaactatggtgcatgaactaaagggagttggagaaaatttacaagatcatttaatgttcagaccaatttacaaagttaatggacttaaatcattgaacaagaaagttaatagtttatttggtaaattaatgattggtctagaatatgtttttaataggagtggaccaatgactatgggcgctagtcaaatgtgtatgtttgcaaaaagtgatccttctttagaattgccagatcttcaatggcacgtccaaccaatgagtatggatactttaggtgctactaaaaaccatgactttcatgcattcacacctactgtatcaaatataagaccaacaagtagaggtcacgtaaatattattaataaagactcaagaatttatgcaaaagtaaaactcaactatctttcaactgaccatgatcgtatggttgctgcaaaaggtttgaaacttacaaggaaaatagtgatggagtctgaaacttttaaaaaatataaaccagaggaatatagacctggtattgatattaatgacgatgaagaacttgtaaaagctggatcaaattacgcgcaaactatttttcatccagttggcacatgtaaaatgggacaagacgatatggcagtagttgatgaaactcttaaagtaaagggtttaaataatttaagagtaattgatgcctcaataatgcctaatataacttcgggtaacactaatgcacctacaattatgattgctgaaaaaggtgctgatatgatacttagaagttaa

SEQ ID NO: 209987 - DNA, 1026 bp, Unknown
  Bacterial polypeptide expressing nucleotide sequence isolated from the Sargasso Sea
tcatttagaggttcgttaggtcctcttccaataaatttatctaaaaattctaatcctttattcaaagcttttattgatgcggcaggacaagctggtcacaaaataaatatagacatgaatggtgaagaacaagaaggttttggaatgtttgataccacaatgcaccaaggagaaagagccggagttgcaaaatattatttaaatccagttaaaaatagaaaaaacttagatattttaaaaaattcttatgtagaaaaaatactatttgatgggaaaaaagctataggacttcaagttaaaattaaggataaggttaaaaagattttcgctaataaagaaataattttaagcggtggttcaataaattcacctcaattattaatgttatcaggaattggagatgtaaatcatttaaaaaataaaggaatagagattgttaataatgttaaaggcgttggaaaaaacctacaagatcatttggaaacatatattcaacaagaatgtttaactccaaatactttatacacatacacaaaattaattcccaaagtattagctggaattcaatggtttatgtttaaatcaggtccatgctctaaatcttttttagaagcaggtggttttgcaaaatcgtcccctgaaagagaaattccaaatattcaatttcatttttttccatcgtttgtaattaatcatggtttagagcaacccaattctcacggttttcaattacatgcaagtccaaatcatcctaaaagcaggggtcatattaccctcaattcatctgatccttatgaatatccaaagatattatttaattatcttcaaaatgaagaagatctaaaacaaacaagagaatgcattcatgttgcaaggaatattttatctcagccagcacttgctgaacatgctggaaaagaagttggacccggaataaatgctcaatcagatgatgagataaatgaatacattaaatcaaaagcagatacagcttatcatccatgcggaacttgtaagatgggtgtt

SEQ ID NO: 209988 - DNA, 893 bp, Unknown
  Bacterial polypeptide expressing nucleotide sequence isolated from the Sargasso Sea
gcctgatgagactatggaaaatgtttcaattccttatccgagaggaaaaacattaggaggcagttcctcgatcaatggacttttatacataaggggtcaagagcaagattatgatttatggcggcaacttggaaacgttggttgggcctggaaagatgtcctaccttatttcattaaagctgaagaccaagaaagaggtaaagaccagttccatggtgtcggagggccattagctgtatcagatcagagaataaaattagatattttagatgtttttatgaatgcagctgaggaagtaggtattccaaaagtaaatgattttaataaaggagataattttggatgtggttattttcaggttacagagaggaatggattaagatgcagtaccgcagttggttatctcaatcctatcaaaaaaaataaaaatttaaaaattgaaacaaactgtcatgttcaaaaaattaatttcgatggaaataacgcagaaagcgttacatattcaaaaggaaatgaaacttttactgttagagccgagaaagaaattttactatgcgcggggtcaattggaagccctcatatacttcaaacatcaggtgttggagaagcttcaaaaataaaagatttgggaattaatattgtcaaagatcttaagggtgttggtaaaaaccttcaagaccacctgatgttcaggcctgtttacaaagttaagaatataaaaactttaaacaagaaaattaatagtgtgtttggcaaactattaattggacttgagtatgtctttaaaagaagaggcccaatgactatgggcgcaagtcaactttgtggttttgctaaaagtgatccaaatagagatacacctaaatttacaatttcatattcagccaattagc

SEQ ID NO: 209989 - DNA, 790 bp, Unknown
  Bacterial polypeptide expressing nucleotide sequence isolated from the Sargasso Sea
catgaaagaatttgattacataattattggagcaggatcagctggttgtgttttagctaatagattgactgcagataaaaataataaagttctcttgctagaggctggaggcaaagataattatccatggatacatattccagttgggtattataaaactatgcataaccccaaagtggactggtgttttcataccgaaaaagatgaaaccatgaataatagatctattcgttatcctagaggaaaaacactaggtggtagttcttctataaacggattgctttggattagaggtcaaagcaatgattatgacaactggagacaacaaggaaatactggttggggttgggatgacgttcttccatattttttaaagtcagaaaataatgaattaggaaaaaatgaatttcacaatgatgaaggaccaataagtgtcacaaataaaaaaattaatttaagaatgttagaggaatttcaaaatgctgctgaagaatttggtattcctagaacaaatgattttaacaagggtgataactttggaataggttatttccaattcactacaacacgtcagaaattattgaaactacgatgtagtgcagctaaaggatatttaaatcctgtaaagaaaagaccaaacctaaagataacagttaatgcacacgtacaaaaaattaatttcttgggaaaaaaagctgtaagtgtaagtttttatagcaatggaaagttaacaactattaaagcaaataaagaaatattgctttcagctggatctattggttctccccat

SEQ ID NO: 209990 - DNA, 817 bp, Unknown
  Bacterial polypeptide expressing nucleotide sequence isolated from the Sargasso Sea
tttacaaacatctggaataggtaattccaaaaatttaaaagatttaggaattgatatggtgcatgatttaaaaggggttggagaaaatttacaagatcatttaatgtttcgaccaatttataaagttcatggactaaaatcattaaataaaaaaattaatagtttgtttggaaatttaatgattggtcttgaatacgtttttaataggagtggaccgatgacaatgggtgctagtcaaatgtgtatgtttgctaaaagtgacccatctttagaattacctgatcttcagtggcacgtacaacctatgagtatggatactttaggtgctacaaagaatcatgattttcatgcattcactcctactgtttcaaatattagaccaactagtagaggtcatgttaaaattactaataaagactcaagaatttacgccaaagtaaaacttaattatctttcaactgaacacgatcgtatgattgctgcaaaaggtttaaaactgacaaggaaaattgtaatggagtctgagacttttaaaaaatacaaaccagaggaatataggcctggtgttaatataaatgatgatgaagaacttgtaaaagcaggatcagattacgcacagacaatttttcatcctgttggtacatgcaaaatgggacaagatgatatggcagttgttgatgaaactcttaaagtaagaggtttaaataacttaagagtaattgatgcatcaataatgccaaacattacttctggtaacaccaatgcaccaacaataatgattgcagaaaaaggtgctgatatgatactgagaggttga

SEQ ID NO: 209991 - DNA, 794 bp, Unknown
  Bacterial polypeptide expressing nucleotide sequence isolated from the Sargasso Sea
gatggggaaaaaagcaattggtgtagagattttaagcaaaaataaaaaagtcgaaaaaatttattcaaataaagaaattattttaagcgcgggtgcaattaactctccgcaaatactaatgttgtctggaataggtccaggagatcatttaaaagaaaatggaatagatgttgttcacaatttagaaggtgttggtgccaatcttcaagatcaccttgaagtttatatacaacaggaatgtaaaaaacctttaacactttactcttatgtcaataaaattaatatggttaaaattggaattcaatggttcttatctaaaaaaggaccctgttcttattcatttttagaagcaggaggtttttgcaaatcttctcgagaacaggaatatcctaatattcaatttcatttttttcctgcatttgtaattgatcatggtttagtagatcctgatagacatggttttcaattacatgcaagtccaaatcatccaaaaagtagaggaaatataaaattaagaagttcaaatatttttgaatcaccagttattaaatttaattatttagagcatgaagatgatatgaaacaaacaattgagtgtgtaaaagttgcaaggaatatacttaaacaaaattctcttaaagagtatgcgggtaaagaaataggtcctggcgaggatgctatatccgatgaatctattgttgagtatattagatcgaaagctgaaacagcctatcatccttcctgtacactaaaaatgggctcagataaatcagcggttgtagatcagaagttaa

SEQ ID NO: 209992 - DNA, 770 bp, Unknown
  Bacterial polypeptide expressing nucleotide sequence isolated from the Sargasso Sea
gattaaagatttaaagggtgttggtcaaaatttgcaagaccatttaatgtttagacctgtttataaagttaaaaatattaaatcactaaataaaaaaataaatagtttatttggaaacttgctgattggtttagagtttatatttaacaggtcagggccaatgacaatgggtgcaagtcaactttgtttatttgcaaaaagcgacatatcaagagatactcctaatttacaatttcatgttcaacctataagtactgataaacttggaggtgcggcactacatgattttcatgcatttaccccaacagttgcaaatataagaccaacaagtcgaggagaaataaatataattagtagcgatagtagagaaaaaccaaaaataaaaatgaactatttatcaaccgatgatgatagaaaagtagctgcagatggattaagattggtaagagatattatattcaatactgaaacatttaaaaaatatagtcctgaagaacttagacctggacctacttttgaatcagatgaagaacttgttcaagagggaagtaaatttactcaaactatttttcatcctgttggtacatgtaaaatgggaaatgataaaaattctgtggttaatgatgagctaaaagttcatggtttacaaaatttaagagttatagatgcatctataatgcctaatatcacatctggtaacactaatgcacccacaataatgattgcagaaaaaggcgcagatatgatactaggaagtaatgccaattgat

SEQ ID NO: 209993 - DNA, 844 bp, Unknown
  Bacterial polypeptide expressing nucleotide sequence isolated from the Sargasso Sea
ttgggtcttccacatatacttcaagtttcaggaattggggacagcgaaaaattgaaaaatactggtatagaggtaatcaacgaattaaaaggagtaggacaaaatttacaagatcatttaatgtttagacctgtctacaaagttaaaaacctaaagtctttaaataaaaaaattaacagtttatttgggaatttacttattggtttagaatatgtattttttcaaagtgggcctatgactatgggagccagtcaggtatgtggatttgcaaaaagtgactcttcacgcgctacacctaatcttcaattccatatccagcctattagcactgatattttaggagcatcaaaactacatgactttcatggtattactccaacagtcgcaaatataagaccttctagtagaggtaatatcagtataataagcaatgatagcagagttaatcctaaaatcaaaatgaactatttatcaacagaagatgatcgtcatgttgctgctcaaggtcttaagctcattagaaggattatgcttgatacagatacttttaaaaaatatgaagcaagtgaatttagacctgggatacatattcaggatgatgaagagttggttaaagcaggaagcgattatacacaaacaatttttcatcctgtggggacatgcaagatgggccaggatgaaaatgcggttgttagtgatagattaaatgtttatggcgttgataatcttcgagttgtagatgcatcaattatgccaaatataacctcgggtaacacaaatgcaccaactattatgattgctgaaaaagcttctgatatgatattagaagacagtaaagcatgaa

SEQ ID NO: 209994 - DNA, 938 bp, Unknown
  Bacterial polypeptide expressing nucleotide sequence isolated from the Sargasso Sea
gtgatatttggaaagttaacatgcccacttgcgattttatatactatgcatgatccaaaatataattacaaatattattcagagccagaacctcatttacataatagaagattattttgtccaagaggaaaaatgattggtggatgttctgctcataatggaatggtatttgtaagaggaaatccaaatgattaccaaagatgggcatcttttggattggatgattggtcgtatgaaaaagtacttcccttcttcaaaaaaattgaaacatggtctgagggagaaaatgaatatcgaggtggtagtggaatattgcccgtaaaccaatctaaaaataaaaatcctttattcaaagcgtttgtcgattcagctggcgaggctggttataaaataaacaacgacatgaatggtaaagaacaagagggttttggaatgtacgatgttactattcataagggagaaagagcaagtgtatctaagtattatctaaatcctgctaaaaaaagaaagaatttaaaagtatttacagaagcttttgttgaaaaaattatttttgatggaaaaaaagcaattggaattgaagtaaaaattaaaaataaaattgaaaagatttatgcaaataaagaagtaattttaagtgggggtgcaattaattcaccacaattactaatgctttctggagttggtccaagccaacacttaaaagataaaggaattgatgttgttcataacttagagggtgttggaaaaaacttacaagatcacttagaaacttatgttcagcaagaatgcaaaactaaagatacattatattcatacgtaaataaattaaatatggttagaattggaattcaatggtttttgaatagaagtggtccctgctctgcctcttttttagaagctggcggtttttgtaaatcatctccaaaaagggagta

SEQ ID NO: 209995 - DNA, 880 bp, Unknown
  Bacterial polypeptide expressing nucleotide sequence isolated from the Sargasso Sea
caggcgaccggcgtcacattggacggtaaacgctgcacagcccttacgattgttcacaacggtcggctggcgcgcgtcaaagccggccgcgagacgatcctatctggcggttcgatcggatcaccacaattgctccagctatcagggataggcccagcggatcacttaaaagacctcgggattgcgatccaccacgatctcccaggtgtcggcgagaacctccaggatcatttgcagatacgtgcagtctataaggtcaagaacaccgaaaccttaaatgagcgtgccaactcattgattggcaagatggggatcgggttggagtactttcttttcaaacgcggccccatgaccatggcacctagccagttgggcggcttcgccaagagcgatataaacaaggagacgccaaacctcgaatatcatgtgcaacccctgtccttgccgaagttcggtgagccgttgcaccccttccccgccttcaccgcgtcggtatgcaatttgcgaccggaaagtaggggacacgtaaggataaaatcagccgacccccttcaacaacccgcaatctgtccaaactacctgtccgcacccatcgatcgtcaggtcgccgtcgatgcacttcgtttgactcggcgcatcgtatccgcagatgccatgaaacgctttgagccggaggagttcctcccgggcccagagtattcggatgacgccgatctagcccgcgaagcaggaaatatcgccaccacaatttttcatccggtcggtacctgcaagatggggtcggatcccatggctgtggtggacgaccaacttcgggtgtctgggatcagcggactaagggtcgtcgatgcctcaataatgccgaccatcacgtcaggca

SEQ ID NO: 209996 - DNA, 736 bp, Unknown
  Bacterial polypeptide expressing nucleotide sequence isolated from the Sargasso Sea
aatggttatcgtcaggaaaggctttggcgctgcagatatgaccgtttggagaggacgacgttggtcttcggctaatgcatatctaaggccagccttgcgccgcggtaatgtaaagttggtcactggagcactggttgaaaaaattctgatcgataaaaaaactgcgacaggtgttgtttatcgaaaagggggcaaacaacatgaagtaacggcacgtgccgagactgtgttggcagctggagcgattaattcgccgcagattatgcagcgctcaggagttggcccgggcgctgtgttacaaaatgctggggttgatgtgctgcttgaccgtgccggtgtaggagcaaatctccaagaccatttggaggtatatttccagatcgcctgcgtgcaacccattacgctttataaacatctcaatatggcgtcaaaagcaattattgggctgcgttggctaatgtttaggtcaggtctgggtgcctccaaccaatttgaaacacttgggtttatcaggtcggcggcaggcgttgcttatcctgatattcaatttcattttctgcctgtggcgatacgatatgatggcaccgcttcagctgaaggacatggatttcagttacatgtagggccaatgcgatcaaaatcgcgagggcatgtcagaatcttggatgccaacagtttcagtccaccacaaattaaattcaactacctcagccatgccgatgattggaccgagttc

SEQ ID NO: 209997 - DNA, 862 bp, Unknown
  Bacterial polypeptide expressing nucleotide sequence isolated from the Sargasso Sea
aaagaagtaatattatcagctggatcaattggttctccccacatattgcaagtatcaggaattggagaaagtaataaattaaaagaacttgggattgatgttgttcatgaattaaatggtgtaggaaaaaatcttcaagatcatttaatgttcagaccagtctataaagttaaaaatttaaaatcattaaatagaaaagttgaaagtttgtttggaagatttttaatgggtttagagtatatttttaatcaaagcggtcctgtgactatgggagcaagtcaggtttgtggttttgtaaaaagtgacccctctagagcaacaccaaatttacagtttcatgtttctccagttagcacagatattttaggtgtaactcctatgcatgattttgaaggaattactccgactgttgcgaatataagaccaacaagcagaggtgaaattaaaattgttagtaatgatagtaggatttatccaaaaattaaaatgaattacttgtcaactgatgaagatagaaaagttgcagcattaggattaaaaattgtaagaaaaattatgttagaaactgaaacttttaaaaaatatgaaccagaagaatatagaccaggtgctcacattacggatgatgaagaattagttaaagctgcctctgattacgctcaaactatttttcaccccgttgggacctgtaaaatgggaagtgacgatatggctgttgtgaatgattctttaaaagttagaggtatagaaaatttaagagtaatagatgcatcgatcatgccgaatattacttctggcaacaccaatgcacccactataatgattgctgaaaagggtgcagatatgatattgaacggataat

SEQ ID NO: 209998 - DNA, 922 bp, Unknown
  Bacterial polypeptide expressing nucleotide sequence isolated from the Sargasso Sea
taatccagatatgaatggagaatatcaagaggggtttggaatgtttgatactactattcacaatggtgaaagagcaagcgtatccaaatattatttaaatcctgtaaaaaatagaaaaaatttaagtattttttcaaattcatttgtagaaaaaattatttttgatgggaaaaaagctattggtatagaagtaaaaattaaagataaagttgaaaaattttatgctgaaaaagaattaatattaagtggaggatcaattaattccccacaattattaatgctttcaggagttggagattcaaatcatttaaaagaaaaaggaataaatattgttcataatttaaaaggcgttggcaaaaatcttcaagatcatttggaaacatacattcaacaagagtgtaaaactcctgatagtctttatacatatacaaaattaattcctaaagtacttgctggaatacaatggtttttatctaagtctggaccttgttctcaatcatatttagaatcaggtggatttgcaaaatcttcacctgaacgtgaaattccaaatattcaatttcacttctttccttcttttgttattaatcatggtttaattaatccaagttctcatggctatcagttacatgctagccccaatcatccaaaaagtagaggatctgttaagttaaattcatcagacccatatgattatcccaaaatattattcaattacttagaagatgaagatgatttaaagcaaacaagagagtgtattgatgttgcgagaaaaattttatctcaaccatctttatcaaaacatgcaggtaaagaagttggtccgggatctgacaaacaaagtgatgatgaattaaacgaatatattagatctaatgcagaaactgcttatcatccgtgtggaacgtgtaaaatgggaata

SEQ ID NO: 209999 - DNA, 748 bp, Unknown
  Bacterial polypeptide expressing nucleotide sequence isolated from the Sargasso Sea
ttgttccaacttagacggtgttggaaaaaacttacaggatcacttggaaacttatgttcaacaagaatgcaaaactaaagacaccttatactcatacgttaataagttaaatatgattagaattggaattcaatggtttttgaataaaagtggtccttgttctacttctttcttagaagctggaggattttgtaaatcctctccagaaagagaatatccaaatattcaatttcatttttttcctgcttttgtaattgatcacggattagttgatccagatagacatggttaccagttacatgcaagtccaaaccatcccaaaagtagaggtcatatagctttaaatagctcaaacccttatgattatccaaaaattcaatttaattatctagaacatgaagatgatttaaagcaaactatagaatgtattcatgtagctagaaaaattttgggacaagattcattaaaaccatatgcgggaaaagaaattggaccaggagaacatgcccagactaatgaggtattcgaagaatacatcagatctaaagctgaaactgcttatcatccatcttgtacattaaaaatgggagtagataatatggctgtagttgaccaaaagctaaaagttcatggtgtagaaaatttaagggtagtggatgcttctgtcatgccagaaattacaagtggaaacctaaatgctccaacattaatgattgcagaaagagcatccgaatttattttaaattaa

SEQ ID NO: 210000 - DNA, 528 bp, Unknown
  Bacterial polypeptide expressing nucleotide sequence isolated from the Sargasso Sea
tgcaattttttgtgcaaccattcagtttagatttacaaacctcgaaaccacacccctttgatgcactaacaatggcagtttatcagttgcggccgcgcagtcggggcgaaatacgacttgcgtctagtgatttcaaaaagcagcccaaaattctgccaaagtatttgtctgaggaaatagatcaaaatgtattgattagtggaatcaaaatagcaaatgagttggcaaacacgtcgcccctgaacgatttaatcacgaatgcttatgagacgcctccaataaagaagtcctctgaaaaggaacttttagaatggattaaggcaaccgccagtactgcttatcatccctgtggaacttgcaagatgggtgatgataaaagctcggttgttgatcagaatctcgtagttcatggtttatcgggcttgagaatagttgatgcgtccataataccgcttataacatccggtaacacaaatgccccaacaattatgatcgctgagaaagctgctgacttgatcaaaaattagc

SEQ ID NO: 210001 - DNA, 967 bp, Unknown
  Bacterial polypeptide expressing nucleotide sequence isolated from the Sargasso Sea
agcaaggaattgtcttggggatatgagacagatccagatcctaacttgaatgggcgcaaattgatctggccacgtggtcgtgttttggggggtagtagttctattaatggtaccctttatgtgcgtgggcaagctgaggactacaatcattggcggcagcttggtaataccggctggagctttgatgatgtgcttccgcatttcaaaaactcagaagattatgagagaggtgccgataattatcggtcgacaggaggtccacttggggttcaagaggtatcagatcgacggcccgcctgtgaggcgtttttagcggcatgtcgagaagcaggatttaaagacaacccggactacaatggtgctactcaggaaggtatagggtatttccagacaaccactcggaacgggagacgttccagtactgccacagcctttttaaagccagctaataaacgtcccaatcttcgaattataactcgggcgttggcaacgggtctcaatattaaagaaggacgcgtcactggagtttcctacagtcaaggcctgaaacatactcaagcttccgcaaatagagaggttattctctcaggaggctctattaattcgcctcagttgcttcaattatcagggatcggtgatccagagcatcttaccaaattgggtatttctgttgtgcataatctgcccgatgttggacgaaatcttcaggatcacttgcaggtgcgagcggtttatgagttggacgggttgcactccctcaatacagatgtccgcagtccaataagacggttcatgatgggtatgcaatacgctttaaagagaaatggacctctgactatttcggctggacagacgtatctttttgcacgaacacgggaagagctagttacaccagatattcaattcttgtttatgccccttagcactgataagcccggtacggatctccacccataccctggtgtca

SEQ ID NO: 210002 - DNA, 706 bp, Unknown
  Bacterial polypeptide expressing nucleotide sequence isolated from the Sargasso Sea
aatgctttcgggagttggtaattcagatcatttgaaggaaaaaggaattgatgtggttagtgatataaaaggagttggtaaaaaccttcaagatcatttggagacatatattatgcaagaatgtaaaacacccaacactctttatacttatacaaaactaatcccaaaagttatggctggaattcagtggtttttatctaaatcaggtccttgttctaaatcttttttagaagctggaggttttgcaaagtcatctcctgaaagagaaatagcaaatatacaatttcatttttttccgtcatttgttattgatcatggtttagttaacccaagttcacacggatatcaattacatgcaagtccaaatcatccaaaaagtagaggattaataactcttaattcatcagatccttacgattatccaaaaatattatttaattatttggaagacgaagatgatttaaaacaaactagagaatgcattcatgttgcaagaaaaatcttatctcaaccttctttagcaaaacattctggaaaagaagttgggccgggttctgataagcaaagcgatgatgaattagatgaatatattagatctaaggctgaaactgcttatcacccatgtggtacttgcaaaatgggtgtggatgatatggcagtagttgatgaaagtttaaaagttaaaggaattcaaaacctaagaatt

SEQ ID NO: 210003 - DNA, 928 bp, Unknown
  Bacterial polypeptide expressing nucleotide sequence isolated from the Sargasso Sea
gatgtatgatgtaacaatacacaaaggtgaaagagcaagtgtttctagatattatcttaatccagcaaagaagagaaagaatttaaaagtatttagcgagtcttatgtggaaaaaataatttttgatggaaagaaagctgttggaattgaagttaaaattaaaaataaagtagaaaaaatttatgcaactaaagaagtgatattaagtggaggttcaattaattcgcctcaactacttatgctttcaggagtaggtccagcaaaacatttaaaagaaaaaggaattgaagtcgttcatgctttagaaggtgtcggtaaaaaccttcaagatcatttagaaacctatgttcagcaagaatgcaaaacatctgacactctgtattcctatataaataaactaaatatgttgagggttggaattcaatggtttttaactaaaagtggtccctgctctacttcgtttttagaagctggaggtttttgcaaatcttctcctgaaagagagtatccaaatattcaatttcatttttttccagcttttgtaattgatcacggtttagttgatcctgatagacatggatatcaattacatgctagtccaaatcatccaaaaagtagaggtcatataactttaaatagttcgaacccttatgattatccaaaaattcaatttaattatttagaacatgaagatgaccttaaacaaacaattgaatgtattcatgttgcaagaaaaattcttggtcaaaattctttaaaaccatttgctggaaaagaaattgggccgggtgaagaagtacaaactaatgaattatttgaagaatatattagatcaaaagcagaaacagcttatcacccgtcttgtactttaaaaatgggaatcgatgaaatggcagtagttgatgaaaaattgaaaatcacggtttag

SEQ ID NO: 210004 - DNA, 754 bp, Unknown
  Bacterial polypeptide expressing nucleotide sequence isolated from the Sargasso Sea
attgaaggggagtttggaaaaaatttacaagatcatttaatgtttaggccagtctataaagttaaaaaccttaaatctttaaataaaaaaattaatagtctttttggaaatttcttaattggattagaatatatctttaatcagagcggacccatgactatgggtgctagccaagtatgtggttttgcaaaaagtgatagttctagggaaactccgaatttacaatttcatgttcagccaattagtacagatattttaggcgcaactaagttacatgattttgatggcattacaccaactgtagcaaacattagacctacgagtagaggtgaaataaatatagtaagtaataatattaaagattatcctaaaataaaaatgaattatctttcaactgatgatgatagatatgttgcagctcaaggacttaaactggttagaaaaataatgttagaaactaaaacatttaaaaaatatcaaacagaagagtatagacctggattacacattaaagatgatgaagaattagttaaggcaggaagtgattatactcaaaccatatttcatcctgttggaacttgtaaaatgggaaaagatgaaaattcggtagtaaatgacaaactaaaagttcatggaatagagaatcttagagttgttgatgcctctataatgccaaatattacatcaggaaatactaacgctcctactataatgattgcagaaaaagctgctgatatgatactaggaaaataat

SEQ ID NO: 210005 - DNA, 937 bp, Unknown
  Bacterial polypeptide expressing nucleotide sequence isolated from the Sargasso Sea
aacaatagatcaattagatatccaagaggaaaaacactgggtggtagctcctcaattaatgggttgttatggatacgtggtcaaagagatgattataatgtgtggcgccaacttggtaataatggatggggttggaatgatgttttaccttattttttaaaatctgaaaacaacgaattaggaaaaagtgaatttcataatgatagtggaccgatatcagtagcaaataaaaaaataaatttaaaattacttgatgagtttcaaaatgctgctgaagaagttggaattccaaaaacaatagattttaataaaggtgataattttggagttggtttttttcagtttacaactagtcacagccaatttggtcttaaattacgttgcagcgcagctaaaggttacttaaatcctgtaaaaaaaagaaaaaatttaaaaattattgttaatgctcatgttcaaaaaataaattttaataacaagtctgtagatattgttagtttttttacaggggataaattaaatcatattaaagtaaataaagaagctattttatcagctggcgcaataggatcaccacatttgttacaaatatcgggaattggagatagtgaaaaaataaaaaaacatggaatagaagttgtacacgaactgaaaggtgtgggaaaaaatttacaagatcatttaatgtttcgaccagtttataaattaaaaaatataaagtcacttaatagagatgttgagagcttatattcaaagtttttaatgggtcttcagtatatttttagacaaagtggccctattacaatgggtgcgagccaagtgtgtgcttttactaaaagtgatccatcacgtgctactccaaacttacaatttcacgtccaaccacttagtacagatattctgggagttactcctatgcatgattttgagggaatta

SEQ ID NO: 210006 - DNA, 942 bp, Unknown
  Bacterial polypeptide expressing nucleotide sequence isolated from the Sargasso Sea
tcacacaacggtatggttcatgtaagaggaaatccaatggattttgaaaactgggctcaaaaggaccttaagtcatggaattataataatgttcttccgtattttaaaaaatcagagtcaattgaaggattagatgaaacttataggaataaaagcggtcctttaaaattatctcgatcttcagaaggcaatgaattgagtaaagtctacctagaagcagcagaacaagccggctatgagataaataatgacatgaatggatataagcaagagggatttggtctaatggataccactatttatggaggcaaaagacagagtacgagtgtaacttacttgcatccagttattaatagaagaaatcttaccgtcattacaaatacaatagtaaacaaagttattattgaaaatgataaagcagtaggggttgaatgtactaaaggaagagagataaaaaaaatacatgctgaaaatgaagtgatattatcagctggagcaataaattcacctcaacttctaatgctttcaggtataggaagtgctgaagaactaaaaaaattagatatatctgttcaacatgacctgagaggtgtaggtgaaaatttacaggatcatcttgaaacttatttacaatatgaatgtacaaagcctgttacactttacacatcatataatccgataagaatggcattcataggaatagagtggtttatttttaaatctggagtggcagcatattcaaacttagaaactggtggcttcgtgagaagtaatgatatggttgattaccctaatattcagtatcacttctttccatcgcttgtattggatcatggaagacaatctccaagctctcattcttttcaagcgcatgtaggaccaatgaggccaacaagtagaggaaatgtcaaattaaagtcaaacaatccctcagcctcaccc

SEQ ID NO: 210007 - DNA, 918 bp, Unknown
  Bacterial polypeptide expressing nucleotide sequence isolated from the Sargasso Sea
aatggaaaaatttgattacataataattggtgctggttctgctgggtgtgttttagctaatcgaatagttaaaacaaataaatataatgttttattaattgaggcaggaggcaaagatacttacccatggatacatataccggttggttattacaaaacaatgcataatcccaaaacagattggtgttttaaaactgaaccagacgagagtatggaaaatgtatctattccctatcctagaggaaaaactttaggtggtagctcatcaattaatggtcttttgtacattagaggtcaagagcaagattatgatttatggagacaactcggaaatgttggttgggcttggaaagatgtcttaccttacttcattaaagctgaggatcaagagagaggtggtgacgaatttcatggtgttggagggcctttggccgtatcagatcaaagaataaaattagatatattagatgttttcatgaacgcagcaaaagaagttggtattccaaaagtaaatgattttaacaaaggagataattttgggtgtggttattttcaggttacagagaggaacggattaagatgtagtacagctgttggttatttaaatcctatcaaaaaaaataaaaacttaaaaattgaaacaaactgtcatgttcaaaaaattaattttgatggaaataacgcagatagcgttacttattcaaagggaaatgaaaattttatcgttaaagctgaaaaggagatcctactctgtgcagggtcaattggaagccctcatatactccaaacttcaggagttggggaagcttcgaaaataaaaaattttggaattgatatcattaaagatctcaagggtgttggcaaaaatcttcaagatcacctgatgtttagaccagtttataaagtaaaaaaatataa

SEQ ID NO: 210008 - DNA, 773 bp, Unknown
  Bacterial polypeptide expressing nucleotide sequence isolated from the Sargasso Sea
aactgtctggcgggaggagacgatttccggggggatcagggaccactcaaagtggaaagaggtcctgcttcaaccccgttgtttcaggcttttttccaggcagtccaacaggcaggattcgaactgacaaacgatgtaaacggttaccgtcaagaaggctttgcagcctttgataaaaacgtattccggggaagacgtctcagcgcagctagagcttatcttcatcctgtgatgaatcgacccaacctcgaagttatctgccgtgcccatgcattatgcatccgttttgagggaaacagggctttgggtttggattttagccacaaagggcaaacacgaagcgttaaaggtggagaaatcattagctgtggaggcgccttcaattctcctcaactgctgcagctttcagggatcgggaatccgaaagaccttgagcccctgggtatcgaaatcgttcaagaactcccgggattgggagaaaacctgcaggaccatctggaggtgtatgtgcagcatgcgtgcacccagcctgtttcgatgcagcctgctctgcgttggtggaataaaccttggatcggttttcagtggcttttctttcgaaagggccctgcagccaccaatcattttgaagcaggagggtttgcgcgaagcaatgatcaggtggcttaccccaacttgatgtttcattttctgcccctggcaatccgctatgatggaacctctccaaccggaggacatgggtaccaggtccacatcggaccaatgtattccaa

SEQ ID NO: 210009 - DNA, 785 bp, Unknown
  Bacterial polypeptide expressing nucleotide sequence isolated from the Sargasso Sea
aaacggtataaaaactgttcatgagttgaaaggtgttggtaaaaatttgcaagatcacttaatgtttagaccagtttacaaggtaaaaaatttaaaatcgttaaatggtaaaataaatagtttatttggtaattttttaattggtttagaatatctatttaaacaaagtggaccaatgacaatgggagcaagtcaagtttgtggatttgctaaaagcgatccatcaaaagaaactcctaatttacaatttcatgttcaaccaattagcactgatattttgggtgcatcaaaacttcacgactttgacggtatcactccaactgttgcaaatattaggccttcaagcaggggagaaatttcattagtaagtaatgacagtagagttaatcctaagattaaaatgaattacttgtctacacaagatgatcgaatagttgcggctcaaggactaaaacttgtaagaaaaattatgttagagactgaaacttttaaaaaatatgagccagaagaatatagacctggcgttcacattacgaaagatgaagagttggtaaaagctggtagcgagtttacccagaccatttttcacccagtgggtacgtgtaaaatgggcaaagatgatcatgcggttgttaatgataagttatatatccatggacttaagaatttaagagtgatagatgcttcaattatgccaaatattacatcaggaaatactaatgctccaacgataatgattgcagaaaaaggtgcagaatttattttaaataatcaaactcaatgac

SEQ ID NO: 210010 - DNA, 862 bp, Unknown
  Bacterial polypeptide expressing nucleotide sequence isolated from the Sargasso Sea
aaaaaagcaattggaattgaagtaaaaattaaaaataaagtcgaaaaaatttatgccaataaagaagtaattttaagtggaggtgcgattaattcaccacaattactaatgctttctggaattggtccaagccaacacttaaaagataaaggaattagtgttgttcacaacttagatggtgttggaaaaaacttacaagatcacttggaaacttatgttcagcaagaatgcaaaactaaagacaccttatattcatacgttaataagttaaatatggtgagaattggaattcaatggtttttgaatagaagtggtccttgttctacttctttcttggaagctggaggattttgtaaatcatctccagaaagagagtatccaaatattcaatttcatttttttcctgcctttgtaatcgatcatggattagttgatccagataggcatggttaccagttacatgcaagtccaaaccatccaaaaagtagaggtcatataactttaaacagctcaaacccttatgattatccaaaaattcaatttaattatctagaacatgaggatgatttaaaacaaacaatagaatgtattcatgtagctagaaaaattttaggacaagactctttgaagccttttgcaggaaaagaaattggaccaggagaacatgcccaaagtaatgagttattcgaagaatacatcagatctaaagctgagactgcttaccacccatcttgtactttaaaaatgggagtagacaatatggctgttgtagatcaaaaactaaaagttcatggtgttgaaaatctaagagtagttgatgcgtctgtaatgcctgaaattacaagtggaaaccttaacgctc

SEQ ID NO: 210011 - DNA, 466 bp, Unknown
  Bacterial polypeptide expressing nucleotide sequence isolated from the Sargasso Sea
atgagtaatcattacgactatattattgttggtgcgggatctgcgggttgtgttttagctaaccgattatctgaagattcaagcaacaaagtgttactactagaaaccggtggcagtgataaaagtatttttattaaaatgccaacggcgttgtctattcctatgaatactgacaagtatgcttggcaatttcatactcagccagagccgtacttagataaccgtgaaatgcattgccctcgtggtaaggtactcggtggctcgtcatcgattaatggcatggtgtatgtacgcggccacgcaaaagattttgatgagtggcaacagcacggtgctaatggttgggactaccaatcgtgtttaccgtattttcaaaaagcggaaagcttttaccttggtgaaaacagcatatcgaggtggcaaaatggccccacttggcgttataataacggtaacgaaaaatgca

SEQ ID NO: 210012 - DNA, 739 bp, Unknown
  Bacterial polypeptide expressing nucleotide sequence isolated from the Sargasso Sea
tttgaatactgattacgtcattgttggtgctggtagcgcgggttgtgctattgctttcaggctcactgaagccgggcacaaagtaacagtaattgagtttggaggtggcgatggaagtccattaatacaaatgccagccgctttaagctatccaatgaatatgcaacgttttgattggggctactcgtcagaacccgagccccatctgggcggaagaaaattggcgtgtccaagagggaaagtgcttggtgggtcttctagtataaatggaatggtttatgtgagagggcacgcaaaagatttcgataaatgggctgaaatgggtgcccttgggtggtcatctgcggatgttttgccttactttaaacgcttagaaaactgggatagcgcaggtcatggcggagaaaaaagctatcgcggtacaaatggacctttaaatataaccagaggtacaagagtaaatccattgaatttggcgtttgaaatggcagggcagcaagcaggttaccaaacaactttggattataatggaaggcaacaagagggttttggtcctatggaccaaacaataaaaaatggaaaacgctggtccagtgctaaagcttatctaaacccggctgtaagatctggtaaatgtcgcatcattagaggtttagtgacaaaaattaaaataaataaaaagcaagcggagggtgttgaatattttaaaaatggaaaactcgaatgtatttatgcttca

SEQ ID NO: 210013 - DNA, 805 bp, Unknown
  Bacterial polypeptide expressing nucleotide sequence isolated from the Sargasso Sea
gcatgacccaaaatataactacaaatattattcagaaccagaacctcacttacataatagaagattgttttgtccaagaggaaaaatgattggtggatgttctgctcataatggaatggtatttgtcagaggaaatccaaatgattatcaaagatgggcatcttttggattagatgattggtcgtatgaaaaagtacttccttattttaaaaaaattgaaacatggtctgagggagaaaacgaatatcggggtggtagtgggatattgccagtaaaccaatctaaaaataaaaatcctttattcaaggcatttgtagattcagctggcgaggctggttacaaaataaataatgacatgaatggtaaagaacaagaaggttttggaatgtatgatgtcactatccataaaggagagagagcaagtgtatctaagtattatttaaatcctgctaaaaaaagaaaaaaccttaaagtatttacagaggcttttgttgagagaattatttttgatggaaaaaaagcaattggaattgaagtaaaaataaaaaataaagtcgaaaaaatttatgcaaacaaagaagtaattttaagtggaggtgcaattaattcaccacaattactaatgctttctggaattggtccaagccaacacttaaaagataaagggattgatgttgttcataacttagagggtgttggaaaaaacttacaagatcacttagaaacttatgttcagcaagaatgcaaaactaaagataccttatattcatacgttaataaattaaatatggttagaattggaatt

SEQ ID NO: 210014 - DNA, 786 bp, Unknown
  Bacterial polypeptide expressing nucleotide sequence isolated from the Sargasso Sea
aaaacggtatacaaactattcatgaattaaaaggtgttggtaaaaatctgcaagaccacttaatgtttagaccggtctacaaggtaaaaaatttgaaatcgttaaatggtaaaataaatagtttatttggtaattttttaattggtttagaatatctatttaaacaaagtgggcctatgacaatgggagcaagccaagtttgtggatttgctaaaagtgatccatcaaaagagacacctaatttacagtttcatgttcaaccaattagtacagatattttaggagcatcaaaacttcacgactttgacggtatcactccgactgttgctaatataaggccttcaagcaggggggaaatttcaatagtaagtaatgacagcagagttaatcccaagattaaaatgaattacttgtctacacaagatgatcgaatagtcgcggctcaaggactaaaacttgtaagaaaaattatgttagaaactgaaacttttaaaaaatatgaaccagaagagtatagacctggtgttcatattactgatgatgaagaattggtaaaagctggtagtgagtttacccaaactatttttcaccccgtgggcacgtgtaaaatgggtaaagatgataatgcagttgttaatgataaattatatatgcatggacttaagaatttaagagtgatagatgcttcaataatgccaaatattacttcaggaaataccaacgctccaacaataatgattgctgaaaaaggtgcagaatttattttgaataatcaaactcaatgac

SEQ ID NO: 210015 - DNA, 832 bp, Unknown
  Bacterial polypeptide expressing nucleotide sequence isolated from the Sargasso Sea
tcaattttgcaagtttctggaattggagaggcagaaaaattaaaaaagttttgtattgaagtagtaaataatttaaagggagttggaaagaatttgcaagatcatcttatgatgagacctgtttacaaagttaaaaatcttaagtcattaaataaaaaagttaacagcctatttggtagatttgtgatgggacttgaatatattttaaaacaaagtggaccaattactatgggcgctagtcaagtttgtggttttgttaaaagcgatccatctagagctactcccaatcttcaatttcatgtttcaccaataagtacagacattcttggtgttactccaatgcacgattttgaaggaataactcctactgtagccaatgtacgccctacaagtagaggggaaataaatatagtaagtagtgatagtagagaataccctaagattaaaatgaattatttatcaacagaagatgatagacatgtagctgccctagggttgaaaataattagaaaaataatgctggagactgaaacatttaaaaaatatgaacctgaagaatatcgacctggaatacatattcaagataatgaagaattggtaaaagctgcaagtgactatgctcaaactatttttcatccggttggaacgtgtaaaatgggaagtgacgatcattctgttgtaaatgataaactaagtgttcatggaatagaaaatttgagagtaattgacgcctcgataatgccaaatattacctctggtaatacgaatgcacccactattatgattgctgaaaaaggttctgatatgatattaaatggacctaatgtctgaa

SEQ ID NO: 210016 - DNA, 649 bp, Unknown
  Bacterial polypeptide expressing nucleotide sequence isolated from the Sargasso Sea
attagttccaaaagtacttgctggaatgcaatggtttttatctaaatctggtccatgttctaaatcatatttagaagcaggaggatttgcaaaatcttctcctaaaagagaaataccaaacattcaattccatttttttccttcatttgttattaatcatggtttagtaaatccaagttctcatggttaccaattacatgctagtccaaatcatcctaaaagcagaggatatattgctttaaattcatcagatccttacgattatcctaaaatactatttaactatttagatgatgaagatgatttaagacaaactagagaatgtatacatgtcgcaagaaaaattttatctcaaccttctttagcaaaacatgcaggaaaggaagttggtcccggatcagacaaacagaatgatgaagaactcaatgaatatataagatctaatgcagaaacagcataccatccatgtggtacatgtaaaatgggggtagataatatggcagttgttgacgaaaatttgaaagtcaaaggtatagaaaatcttagagttgttgatgcatctattatgccggaaatccctagtgctaatttaaatgcccctactctaatgattgcagaaaaagcttctgaccttattttaaattcttaa

SEQ ID NO: 210017 - DNA, 790 bp, Unknown
  Bacterial polypeptide expressing nucleotide sequence isolated from the Sargasso Sea
cccgccgctctctcttaccctatgaacatggataagttcgattggggttataaagctgaaccagagcaagcattaaacggaaggtctttagcctgtcctaggggtaaagttattggaggatcctcttcaattaatggaatgatttatgtaagagggaacgctggtgactataatcagtgggcagaaagtggagcgaaaggatgggattatccagatgttcttccatattttcaaagaatggaagcaagccatggaggaaattctgaatttagagggaaatctggcccattaaatataactcatggcaaaagagataatcctttacataacgcgtttgtaaaagcaactgaacaagcagggtatacatacactgaggattataatggttttcgacaggagggctttgggcccgctgacatgaatgtttggaaaggttcacgtttttcaacagctaaagcttatttaaaacctgcattagcaaagaaaaatgtacaccttattactaaagttttagttgataaaataatatttagtgaagacaaggctaaaggggtggaagtatttcatcaaggccaaaaaaaaatttttaatgccaatatcggagttgttttatctgccggtgctataaatagtccaactattctccaaaggtcaggaattggggacgcaaatgatttaaacaacttaggaattaaggttattaaaaacttacctggagttggtaaaaatttacaagatcatttagaagtttattttcaagtgaagtgtttacaaccgagtaacacttaac

SEQ ID NO: 210018 - DNA, 910 bp, Unknown
  Bacterial polypeptide expressing nucleotide sequence isolated from the Sargasso Sea
gttttactgatagaagcaggtggtagagatactaatccttggatacatatcccagttggttattacagaacaatgcataatccagaagtagattggtgttataaaacagaaccagatgaaacaatggcaaatagatctataccttatccaagaggtaaaactctaggaggtagttcatcaataaatggtcttttgtatataagaggtcaagagcaggattataatatttggagacaattaggaaataaaggatggagctggaaagatgtattgccatattttatcaagtctgaatctcaagaaaggggcaaggatgaatttcatggtgataatggaccactatcagtttcagatcctagaataaaattagaattgttagaaagatttatggatgctgcagaagaaaaaggtattccaaaaattgatgattttaataaaggtgacaactttggttgtggttattttcaagttactgaaaaaaaaggtctaagatgtagtgcagcagtaggatatttaaatcctgtaaaaaatagaaaaaatttaaagattgaaactaattgtcatgttcaaaaaataaactttgatggaacaaaagctataagtgtatcatttttaagaaataatcaatctattacaataaaagcaaataaagaaattttattaagcgcaggatctattggatctacacaaattttacaaacatctggagttggtaatggaacaaaactatcaaatttaggaattaaaataataaaagaattaaaaggtgttggtcaaaatttacaagatcatttaatgtttagaccagtttataagataaagaatattaaatctttaaataaaaaaattaacagtttatttggaaatttattaattggtttagaattcatatttaatagatctggaccaa

SEQ ID NO: 210019 - DNA, 842 bp, Unknown
  Bacterial polypeptide expressing nucleotide sequence isolated from the Sargasso Sea
ttacaaatattattcagaaccagaacctcctttacataacagaagattattctgtcctagaggaaaaatgattggtgggtgctctgcgcataatggaatggtatttgtcagaggaaatccaaatgattatcaaagatgggcatcatttgggttggaagattggtcttatgaaaaagttcttccctattttaaaaaaattgaaacatggtctgaaggagaaaatggatatcggggtggcagtggaatactaccagtaaaccaatctaaaaataaaaaccctttattcaaagcctttgtggactccgctggtgaggctggttacaaaattaataatgatatgaatggtaaagaacaagaaggttttggaatgtatgatgttactattcataagggtgaacgagctagcgtatcaaaatattatttaaatcctgctaaaaaaagaaagaatttaaaagtatttacagaagcttttgtagagaggattatttttgatggaaaaaaagcaattggaattgaagtaaaaattaaaaataaagttgaaaaaatttatgccaataaagaagtaattttaagtggaggtgcaattaattcaccacaattactaatgctttccggaattggtccaagccagcacctaaaagataaaggaattagtgttgttcacaactcggtgggagtgggaaaaaacttacaagaccacttagaaacttatgtacaacaagaatgtaaaactaaagatactttgtattcttatgtaaacaaaatcaacatgattagaattggtattcaatggtttctaaatagaagtggcccatgttctgcctctttcttagaggcggggg

SEQ ID NO: 210020 - DNA, 916 bp, Unknown
  Bacterial polypeptide expressing nucleotide sequence isolated from the Sargasso Sea
gttagcgcagcacaagaagcaggatttttagcaactgaggattataatggtttccagcaagaaggatttggtccagctgacagaactatttggaaaggatcaagatggtctgcatcaaaagcatatcttaaaccttctattcaaaccaagaaactaaaaatatttaagaatgctcttgttgataaaataaacttttcagatagaaaagctataggtgtaacattttcacaaaatggcaaatcagaaaaaattttagctgcaagagaagttatatgttcagcaggtagtataaatagccctttgatattgcaacgttcgggaattggcccttcaaatctcttaaaaagacataatattaatgtactgctagacaatcaaaatgttggtgaaaatttacaagatcacttggaagtttattttcaagtaaagtgcaaaaaacctatcactttatacaaatataataattttttttcaaaaggaattataggcttaaattggcttttgttcaaaaaaggaataggtgcttcaaatcattttgaaacacttgggtttttaagatcaaataataaagtaaaatatcctgatattcaatttcacttgctaccaattgctattaattatgatggcagttcagctgtaaatgatcatggttttcaattgcatactggtcctatgagatctaaatctcgaggttgggtaaaaatcactagttcaaatccaaaattaaatccaaaaattaaatttaattatatgacacatcccgatgattggtttgaatttagaaattgtatcaaaattactaggaagattttaaatcaaccagcgtttaaagatttttatgaagaagaaattcaacctggaaaacaaaaaatctctaatgatgatttagataactttattaaggaggaggctgaaa

SEQ ID NO: 210021 - DNA, 754 bp, Unknown
  Bacterial polypeptide expressing nucleotide sequence isolated from the Sargasso Sea
cataattaatgatttaaaaggagttggtgaaaatcttcaagatcatttagaaatatatattcaatataaatcaaagaaaaaagaaacattatatgatttatcaaccaattttatttctcaaagtattgaaggaagcaaatggtttacttttaagaaaggtaaattagctcactcacatttagagttaggtggttttgtaaaaacaaataaaaattactcacatccaaatttacaatttcatttttttccatcattagtgatcaatcatggtttaacaaatcctgaatttgatgcttttcaatttcacgcatgtcctaacaggccaaagagtagggggtttgttaaaataaaatcaaatgattttaatatatcacctcaaatccaatttaattacctacaaaatcaagaggatttaattcaaatgagagacagtgtgaaaattgcaaaaaatatttgctctcagaaatcacttttagattatgttgattacgaaataaggcctggaattgatattcaatctaatgaagaattagacgaagttgttagaaacactgctgaatcggcatatcacccctcttgtactaataaaatgggcaatgatgaatattcagttgttgatcaaaaaacaaaagttcatggcattgaaaatttaagagttatagatgcatcaattatgcctgatattgttagcgccaatttaaatgcaagtgtagtgatgatcgcagaaagagcagctgattttttactagattaa

SEQ ID NO: 210022 - DNA, 975 bp, Unknown
  Bacterial polypeptide expressing nucleotide sequence isolated from the Sargasso Sea
ggatccgatccgaagcaggaagaatctgcacatagtatgtaaccgcaccgtctcacgtatcgtgctggagggtgatcaggcgacaggtgtagagattttctcagacgagaacttccgctatatccggagtcggcgggagatcatccttagtgcgggggcgatcgattcccctaagctgttgatgttatctgggattggtcccgccgagcatttgctggataccggcatagatccggttcttgacctggccggcgtcggccggaatcttcaggaccacgtcaatgttaacgtcaagtatgcatgcgaacagcctgttagctatacccggttgctcgaaccccatcgaaagatgctagttggcttgcagtggttgctgacaagaaaggggcctggagcaaccaatcatttcgagattgcgggatacgtaaaatcgcggatcgggattgatcgtccggacctgcaagttctctttattccactgttagtggatgatgatggaagggctccgaaacaaccccacggtttccaggtcgccctgtccctgctgcgctccaacagccgcggcagtgtggagttgaaaagtgctaatccttgcgatccgccttccattttattcaactacttggaatcatcccgggactatgtcgagctgcgaaaaggcattgaaaagacccgagaaatttttggtgccagtgcgttctcgcctttccttggcgatgagattgccccgggaaaaccgacttcggaaggcaagctggattctttcatcaagcagaccctgcgctccactaagcatccatgcggtacctgcaggatgggccaggacgacgagtcggtggtagaccatcagtgcagagtgcacagtgttggtgggttaagagtggttgatgcttcaatcatgcccgagatcaccagcggtaataccaatgctccgactatcatgattgcagagaagattgcggaccggatactcgg

SEQ ID NO: 210023 - DNA, 808 bp, Unknown
  Bacterial polypeptide expressing nucleotide sequence isolated from the Sargasso Sea
ttactaatgctttctgggattggtccaagccaacacttaaaagataagggaattgatgttgtacataacttagagggtgttggaaaaaacttacaagatcatttagaaacttatgttcagcaagaatgcaaaactaaagataccttatattcatacgttaataaacttaatatgataaggattggtattcagtggtttttaaatagaagtggtccttgttctacttctttcttagaagctggaggattttgtaaatcatctccagaaagagagtatccaaatattcaatttcatttttttcctgctttcgtaattgatcatggaatagttgatccagacaggcatggttaccaattacatgcgagtccaaaccatccaaaaagtagaggtcatataactttaaacagctcagacccttatgattatccaaaaattcaatttaattatctagaacatgaggatgatttaaagcaaaccatagaatgtattcatgtagctagaaaaattttggggcaagactctctgaagccttttgctggaaaagaaattggaccaggagaacatgctcaaactaatgaggtatttgaagaatacattagatcgaaagctgaaactgcttatcacccatcttgtacattaaaaatgggagtagataatatggctgtagttgaccaaaagctaaaagttcatggtgtagaaaatttaagggtagttgatgcttctgtcatgccagaaattacaagtggaaacttaaatgctccaacattaatgattgcagaaagagcatctgaatttattttaaattaaa

SEQ ID NO: 210024 - DNA, 615 bp, Unknown
  Bacterial polypeptide expressing nucleotide sequence isolated from the Sargasso Sea
gttgtgcataactcaaaaggtgttaggaaaaaatttacaagatcatcttgaaacatacattcaacaaaaatgtaagacacccaacactctctatacatacacaaaattgatacctaaaattttagcaggtatgcagtggtttatgtttaaatcaggaccttgttcaaaatcatttttagaggctggaggttttgcaaaatcttcatcagagagaaaagttgctaacattcaatttcatttttttccatcttttgtaataaatcatggattagaggatccagattcgcacggttatcaattacacgcgagtccaaatcatccaaaaagtagaggtgagataactctaaattcatcagatccatacgattaccctaaaattttatttaattatttaaaagaagaagaagatctaaaacaaactagagaatgtattcatgttgcaagaaaaattctatcacaaccagctctttcagaacatgctggtgatgaagtaggaccaggtttcaacgctcagtcagatgatgaattgaatgaatatataagatctaaagctgatactgcttatcacccatgtggaacttgtaaaatgggtgtggataacatggcagttgtaga

SEQ ID NO: 210025 - DNA, 583 bp, Unknown
  Bacterial polypeptide expressing nucleotide sequence isolated from the Sargasso Sea
tatggattcgtttgattatattataattggtgctggttctgctggatgtgttttagctaaccgtctcacaagtgatggtaaaaataaagtattactattagaggctggtggaaaagataattatccctggattcatattccggttggatattataaaacaatgcataatcctagaacggattggtgttttaaaactcagccagataaatcgatgaataatagatctataaattatcctaggggaaaaactttaggtggaagttcttccataaatggattgctttatataagaggacaagaacaagattataatctttggagacagttaggaaatgttggctggagttggaatgatgttttaccttattttttaaaatcagaggaccaagagagaggggaaagtaaatttcatggtgtaaatggaccattatcagtatccgatcaaagaattcaattacccatattagatatatttcaaaaagctgctaatgaggtcggaattcctaaagttgatgattttaataagggagataattttggatgtggatactttcaagtaacagaaaaaaatgggttaaggtgt

SEQ ID NO: 210026 - DNA, 776 bp, Unknown
  Bacterial polypeptide expressing nucleotide sequence isolated from the Sargasso Sea
cttcaaaatcggagctgacacaagttggagaggtacttctggtccacttagggtacaacaggcgcaaccgcataatcccttaatgcgtggtttcctaaaagcaggtgaacaggctggattaaaatttacacaagactacaatggagagtctcaagaagggttttgtgcttttgatcagactatattttcaggtgaaagattttcagctgctaaagcatatctttcaccggcacttaagactagaaaaaatatagaattgcgaaatggcagggttacccgcataatttttgagaagggtgttgcaaagggtgtagagtatctaaaaggcaaaagaaagcacattttgtgggcttctaaagaaattattcttgcagcctcatcaattaactcgccatttattttgatgcattcaggaataggtccagctgatcacttgagaaaatatggtattccaattataaatgatctgcctggtgttggtgaaaaccttcaggatcatttagagttatatattcaacaagaatgtaccaagccagtgagtctctataaatattggaacccaatttctaaaggcctcattgggttgcagtggctactattcaaaacaggattaggttcctccaaccaatttgaggtaggggctttcttaaagtcggatagaaattcttcctatcctgatatacaaattcactttttaccgttagctgtaagatatgatggttccatggcccaaggacatggtttccaaattcatattggacctatgaggtcaaaat

SEQ ID NO: 210027 - DNA, 855 bp, Unknown
  Bacterial polypeptide expressing nucleotide sequence isolated from the Sargasso Sea
tgcttatcttgacagaataagcaaaaaaaagaatataaaaataatcacttcatgtatagctgataaactattgttttcaaataataaatgcacaggattattgcttattaaaggaaataaaaaattcgcagttggttgtactgatggggtaattttagcggcaggagcgataggtagcccctcaatacttcaaagatcagggattggccctccaaatcttttgaaaaaattaaagataaaaccgctagtcgaattaaatggagttggaaaaaatttacaagatcacttagaactatactttcaagtaaaatgcaaattacctgtatctctttataaacataccaatgcattttccaaattatctattttcttgaaatggatgttttttaaaaagggcgttggagcttcaaatcaattcgaaactcttggattcttaaaaaccgataaaagccaattatatcctaacctacaatatcactttcttcccttagcgataaagtatgacggatcctttcctcttaaaggtcatggctttcaatttcatattggtacgatgagatcaaaatctcgtggctttgtagaaataacagataccaaccccttctcgcaaccaaaaattcagtttaattatttgagccattcagatgatttgaaagattttcgaagcgcaataaaaatttctagaaagattttgagccaaccctcattcaggaagtttgtagataaagaaattaacccaggatccgaattatggacagatgctcagcttgatgaatatataaggtcaaatgttgaatctgcttatcacccttgcggatcatgcaagatgggaagcgataatgatcttgaagccgt

SEQ ID NO: 210028 - DNA, 418 bp, Unknown
  Bacterial polypeptide expressing nucleotide sequence isolated from the Sargasso Sea
tggcaggaattccgcgatgcgattcgccttacccttgaaatcatcaaccagccggcgctggataaattccgtgggcgggagataagcccaggcattgactgtcagagcgacgaacaactggatgcgtttgtgcgtaaccacgcggaaaccgcgtttcacccctgtggcacctgtaaaatgggcgttgatgagatggccgtggtcgatggcgaaggcatcgtgcacggcgtggaaaatctgcgcgtggtggatgcgtcaatcatgccgcaaattatcaccggcaatttgaatgccacgaccatcatgattggcgagaaaatcgccgatgccattcgcggtcgtgcgccgctggcaaaaagcaccgcgcgctattacgtggcgggcgatgcgccggtacgcaaaccggcactgcgctaat

SEQ ID NO: 210029 - DNA, 868 bp, Unknown
  Bacterial polypeptide expressing nucleotide sequence isolated from the Sargasso Sea
gttgagagaattatttttgacggaaaaaaagctatcggaattgaagttaaaattaaaaataaagttgaaaaagtttatgcaaataaagaagtaatcttaagtggaggtgcaattaattctcctcaattactaatgttatctggaattggtccaagtcaacatttaaaagacaaaggaattaatgtagttcataacttagaaggtgttggaaaaaacttgcaagatcatcttgaaacttatgtgcaacaagaatgtaacactgaggatactttattttcttatttgaataaaattaatatgataaaaataggcgttcaatggtttttaaatagaagcggaccctgttcacactcttttttagaggccggaggtttttgtaaatcttcatcagaaagagagtatccaaatattcaatttcatttttttcctgcttttgtaattgatcatggattagttgagcaagataggcatggttatcaactacatgcaagtccaaaccatcctaaaagtagagggcatataactttaaatagttcaaacccatatgattatcctaaaattcaatttaattatcttgagcatgaggatgatttaaaacaaacaattgaatgtattcatgtagcaagaaaaattttaggtcaaaaatctctaaaaccttatgctggaagagagattggaccaggagaaaatgctcaaacgaatgaggtatttgaggaatatataagatcaaaagctgaaaccgcttatcacccatcttgtactttaaaaatggggttagataacatggcagttgttgatcaaaaattaagggttcatggtatagaaaatctaagagtagtagatgcatctgtaatgcctgaaataacaa

SEQ ID NO: 210030 - DNA, 808 bp, Unknown
  Bacterial polypeptide expressing nucleotide sequence isolated from the Sargasso Sea
tgggattggtgatgagaaaaaacttgtaagcttaggaatatccgtaaaacatcacaactcaagtgttgggcaaaacttacaagatcatctaatgttacggcctgtttataaagttaaaaatatcaaaacactaaacaaaactataaacagtttttttggaaaaatgatgattggtatggaatttgttttttttagaagaggtgtaatgacgatgggggcaagtcaactttgtggttttgctaaaagtgatgaaagtaaagaaacaccaaatttgcaatttcatgttcaaccaattagcactgaccgattaggaggtgccagtctgcataagtttaatgcctttactccaactgttgcaaatataagaccaacaagtagaggagaaatatatataacttcaaatgattctagagattatccaaaaataaaaatgaattatctttcaactgaagatgatcgtcaagtatcagctgcaggtataagattggtaagaaaaataatttttgagagtgaaacattcaaaaaatatgaaccagaagagtttagacctggtataaattatcaaagtgatgaagaaattatacaagcttcaagtgaacatgttcaaacaatttttcaccctgttggaacttgtaagatgggaagtgacagcacctcagtagttagtgataagcttaaagttcatggtattgagaacttgagagttgttgatgcatcgattatgccgaacattacttcaggtaatacaaacgccccaacaattatgattgctgaaaaagcagcagatttgattattgctgatcaataa

SEQ ID NO: 210031 - DNA, 883 bp, Unknown
  Bacterial polypeptide expressing nucleotide sequence isolated from the Sargasso Sea
gtgttgcaaacattatctagaacctgcaaaaaaaagaattaatttgaatatattttcttattcatttgttgaaaaaattatatttgaaggaaaaaaagctgtgggaattcaggttaaaataaaaaataaaattgaaaaaatttttgctaacaaagaaataatattaagtgggggctccattaattctccacaattattaatggtctcagggattggtgatgcaaatcacttgaaagataaaggtattagtgttgtgaatgatctgaaaggcgttggtagtaatttacaggatcatttagaaacatatataatgcaagaatgtaaaactcccaatacactttacaaatatacaaagttaattcctaaagtaatctctggaatcagatggtttttatcaaaaactggaccatgctcacaatcttacttagaagcaggaggatttgcaaaatcttctagtgaacgcgaaataccgaatgttcaatttcatttttttccatcttttgtgattaatcatggtttagttgatccaaaaacccatggttaccaattacatgctagccctaatcacccaaaaagtagaggttctgtaaaacttaattcttcaaatccatacgattatccaaaaattttatttaattatttgaaggaggaggatgatttgaaacaaactagagaatgtattcatttagcaagaaatattttatcacaaaaatctttagcgaaacatgctggaaaggaagtgggtcctggttttgataaaacaactgatgatgaactagatgattatataagatcaaacgctgaaactgcataccatccatgcggtacatgtaaaatgggagttgataaattagctgtagtagacgaaaccttggaaagttaa

SEQ ID NO: 210032 - DNA, 865 bp, Unknown
  Bacterial polypeptide expressing nucleotide sequence isolated from the Sargasso Sea
aattggtgttgaaacaattaaaaaaaacataacaaataaatatttagcaaataaagaagttatactttgtgcaggttcaattaattctcccaaaattcttcaattatctggaataggtaatgaaaaacatcttaaaagcttgggaatagaggtaattaataatttagttggggtgggagaaaatttacaagatcatttagagatgtatattcaatataaatcaaaaaaaaatgaaacattacattctttagcgactaattttctctatcaagcaattgaaggatcaaaatggtttttgtttaaaaaaggcaggttagcaaactcacacttagagttaggagggtttgttaaatctgataaatcatataatcattcaaatttacaatttcatttttttccatacttagttattaatcatggtttagaaaatcctaattttgaagcttttcaatttcatgtttgtccaaatagaccaaaaagtagggggtttgttaaaattaaaacaaataactataaagatgatcctaaaatacaatttaattatcttaagcatgaagacgatttaaaacaaatgagagaaggtgtgggaattgctaaaaaaatattatcccaaaaagcactaaaagaatatgtaggcactgaaattaggcctgggaagaatgtatctagtcaagatgagttagatgaagttattaaaaatacatctgaatctgcgtatcatccgtcatgcacaaataaaatgggtgaggacaaaacttctgttgtagaccaaaacttaagggttcatggaattcaaaatttaagagttgttgatgcttctgtaatgccagatattgtaagtgctaatttaaatgcaacaactatt

SEQ ID NO: 210033 - DNA, 789 bp, Unknown
  Bacterial polypeptide expressing nucleotide sequence isolated from the Sargasso Sea
gagtttaggaaagatcgacgcaccagaacgataaagtcaaatgaaataatttgttgcggaggagcaatcaacactccgcaacttttgcaattatcgggaataggtccagcgcgagttcttgaggaggccggtgtcgaaactctgcttgacctgcctggagtaggtgaaaatttgcaggaccacctagaggtttatgtccaatacgcctgcaagaaaccagtttccatgtctccttatctgcaatattggagacgaccgtttgtgtttcttcaatggcttttgaggaaaggtccggcttcaacaaatcattttgaggcaggtggttttgtgagaggaaatgaaaatgtcgaatggccaaatttaatgttccactttttgcccatagcgattagatatgacggatccaccccagtatcaggacatggctaccagtttcatgtaggtcctatgttttccaacagtcgcggaagcatccaaatacagaacaataatccttttgaaaaaccgtctatcagattcaattatctttctacagaagaagatagaaaagaatggattgaagcaattcgtgtcgctagaaacataatggatcaaagggcctttgatgaatacaacggaggagagatttcacctggctctactgtgaaaagtgatgaagaaattttggagtggattaagaaagattctgaaacggcacttcacccttcttgctccgcacgaatgggaactgaccatatggcagtcgtggacccttcatctatgaaagtgcatggcgtggaacaactcagg

SEQ ID NO: 210034 - DNA, 918 bp, Unknown
  Bacterial polypeptide expressing nucleotide sequence isolated from the Sargasso Sea
aggtcaaaggggccagtggcttctaaatattatctagagccagcaaaaaaaagaaagaatttaaaagtgtttaccaattcgtttgctgaaaggattatttttgaaggaaaaaaagcagttggaatacaggtaaatattaaaaataaagtcacaaaggtttatgctaacaaagaagttgttttaagtggaggttcaatcaattcaccacaactattaatgttatcaggtgtaggacctgagaaagatttaaaagataaaggaattaatgttgtacaatctttagagggagtgggtcaaaatttacaagatcatttagaaacctatattcagcaagaatgtaaaactaaagatacactatattcttatgttaataaaataaatatgcttaaaattggtattcaatggtttctttcaaaaagtggtccatgttctacctcatttttagaggcaggtggtttctgcaagtcttcagaggataaaaattatccaaacattcaatttcatttttttccagcatttgtaatcgatcatggattagttgatcctgacagacatggttatcaattacatgcaagtttgaaccaacctaaaagtagaggatatattaaattaaatagctcaaatccatatgattacccaaaaattcaatttaattatttagaggatgaatatgatttaaaagaaacaattaagtgtgttcgtgtagctagaaagattttaaatcaagattcaatgaaaccttacgctggaaaagaaataggtccaggtgaaagtgcaactgatgatgaacaaattaccgagtatattagatcaaaagccgaaactgcttatcatccatcctgtacattgaaaatgggagtagacaaaatggcagtagttaacgaaaaattgaaagttcatggtttagaaaatttgaga

SEQ ID NO: 210035 - DNA, 874 bp, Unknown
  Bacterial polypeptide expressing nucleotide sequence isolated from the Sargasso Sea
aaaaaaatttatgctaataaagaagtattattagtgttgggttcaattaattcaccgcagttactaatgctttcaggcattggtgatgcaaatcatttaaaagaaaaaggaattaatgttgttaatgatgtaaaaggtgtaggcagaaatcttcaagatcatttggaaacttacattatgcaagaatgcaaaacaccagatactctttatacttataccaaactaattccaaaagttttagctgggatccagtggtttttttccaaatcgggaccctgttctcaatcttatttagaggctggaggtttcgctaaatcttctcctgaaagagaaatagcaaacattcaatttcatttttttccatcgtttgttattgaccatggcttagttaatccaagttcacatggttatcaattacacgctagtcctaaccatccaaaaagtagaggattaataactcttaattcatcaaacccatatgattatcctaaaattttatttaattacctggaagatgaagatgatttaaaacaaactagagaatgtattcatgttgcaagaaagatcttggcacaaccttctttggcaaagcattcaggaaaagaagttggtccaggaacagaggcgcgatcagatgatgagttaaatgaatatatcagatctaaagctgaaacagcttatcacccctgtggtacttgtaaaatgggtgtagacgatatggcagttgttgatgaaaatttaaaagtaaaaggaattcaaaacttaagagttattgatgcatctgttatgcctgaaataccaagcgctaacttaaatgcacctacactaatgattgccgaaaaggcgtcagatattatcataaatgcaaactaac

SEQ ID NO: 210036 - DNA, 817 bp, Unknown
  Bacterial polypeptide expressing nucleotide sequence isolated from the Sargasso Sea
ttcttcagactctgggattgggaattctcaaaaattaaaagaattgtgtattaatatagttcatgaattaaaaggtgttggcgaaaatttacaagaccatctaatgtttagacctatatataaagttcatggtcttaaatcactcaataaaaagattaatagtttatttggaaacttaatgatcggcttagaatatatctttaaacgaagtggtccaatgactatgggtgctagtcaaatgtgtatgtttgctaaaagtgatccctctttagaattacctgatctacaatggcatgttcaaccaatgagtatggatacattgggtgcaaccaaaaatcacgactttcacgcttttacaccaacggtttccaatataagaccaactagtagaggaaatataagtatcgttgataaagactctcgaacttacgctaagataaaaatgaattatttatcaactgaacatgatcgaatcgtagctgcaagaggattaaaattaaccagaaaaattgtaatggaatctgaaacatttaaaaaatataaaccagaagagtacagaccaggaattgacattaatgatgatgaggaattagttaaagcaggttcagattatactcaaacaatttttcaccctgtaggcacatgtaaaatgggccaagacgatatggctgtagtagatgataaacttaaagtaaaaggaattaaaaatttaagagtaattgatgcttcaatcatgccaaatatcacttctggaaatacgaatgcaccgacaataatgattgcagaaaaaggtgctgatatgatactaagaaattga

SEQ ID NO: 210037 - DNA, 260 bp, Unknown
  Bacterial polypeptide expressing nucleotide sequence isolated from the Sargasso Sea
tggtccaggatcggataagcaaagcgatgaagaattaaacgaatatataagagccaatgctgaaacagcctatcatccatgtggaacttgcaaaatgggtgtggatgaaacatcagttgttgatgaaagtctaaaagttaaaggaataaaaaatttaagagtagtagatgcctctataatgcctgaaattcctagtgcaaacttaaatgcccctactctgatgattgctgaaaaagctgcagatcttattttaaactaat

SEQ ID NO: 210038 - DNA, 925 bp, Unknown
  Bacterial polypeptide expressing nucleotide sequence isolated from the Sargasso Sea
aggtttaggtggatcatcttcaatcaatgggatgatttatgttcgcggtcatcctcaagatttcgataactggagcaccaaaggggcctcaagttggtcatttgcagatgttcttccttacttcaaaaaaatggagtgttgtgaaggtcgacaatcaacttggagaggaaaaaacggccctatccatataaaaactgcagaacaaaaaaacgttttgcataaaattttttcagatgcagcgatacaatgtggttactcttttactgaagattataatggctacaagcaagaaggcattggggctgcagaaatgactgtatataaaggaaagagatggtctactgcccaaggctatttgaaaaatataacaaaacaaaaaaatatttgcataattacttcatgtttagttgataaattattgtttttgaacaataaatgcaatggattgattttcaaaaagaaatcccaaactttttctgcgcaatgcaaaagaggtgtcatattagctgctggttccattggcaatccctgtattttacagagatctggaataggagactcaaaacatattgcgagcatcaatataaaaccttttctggatttaaaaggtgttggaaataatttacaggatcatcttgaattatattttcaagtgaaatgtactcaacccgttactctttttaggaatactcagttattttcaaaagctaaaattttcttacaatggtatatgttcaaaaaaggattaggagtatcaaatcaatttgaaactcttggtttccttaaaacagataggcaacaaaagtatcctaacttgcagtatcactttttacctttagcaataaattatgatggatcatcaccacacagaggggatggctttcagttccacgtaggaacgatgcggtcaaaatcaaagggattt

SEQ ID NO: 210039 - DNA, 828 bp, Unknown
  Bacterial polypeptide expressing nucleotide sequence isolated from the Sargasso Sea
gctaatcgcctctcttcagaccctaaaaatagagttcttttactcgaggccgggggtaaggatgactatttctggattagggtcccagtcggctacctttttacaatgaataatcctaggaccgattggtgtttttcaactgaggcatcaactggcttgaatggcaggtcgttgaattatccacgcgggaaggttttgggaggatgctcctccatcaatggtatgatttatatgaggggtcaagctcgagattacgatcattggaggcaattaggaaattctggttggggttgggatgaagcgcttaaatattttaaacggtcagagggccatgttttaggcgaaaacgaaatgcacggtggcaatggtgaatggcgtgtcgaaggccagcggctctcgtgggaaatattagatgcttttcgagatgctgccgccgaaacaggaattccgaatactgacgattttaatacgggcaataatgaaggatgtggttattttgaagttaatcaaaaacagggggtgaggtggagcgctgctgacgcttttcttcatccgataaaatcgcgagctaatttgactgttttgacagagtcgcatgtcaacaaactacaatttgacggtaataaagttgttggggttaaattttggcgaggaaacgatttatttgaggcttctgtttctggagaaattatcttggcgtcgggcgccatcggttccccgcaaataatgcaggcatctggtattagttctggagcgctttcccaaaaaataggcatccaaaatatcatagaacttcctggagtaggagaaaatttgcaagaccatttg

SEQ ID NO: 210040 - DNA, 817 bp, Unknown
  Bacterial polypeptide expressing nucleotide sequence isolated from the Sargasso Sea
ttgttaatgttatcaggtattggtgatgctaatcatttgaaagataaaggaattgaagtcgtaaacaatgtgaaaggtgtaggcaaaaaccttcaggatcacttagaaacttacattcaacaggaatgcaaaacgccaaatactttgtatacttatacaaaattagttcctaaagtgctagctggtattcagtggtttttatttaagtctggaccttgctcaaaatctttcttagaggctggaggatttgcaaaatcttcacctgaaagagaaatttcaaatattcaatttcacttttttccatcatttgtaattaatcatggtttagagcaacctaaatcccatggatatcaattacatgcgagtccgaaccatccaaaaagtagaggacatattactcttaattcctctgatccctatgagtatccaaaaatattatttaattatttaaaagatgaagatgatcttaaacaaacaagagagtgtatacatgttgcaagaaagattttatctcagccagctttagctgatcatgctggaaaagaagtaggaccaggtacacaagcacaatcagatgacgaattaaatgaatatattagatcaaaagcagatacagcttatcatccatgtggtacatgcaaaatgggagttgatgaaatggcagttgttgacgaaaatttaaaagtaaaaggaattcaaaacttgagggttattgatgcatcagttattcctgaaataccaagtgcaaaccttaatgcccctacattaatgattgctgagaaaggttcagattgtattctacaatctcgttattaaa

SEQ ID NO: 210041 - DNA, 940 bp, Unknown
  Bacterial polypeptide expressing nucleotide sequence isolated from the Sargasso Sea
tatggaagagtttgattatatcatcataggcgctggctctgcgggttgtgtcttagccaataggttgaccgctgatggcgcaaataatgtctgcattcttgaggctgggccacccgactggaatccatttattcatataccagctggttttatgaggacgttggtaaaccccaaagtcaattggctttacgaggcgtcgccgagcgaatggacagctggaagagtggtggcagttccgagaggtaaaacacttggcggctcaagttctataaatggacatgtttataatcgaggtcagcggatggattttgatagctgggcccagcttggtaattcgggttggggctattctgacgttttaccctattttaaacgttgtgagcaaaagataggtgaaggagatgaactttatcgaggaaggaatggtaacctaaaaattactgaccttgattggcggcatcctctttgcgatgcttttattaaaggggctaactccctcggtattccgacaaatactgattacaatggcgctagccaggagggtgtgtcttatgtgcagcgtacaacacacaaaagacttcgcgtaagctcagctaaagcttttctaaatccagctaaatcaagaaaaaacctgacagtatatactgaatctcaggttacaagcattttatttgaggaaaggcgggcttgtggcgttgaattaaaaaaaggtgggcctagaggtcagactgggaaaatttacgcgagaaaagaaataattttatcgggaggagcaataaattctcctcaactgcttcaattatcggggatcgggtcgacaaatctgcttaaagagctgggaattccagtagtgcataatttacctggagttggtgaaaatttaagagatcactacgcaccacggttcacagcgcgtgttaaaacatcgatactattaatg

SEQ ID NO: 210042 - DNA, 880 bp, Unknown
  Bacterial polypeptide expressing nucleotide sequence isolated from the Sargasso Sea
aacaactataaaagctaataaagaaattttgctttctgcaggatcaataggttccccccatatactgcaggtttctggtataggtgaaaagcaaaaacttaataattttggaatagatgtgattcatgaattgaaaggagtaggaaagaatttacaagaccatttgatgtttagaccagtctacaaggtaaaaaatttaaaatcccttaatggaaaaataaatagtttattaggtaatttattaattggaatggaatatatctttaatcaaagtggtccaatgactatgggagcaagtcaagtttgtgggtttcttaaaagtgactcctcaagagcaacacctaatctccagtttcatgttcaaccaattagtacagatattttgggagcaactaagatgcatgattttgatggaataactcctactatagcaaacataaggccaacaagcagaggagaaataaatattacaagtggggatagtagagataatccaaaaataaaaatgaattatttatcaacacaagatgacagagatgttgctgcaaaaagcttaaagattgttagaaaaattatgctagaaactgaagcttttaaaaaatacgagccagaagaatacaggcctggcatacatattactgaagatgaggaattagtcaaagctggtagtgaacatacgcaaacaatatttcacccagttggtacgtgtaagatgggtcagggtgacgactcagtcgttgatgaaaaattaaaagttagaggattacaaaatttaagagttatagacgcctcaataatgcccaatatcacgtctggtaatacaaatgcacctacgataatgattgctgaaaaggcatcagacatgatattgaatcgttaa

SEQ ID NO: 210043 - DNA, 1197 bp, Unknown
  Bacterial polypeptide expressing nucleotide sequence isolated from the Sargasso Sea
tatggataaatttgattacataattattggtgctggatccgcaggctgtgttttagctaatagattaacagcaaatcctgatactaaagttcttttacttgaagctggtggtaaagacactaatccatggatccatattcctggtggttattttaaaaccatgcacaatccagatactgactggtgttttaacacggaaaaagagccaaactgtgataacaggcaaatggtttatccaagaggtaaaacactaggcggaagctcatctatcaatggaatgctttatattagaggtcaatcaaatgattataattattggagacaactaggtaatgttggttggtcatgggatgatgttctgccttattttaaaaaatctgaagattttcaatttggagaaaatgagtttcatggttctgggggtcctattgcagttgagaaaattagagcaacatttaaagttctcgatctatttttagaagctgctgaagagcatggttataaaagaactgatgattttaacaacggtgataatgagggaatgggatattttccattcacaattaaaaatggctttagatgcagtacagctgtaggttatttaaatccagttaagagtagaaaaaatttaaaaataattactaaggctcatattaaaaatatagaatttgaaaataataaagcaaaaaaagtaaattattggatagacggaaaagaattttctgttgagactaataaagaaattatattaagcgcaggtacaattggttcacctcatatattacaagcatcgggaattggtccaggagaacttctaaaagaaaacaatattaatgttttaaaagatcaccaaggagttggaagaaatctaactgatcatttaatgctaagaccagtttataagattaaaaatttagaaactttaaatgatatttattacagctttactaaaaaaatgttatctggtttgaagtttcttctattaagaaaaggacctttaacagttggtgctagttatgtttgtggttttgttaaaagtgatgagcatttagaaaccccaaatcttcaatttcatatttcaccagcaagtaccgatcttttaggaaaatctgctttacataaatttccggcgttcactccaacaattacaaatgtaagaccaacaagcagaggatctatagaattaaaatctccaag

SEQ ID NO: 210044 - DNA, 1672 bp, Unknown
  Bacterial polypeptide expressing nucleotide sequence isolated from the Sargasso Sea
ttgaatacttataataaaaaagaatatgattacattattttaggtgcaggatctgcaggttgtgttttagctaacagactgtctgaagatccaaataacacagttctgattttagaagctggccctatggatgtgaatatcttaaggccaatagagtcacttttaattcatatgccagctggtgtataccatgcatacaaaaatcctcaaattaattggaattataaaacggtagttgaacctaattgtcataatagagagcttgaattgccgagaggtaaaataataggaggatcttcatcaataaattcaatggtctatatgagagggcacccattagattatgataactggtctacaaaatatggtttgaaagaatggtcatttgataaatgcctaccctattttaagagatgtgaaagttctgatcgaggagaaagcgagtggcgtggagcaagtggtccattaggagtaacaaaaggtagattacaaaatcctttatttgatgctttaattgaggcaggtgatcaatctggtcaaggtacatccgaagacttaaatggctttaaacctgaaggcatatcgagattagatagtaccacaaaaaacggaatgaggtgtagcgctgctacagcacatctcagaccagctttaaaaaggcccaatgtaactcttattacagaagcatttactagaaaaattttacacaaaaatggaaaagcttttggtgttgaatttgacaataacggtgaagttcaagaggtttattcaagcaattcagtaattgtaagttgtggagcaattaaatcgccacaaattttgatgttatctggaataggtccagcagaccatcttcgttcaatggatattgaagtaaaagaaaacttatctggtgtaggaaaaaatttacaagatcatttacttgttgctaccggttttgagtgtactaaaaatgtaactattcataaaattactcaacctcaacaaaaactttttgcaggtcttaaatggttattaacaagaaaaggtattgtagcatctaatatatgggagatgggtggacagatttttggaaatcacaatgtaaaatatcctaatttacagtatcattttgcacctgcatttaataaatatgaaggcagaaaaattatcctttctcaaggctttcttcttcagtgtgatcagttaagaccaaaaagcaaaggctctgttcaactcaaatccaataatccttatgaaaacccaaattcattttttaattatctttctcatccacatgatttaaaggaattaagggaagcatttaaaaaaatgattgaattaatttctcagccagcctttgatgaatttagaggtaaaagaataaaaccctctcctgacattaaaagtaattcagaaattgatagctggatacgtgaaactgcaattacagattaccatccatcagggacttgtaaaatgggaaatgagcctgactcagtagtagatgaaaaactaaaagtccatggctttgaaaatttatatgtagtagacgcttctattatgcctgacgttgttagtggaaatttaaatgcaccaacgcaaatgattgctgaaaaagcatctgattttatattaggaaaaaaacctttaaaaccaataaatgctaaatttcactttcaaaatgtttaaa

SEQ ID NO: 210045 - DNA, 850 bp, Unknown
  Bacterial polypeptide expressing nucleotide sequence isolated from the Sargasso Sea
attaagtgcaggttcgattggtagtcctcaaatacttcaaacatccggtattggagatgttggtaaattaaaaagtttaggaattgaagtcacaaaagacttaaagggagttggaaaaaatcttcaagatcatttaatgtttagaccagtatttaaagttagaaatatcaaaaccttaaataaaaagattaatagtgtttttggaaaacttttaattggactagaatatgttttcttaagacgcggaccaatgacaatgggggcaagtcagttatgtggatttgctaaaagtgacgaaactagagagacaccaaatttacagtttcatatccagccaataagcactgataaacttggtggtgctaaccttcacgactttgatgcgtttactccaacagttgcaaatattagaccaactagtagaggagaaattaatattatcagttcagattcaagagataatcctaaaattaaaatgaattatctatctactgatgaagatagaaaggttgctgctgatggaattaaattaataagaaaaatagttttggaaacaaaagaatttaaaaaatatgagcccgaggaatatagaccgggcgctcatatacaagaaggtgaagaaatagtaaaggcttgtagtcattatgcacagactatctttcacccagttggtacatgtaaaatgggagatgataatgaggctgtagtatctgatcaattaaaagtgcatggaattcaaaatttaagagtaattgatgcatcgattatgccaaatataacatctggtaatactaatgctccgaccattatgattgccgaaaagggtgctgatatgatattgaacagctga

SEQ ID NO: 210046 - DNA, 1157 bp, Unknown
  Bacterial polypeptide expressing nucleotide sequence isolated from the Sargasso Sea
ggctggttatgaatataaagaagatttgaatggaatggatcatgagggattggggccttgtcagcaaacaatatggaaaggaagaagggctagcactgcgcattcgttcataagccctatcaggagtagaaaaaatcttactatttttacgaattctattaccaataagcttttattcgatggaaataaatgcgttggtttagaatatttaaaaggtaaaaacataaataaagtttttgctgacaaagaggttattgtttgtggtggcgcaattaattcaccacagatattacaattatctggaattggaaaaggtgattacataaaaaaatggggcttaaatgttgtagctgacttgccaggagtaggtgaaaatcttcaagatcacttggatatattatcgcattatgagtgtacacaaccggtaactgaagcaaaatatactgcgggcgggttagcaatatttagaatggcatctattctgggacaatggttagtgacaagaaaaggaccaggtgttgacattggactttcaggtttatcattcttaaagacagatgatagtttagacgtaccagacatccaaatgcattttgttggctctttattaaaagatcatggaaagacaagacctgactctcatgcgtttagtaatcacgtatgtatgttacgtcctgaaagtagaggctatattgcattaaagtctctagatcctaaagttcagccaattatccagcctaactattttgcaacacaaaaagacagagatactatgatcaagggtgtcaaaatgtctagggaaattattaatcaaaaggcttttgatgaatatcgtggcaaagaaattaatccaggtgatcatgtacagactgatcaagaaattgaggaatttattaaagggcacgcagaaacaatctatcatcctgttggaacctgcaagatgggtagtgacgaatttgctgttgtcgatgatcgacttaaagtcagaggtgtcgaaaacttgagagttattgatgcaagtgtaatgcctactttaattggtggaaacacaaacgctcctacgattatgattgctgaaaaagcagcggattatatcttgggtaatgagcctttatctcctcaaaatgtaagcttagataataaatcagcagcatagc

SEQ ID NO: 210047 - DNA, 1070 bp, Unknown
  Bacterial polypeptide expressing nucleotide sequence isolated from the Sargasso Sea
atgggcatcttttggattggaagattgttcttatgacgaagttcttccctatttcaaaaaaattgaaacatggtctgaaggagaaaatgaatatcggggtggcagtggaatactaccagtaaaccaatctaaaaataaaaaccctttattcaaagcatttgtcgattcagctggtgaagcaggttacaaaataaataatgacatgaatggtaaagaacaagaaggttttggaatgtacgatgttactatccataaaggagagagagcaagtgtatctaagtattatttaaatcctgctaaaaaaagaaaaaaccttaaagtatttacagaagcttttgttgaaagaattatttttgatggaaaaaaagcaattggaattgaggtaaaaattaaaaataaagttgaaaaaatttatgccaataaagaagtaattttaagtggaggtgcaattaattcaccgcaattactaatgctttctggaattggtccaagccaacacttaaaagataaaggaattagtgttgttcacaacttagatggtgttggaaaaaacttacaggatcacttggaaacttatgttcagcaagaatgcaaaactaaagacaccttatactcatacgttaataagttaaatatggttagaattggaattcaatggtttttgaatagaagtggtccttgttctgcttctttcttggaagcaggaggattttgtaaatcatctccagaaagagagtatccaaatattcaatttcatttttttcctgcttttgtaatcgatcatggattagttgatccggataggcatggttaccagttacatgcaagtccaaaccatccaaaaagtagaggtcacataactttaaacagctcaaacccttatgattatccaaaaattcaatttaattatctagaacatgaggatgatttaaaacaaacaatagaatgtattcatgtagctagaaaaattttgggacaagactctttgaagccttttgcaggaaaagaaattggaccaggagaacatgcccaaactaatgaagttattcgaagaatacatcagatctaaa

SEQ ID NO: 210048 - DNA, 819 bp, Unknown
  Bacterial polypeptide expressing nucleotide sequence isolated from the Sargasso Sea
ttttgccaacatctggaataggaaattctcaaagactaaaagatttaggggttgaaatagtgcatgagttaaaaggtgtgggtgaaaatttacaagatcatcttatgtttaggcctatttataaagtccatggtttaaaatctcttaataaaaagattaacagtttatttggaaatttaatgattggattagaatatatctttaatcgtagtggtccgatgactatgggtgctagtcaaatgtgcatgtttgcaaaaagtgactcttctttagaattacctgatcttcaatggcatgttcaacctatgagtatggatacattaggagcaactaaaaatcatgactttcatgcgtttactccaactgtttcaaatataagacctacaagtagaggtaatgtgactattgtagataaagattctagaacttatgctaaaattaaaatgaattatctttcaactgatcatgatcgaatggtggcagccaaaggattaaaacttacaagaaagatagtaatggagtccgaaacttttaaaaaatacaaaccagaggaatataggccaggtataaacattgatgatgatgaggaacttgtaaaagcaggctcagattatactcaaacaatttttcatcctgttggtacttgtaaaatgggacaggatgatatggcagtagtcgatgagaaattaaaagtaaaaggtattaaaaatttaagagtaatagatgcttcaatcatgcctaacataacttcaggaaatactaatgcaccaacaataatgattgcagaaaaaggtgctgatatgatacttacaaattaat

SEQ ID NO: 210049 - DNA, 1208 bp, Unknown
  Bacterial polypeptide expressing nucleotide sequence isolated from the Sargasso Sea
aatggtttttgtaagaggaaaccgaaatgattatgaaagatgggaaaactttggattaaagacttggtcttatgaaaaagttttaccttattttaaaaagattgaaacatggtctggtggagaaaatcaatacagaggttcttttggtcctcttacggtcaatcaatctaaaaataataatcctttgtttaaagcttttattaattcagcttcagaagctggtcataatattaatcttgatatgaatggagaagagcaagaaggatttggtatgtttgacactacaattcacgaaggtcaaagagctagtgtatcaaaatgctatttaaatcctgcaaaaaaaagaaaaaatttaaatgttttttcaaattcatttgtagaaaaaattatttttgacggaaaaaaagcaattggtatagaggtcaaaattaaaaataaagttcaaaaaatttatgctgaaaaagagataatattaagtggtggctcaattaattcacctcaattattaatgctctcgggtataggtgatgcaattcacttaaaagataaaggaataaatgttgttaacgacttaaaaggtgttggtagaaatctccaagatcatttggaaacatacattatgcaagaatgcaaaacacctgacactctttatacttatacaaaattaatcccaaaagttatggcaggaatacaatggtttttatctaaatcaggtccatgttctaaatcttttttagaggctggaggttttgcaaaatcttctcctgaaagagaaattgcaaatatacaatttcatttttttccttcatttgttattgatcatggtttagttaacccaagctcacatggatatcaattgcacgcgagtccgaatcatccaaaaagtagaggattaataactcttaactcctcagacccttatgattatccaaaaatattatttaattatttagaagatgaggatgatttaaaacaaacaagagaatgcattcatgttgcaagaaaaattttagctcagccttctttagcaaaacattctggcaaagaagttggtccaggttctgataaaaaaagtgatgaagaattaaatgaatatataagatctaaagcagaaactgcttatcatccttgtggtacttgtaagatgggagtagacgatatgtcggtagtagatgaaaatttaaaagttaatggaatacaaaacttaa

SEQ ID NO: 210050 - DNA, 1603 bp, Unknown
  Bacterial polypeptide expressing nucleotide sequence isolated from the Sargasso Sea
aatggataattttgattatataataataggagcaggatcagctggatgtgtgctggctaatagattaacaaaaaattcaaaaattaatgttttattattagaggcaggaggaaaagactctaatccttggatacacattcctggtggttattttaaaactatgcataatcctggaactgattggtgctttaatacagagaaagaaccaaattgtgataatagagagatggtttatccaagaggaaaaactctaggtggaagctcatcaataaacggaatgctttatataagaggtcaatcaaatgattataattattggaggcaactaggtaatgtaggttggtcctgggaagatgtattgccttattttaaaaaatctgaagactttcaatttggagaaaatgaatttcatggttctggcggtccaattaaagttgaaaaaattagagctacattcaaagtattagatttatttttagaagctgcagaagagtttggttataaaaaaactgaagatttcaatacaggtgacaatgaaggaatgggttattttccattgacagttaaaaatggctttaggtgtagtaccgcagttggttatttaaatcctgttaaaaaaagaaaaaatttaaaaatcattacaaacgcacatataaaaagtatcaattttgaaaataaaaaagcaacaggtgtaaactactggattaataatgaattattttctgtaaaagttaataaagaaataattttaagtgctggaacaataggatctccacatattttacaggcatcaggaattggtcctggtaaacttttaaaagataacaatatagaaataattaaagatcattctggggttggtgcaaatcttacagatcatttaatgttaagaccagtttataaaataaaaaatttagaaacattaaatgatatttattacagtattccaaaaaaaatattaactggattaaaattttttttgtttagaaaaggacctttaacagtaggagcaagctatgcatgtggttttataaaaagtgatcctaatcttgaaactccaaatttacagtttcatatatcgccagcaagcacggatgtgttaggaaaagcatcactacataaatttccagcattcactccaactataactaatgtaagaccaacaagtagaggttcgattgaattaaagtctcctgatacaagagtatcaccaaaaataaaaatgaattatttatcaacgcacgaagatagagagatagcaggaaaatctttaaaaattgttcgtaacattgtaatgaattcaaaagcttataaagagtatgagccagaagaattaagaccaggtattaatataactgacaacgaaacacttgcaacagaagctggtaaatttgctaatacaatatttcaccccgttagtacatgtagaatgggaaaagatgaaaaagcagttgtaaatgatagacttgttgctcatggtttatcaaatttaagaattgttgatgcatcagttatgcctcacataacttcaggaaatactaatgcaccaactattatgattgccgaaaaagcggcagacatgataatagaagatagcaaatga

SEQ ID NO: 210051 - DNA, 1564 bp, Unknown
  Bacterial polypeptide expressing nucleotide sequence isolated from the Sargasso Sea
aattgttggcgctggaacagctgggtgtgttcttgcaaataggttaactgagaagtctcaaaataatgttgctatttttgaggctggtaaaccaagtgatatttggaaagtaaatatgccattagcaattttatacacaatgcatgatccaaaatataattacaaatattattctgagcatgaaccttatttaaataacagaaaacttttttgcccaagaggaaaaatgattggtggatgctcggcacataatggaatggtatatgttcgtggtaatccaaacgattatcaaagatgggcgtcttttggattaaaagaatggtgttatgacaaagttcttccttactttaagaaaattgaaacatggtctgagggagaaaatgattatcgaggtggtagtggtttactaccagttaaccaatctaaaaacaaaaatccattattcaaagcatttgtcgactctgctggtgaagctggttacaaaatcaatagcgatatgaatggtaaagaacaagaaggttttggaatgtatgacgttacaattcataaaggtgaacgtgctagtgtttctaaatattatttaaatccagcaaaaaaaagaaagaatctaaaagtatttacagaagcttttgttgagaaggttatttttgatggaaaaaaagctattggcattgaagttaatattaaaaataaagttgaaaaaatctacgcaagtaaagaggtaattttaagtggcggtgcaattaattcaccgcagttactaatgctatcaggaataggtcctagccaccatcttaaagataaaggcatcaatgttgttcataacttagaaggagttggaaaaaaccttcaagatcatctggaaacttacgtacagcaagaatgtaaaactaaagatactttatattcatatattaataaacttaatatgcttagaattggtattcagtggttttttaatagaagtggtccttgttctaattctttcttagaggcgggtggcttttgtaaatcatcgccagatagagaataccctaatattcagtttcatttttttccagcttttgtgattgatcatggattagttgatccagatagacatggatatcaactacacgcaagtcctaatcacccaaaaagcagaggacatataactttaaatagctctaatccttatgattatcctaaaatacaatttaattatttagaacatgaagatgatcttaaacaaacaattgaatgtattcatgttgcaaggaaaatattaagtcaaaattctttaaaaccttatgcaggaaaagaaattgggccaggtgaaaatattcaaagtaatgaattatttgaagagtacattagatcgaaagcagaaacagcttatcacccttcttgctctttgaaaatgggtatagatgaaatgtcagttgtagatgaaaaattgaaaatacatgggttgcaaaatattagagttgtagatgcttctgttatgcctgaaattactagtggcaacttaaatgcaccaactcttatgattgcagaaagagctgctgattttattttaaattaa

SEQ ID NO: 210052 - DNA, 785 bp, Unknown
  Bacterial polypeptide expressing nucleotide sequence isolated from the Sargasso Sea
aaatcttcaggatcatctggacatattaactcataacgaatgcactcagccagttacagatgctaaatatgtgatgggcccattcggattccttaaacaggcatggatactaggaatgtggggagcatttagaaaagggccaggtggaatgttgccattaaatacattatcatttttaaaaactgatccttctctggacttacctgatattcaaatgcattttttaagtgttcttttgcaagatcatggagcaaagcttcctgactcgcattgcttcagtaatcatatatgtcaattaagaccagagagtagaggctatattgcaatcaagtctcttgattctagggttccaccaattattcagcctaactattttgcggagcaaaaggatcgtgacgttatgattgaaggagttaaaatgtcgagagacatcataagtcaaaaggcatttgatgagtaccgaggtaaagaaataacgcctggtattgaggtacaaactgatgagcaaattgaaaactttattagggaaaaagctgaaacaatttatcacccggttggaacttgtaagatgggaagcgacgaatacgctgtagttgatgataaattaagagtaagaggggtagagaatcttcgagtggttgatgcatcaattatgcccaatttggtaggcggaaatacaaatgcccctacaattatgatagcagagaaaatctctgatcatatactaggtaatgattttcttcctccgcagcacataagttataaagataaaaacgccgcataat

SEQ ID NO: 210053 - DNA, 1118 bp, Unknown
  Bacterial polypeptide expressing nucleotide sequence isolated from the Sargasso Sea
ggaagaatttggatataagaaaactgatgattttaataatggaaataatgaaggcatgggatattttccatttacagttaaaaatggtttaagatgtagtacagcagtaggttatttaaaccctattaaaaaaagaaaaaatttaaaaattgttactaaagctcatataaaaaatattgaatttgaaaacaaaaaagctgtttctgtcaattattggcataataataatttaattaaagttaaagcaaataaagaaataattttaagtgctggtacaattggttctccacatattttacaagcttcgggaattggtcctggagagttattaaaaaataacaatgtaaatgtgataaaaaatcatccaagtgtaggtatgaatcttactgatcatttaatgcttaggcctgtatataaagtaaaaaacttagaaactttgaatgatatttactatagcattacaaaaaaattaattactggtttgcaattttttttatttagaaaaggtcctttaacagttggtgctagctatgtgtgtggttttattaagagtgatagtcatttggaaacaccaaatttacaatttcatatttcacctgcaagtacagatttattaggaaaatcatctctacataaatttcctgggtttacaccaactataacaaatgtaagaccaactagtagaggttctattgaattaaagtctcctgatacaagaatttctccaaaaataaaaatgaattatctttctactgatgaagacagagagattgcgggtaaatcacttaaaattgttcgtaaaatagtaatggagtcaaatgcttacaaaaaatatcaaccagaagaactcagacctggaattaatataacagataatgaaaatcttgctttagaggctggtaaatatgctaatacaatatttcatccagttagcacatgtagaatgggaaatgatgaaaatgctgttgtaaacgacagatgtattgcgcatggattagaaaatttaagagtagttgatgcttccataatgcctcatataacttcaggaaatacaaatgctccaactattatgattgcagaaaaagcttcggatatgatattagaggatagcaaataat

SEQ ID NO: 210054 - DNA, 1312 bp, Unknown
  Bacterial polypeptide expressing nucleotide sequence isolated from the Sargasso Sea
aatggtatttgtcagaggaaatccaaatgattatcaaagatgggcatcttttggattggaaaattggtcttatgaaaaagttcttccctatttcaaaaagattgaaacatggtcggaaggagaaaatgaatatcgaggaggtagcggaatattgccagtaaaccaatctaaaaataaaaatcctttattcaaagcctttgtggactccgctggtgaggctggttacaaaataaacaatgacatgaatggtaaagaacaagaaggttttggaatgtacgatgttacgatccataaaggagaaagggctagcgtttctaaatattatttaaatccagcaaaaaaaagaaaaaatctaaaagtatttacagatgcctttgttgagaaaattatttttgatggaagaaaagcaattggaatagaagtaaaaattaaaaataaagttgaaaaaatatatgcaaataaagaggtaattttgagtggtggtgcaatcaattcaccacaattactaatgctttcaggaattggaccaagccagcacctaaaaaataaaggaattagtgttgttaacaacttggagggagtgggaaaaaacttacaagaccacttagaaacttatgtgcaacaagaatgtaaaactaaagatactttgtattcttatgttaacaaaatcaacatgattagagttggtattcaatggtttctaagtagaagtggcccttgttctgcctctttcttagaagcgggaggtttttgtaaatcatctccagaaagagaatatcctaatgttcaatttcatttttttcctgcttttgtaattgatcatggattagttgatccagatagacatggttatcaattacatgcaagtccaaatcacccaaaaagtagaggtcatataacactaaatagctcaaatccttatgattatccaaaaattcaatttaattatctagagcatgaagatgatttaaagcaaacaatagaatgtattcatgtagctagaaaaattttaggacaagattccttaaaaccatatgcaggaaatgagattggaccaggagaacatgctcaaactaatgaagtatttgaggaatatattcgttcaaaagcagagacagcatatcacccatcttgtactttaaaaatgggaatagataatatggctgtagttgaccaaaaattaaaagttcatggtatagaaaacttaagagtagttgatgcttctgtaatgccagaaattacaagtggaaacctgaatgctccaactttaatgattgctgaaagagcatcagaatttattttaaattcttaa

SEQ ID NO: 210055 - DNA, 1450 bp, Unknown
  Bacterial polypeptide expressing nucleotide sequence isolated from the Sargasso Sea
aatgccacttgctctactctacactatgcatgatccaaaatataattggaaatattattctgaacctgagccatacttaaataacagaagaatattttgtccaagaggaaaaatgattggcggatgttcttctcataatggaatggtttttgtaagaggaaatagagatgactacacaagatgggaaaattttgggcttaaaaattggtcttatgaaaaggtacttccttattttaaaaaaatcgagacttggtcagaaggagaaaatcaattcagaggttctttaggtccgcttccaataaacctttcaaaaaattctaatcctttatttaaagcctttattgaggccgcaggtcaagctggtcataaaataaatatagatatgaatggtgaagatcaagagggttttggaatgtttgatactacaatgcaccaaggagaaagagctggagttgccaaatattatttaaatccagttaaaaatagaaaaaacttagatgtattaaaaaattcttttgtagaaaaaatattatttgatggaaaaaaggcagtaggtcttcaagttaaaatcaaagataaagttgaaaaaatttatgcaaataaagaagtaatcctaagtggtggttcaataaactcaccgcaattattaatgttatcaggaataggagacgcagataatttaaaaggtaaaggaatagagattgttaatgatattaaaggtgttggaaaaaatctgcaagatcaccttgaaacttatattcaacaagaatgcaaaacaccaaacactttgtatacttatacaaagcttattccaaaagttttagctggaattcaatggtttatgtttaaatcaggaccatgctcgaaatcttttttagaagccgggggttttgcaaaatcatcttcggaaagaaaaattccaaatattcaatttcatttctttccatcatttgtaattaatcacggattagagcaacctagtaatcatggttttcaattacatgcaagtccaaatcatccaaaaagcagaggccaaattactctgaattcatctgatccatatgaatatccaaagatattatttaactatcttcaagatgaagaagatctaaaacaaacaagagaatgtattcatgttgcaagaaatattttatcacaaccagctctcgctgaacatgcaggtaaagaagttggaccaggaattgatgctcaatcagatgatgaaataaatgaatatattagatcaaaagcagatacagcttaccatccttgtggaacttgcaaaatgggtgttgatgaaatgtcggtagtagaggaaaatttaaaagtaaaaggtattcaaaatcttagagttgttgatgcatcagtaattccagaaattccaagtgccaatctaaacgcaccaacacttatgattgctgaaaaagcagcagactgtattttaaattaa

SEQ ID NO: 210056 - DNA, 1468 bp, Unknown
  Bacterial polypeptide expressing nucleotide sequence isolated from the Sargasso Sea
tatgcaatttaattcttataattatattattattggtgccggaagtgcgggttgtgttctggcaaatagactttcagctaatccagagataaatgtattgttaatagagtcaggtccatcggataaaacgtggaaaacctcaatgccggcagctttattatacacaatgcatgacccaaaatataattatttatacgaaactgagcctgaaccgttcatgaacaatagaaaaatgttttgcccaagaggaaagatgttgggaggaagttcatcacacaacggtatggttcatgtaagaggaaatccaatggattttgaaaactgggctcaaaaagatcttaagtcatggaattataataatgttcttccgtattttaaaaaatcagagtcaattgaaggattagatgaaacttataggaataaaagcggtcctttaaaactatctcgatcttcggaaggcaatgaattgagtaaagtctacctagaagcggcagaacaagccggctatgagataaataatgacatgaatggatataagcaagagggatttggtctaatggacaccactatttatggaggcagaagacaaagtacgagtgtaacttacttgcatccagttattaacagaagaaatcttaccgtcattacaaacacaatagtaaacaaagttatcattgaaaataataaagccgttggggttgaatgtactacaggaagagagagaaaaaaaatacatgctgaaaatgaagtgatattatcagctggagcaataaattcacctcaacttctaatgctttcaggtataggaaatgctgaagaactaaaaaaattagatatatctgttcaacatgacctaagaggtgtaggtgaaaatttacaggatcatcttgaaacttatttacaatatgagtgtacaaagcccgttacactttacacatcatataatccaataagaatggcattcatagggatagagtggtttatttttaaatctggagtggcagcatattcaaacttagagacaggcggcttcgtgagaagtaatgatatggttgattaccctaatattcagtatcacttctttccatcgcttgtattggatcatggaagacaatctccaagctctcattcttttcaagcgcatgtaggaccaatgaggccaacaagtagaggacatgtcaaattaaagtcaaacaatccctcagcctcacccgctattcagtttaactatatgcagacagagcatgatttaaaagaaatgagagatggtattaaaattgcacgggaaatttttcatcaaaaagcttttgataaatatcgaggaaaagaaattaatcctggaataaattcaagctctgagagtgatttaaatgaattcattaaaaataaaggcgatactgcttatcatccttcttgtacatgcaaaatgggaaaaaagatgcgttatctgttgtcgatgaagagctga

SEQ ID NO: 210057 - DNA, 1582 bp, Unknown
  Bacterial polypeptide expressing nucleotide sequence isolated from the Sargasso Sea
ttgaaatttgattacttaattattggtgcaggtacagctggatgtgttcttgctaatagattgtcagaaaataatcaaaacaaagttgcaatatttgaggcaggtaaaaatagtgatatttggaaagtaaatatgcctcttgctattttatatacaatgcatgatccaaaatataattacaaatattattctgaaccagaaccacatttaaacaatcgaagattattttgcccaagaggtaaaatgattggaggatgctctgcgcataatggaatggtttatgctagaggaaacaaaaatgactatgaaagatggtcttcatttggacttaaagaatggagttacgaaaaagttttacctttttttaaaaaaattgaaacatggtcagaaggtgaaaatgaatatagaggtggagatggtatacttccaataaatcaatctaaaaataaaaatccattattcaaagcatttttaaattccgctaaagaagcaggatataaaatcaataatgatatgaatggaaaagatcaagaaggatttgggatgtatgatgtaactattcataatggagaaagagcaagtgcctcaaaatattatttaaatccagcaagaaaaagagagaatttaacagtgtttaccgagtcttttgtagaaaaaataatttttgatggaaaaaaagccgttggtattgaggttaaaataaaagataaagttgaaaaaatttacgctaataaagaaataatacttagtggaggatctataaattctccacaattacttatggtttctggtgtaggtccaggagaacacttaaaaaaaaatggtattgaagtagtacataatcttaaaggtgttggtaaaaatcttcaagatcaccttgaaacatatatacaacaagaatgcaaaacttcagatactctatattcatatgtaaacaaattaaatatgcttagagtcggcattcaatggtttattaacaaaagtgggccctgctcaacatcttttctggaagctggtggtttttgcaagtcatcttctgataaagaatatccgaatattcaatttcatttttttccagcttttgttattgaccatggttctgtagatcctgataggcatggctatcaattacatgcaagtttaaatcagcccaaaagtagaggacaaataactttaaaaagttctaatccatatgattatccaagaatacaatttaattacttacaggatgaatatgatctaaaagaaacaataaaatgtattcatgtagcacgaaagattttaagccaaaactctatgaaaccctatgctggtaaagagattggcccaggggaaaattctcaatcagagcaggaaattgaacattatataagatctaaagcagaaactgcatatcatccatcttgtacattaaaaatgggtattgatgatatggcagttgtggatgaaaatttaaaaatacatggcttagaaaatattagagtagcggatgcatcagtgatgccagaaatcacaagtggaaatcttaatgcacctactttaatgattggtgaaagggccgcagactttattcaaaattaat

SEQ ID NO: 210058 - DNA, 1371 bp, Unknown
  Bacterial polypeptide expressing nucleotide sequence isolated from the Sargasso Sea
ataggactatgttctgccccaggggcaagatgtgggagggaagttcctcacacaatggcatggttcatgtaagaggcaatgcaaaagattttgataactggggacagttgggtttaacagattggacttacgataaagttctaccctattttaaaaaatctgagtcagttgagggcttggatgcaaattttcgaggagagtcgggaccattaaaactttctagatcgcccaatggcaatattcttagtcaagtttatttaaatgctgctcaacaagctggatatcaaattaataatgatatgaatggtgaaagacaagaaggttttggattaatggatacaactatttttaatggaaagaggcaaagtacaagcgttacgtatcttcatccaataaagcacagatctaacttggagatattaactaacgtaactgtaaataagatactatttgaggataaaaaagctgttggggttgaatgcaaggcgaatggtgaaaataaaaaatatttttcaagcaaagaggtccttctttctgctggggctataaattcacctcaactacttatgctttctggaattggtccagaaaatgaattatcaaaatatagcattgagccagtagagtgtttagagggagttgggaaaaacttgcaagaccatcttgaaacctatgttcaatataaatgtaaaaagcctgtaacactgcacagtgctcagaaccctttaaaaatggcattgataggtgctgaatggtttttgtttaagacgggtgttgctgcacactctaatctagaaacaggtggatttgtgaggagcaatgaaatgtctgattatccaaatatgcaattccatttttttccatctttagttttagatcatggtagaaagagctctacctgccatgcttttcaagcacatgttggaccgatgcgacctactagcagaggatcagtaaaattaaaatcagctaatccaaacgatgcgccttcaatccaattcaattacatgcaaactgaacatgatcttagagaaatgcgagaaggaataaaaattgcaagggagatatttaatcaaaaagaattcgatgaatatagaggagaagaaatctcgccaggaagtgacacaaacaatgatgaagatctgaataattttataagagataaaggagatactgcgtaccatccatcatgtacgtgtaaaatgggtaaagataatttatcagttgtagacgaggagctgaaagtatacggaatagatggattgagagtcatagatgcatcgattatgcctaatattattacgggtaatctgaacgcatcaacagtaatgattgctgagaaggcgtctgactcaattataaataattaat

SEQ ID NO: 210059 - DNA, 1253 bp, Unknown
  Bacterial polypeptide expressing nucleotide sequence isolated from the Sargasso Sea
catgagcatcacaaaaaaaacaccccctcgcctggaaggcgaattcgactacatcatagtaggcgccggcacagcaggttgcgtcctcgccaaccgcctatcggaagacccggaaatccaggtcctgctcctggaagccggcggcaaagacgactaccactggatccacgtaccggtaggctacctctactgcatcggcaatccccgcacggactggctctacaaaacccaatcggaacccggcctgaacggccgctccctctcatatccccgcggacgcgtgctaggcggcagttcgtcgatcaacggcatgatctacatgcgcggccagcgcgaagactacgatgaatgggcccgcgtcaccaatgacgcgtcatggtcctggaacgccgtcctccccatcttcaaacgtagcgaagaccactacgccggcgcatccgaatcgcacggagcaggcggcccgtggcgtgtggaaaagcagcgtctcaagtggaagatcctcgaggagttctcgcgagcggcgcaacaaaccggcatacccgccaccgacgacttcaatcgcggcgacaacaccggcgtcggctacttcgacgtcaatcagaaacgcggcatccgctggaatgcctcgaaagcattcctgcgcccggcgctcaagcgtccgaatctcaccgtcatcaccggagcacacacccaacgcgtcgtgttcgaaggacgtcgctgcgcaggcgtcgaatatcgtggcgacaacaccgactatctcgccaaagcccgttgcgaagtgatcctcagttccggcgcagtcaactcgcctcaattgctcgaactctcaggaatcggcaacggcgcgcgtctgcagaatcttggcatcgaggtcgtaaaggatctgcgcggcgtcggcgagaatctgcaggaccatctgcaattgcgcatggcttataaagtcgacggcgtacgcacgctgaataccgcctccgctcattggtggggcaagctgatgatcggcatgcagtacgccttttttcaaagcggccccatgtcgatgtcgccatcgcaactcggcgcattcgccaaatccgatccggacgaccgccagcttacgcgccccgacctcgagtatcacgtgcagccgctctcgctggatcgctttggtgaaccgctgcatcgcttcaacgcgttcaccgcgtcggtgtgccagttgcggccgacctcgcgtggcagtattcatatcgaatcacccgatgcttcgacgccac

SEQ ID NO: 210060 - DNA, 744 bp, Unknown
  Bacterial polypeptide expressing nucleotide sequence isolated from the Sargasso Sea
aaaatttacaagaccacttaatgtttagacctgtttataaaataaagaatattaaatcgcttaataaaaaaataaatagtttatttggaaatttaatgattggtttagagtttatatttaatcgatcgggaccaatgacaatgggtgcgagtcaactttgtttatttgcaaaaagtgattcctcaagagaaactcctaatttacagtttcatgttcaaccaataagtactgataaactcggaggtgcagctcttcatgactttcatgcttttactccaacagttgcaaatattagaccaactagtagaggtgaaataaatattattagtagtgatagtagagaaaaaccaaaaattaaaatgaattatttatcaacagaagatgatagaaaagttgcggcagatggacttagattagttagggatattgtctttcaaactgatacttttaaaaaatataaaccagaggaattaagacctggatctcaatttcaatcagatgaagaacttgttcaagaaggaagtaaatttactcaaactatttttcaccctgttggcacatgtaaaatgggaaatgacgaaaactctgtagttaatgatgagcttaaagttcatggtttacaaaatttaagagttatagatgcatctataatgcctaatattacatctggtaacactaatgcacctacaataatgattgcagaaaaaggtgcagatatgatactaggaagtaatgccaattgat

SEQ ID NO: 210061 - DNA, 904 bp, Unknown
  Bacterial polypeptide expressing nucleotide sequence isolated from the Sargasso Sea
tcttcagtaaaaattaaagacaaaattcaaaaaatttatgcaaacaaagaagttattttaagtggtgggtctataaactcacctcaattattaatgttatcaggtattggagatgcaaatcatttgaaagataaaggaattgaagtcgtaaacgatgtgaaaggtgtaggtaaaaaccttcaggatcacttagaaacttacattcaacaggaatgtaaaacacctaatactttgtatacttatacaaaattagttcctaaagtactagctggtgttcagtggtttatgtttaaatctggaccttgctcaaaatcctttttagaggctggaggttttgcaaaatcttcacctgaaagaaaaatttcaaatattcaatttcacttttttccatcatttgtaattaaccatggtttagagcaacctaaatcccatggatatcaattacatgcgagtccgaaccatccaaaaagtagaggacatattactcttaattcctctgatccctatgagtatccaaaaatattatttaattatttaaaagatgaagatgatcttaagcaaacaagagagtgtatacatgttgcaagaaagattttatcccaacctgctttagctgagcatgctggaaaagaagtgggaccaggtacacaagcacaatcagatgacgaattaaatgaatatattagatcaaaagcagatacagcttatcatccatgtggtacatgcaaaatgggagttgatgatatggcagttgttgatgaaaatttaaaagtaaaaggaattcaaaacttgagggttattgatgcatcagttattcctgaaataccaagtgcaaaccttaatgcccctacattaatgattgctgagaaaggttcagattgtattctacaatctcgttattaaa

SEQ ID NO: 210062 - DNA, 553 bp, Unknown
  Bacterial polypeptide expressing nucleotide sequence isolated from the Sargasso Sea
atcttcctctgaaagaaaaataccaaatatacaatttcatttttttccatcatttgttattaatcacggtttagttaatccaagttcacatggttaccaattacatgcaagtcctaatcacccaaagagtagaggatctattactctaaattcttcaaatccatatgattatccaaaaatattatttaattacctagaagatgaagatgatttaaagcaaacaagagaatgtatccatgtagcaagaaaaattctatcacaaccttctttggctaaacatgctggaaaggaagttggtcccggttctgacaaacaaagtgatgatgaattaaatgaatacataagatctaatgcagaaactgcttatcatccatgtggcacctgtaaaatgggtgtggatgatatggctgtagtggacgaaaatttaaaagttaaaggaatacaaaacctaagaattgttgatgcatctatcatgccagaaattcctagtgcaaatttaaacgcccctactcttatgatcgcggaaaaagcttctgatcttattttgaactag

SEQ ID NO: 210063 - DNA, 1285 bp, Unknown
  Bacterial polypeptide expressing nucleotide sequence isolated from the Sargasso Sea
aatgaattatgattatttaatagttggtgctggatcagcaggatgcgtactagcaaatagattatctgataatagcaatcataaagttgcaattttcgaagcaggtggaacaagtgatatttggaaagttaaaatgccacttgctcttctttacactatgcacgatccaaaatataattggaaatattattcagaacctgagccatacttaaataatagaagagttttttgccctagagggaaaatgattggtggttgttcatctcacaatggaatggtttttgtaagaggtaacaaagatgattatactaggtgggaaaactttggcttaaaaaattggtcttatgaaaaagttttaccttattttaaaaaaattgagacgtggtcagaaggagaaaatcaatttagaggttctttaggtcctctaccaataaatttatcaaaaaattcaaatcctttgtttaaagcttttattgatgcagctggagaagctggtcacaaaattaatattgatatgaatggtgaagaacaagagggatttggcatgtttgataccactatgcataatggagaaagagctggtgttgctaaatattacctagatccagtaaaaaatagaaaaaacttggatattctaaaaaattcatttgtagaaaaaattttatttgatggaaaaaaagctgtaggtcttcaagtaaaaattaaagataaagtccaaaaaatttatgcaaataaagaggtgatacttagtggaggagcaattaattctcctcaattattgatggtttcaggtattggtgatgcaaaacatttaaaagataatggaatagaagttattaatgaagttaaaggtgttggaaaaaatcttcaagatcacttggaaacttatattcaacaagaatgtaaaacacctaataccttatataagtatacaaaacttattccaaaagtattagctggcattcaatggtttatgtttagatcaggaccttgttctaaatcatttttagaagctggaggatttgcaaaatcttcgcctgatagaccggttgcaaatattcaatttcattttttcccgtcatttgtaataaatcatggtttagttgatcccgatactcatggttatcagttacatgcaagtccaaatcatcctaaaagcagaggtcatgtaactcttaattcatcagatccttataagtatccaaaaatattatttaattatttgaaagatgaggaggatttaaaacaaacaagagagtgcatccatgttgcaagaaaaatttta

SEQ ID NO: 210064 - DNA, 1585 bp, Unknown
  Bacterial polypeptide expressing nucleotide sequence isolated from the Sargasso Sea
atgaattttgattatataataatcggtggaggatctgctggttgtgtattagccaacaggctaagtgaaaattcaaaaaataatgtagctcttatagaggcgggtaaagatagcgatatttggaaagttaatatgccattggcaatactttatgcaatgcatgatcctaagtataattttaaatattattctgagcctgagcctcaattaaataatagaaaaattttttgtccacgaggaaaaatgattggtggctgttccgcacataatgggatggtttatgttagaggaaatcctaatgattactcaagatgggctaaaatgggactagatgagtggtcttatgaaaaagttttaccttattttaagaaaattgaaacttggtctgaaggaggaaatgaatatagaggtggcgatggtattttaccagttaaccaatcaaaaaactcaaaccctcttttcaaggcatttataaattctgctggagaagccggatataaaataaattcagatatgaacggaaaagatcaagaaggctttggaatgtacgacgtaacaatacataaaggtgaaagagcaagtgtttctaaatattatttaaaaccagctaaatctagaaataatttaaaaattctaactgaaaaatatgtcaaaagaatattatttgatggaaagaaagcaattggtgtagaaattttaagcaaaaataaaaaagttgaaaaaatttactcaaataaagaaattattttaagcgctggtgcaattaactctccacaaatactaatgctatctggaataggtccaggagatcatttaagagaaaatggaatagatgttattcataatttagagggcgttggtgctaaccttcaagatcacctcgaggtttatatacaacaagaatgtaaaaaacctttaacactttactcttatgttaataaaattaatatggttagaattggaattcaatggttcttatcaaaaaatgggccttgctcttattcattcttagaagcaggaggtttttgtaaatcctcgccagaacaggaatatcctaatattcaatttcatttttttcctgcatttgtaattgaccatggtttagttgaccctgatagacacggttttcaattacatgcaagtccaaatcatccaaaaagtagaggaaatataaaattaaaaagttcaaatattttcgacgctccaactattaaatttaattatttagagcatgaagatgatatgaagcagacaattgaatgcgtgaaagttgcaagaaatatactcaaacagaattctcttaaggagtatgcaggaaaagaaataggacctggtgaggatgctacatctgatgaaaccattgtcgagtatataagatcaaaagctgagacagcttatcatccctcatgtacacttaaaatggggattgataaatcagcggttgtagaccaaaagctgaaaattcatggacttgaaggcataagagttgctgatgcatcagtccttcctgaaattactagcggaaatttgaatgcaccagtaatcatggtggcagaaaaagcttcggacatcattttaaattaat

SEQ ID NO: 210065 - DNA, 1672 bp, Unknown
  Bacterial polypeptide expressing nucleotide sequence isolated from the Sargasso Sea
atggtaaaaatcgatactgaatacgactatatcattgttggcgctggatctgctggctgtgtattagcgaatagattgacctcaaattcaaagaatactgtccttcttcttgaagcgggtggggaagacaaatccttaaccttaaagatgcctgctgccgttttatcgaatcttaaaagtactaaacacaattgggcatttaaaggtgagccagaacccgaactaaatggtcgtcaacttcaacatgaccgcggtaaaaccattggtggctcatcatcaataaatggaatggtctatataagaggaaacacacttgattatgagggttggagacaaatgggatgcgatggatggggatacgcagatgtcttgccatattttaagaaaatggaatgttacagtggaggaggggatgattttcgaggtgagtcaggtccattaaaggtacatagaagcattcccaaagacccactttcactggcttttattaatgcaggaaaagaagcaggatataaagaaacagatgatataagcggattttgccaagaaggttttggtatatttgatcggacagtattcaacggtgagcgatggagcgcatcaaagggttaccttgatccgatacgtaatagaaaaaatttaacaattttaacaaatgcgcttgtttgcaatttaaattttaaagataacacagcagaaggcatatgttttaaaaataaaaataatgaaatagtaaatgtaaaggcaaaaaaagaagtaattctgagtgctggtgcagttggatcaccacacatacttatgctctcaggaattgggccgaaagagcatttagattcaataggagttaatacattagctgatttacagggtgttggacaaaatcttcaagatcatcctgattttattatgaaatataaatgcttaaaacctgtttcactttggccaaaaacaaagagattaagtagtataggatctggtatacaatggctattaactaaagagggtatgtgtgcatctaatcacttcgatactgttgcatgtgtaagatcagcacctggtgttgagtaccctgacttacaattatgtatttcaccaattgccatgaaagacaatagttgggaactgcttcaagaacatgcatttcaagttcacgtcggtttaatgcgaactcacagtcgtggtaagatcgaattacgatcaaaaaatcctgctgatcctcctcgcattcttgttaattatctcaaagacaagcgtgatagagaattgttacgtaagggcattcatttggcgcgcgaactacttaatcaacctgctttttcaaacataaagggtgatgaaatctttcctggtgaaaactacaaatcagatgacgaacttgatgcaaaattaaattccaacattacgagtcaatggcacttgtgctgcacggcacgcatggggctaaaaacagataaacattcagttgttgataatcaaggcagagttcatggtttcaatagcttacgtgttgttgatgcttcgattatgccttttgcgacaaatggaaatacaaatgcaccaacaattatgattgctgaaaaaataagtgataatatattgggtgataagcctctacctcgaatagaattaaaaacctggcaaagtcctaactatcagatgtatcaaaggtaag

SEQ ID NO: 210066 - DNA, 942 bp, Unknown
  Bacterial polypeptide expressing nucleotide sequence isolated from the Sargasso Sea
aatggatatttttgattatataattgtaggagcaggatctgcaggatgtgttttggctaacagattatccgctaacccaaaaaacaaagttttacttttagaagctggaggtaaagatagttacccatggatccatattccagttggctattataagacaatgcacaatcctaaagttgactggtgctttcatacagaaaaagatgagagcatgaataacagatcaataagatatccaagaggaaaaacattggggggaagctcatctatcaatggtcttctttggataaggggacaaagtaatgattatgacaattggagacaacaaggtaatactggatggggttgggatgatgttctaccctactttataaaatcagaaaataatgaattaggtaaaagtgaattccatagtgacagtggaccaataatggttgctaataaaaaaattaaattaaaaatgttagaagaatttataaacgctgctgaagagaaaggtatacctaaagttattgattttaatactggtgataattttggtgtaggttattttcagtttacgactagtcattctcataaaggtctaaaattaagatctagtgctgcaaaaggatatttaaatcctgttaaaaaaagatctaatttaaaaataatcacaaatgcacatgtaaaaaaaataaattttgatggaaaaagagcagtaagtgtaagttattttttagatgaaaaattagaagaagttcatacaagtggtgagataatattatcagctggttcgattggttcaccgcatatattacaagtatcaggaattggtgatagtaaaaaattaaaagagtttggaataaattcaattaatgaattaaaaggagttggaaaaaatttgcaagatcatttgatgtttagaccggtctataaagttaaaaatcttaaatctttaaa

SEQ ID NO: 210067 - DNA, 805 bp, Unknown
  Bacterial polypeptide expressing nucleotide sequence isolated from the Sargasso Sea
ggaataggtgatgaaacgtatcttaaaagcttgggaatagaagtaattaataatttagttggggtgggagaaaatttacaagatcatttagagatgtatattcaatataaatctaaaaaaaatgaaacattacattctttagcaacaaattttctatatcaatcaatagagggatcaaaatggtttttatttaaaaaaggtaggttagcaaactcacacttagagttaggaggttttgttaaatctgacaaatcatataatcaccctaacctacaatttcatttttttccctacttagttattaatcatggtttagaaaatcctaattttgaagcttttcaatttcatgtttgtccaaatagaccaaaaagtagggggtttgttaaaattaaaacaaataactataaagatgatcctaaaatacaatttaattatcttaagcatgaagacgatttaaaacaaatgagagaaggtgtaggaattgctaaaaaaattttgtctcaaaaagcacttaaagaatatgttggcacagaaattaggcctgggaagaatgtatctaatcaaaatgaattagatgaagttattaaaaatacatctgaatctgcgtatcatccgtcatgcacaaataaaatgggtgaggacaaaacttcagttgtagaccaagacctaagggttcatggaattcaaaatttaagagttgttgatgcttctgtaatgccagatattgttagtgctaatttaaatgcaacaactattatgattgctgaaaaagcttacgaccaaataaatagtaccgttagttaga

SEQ ID NO: 210068 - DNA, 1726 bp, Unknown
  Bacterial polypeptide expressing nucleotide sequence isolated from the Sargasso Sea
aatgacgcgcggcgttgcgccgcgtgacaggagacaaaccgtgactacccaacgcacgctagaaggcgaattcgattacgtgatcgtcggcgcgggcaccgcgggctgcgtgctcgcgaaccgcctgaccgaggatcccgacatccgcgtgctgctgctcgaagccggcggcaaggacgactatcactggatccatatcccggtcggctatctgtattgcatcggcaacccccgcaccgactggctgtacaagacgcaacccgaagccgcgctcaacggccgcgcgctgtcgtatccgcgcggccgtgtgctcggcggctgctcgtcgatcaacgggatgatctacatgcgcggccagcgcgaggattacgacagctgggcgcaggaaaccggcgacgccggctggtcgtgggacagcgtgctgccgatcttcaagcgcagcgaggatcatcatgggggcgcgagcgacgcgcacggcgcgggcggctactggcgtgtcgagaagcagcggctgcgctgggagatcctcgaatcgttcgcgcaggccgcgcagcagacaggcatcccggcaaccgacgatttcaaccgtggcgacaattccggggtcggctatttcgaggtgaaccagaagcgcggcgtgcggtggaatacgtcgaaggcgttcctgcggcccgcgatggcgcgcccgaacctgaccgtgatcaccggcgcgcacgcgcagcgcgtgatcttcgacgggcggcgcgcggtcggtgtcgaataccacggcggcggcacggattacgtcgcgcgggcacgcgcggaggtgctgctgacgtccggcgcggtgaattcgccgcagttgctcgaactgtcgggtatcggcgatggccggcggctgcaggcgctcggcattgacgtcgtgcaggatctgccgggcgtcggcgaaaacctgcaggatcacctgcaattgcggatggcgtttcgcgtcgaaggcgtgcgcacgctcaacacgctgtccgcgcactggtggggcaagctgatgatcggcgccgaatatgcgctgctgcagcgtgggccgatgtcgatggcgccgtcgcagctcggcgcgttcgcgaaatccgatcccgacgatcccgcgctcacgcgccccgatctcgaataccacgtgcagccgctgtcgctcgaacgcttcggcgagccgctgcacagcctcaacgcgttcacggcgtccgtgtgccatctgcggccgacgtcgcgcggcagcgtgcatatcgcgagcgccgatccgggcgcggcacccgcgatcgcaccgaactatctgtcgaccgaccacgatcgccgcgttgccgcgaacgcgctgcgcctcacgcgccggatcgcgtccgcgccggcgctcgcgcgctatcgtcccgaggaaatcctgccgggcctgcaataccggagcgaagcggagctgatcgaggcggccggcgcggtcggcacgacgatcttccatccggtcggcacgtgccggatggggcgtgccgacgatgagcgcgcggtggtcgacagccggctgcgcgtgcgcggcgtcgccgggctgcgaatcgtcgatgcatcggtgatgccgttcattacatcgggcaacaccaattcgccgacgctgatgatcgccgagcgcgcgagcgacatgattcgtgccgatcgccgcgcggcgcgcgaagcgacgccggtgcgcacggagccggcggtgacggccgcgtga

SEQ ID NO: 210069 - DNA, 1049 bp, Unknown
  Bacterial polypeptide expressing nucleotide sequence isolated from the Sargasso Sea
tatggtatttgtaagaggaaatccaaatgattatcaaagatgggaatcttttggtttggatcattggtcttatgataaagttcttccctatttcaaaaaaattgaaacatggtcggaaggtgaaaatgaatatcgaggtggcaatggaatactaccagtaaaccaatctaaaaataaaaatcccttattcaaagcgtttgtcgattctgctggtgaggctggttacaaaataaacaatgacatgaatggtaaagagcaagaaggatttggcatgtacgatgttacgattcataaaggtgaaagggctagtgtttctaagtattatttaaatccagcaaaaaaaagaaaaaatctaaaagtatttacagaagcctttgttgagaaaattatttttgatggagtaaaagccattggaatagaagtaaaaattaaaaataaaattgaaaaaatatatgcaaataaagaggtaattttgagtggtggtgcaatcaattcaccacaattactaatgctttcaggaattgggccaagccagcacctaaaagatagaggaattagtgttgttcacaacttggagggagtgggaaaaaacttacaagaccacttagaaacttatgtccagcaagaatgtaaaactaaagatactttgtattcttatgttaacaaaatcaacatgattagagttggtattcaatggtttctaaatagaagtggcccttgttctgcctctttcttagaagcgggaggtttttgtaaatcatctccagaaagagaatatcctaatattcaatttcatttttttcctgcttttgtaattgatcatggattagttgatccagatagacatggttatcaattacatgcaagtccaaatcacccaaaaagtagaggtcatataacactaaatagttcaaatccttatgattatccaaaaattcaatttaattatctagagcatgaagatgacttaaaacaaacaatagaatgtattcatgttgctagaaaaattttaggacaagattctttaaaaccttttgcgggaaaagaaa

SEQ ID NO: 210070 - DNA, 1597 bp, Unknown
  Bacterial polypeptide expressing nucleotide sequence isolated from the Sargasso Sea
atggaaaattttgattacataattattggagcaggatctgcaggatgtgttctagcgaaccgactttctgaaaatccaaataccaaagtcgtattaattgaagctggtggaaaagataattatccatggatacatattcctgttggatattttaaaacgatgcataatccctctgttgattggtgttataaaactgagcctgatgcatcaatgaacaatagatcaatccgttatccaagaggtaaaactctaggcggtagctcctccattaacggactactttatattagaggacaaagtagagattatgatatttggcgacaattaggaaatactggttggggttgggatgatgttctgccatattttataaaggcagaaaaccaagagagaggaaaagatgaatttcatggtattggagggcctctatcagtttctgatcaaagaattcaattaccattattgaatgaatttcaaaatgccgctgaagagtttggaattcctaaaacaaaagattttaatacaggcgataatcatggatgtggttattttcaagttactgaaaaagatggctttagatgtagtacagcagttggatatctaaacccaataaaaaacaggcaaaatttaagaaccataactaatgctcatgtaaaaaagattaattttgatggcaaaactgcaaaaggaattgaatactggcaaggtgatgagcttaaaaaactaaattgtaataaagaaataattttatcatctggttcgataggttcaccccagatattgcaaacttctggaataggaaattctcaaaaattaaatgacttaggtatagatgtagtgcaagaattaaaaggtgtgggtgaaaatttacaagatcacttaatgtttagacctatatataaaattcaaggacttaaatcgctaaataaaaaagttaatagtttatttggaaaattgatgattggtctggaatatgtttttaatcgaagtggaccaatgaccatgggagcgagccaaatgtgtatgtttgctaaaagtgatccctcattagaattaccagatctacaatggcacgttcaaccaatgagtatggacactttaggagcaactaaaaatcatgattttcatgctttcacacctactgtttcaaatattagacctacaagtagaggccatgtgagtattgtagataaagactctagaacatatgcaaaaataaaaatgaattatctttcaaccgatcacgaccgaatgattgcagctagaggattaaaacttacaagaaaaattgtaatggagtcagaaacatttaaaaaatataaacctgaggaatatagaccaggcattgacattaataatgatgaggaacttgtaaaagcaggttcagattttgcacaaacaatttttcatccagttggcacatgtaaaatgggtcaagatgatatggctgtagttgatgaaaaactaaaagtaaaaggaattgaaaatttaagagtaattgatgcttctataatgccaaacattacatcaggtaatactaatgcacctacaataatgattgcagaaaaaggtgcagatatgatacttacccattgat

SEQ ID NO: 210071 - DNA, 1318 bp, Unknown
  Bacterial polypeptide expressing nucleotide sequence isolated from the Sargasso Sea
atgttatatgttagaggacataaatgggattatgatctctgggcagagcttggaaatgaaggatggtcatatgatgatgttttgccttattttaaaaaatctgaagataatgagttacttgataatgaatatcatggtaaaggcggtccattaacagtctcacaattgcgtcatgacaaccctttttccagatattttgttgaagctgcctcaaaacattataaaaagaatgatgatttcaatggagaggatcaagagggaattggactctatcaggtgacgcaaagaaaaggtaaaaggtgtagtgcagcagttgcatttcttaatgatgtaaaacataaacaaaatctaacagtatttacagaaacagttgttgacaaagtaaatttcgaaaacgatttagctgtttcagtaacaggcataaataagggcaaagttatggattttcatgcaaataaagaaattatactttgtgggggtgcttatggatcccctactattcttatgcgttcaggagtaggagataaagataagctttcaagattagatattgattgtaaattcgatttaaaaggagttggtgagaatttgcaagatcaccttgactatattactgcgcatcgggttgatagttgggacttaatgggacagccctttaggtcagcaaaatttattttaagagctccatatgagttattaaaatatcttataaatcaaacggggatgttttcttcaacactcgcagagggtggagcatttataaaatcaaatgattctttagagattccagatattcagcttcactttgttgtagggatggtcgaggatcatggtcgtgaagaaatttgggggaatggttttagttgccatatgtgtttgttaagaccagaatcaagaggcactgtttcaattagttcaaaaaacccaatggaagatccagtaattgacccaaattatctttctaataaaaatgatcttaaaacaatgatcgaaggctataaaaaaatgatgcaaatcatgaatactgcccctctagatcagtttgataacgttcgaaacccagttaatcttaaggatgacaagtcaatagaatcggcgatcagagctagggctgatactatttatcatcctgtgggaacgtgcaaaatgggaaatgatgagatgtctgtcgtagactcaaatcttgtagtaagaggcactaaaaatttaagagttgttgatgcatctattatgccaacacttgttggaggcaacacaaatgctccgacaataatgattgcagaaaaaattgctgataatattaagggaacatcatgaa

SEQ ID NO: 210072 - DNA, 1582 bp, Unknown
  Bacterial polypeptide expressing nucleotide sequence isolated from the Sargasso Sea
tatgaatttggattatttaattattggcgctggaagtgcaggctgtgtacttgcaaatagattaacagaaaacagtcaaaacaatgtagcaatatttgaagcaggaaaacccagtgatatctggaaagtcaacatgccacttgcaattttatatacaatgcatgatccaaaatataactacaaatattattcagaaccagaaccttatctacataatagaagattattttgcccaagaggaaaaatgattggtggatgttctgctcataatggaatggtgtttgtcagaggcaatccaaatgattatcaaagatgggcatcttttggattagacgattggtcttatgaaaaagtccttccctattttaaaaaaattgaaacttggtcagaaggagaaaatgaatatcgaggtggtaagggaatattgccagtaaaccaatcaaaaaataaaaatcctttatttaaagcatttgtagattcagctggagaagctggttacaaaataaataacgacatgaatggtaaggaacaagaaggttttggaatgtacgatgtcactattcataagggagaaagagcaagtgtttcaaaatattatttaaatcctgcaaaaaaaagaaaaaaccttaaagtatttactgaagcttatgttgagaaaataatttttgatggaaaaaaagcaattggaattgaagttaaaattaaaaataaagttgaaaaaatttacgcaaataaagaagtaattttaagtggaggtgcaattaattcacctcaattacttatgctttcagggattggcccaagtcaacacttaaaagataagggaattgatgttgttcataacttagagggtgttggcaaaaatctacaagatcatttggaaacgtatgtgcagcaagaatgtagaactaaagataccttatattcttacgttaataagttaaatatggttagaattgggattcaatggtttttaaatagaagtggtccttgctctacctctttcttggaagctggaggtttttgtaaatcatcaccagagagagaatatcctaatattcaatttcatttttttcctgctttcgtaattgatcacggattagttgatcctgataggcatggttaccaattacatgcaagccctaaccatccaaaaagtagaggccatataactttaaagagctcaaacccttatgattatccaaaaattcaatttaattatcttgagcatgaagatgatttaaagcaaacgatagaatgtattcatgtagctagaaaaattttaggacaagattctttaaagccttttgcgggcaaagaaattggaccaggtgaacatgctcaaactaatgaggtatttgaagaatacattagatctaaagctgagactgcttatcacccatcttgtactttaaaaatgggtgtagataatatgtctgttgtagatcaaaaactaaaagttcatggtgttgaaaatctaagagtagttgatgcgtctgtaatgcctgaaattacaagtggaaacctaaatgctccaacattaatgatagctgaaagagcatcagaatttattttaaattaa

SEQ ID NO: 210073 - DNA, 931 bp, Unknown
  Bacterial polypeptide expressing nucleotide sequence isolated from the Sargasso Sea
aggataatttttgaaaatagtgtagctgttggagtagaatatttcacaaataataaaactaaaaaatactttgctaataaagaagtaattttgagtgcgggagcaataaattcaccaaaaattcttcaactatctggtattggaaatcagagtcatcttaaagatttaggaattaaagtgattaatgatctaaaaggtgttggagaaaatttacaagatcacttagaagtttacatacagtataaatccaaaagtaatgatactttgtataacttaacaactaatatgattacacaatgtattgaaggtgcaaagtggtttttgttaggaaagggtaagttatcacattctcatttagaacttggaggttttgtaaaatcaagttctatttataatcatcccaaccttcaatttcatttctttccttcattagttattaatcacggtttagaaaatcctaaatttgattcattccaattccatgcttgtccaaatagaccaaaaagtagaggttttgttaaaatttcatctagtaattttaccaaagatccaaaaattcaatttaattatctccagcataaggaggatttagaacagatgagacaaagcgttaaaattgtacaaaatatttgttctcaaaaatctcttttagaatatattgattatgaaataagaccaggaagggaagttgtaaatcaagaacaattagatgaagtgataagaaatactgcagagtccgcataccatccttcgtgcagtaacaaaatgggtattgataaagattctgtagttgatcaagatgctagagtttatggagtccaaaatttgcgagttatagatgcttcaataatgcctgatattgttagtgctaatctaaatgctaatgttgtgatgatagctgagaaggctgctgatataatattaaattaaa

SEQ ID NO: 210074 - DNA, 1441 bp, Unknown
  Bacterial polypeptide expressing nucleotide sequence isolated from the Sargasso Sea
ccgcaagcatgcaggatactctgggggttcttacaaagtcccagaatcacaccaagaaaaaagaagaggatttcaaccaagaggaaaaactttaggtggttctagttcaataaatggcatgctttatgtaagaggacatccttgggattatgatcactggtcatctcttggtaacgatggttggtcttatgaagaagtactgccatattttataaaatctgaatgtaatgaaagactacaagatgaatatcatggaaatagtggtccccttaacgtagcagaattaaggcatgacaatccttttacaagattctttgttgaagctgcaacaaaacatcatcctgcaaatgatgatttcaatggaaaaaatcaagaaggagtaggtctctatcaagtgacccaaaagggtggacaaagatgtagtgcagcagtggcttacctgaacccagtaaaagaaagaggaaatctaacggtcttcactgaaacaatagtagataaagttgaatttgatggcttaaaggctgttggagttagatgcatcaagaaagataaaactttctctattaaagcaagcaaagaagttttactttgcggaggagcttatggctctccatcaattttaatgcgttcaggaattggcaacaaagaatatttaagaaccaaggatatagattgtttaattgaccttcctggtgtcggtgagaatttacaagaccatatcgattatataacttcgcatagagttgatagctgggaattgatgggaagcagatcgcttaaattttggcttcgtgctccctttgagcttcttaaatatctattgtctcgcacaggaatgttttcatcttctttagcagaaggaggcgcatttattaaaacaagtgaagagcttgagatgccagacattcaactacattttgtagtttctatggttgaagatcatggtagaacaaaactttggggtaatggttttagttgtcacgtctgtttattaaggccggagtcaaaaggtactgtaaaaatcccttctaaagatccaaccgctgctcctttaattgacccaaattatttgactgaagagcgagatatgaaagttttaataaaaggctataaaaaaatgatggagataatgactacagagcctctaaagaaatttaataatattcgtaatccattaaacattaatgatgataaagctatcgaaacagccataagaacaagatcagacactatttaccatccagtgggaacatgtaaaatgggtatcgatgatatggctgtagtggatagctctcttagagttaaaggagtgcagaatctgcgcgtagttgatgcatcagttatgccaacacttgtaggcggcaatacaaatgctccaactattatgatcgctgaaaaagcagccgatttaattaaaaaacatggaagcagaagcttttaa

SEQ ID NO: 210075 - DNA, 865 bp, Unknown
  Bacterial polypeptide expressing nucleotide sequence isolated from the Sargasso Sea
tttggatgctgattttataataattggggctggttctgctggttgtgttttaagttataggctttctaaggacaaaaatagtaaaattttactgcttgaaaatggagggtctgataaaagtcccttaattcaaatgcctgcagcactatcttatcctatgaatatgaaaaaatatgactggggatttatgtctgatccagagcctaaattaaataataggagactggccacacctagaggtaatgttatagggggctcttcttcaatcaatggaatggtatttgttagaggtcatgcaagagactttgataattgggcacaatctggagctagaggatggtcctacgctgacgttttaccctatttcaagaaaatggaaacttggcatggtgacagagataccaattctgaaaaattccgaggtttttctgggcctcttcacatttctagaggagatcaaaaaaacccattatttaaagcttttgtaaaagctggtaatcaagctggttttgaaattacgtcagactacaatggttttaagcaagagggttttggagtaatggaacaaacgatttataaaggaagaagatggtcagcagctaatgcctatcttagaccagtattaaaaagaaataatttaaagattctgaggtgttatgcagaaaagatagtttttgatggcttaaaagcagtaggagttgaagtaaatataaagggtaaaataaaaaaatattttgctaagaaagaaattattatatctgcctcttctataaattctcctcgattattactattgtcaggagtgggtccagcaaacgaattaaaaggattaggtatcaatccaatagttgatcgaaaaggtgtt

SEQ ID NO: 210076 - DNA, 1054 bp, Unknown
  Bacterial polypeptide expressing nucleotide sequence isolated from the Sargasso Sea
agaaggttttggcatgtttgatactacaatgcatcaaggcgagagagctggagttgccaagtattatttaaaccctgttaaaaatagaaaaaatttaaatattttaaaaaactcatttgtagaaaaaatactatttgagggaaaaaaagcagttggtcttcaagtaaaaataaataacaaggttgaaaagatttatgcaaataaggaagtcattttgagtggaggatctataaattctccacaattattaatgttatctggtataggcgacgaaacccatcttagagataatggtattgaagttgttcatcactcaaagggtgttggaaagaatttacaagatcatcttgaaacttacatacagcaaaaatgtaaaactcctaatacactttacacatacacaaaattaattcctaaaattttagcaggtatgcaatggtttatgtttaaatctggaccctgctcaaaatcatttttagaggctggtggttttgcaaaatcatcacctgatagaaaagttgctaatattcaatttcatttttttccatcatttgtgataaatcatggcctagaagaacctgatacacatggttatcaattacatgcaagtccaaatcatccaaaaagtagaggtgaaataacacttaattcttcagacccatacgattaccctaaaattttatttaattatttaaaagaagaagaagatcttaaacaaacaagagagtgtattcatgttgcaagaaaaattctagcacagccagctttagcagagcacgctggtaatgaagttgggccaggttttgatgcacagtcagatgatgaattaaatgaatatattagatcgaaagcagacactgcatatcatccttgtggaacatgcaaaatgggagttgatgatatggcagtagtagaccaggatttgagggtaaatggaattggaaatttaagagtgattgatgcatcagtgatacctgaaataccaagtgcaaacctaaatgctcctacacttatgattgctgaaaaaggttcagaggcaattttaaataattaa

SEQ ID NO: 210077 - DNA, 754 bp, Unknown
  Bacterial polypeptide expressing nucleotide sequence isolated from the Sargasso Sea
aatgtataaacccataactctttataaatattggaatttgatttcaaaagctaaaattggtttacaatggctgattactaaaaagggtcatggggcctctaatcattttgaaagtgccgcatttattagatcaagagctggtgtagagtatcctaatattcaatttcattttttaccattagcagtgagatatgatggtaaaacttctgcagactctcatagttggcaggcgcacgttggtccaatgcgatcctcatctagaggtcagataagtcttaaatctaaagatcctaatatacctccttcaatcaaatttaattatatgtctcatgaacaagattggattgattttagacattgcgttagaattacgagagaaattttcaatcaaaaagcatttgaagaatttaaaggaaaagaaatacaaccaggtgatcattgtaattctaatgatgaaattgataattttattaaacaacatgtagaaagtgcatatcatccatgtgggacctgcaaaatgggttcaaaaagtgatccattagcagttgtagatgaagaatgtaatgttataggattgcaaaatttaagagttgtagacagttcaattttccccaatataacaaatggaaatttaaatggtcctactataatggtagctgaaaaggcttcagatcatattatagggaaaggtgttttgcctaagtctcatttcgaaccatggattaatactaattgggaaataaaagataggtag

SEQ ID NO: 210078 - DNA, 1261 bp, Unknown
  Bacterial polypeptide expressing nucleotide sequence isolated from the Sargasso Sea
ggttggagttggagagaagtacttccatattttataaaagcagaagaccaagagagaggtgctagtgagtttcacggaaaaggtggacctttggctgtttctgatcaaagaattacattagatattttagatgtatttcaaaacgcagcatcagaagttggaatacctaaggtagatgatttcaataaaggagataattttggttgtggttattttcaagtaacggaaagaaatggtctaagatgtagtgctgctgttgggtatttaaatccaatcaaaaaaaataataatttaaaaatagaaactaaatgtcatgtgcaaaaaattaattttgaaaataaaaaggctgtgagtgttaattatttaaaaggagacaaaaaatttacagtaaaagccaataaagaaataatactaagtgctggatcaataggaagtccacaaatattacaaacctctggtataggagaaagttctaaacttaaaaatttaggtttagaaatagtaaatgatttaaaaggcgtaggtaaaaatttacaagatcacttaatgtttagacctgtttacaaggtcaaaaatatcaaaacattaaataaaaaaattaatagtgtatttggaaaacttttaataggtttagaatatgtttttgcgagaaggggtccaatgactatgggggcaagtcaactttgtggttttgctaagagtgatgaaaatagagaaactcctaatttacaatttcatatacagccaattagcactgataaacttggtggtgcaaaccttcatgattttgatgcatttactccaacagttgcaaacattagaccaacaagtagaggagaaattaacataataagttcagattctagagataatccaaaaattaaaatgaattatttatcaactgaggaagatcgaaaagttgcagcagacggcataaaattaattagaaaaattgtaatggaaacagatgaatttaaaaaatatgagccagaggaatttagacctggagcgcatattcaagagggagaggaaatagtaaaagcttgcagccattatgcgcaaacaatatttcatcctgtaggaacatgcaaaatgggaaatgacaatgatgcagttgtatcagatgaattaaaagtccacggtattaataatttaagagttattgatgcatctattatgccaaatataacatctggaaatacaaatgctcctacaattatgattgccgaaaagggtgctgatatgatactgaacagttaat

SEQ ID NO: 210079 - DNA, 922 bp, Unknown
  Bacterial polypeptide expressing nucleotide sequence isolated from the Sargasso Sea
taaaactgcaattggtgttgaaacgattaaaaaaaatataaccaataattatttagccaataaagaagttatactttgtgcaggttcaattaattctcccaaaattcttcaattatccggaataggtaatgaaaaacatcttaaaagtttgggaatagaggtaattaataatttagttggggtgggagaaaatttacaagatcatttagagatgtatattcaatataaatcaaaaaaaaatgaaacattacattccttagcaacaaattttgtctatcaagcaattgaaggatcaaaatggtttttgtttaaaaaaggtaggttagcaaactcacacttagagttaggagggtttgttaaatctgacaaatcatataatcatccaaacttacaatttcatttttttccatacttagttattaatcatggtttagaaaatcctaattttgaagcttttcaatttcatgtttgtccaaatagaccaaaaagtagggggtttgttaacattaaaacaaataactataaagatgatccaaaaatacaatttaattatcttaagcatgaagatgatttaaaacaaatgagagaaggtgtgggaattgctaaaaaaatattatctcaaaaagcactaaaagaatatgttggcactgaaattaggcctgggaagaatgtatctaatcaaaatgagttagatgaagttattaaaaatacatctgagtctgcgtatcatccgtcatgcacaaataaaatgggtgaggacaaaacttcagtcgtagatcaaaacttaagggttcatggaattcaaaatttaagagttattgatgcttctgtaatgccagatattgttagtgctaatttaaatgcaacaactattatgattgctgaaaaagcttacgaccaaataaagagtaccgtttgttag

SEQ ID NO: 210080 - DNA, 1556 bp, Unknown
  Bacterial polypeptide expressing nucleotide sequence isolated from the Sargasso Sea
tgggtgtgttctagctaatagattatcggagagtccaaaaattaaagttctattaatagaggctggtggtaaagataattatccttggatacatatcccggttggctattttaaaacaatgcacaatcccactgttgattggtgttacaaaactgagccagacgaaacaatgaataatcggtcaattcgttatcctagaggaaaaactcttggtggtagttccgctattaatggcttattgtacataagaggacaaagtagagattacgatgtttggcgtcaatcaggcaacactggttggggttgggatgacgttcttccctattttattaaagcagaaaaccaagagcgggggggaaacgattatcatggagttggtggtcctttatctgtttctgatcaaagaattcaattaccactattaaatgaatttcaaaatgcagctgaagaatttggtatacctaaaacaaaagattttaatactggtgacaatcatggatgtggatattttcaagtaacagaaaaagatggttttaggtgtagtactgcggttggttacctcaatccaatcaaaaaaagaaataatttaaaaattataacaaacgcacatgtaaaaaaaataaattttgataataaaactgctaagaatgttgaatattggataggaaatgagcttagaaatgtttcggctaataaagagattatactttcatcaggatctattgggtctccacagattttacaaacatcaggaataggtaattctaataatttaagagaatttggagtcaatgttgttcatgatttaaaaggggttggagaaaatttacaagatcatttgatgtttagaccaatttataaagttcatggacttaagtcattaaacaaaaagattaatagtttgtttggaaatttaatgattggtctggagtatatttttaataggagtgggccaatgacaatgggtgctagtcaaatgtgtatgtttgctaaaagtgacccatctttagaattgccagacctacagtggcatgttcagcctatgagtatggatactttaggcgccacaaagaatcatgattttcacgcattcacaccaactgtttcaaatataagaccaactagtagaggtcacgttaagattacaaacaaagactcaagaatttatgcaaaagtaaaacttaattatctttcaactgatcatgatcgtatgattgcagcaaaaggtttaaaactgacaaggaaaattgtaatggaatctgaaacttttaaaaaatacaaaccagaggaatatagacctggaattagtataaatgatgatgaagaacttgtaaaagcaggatcagattacgcacaaacaatttttcatcctgttggtacatgcaaaatgggacaagacgatatggcagttgttgatgaaactcttaaagtaagaggtttaaataacttaagagtgattgatgcatcaataatgcctaatattacttctggtaacaccaatgcaccaacaataatgattgcagaaaaaggtgctgatatgatactgagaagttgat

SEQ ID NO: 210081 - DNA, 1086 bp, Unknown
  Bacterial polypeptide expressing nucleotide sequence isolated from the Sargasso Sea
aatgaaaaatgaagaatataattttattatagtaggagcaggatcggcaggatgtgtccttgcaaatagattatccaaaaacccagattgtaaaattctgttaatcgagtcgggaccctcagataaaacatggaaaaccgctatgcctgctgcattgctgtatactatgcatgatcctaaatataattatttatatgaaacagagcctgagcctttcatgaacaatagaagaatgttttgtccgagaggtaaaatgcttggaggtagttcatctcataatggaatggttcacgttcgcggtaatgcaaaagattttgacaactgggcacaacaaggtctaacaaattggagttatgaaaaagtattgccttattttaaaaaatctgaatcgatcaatggtttagataaagaatataggaatgacactggacctctaaaactctcacgatcacccaatggtaatattcttactcaagtctacttagatgcagcaaggcaagcaggataccagataaacaatgatatgaatggcaaaaaccaagagggtttcggattaatggataccacaatctataaagggaaaaggcaaagtactagtgttacatatttacatccaataatacatagaaacaacttaaatgttctaactaatgtaacagtaaataaaatcttatttgaaaataaaaaagccattggagttgaatgtaaaataaatggaaaagttaaaaagtttctttctagccaagaagttttaatttctgctggtgcaatcaattcacctcagttacttatgctatctggaattggtccagaaaaagaattaaaaaaacataatattgaaccactagaatgtttaaaaggtgtaggagagaaccttcaagatcacctagaaacttatgttcaatatgaatgtaaaaagcctgtaactttatacagtgctcaaaatccaataagaatggcattaataggaatggaatggtttttgtttaaaactggaattgctgctaattctaatcttgaaacaggtggatttataaaaagtaatgaaatggtagattatcctaatatccaatatcattttttccc

SEQ ID NO: 210082 - DNA, 956 bp, Unknown
  Bacterial polypeptide expressing nucleotide sequence isolated from the Sargasso Sea
catgaacgaattcgattatatcattgtaggtgcagggtcagcaggatgtgttttagcaaacagacttactagtaaagaagaaaataaagttttgcttctcgaggctggaggtaaagataattatccatggatacacattccagttgggtattataaaactatgcacaaccctaaagtagactggtgtttccatacagaaaaagatgaaaccatgaataatagatcaattagatatccaagaggtaaaactttaggcggaagttcttctattaatggtcttctttggataagaggtcaaagtaatgactatgataattggagacaaatgggaaatagcggatggggatggaacgatgttctgccttattttttaaaatctgaaaataatgaattaggtaaaagtgaatttcataatgatagtgggccaattatggtttctaataaaaaaattaatctaaaaatgttagatgagtttcaaaatgcagctgaagaatgtggaattccaaaaactaatgattttaatactggagataatactgggataggtttttttcaatttactacaaatcataacaagtctttatttaagttaagatgtagtgctgcaaaaggatatttaaatcctgtaaaaaaaagaaacaatttaaaaatcataactgaagcacacgttcaaaaaattaactttgatggaaaaaaagcagaaagtgtaagtttttatcaaggtaatgaagttgttacgataaaagctcgaagagagattatattatcagcaggttcaataggatcacctcatatacttcaggtttctggtgtcgggaattcaagtaaacttaaaaaaaacggtatccaaactgttcatgaattaaagggtgttggtaaaaatttgcaagatcacttgatgtttagaccagtctacaaggtaaaaaatttgaaatcattaaatggtaaaataaata

SEQ ID NO: 210083 - DNA, 892 bp, Unknown
  Bacterial polypeptide expressing nucleotide sequence isolated from the Sargasso Sea
gttgttaccgttaaaagcccgaagagaaatcattttatcagcaggttcgataggatcacctcatatactccaggtttccggtgtgggagactcaaataaacttaaaaaaaatggcatacaaactattcatgaattaaaaggtgttggtaaaaatctgcaagatcacttaatgtttagaccggtctataaggtaaaaaatttgaaatcgttaaatggtaaaataaatagtttatttggtagttttttaattggtttagaatatctatttaaacaaagtggacccatgacaatgggagcaagtcaggtttgtggatttgctaaaagtgacccatcaaaagagacacctaatttacaatttcatgttcaacccattagtacagatattttaggagcatcaaaacttcacgactttgatggtatcactccaactgttgcaaatattaggccttcaagcaggggagaaatttcaatagtaagtaatgacagtagagttaatcccaagattaaaatgaattacttgtctacacaagatgatcgaatagttgcggctcaaggattaaaacttgtaagaaaaattatgttagagagtgaaacttttaaaaaatatgaaccagaagagtatagacctggtgttcatattactgatgatgaagaattagtaaaagctggtagcgagtttacccaaactatttttcatcccgtgggcacgtgtaaaatgggtaaagatgataatgcagttgttaatgataaattatatatgcatggacttaagaatttaagagtgatagatgcttcaataatgccaaatattacttcaggaaatactaatgctccaacaataatgattgcagaaaaaggtgcggaatttattttaaataatcaaactcaatga

SEQ ID NO: 210084 - DNA, 1588 bp, Unknown
  Bacterial polypeptide expressing nucleotide sequence isolated from the Sargasso Sea
atgcaagctttcgattatctcatagttggtgctggttcagctggatgtgtagtagcaaataggctatctgagaatcctaacaattctgtagctatttttgaggcaggtggatctagtgatatttggaaggttaaaatgccattagctcttctatacacgatgcatgatcccaaatacaattggaaatattattcagaacctgagccatatttgaacaatagacgtgttttttgccctagaggaaagatgattggaggatgctcatctcataatggaatggtctttgtaagaggaaatagagatgactatacaagatgggaaaactttggtttggatgattggtcctatgataaagttcttccttattttaagaagattgaaacttggtctgaaggtgaaaatcaatacagaggatcattgggtccacttccgataaatttatctaaaaattcaaatccactatttaaagcatttattgatgctgcagctgaagcaggtcacaaaacaaatatagatatgaatggtgaagaacaagagggttttggtatgtttgatacaacaatgcatcaaggtgagagagctggagttgccaagtattatttaaaccctgttaaaaatagaaaaaatttaaatattttaaaaaactcatttgttgaaaagatactatttgaaggaaaaaaagcagttggtcttcaagtaaaaataaataacaaagttgaaaagatttatgcaaataaagaagtaattttgagtggaggatctataaattctccacaattattaatgttatctggtataggtgacgaaacccatcttagagataatggtattaaagttattcatcactcaaagggggttggaaaaaatttacaagatcatcttgaaacttacatacagcaaaaatgtaaaactcctaatacactttacacatacacaaaattaatacctaaaattttagcaggtatgcaatggtttatgtttaaatctggaccttgctcaaaatcatttttggaggctggtggttttgcaaaatcatcgccagaaagaaaagttgctaacattcaatttcatttttttccatcatttgtgataaatcatggcctagaagatcctgactcacatggttaccaattacatgcaagtccaaatcatccaaaaagtagaggtgaaataacacttaattcctcagacccatatgattatcctaaaatattatttaactatttaaaagaagaagaagatcttaaacaaacaagagaatgtattcatgttgcaagaaaaattctatcacagccagctttagcagagcatgctggtgatgaagttgggccaggttttgatgcacagtcagatgatgaattaaatgaatatgttagatctaaagcagatactgcttatcatccttgtggaacatgcaaaatgggagttgatggtatggcagtagtagaccaggatttgaaagtaaatgggattggaaatttaagagtaattgatgcatcagtgatacctgaaattccaagtgcaaacctaaatgctcctacactaatgattgctgaaaaaggttcagaggcaattttaaataattaat

SEQ ID NO: 210085 - DNA, 904 bp, Unknown
  Bacterial polypeptide expressing nucleotide sequence isolated from the Sargasso Sea
aatgaattttgactacataattgcaggaggtggttcggctggatgtgtactagccaatcgactttcaaaaaatccagacgtcaaagttctacttctagaagctggaggaactgattggcacccatttattaaaatgccttcaggtgtttctaagattatggccggtgaaacatttgatgcaaaactctataactatgcatattatacagaagggcagccacatttgaataatcgaaagcttttcttccctagaggaaaaggcgttggtggctcaagtaatataaatggcatgttatacataagaggacatgcccgtgattatgatatctggagacaacttggaaatgctggctggtcttatgacgaagtcctaccttattttaagaaaagtgaaaataacgaaaacggttctgacttatatcatggatctaatggagaactaaaagtttctaatccaaatttggataccaatccactacactatgcatttatagaggcaggtcaacaagctggatataaatataatcctgattttaatggagaagatcaagagggggttggtcccgtatctcaaaatattgataatggaagaagagcaagtacggcctactcatttattgagcctgttaaaaataggaaaaacctcacaatttataccaactcagttacttcaaaacttttgttcgaaaaaaataaatgtatcggagttgaatttttaagaaaaaacaaattagagaaagtatttgctgacagggaagttatagtatgtggtggagctataaattctcctcagatacttcttctatcaggcattggaaaagctgattatttaaaaaaatgggatttaaatgttgttagtgacctccctggggttggagaaaatttgcaagatcatttagatatt

SEQ ID NO: 210086 - DNA, 1399 bp, Unknown
  Bacterial polypeptide expressing nucleotide sequence isolated from the Sargasso Sea
gaataatagatcaattagatatccaagaggtaaaactctaggaggaagttcttctatcaatggccttttgtggataagaggacaaagtgaggattataatatttggcgccagttaggaaatacaggttggggttggaatgatgttctgccctattttttaaaatcagaaaataatgaattaggtaaaggtgagtttcataacgacaatggtccaattacagtagcaaataaaaaaattaatttaaaattacttgatgaatttcaaaatgctgctgaagaatacggaataccaaaaacaaatgattttaacactggtgataatactggtgtaggtttttttcaatttacaactagttttaataaacctggtttaaagttaagatgtagtgctgcaaaaggatatttaaatccagtaaaaaagagatcaaatctaaaaattattgttaaagctcacgtacaaaaaataaattttgaaggaaagaaagctatcggcgcaaattattataatggtgataagattgttgaggttaaagctaataaagaaataattttatctgcaggtgctattggttcgccccacattcttcaagtatctggcataggaaataaggaaaaactaaaaaaacttggtattgatatagtgcatgaatctaatggtgtaggtttgaatttgcaggatcatttaatgtttaggccagtatacaaagtaaaaaatttaaaatctttgaacagaaaggtcgaaagtttatttggaaggtttttgatgggactggagtatattttaaaccaaagtgggcctgttacaatgggcgcaagtcaggtttgtggttttgttaaaagcgatccatctagagctactccaaatttacagtttcacgtttcaccagtaagtacagatatattaggagtaacccctatgcatgattttgaaggtataactcccactgttgcaaatattagacctacaagcagaggcgaaataaatatagttagcgctgacagtcgagtttatccaaaaattaaaatgaattatttatcaactgacgaagacagaaaagttgcagcaactggtttaaaaataattcgtaaaattatgctagaaacagagacttttaaaaaatatgaaccagaagaatatagaccaggtgttcatataacagatgacgaggaattagtaaaagaaggttcaaattttactcagacaatttttcacccggttggaacatgtaaaatgggtcaagatgaaatgtcagttgttgatgaaaaactaaaagttagaggtatagataatcttagagtaatcgatgcatctataatgcctaatataacctctggaaatactaatgcacccacaataatgattgcagagaaaggtgctgacatgatactagaacattaa

SEQ ID NO: 210087 - DNA, 979 bp, Unknown
  Bacterial polypeptide expressing nucleotide sequence isolated from the Sargasso Sea
aaagttttaaaattaaattatgaaaataataaaataataagtttaaagattaagcacaaaaataaagtaatttcagtaaaaccaaagataggtacaatcttatcaagtggagcaataatgacgccttatcttttgctaaaatcaggtataggtaatgccgaagaactaaataattataatatccctatcaatttacacagtcctcatattggtaaaaatttacaagatcatttaggtttagattacttatacaaaacatctatgacgactttaaattatgatctaggtacttggagcggaagaataaaatcaattttaaaatatttatataatagaacaggtccttttgcattaagtctcaatcaaggaggagggtatattaattggaattctttagacccttaccccaacattcaactatattttaacccattaacttattcagtttcttataaaaaaaatagacctttacttaaaactgataaatttaatggatttatcattggctttaattcatgtaggccaaaaagccttggggaagttaaattaagagcatctaaaacagattatttaccaagtatagatccaaaatatttaagtgatgaaagagatattcatgatttatattcggcttttgattttattagaaacttttcaactaatagacacttaaaagaaataattgattcatcagtaaatattactccaataaatgcaaataatgaagaattacttggacactttaaatcaaatgctggcactgtttatcatccttgtggaacatgtcgtatgagtaaagatattaattcaggcgttgtctctgaaaaactaaaagttcatggtattaaaaatttatggatagtggatgcttctattatgccaaatattacatcaggaaatatcaatgcccctgttatgatgctatcatatttatctagtaaaattattatagaagaattaaaacaaaaatataaatgaa

SEQ ID NO: 210088 - DNA, 1597 bp, Unknown
  Bacterial polypeptide expressing nucleotide sequence isolated from the Sargasso Sea
tatggataattttgattttataattcttggagctggatctgcgggttgcgtgcttgcaaataggctgtcagcaaatcctaaaaataaagttcttcttttagaggcaggcggtaaagataactatccatggatacacataccagtaggttattttaaaactatgcacaacccaaaaactgactggtgttacaaaactgagcctgatgaaagtatgaacaatatttctattagatatccaagagggaaaacgcttgggggaagttcatctataaatggattgctttatatacgtggtcaaaatagagattatgatgtttggagacaattaggaaatactggttggggatgggacgatgtattaccctattttattaaagctgaaaaccaggaacgaggagaaaatgaatttcatgggattgatggaccattatccgtttctgatcaaagaattcatcttccacttttagatgagtttcaaaatgcagctgaagaatttggtataccaaaaactaaagattttaatacaggagataatcatggatgtggttatttccaagttacagaaaaagatggttttagatgtagtacatcagttggatatttaaatcctataaaaaacagaaaaaatttaaaaattatcactcatgcacacgtcaaaaaaataatttttgaaaataaaatagctaaagaagttgaattttggcaaggagatgagttaaaaaaagtagaagctaataaagaaataatattatcctcaggtgctattggttcaccacaaattttacaagtatcagggattggaaatatggaaaaattaaaaaatcttggaatagaaacagtgcaaaatttaaatggtgttggtgaaaatttgcatgatcatcttatgttaagacctatttataaaataaatggtcttaaatctttgaataaaaaaattaatagtctttttggaaatttgatgattggactagagtatatttttaaaagaacgggtccaatgactatgggggcaagtcaactttgtatgtttgctaaaagtgattcttcactagagttacctgatttacaatggcatgttcagccaatgagtatggatacattaggtgcaactaaaaatcatgactttcatgcttttactcccacggtgtctaatataaaacctactagtagaggtcatgtcagtatagttgataaagattcaaggacttatgcaaaaataaaacaaaactacctatcaactgataatgatagaatgattgcagctaaaggtctaaaattaactagaaaaataataatggagtctgaaacttttaaaaagtattcaccagaagaatatagaccaggaataagtataaatgatgatgaagagcttgtaaaagaagcatcaaattatgctcaaacaatttttcatcctgttggtacttgtaaaatgggtcaagacgaaatgtcggttgttgacgaaaagctaagggtcagaggagtaaagaatttaagagtaatcgatgcctccataatgccaaatataacttctggtaatactaatgctccaacaataatgattgcagaaaaaggtgcagacatgatactacagcaataa

SEQ ID NO: 210089 - DNA, 1606 bp, Unknown
  Bacterial polypeptide expressing nucleotide sequence isolated from the Sargasso Sea
tatggataaatttgattacataattattggtgcaggatcagcaggctgtgtcttagctaatagattgacagtaaatcctgatactaaagttcttttacttgaagctggtggaaaagatactaatccttggatacatattcctggtggttattttaaaaccatgcataatccagataccgactggtgttttaatactgagaaagaaccaaactgcgataacagacaaatggtttacccaagaggaaaaacattaggtggaagctcatctattaatggaatgctttatatcagaggtcaatctaatgattataattattggagacaattaggtaatgttggttggtcgtgggatgatgttttgccctattttaaaaaatctgaagattttcaatttggagaaaatgaatttcatggttctggagggcctattgcagtcgagaaaattagagcaacatttaaagttctcgatctatttttagaggccgctgaagaacatggttataaaaggactgatgattttaataatggtgataatgaaggaatgggatatttcccttttacaattaaaaatggctttagatgcagtacagcagttggctatttaaatccagttaagagtagaaaaaatttaaaaattattactaaggctcacataaaaaatatagaatttgaaaataataaagcaaaaaaagtaaattattggatagatggaaatgagttttctgttgagactaataaagaaattatattaagtgcaggtacaataggatcacctcatatattacaagcatcagggattggtccaggagaacttctaaaagaaaataatattaatgttttaaaagatcatcaaggagttggaagaaatctaactgatcatttaatgctaagacctgtttacaaaattaaaaatttagaaactttaaatgatatttactacagctttactaaaaaaatgttatctggtttaaagtttcttctcttaagaaaaggacctttaacagttggcgctagttatgtttgcggttttgttaaaagtgatgaacatttagaaactccaaatcttcaatttcatatttcaccagcaagtactgatcttttaggaaagtcagctttacataaatttccagcgttcactccaacaattacaaatgtaagaccaacaagtagagggtctatagaattaaaatctccagacaccagagtttcaccaaaaataaaaatgaattatttatcaaccgatgaagatcgtgagattgctggaaaagcattaaagattgtaagaaaaattgttatggagtctaaagcttataaagattatcaacctgaagagcttagaccgggaatcaatattactgataatgaagaattagcaactgaagctggaaaatttgcgaatactatattccatccagtaagcacttgtagaatgggtaaagatgaaaatgctgttgttaacgatagattagtcgctcacggactagaaaatttaagggttgtagatgcctctgttatgcctcatatcacatcaggaaatacaaatgcaccgacaataatgattgcggaaaaagcagctgatatgataattgaggatagtagaagatga

SEQ ID NO: 210090 - DNA, 1543 bp, Unknown
  Bacterial polypeptide expressing nucleotide sequence isolated from the Sargasso Sea
gcgaacccatcaaataaagttttgttaattgaagctggtggtaaagataattacccatggatacatattccagttggatattttaaaactatgcataatccaaaagttgattggtgttttaaaactgaacctgatgaaacaatgaataatagatcaattagatatcctagaggaaaaactttaggtggaagctcctcgattaatgggcttttgtggattagaggtcaaaaagaagattatgatgtatggcgacaactcggtaatactggttggagctgggaaaatgttttaccctattttcttaaatcagaaaataatgaattaggaaaaagtgaatttcataatgatagtggtccaattactgtagcaaataaaaaaatcaatttaaaattacttgatgaatttcaaaatgcagcagaagaatatggaatacctaaaacaaatgattttaatactggtaataattttggtgtgggtttttttcaattcaccacgaactttaataaagtgggattaaaacttagatgtagtgctgctaaaggatatttaaatcctgtaaaaaaaagatctaatttaaaaattgtaactaatgcacatgttcaaaaaataaattttgaaggtaagagagctataggtgttaattattttactggagaaagaattaatactgtaaatgctaataaagaagtaattttatcagcaggatcaattggatctcctcatattttacaagtatctggaattggtgaagttaataaacttaaaaacttaggtatagaaattgttcatgagtcaaatggagttggtaaaaatttacaagatcacctaatgtttaggccagtttataaagtcaaaaatttaaaatctctaaatagaaaagttgaaagtttatttggaagatttttaatgggacttgagtatttacttaatcaaagtggtcccgtcactatgggagctagtcaagtttgtgggtttgttaaaagtgatccctcaagagctactcctaatttacaattccatgtatctcctgttagtacagatatattaggtgtaactccaatgcatgattttgaaggaattactccaactgttgcaaatgttaggcctacaagcagaggtgaaattaatatagtgagtagtgatagtagaatttatcccaaaattaagatgaactatttatctactgatgatgatagaacagttgcagctcaaggattaaaaattgtaagaaaaataatgttagaaaccgagacattcaaacaatatgagccagaagaatataggcctggagttcatataactgacgatgaagagttggttaaagctggttcagattttactcaaacaatttttcatcctgttggtacttgtaaaatgggacaggataatatggcagttgttgatgaaaaacttagagtcaaaggtattcaaaacttaagagtaatagatgcttcaattatgccaaacatcacttcgggtaatacgaatgcaccgacaataatgattgcagaaaaaggtgctgatatgatacttagaagttaat

SEQ ID NO: 210091 - DNA, 1579 bp, Unknown
  Bacterial polypeptide expressing nucleotide sequence isolated from the Sargasso Sea
tataattcttggagctggatcagctggctgtgtacttgctaatagattgtcagaaaatcctggtcataaagtcctacttttagaggctggtggtaaagataattatccctggatacatatacctgtgggttattttaaaactatgcataacccaaaaactgattggtgttacaagactgagcctgatgaaagtatgaacaatatctctattaggtatcctagaggtaagactttaggaggaagttcatcaataaatggattgttatatataagaggtcaaaatagagattatgatgtctggcgtcagttaggaaatactggttggggatgggatgatgtgttgccttattttataaaagctgaggatcaagaaagaggtaaaaatgaatttcatggagttgatggacctttggcggtttctgatcaaagaattcatctcccgctattagatgaatttcaaaatgcagctgaagagtttggaatacctaaaactaaagattttaacactggcgacaatcttggatgtggatattttcaagttacagagaaagatggttttagatgtagtacatctgtgggatatttaaatccaattaaaaatagaaaaaatttagaaattattactcatgcacatgtcaaaaaaataatctttgaaaataaaatagctaaaagtgttgaattttggaaaggagatgaattaaaaaaagtagaagctagtagagaaataatattatcctcaggggctattggttcaccacaaatcctacaagtttcaggaattggaagttctgaaaaattaaaaaacctcggaatagaaatggtgcataatttaaatggtgtaggtgaaaatttacatgatcatcttatgttaagacctatttataaaataaatggtcttaaatctttaaacaaaaaaattaatagtctgtttggaaatttaatgattggattagagtatatttttaagagaactggtcctatgactatgggagctagtcaactttgtatgtttgcaaaaagtgattcttcattagaattaccagatttacaatggcatgttcagccaatgagtatggatacattgggtgcaactaaaaatcatgacttccatgctttcacaccaacggtgtccaacataaaacctactagcagaggtcatgtaagtatagttgacaaagactctagaacatatgctaaaataaaacaaaactatctatctactgataatgatagaatgattgcagctaaaggtctgaaattaactagaaaaataatcatggagtctgaaacatttaaaaaatattcaccagaggaatatagacctggaataaacattaatgatgatgaggagttagtgaaagaggcttcaaattacgctcaaactatttttcatcccgttggtacttgtaaaatgggtcaggatgaaatgtcagtggttgatgaaaaactaagggttagaggagtaagtaatctgagagtgattgatgcatccattatgccaaatattacatcaggcaatactaatgctcctacaataatgattgcagaaaaaggtgcagacatgatacttaatcattaa

SEQ ID NO: 210092 - DNA, 286 bp, Unknown
  Bacterial polypeptide expressing nucleotide sequence isolated from the Sargasso Sea
tatcagggattatgtcgagagtgcttatcatccttgtggcacctgtaaaatgggtaataaaacggatccaaagagtgtagttgaccccgagacgcgtgtgattggggttgataaattgcgggtggcggacagtagtatatttccacaaattacaaatggtaatttgaatgcaccatccattatggttggagagaaagctagcgatcatatacttggaaaagacctattgcctagatcaaacgaagttccatggatccatccagattggcaaaccagccagcgttaa

SEQ ID NO: 210093 - DNA, 1597 bp, Unknown
  Bacterial polypeptide expressing nucleotide sequence isolated from the Sargasso Sea
atggataattttgattatattataattggtgctggatctgcaggatgtgttcttgcaaacagaatttcatcaaaccctaaaaataaagtcttacttttagaggcaggtggcaaagatactaatccatggatacatattcctggaggatattttaaaacaatgcacaatcctgagacagattggtgttttaacacagaagaagagcccttttgtgacaatagaaagatgacttacccaagaggtaaaacacttggaggaagttcttctattaatggaatgctttatattcgagggcaatcaaatgattacaattattggagacaattaggaaatgttggatggtcatgggatgatgtacttccttattttaaaaaatctgaagattttcaatttggaaaaaatgaatttcatggatctggtggcccattaaaagttgaaaaaattagatctacttttaaagttttagatttatttttagaagctgcagaggaatttggatataaaaaaactgatgattttaataatggtgataatgaaggaatggggtatttccctttaacaattaaaaatggatttagatgtagcacagcagtcggatatttaaatccaataaaaaatagaagtaatttaaagattataactaaagctcacataaaaaatattgagtttgaaaataaaattgccaaaaaagttaatttttggactggtgataagttaaacactgtagaagcaaatggtgaaattattttaagtgctggtactattggatctccacatattcttcaagcttccggtttgggtcctgctaaattattaaaagataacggtattgaagtattaatggaaaataaaagcattggccaaaacttaacggaccatcttatgttaagacctgtttataaaataaaaaatttagaaacattaaatgatatttattatagtttaactaaaaaaatatttactggattaaaatttttcttaacacgaactggcccacttactgttggcgctagttatttgtgtggttttgttaagagtgacccacatttagaaactcctaacttacaatttcatgtttctccagctagtaccgatcttttaggaaaatcatcattacataaatttcctgctttcacaccaactatcactaatgtaagacctactagcagaggatcaattgaactaaaatcttcagatacgagaattcctccaaaaattaaaatgaactatttatctacacatgaagatagagagatagcaggtaagtctcttaaaatagtaagaaaaatagttatggagtccaaagcctataaagattatgaaccagaggaattaagaccaggcataaatattaataatattgagcagctggctattgaagcgggaaaatatgctaatacaattttccatcctgtaagtacgtgtagaatgggtaaagatgaaaatgcagtagtttctgatcagttaaaagttcatggaataaaaaacttaagagtgattgatgcatcagtaatgccatatatcacctcaggaaatacaaatgcacctacaataatgattgcagaaaaaggtgcggacatgatactacagcaataat

SEQ ID NO: 210094 - DNA, 1582 bp, Unknown
  Bacterial polypeptide expressing nucleotide sequence isolated from the Sargasso Sea
atgaaatttgattatttaattattggagctggttcagctggttgtgttcttgcaaatagattaactgaaaatggacaaaacaacgtagctatatttgaggcaggtaaaccaagtgatatttggaaagtaaatatgcctcttgcaattttgtatacgatgcatgatccaaaatataactataaatattattcagaacctgaacctcacttaaataatagaaatttattctgtccaagaggaaaaatgataggtggatgttctgctcataatggaatggtttttgtaagaggaaatcctaatgattatgaaagatggtcttcttttggattaaaagattggtcatatgaaaaagttttaccttattttaaaaagatagaaacttggtctgagggagaaaatgaatttagaggaggcagtggaatactgccagtaaaccaatcaaaaaataaaaatccgttatttaaagcatttgtagattctgcaggtgaagctggattcaaaattaataaagatatgaacggaaaagagcaagaaggatttggaatgtatgatgtaacaatacacaaaggtgaaagagcaagtgtttctagatattatcttaatccggctaagaaaaggggaaatctaaaaatatatagcgaatcatttgtagaaaaaataatttttgaaggaaaaaaagctataggaattgaagttaaaattaaaaataaagtagaaaaaatttatgcaaataaagaagtgatattaagtggaggttctattaattcgcctcaactacttatgctttctggcgttggtccagcagagcatctaaaagaaaaaggtattgatgttgttcacgcattagaaggtgttggtaaaaatcttcaagatcatttggaaacttatgttcaacaagaatgtaaaacatcagacactttatattcttatataaataaattaaatatgttgagagttggtattcaatggtttctaactaaatctggtccctgctctgcttcatttttagaagctggaggtttttgtaaatcttcagcagaaagagaatatcccaatatccaatttcatttttttccagcatttgtaattgatcatggtttggttgatcctgatagacatggatatcagcttcatgcaagcccaaatcacccaaaaagcagaggacatataactttaaatagttcgaatccatatgattatcccaaaattcaattcaattatttagaacatgaggatgatcttaaacaaacaatagagtgtattcatgttgcaagaaaaattcttggtcaagattctttaaaaccatttgccggaaaagaagttggtcctggagaagatgtacaaagtaatgaattatttgaagaatatattagatctaaagctgaaacagcatatcatccatcttgtactttaaagatgggaattgataaaatgtcagtagttgatgaaaaattgaaaatttatggtttagaaaatattagagtagttgacgcttcggtaatgcctgaaataacaagtggtaatttaaatgctccaactttaatgattgcagagagagctgcagaatttattttaaattagt

SEQ ID NO: 210095 - DNA, 1300 bp, Unknown
  Bacterial polypeptide expressing nucleotide sequence isolated from the Sargasso Sea
gatggaaaacttcgattttattattattggtgcgggatctgcaggatgcgttttagcaaatagactttcagcaaatccaaaaaataaagttttacttttggaagctggaggaaaagatagctatccatggatacatattcctgttggctattacaaaacaatgcataatccaaaagttgattggtgttttcataccgagaaggatgaaacaatgaataatagatcaataagatatcctagaggtaaaactttaggaggaagctcttcaattaatgggctgttatggataagaggtcagagtaatgattatgataattggcggcaacagggcaataatggatggggttgggacgatgtattaccatattttataaaatctgaaaataatgagttaggtaaaaacgaatttcataatgatagcggtcccataatggttgctaataaaaaaattaaattaaagatgctggaagaatttataaatgcttctgaagaaaaaggtataccaagggtaaatgattttaatactggtgataattttggtgttggttactatcaatttaccacaagtcacagtcataaaggtttaaaattaagatgtagtgcagcaaaaggatatcttaaccctgttaagaaaagacctaatcttaaaatcgttacaaacgcgtatgttgaaaaaataaattttaatggcaaaaaagctgaaagtataaattattttattaaaggcaaatcaattgaagtaaaaacaaacaaagaaataattttatcagctggttcaattggatctccacatatattacaagtttctggaattggagatagcaataagctcaaaaaatttggcataaatatcattaatgaattgaaaggtgttggaagaaatttacaggatcatttaatgtttagaccagtttataaggttaaaaatcttaaatctttgaataaaaagattaatagtctctttggaaattttttaattgcattagagtatatctttaatcaaagcggacctatgaccatgggagcaagccaagtgtgtggttttgcaaaaagtgatagttctagagaaactccaaatttacaatttcatgttcagccaataagtacagatattttgggtgcaactaaattacatgattttgaaggtataactccgactgtagcaaatgttagacccacgagtagaggtgaaataaatatagttagtaataatattaaagattatcctaaaaataaaatgaattatctatccactgatgatgatagatatgttgcagctcaaggacttaaactggttaga

SEQ ID NO: 210096 - DNA, 1684 bp, Unknown
  Bacterial polypeptide expressing nucleotide sequence isolated from the Sargasso Sea
atgatagattttgattatgtaattgttgggggtggctcagcaggttgtgtattggccaatagactaaccgaagatcctgataacaaaatatgtttaatagagaccggtccagtagataaaagcccactaatacatgtccctggattgtttgcttttcttgtaaaagaaggtgaggaatcagaatatgcctatcaatataatacagaacctcaaaaaggttttaacaatgtcactgtgacagaaggagctgcaagtatgcaagatactcttggtgggtcctataaagtcccagagtcatatcaagaaaaaagaagaggattccagccaagaggaaaaacattaggtggttctagttcaataaatggaatgttatatgtaagggggcatcgctgggattatgatcattggtcctctctaggaaatgatgggtggtcatatgatgaggtactgccatattttataaaatctgagtgtaatgagagattgcaagatgagtaccatggaaatgatggtccattaaatatcgcggaattgaggcatgataacccttttacaaggttctttgtcgaagcagcttcaaaacattatcctgaaaataatgatttcaatggagagaagcaagaaggagttggcctttatcaggtgactcaaaaaaatggacagagatgtagtgcagcagtggcatatctaaacccagttaaagatagaaaaaatctaacaatttttactgaaacagtagttgaaaaagttgaatttgatggcttaaaggctgtcggtgtaaagtgcattaaaaaagataagactttttctattaaagcaaacaaggaaattttgctttgtggaggagcgtatggctcaccatcgatattaatgcgatcaggaattggtaataaagaatatttgaggactaaagatatagattgtttagttgatcttcctggagtcggggaaaatctacaagaccatatagattatataacttcacatagggtagatagttgggaattgatgggcagcagatcatttaagttttggtttcgtgcaccttttgaacttctaaagtatttgttgtttcgcacaggtatgttttcatcttctttagctgagggaggagcatttatcaaaacagacaaaacacttgaaatgccagacatccaactgcattttgttgtttctatggttgaagatcatggcagaactaaactttggggtaatggatttagttgtcatgtttgtttattaaggcctgagtcaaaaggaacagtaaaaattgcctctaaagatccaagcgttgctcctctaattgatccaaactatctaacagcagaatcagatatggaagtattaattaaaggttataaaaaaatgatggaaataatgactactgagcctttgaagaaatttaacaatattcgtaacccaataaatattgatgatgataaagctattgaaaaagctataagaactaggtcagatactatttaccatccagttgggacatgtaaaatgggtatcgataatatggctgtagtcgataattctctcagagttaagggagtgcataacttaagagttattgatgcatcaattatgccaactttagtaggaggcaataccaatgccccaactataatgattgcagaaaaggcagccgatttaattaaaggacatggaaccgtttaac

SEQ ID NO: 210097 - DNA, 1582 bp, Unknown
  Bacterial polypeptide expressing nucleotide sequence isolated from the Sargasso Sea
cttgaaatttgattatttaataattggagcaggtacagcaggatgcgttctcgctaatagactaactgaacaaagtaaaaataaggttgcaatttttgaagctggtaaagatagtgatatatggaaagtaaacatgccccttgcaatactttatgcaatgcatgacccaaaatataattataaatattattctgaacctgagccacacttaaacaatagaaaattattttgtcctaggggaaagatgattggtggttgttccgcgcataatggaatggtttatgtcagaggaaataaaaatgattatgagagatgggcttcatttgggttaaaaaattggtcttacgaaaatgttttacctttttttaaaaaaattgagacatggtcaggtggagaaaataattatagaggtggaaaaggtatattgcctgtaaatcaatcaaataacaaaaatcccctttttaaagcttttttggactcggcgaaagaggcaggacataaaataaatagtgatatgaatggagaagaccaagaaggctttggaatgtacgatgttactattcataaaggagagagagcaagtgcttcaaaatactatttaaaaccagctaaaagcagggaaaatttaaaagtatttactgagtcatttgtagaaaagattatttttgatggcaaaaaagctattggaattcaagttaaaataaaaaatgaaacgaagactatttacgcaaataaagaaattattttaagtggtggatcaattaattctccacaattattaatgttatcaggtgttggtccaagcaatcatcttaaagaaaaaggaattgaggttattcatgattcaaaaggagttggaaaaaatttacaagatcatttagaaacctatattcaacaagaatgtaaaactccagatacattatattcatatgtaaataaatttaatatggtaaaggtgggtatccagtggttcttaaacaaaagtgggccctgctctacctcgtttttagaagctggtggattctgtaaatcatctccagataaaaaatatccaaatatacaatttcattttttcccagcatttgtaatagaccatggtttagtagatcctgatagacacggataccaattacatgcaagtttaaaccaacctaaaagtagaggggaaattactttgaaaagttcaaacccttatgattatccaaaaatacaatttaattatttaaaggatgattatgatcttaaagaaacaataaaatgtgttcgagtagcaagaaaaattttatgtcaaaactctatgaaaccttttgctggtaaagaaattgggccaggtgataatgcaaattcagatgaggaaattgaagaatatgtaagatcaaaagcagaaacagcatatcacccatcatgtactttaaagatgggtatagatgatatggcagtggtagatgaaaaattaaaaattcgtggtcttcagaatataagggtagccgatgcatctgtgatgccagaaattacaagtggaaatctaaatgcaccaacattaatgataggtgagagagctgctgactttattttgaattaa

SEQ ID NO: 210098 - DNA, 1055 bp, Unknown
  Bacterial polypeptide expressing nucleotide sequence isolated from the Sargasso Sea
tcaagaaggatttgggatgtttgatactactattcataatggtgaaagagccagtgtagcaaaatattatttaaatccaattaaacaaagaaaaaatttaaatattttttcgaattcatttgtagaaaaaataatttttgaaggaaagaaagcaattggtatagaagtaaaaattaaaaacaaaatagaaaaaatttatgcagaaaaagagttaatacttagtggtggctctattaattcaccacaattattaatgctttcaggaattggagattcaaatcatttacaagaaaaaggtattaaagttgttcatgatttaaaaggtgtaggaagaaatcttcaagatcatctagaaacatacattatgcaagaatgcaaaacaccaaatactctttatacttacactaaattaattccaaaagtccttgctggaatccaatggtttttatctaaatctggcccttgttcacaatcttatttagaagctggaggatttgcaaaatcttcacctcaaagagaaataccaaatatacaatttcatttttttccatcttttgtaattaatcatggtttggttaatcctgactctcatggttatcaattacatgcaagtcctaatcatccaaaaagtagaggaacagttactcttaattcctcagatccatatgattatccaaaaatattgtttaattacttggaagatgaagatgatttaaaacaaacacgagaatgtattcaagtagctagaaaaattttatcacaaccttctttattagaacattctggaaaagaagttggtcctgggtccgataaacaatcagaggaagagttaaatgagtatattagatctaatgcagaaacagcctatcatccgtgcggaacttgtaaaatgggtgttgatcaaatgtcagtagttgatgaaaaactaaaagttaaaggaatacataatttaagagttgtagatgcctctgtaatgcctgaaatacctagtgcaaatttaaatgcaccaactctaatgattgccgaaaaagcttctgatcttattttaaactaat

SEQ ID NO: 210099 - DNA, 1045 bp, Unknown
  Bacterial polypeptide expressing nucleotide sequence isolated from the Sargasso Sea
ggtcatgcggacgattttgatcaatgggaaaatgaaggcgcgaccgggtggggttacgccgattgtttgccctacttcaagcgtgccgagggctggatgatgggtggcgacacctatcgaggaggagctggccctctgacgacatgcaatggtaacgacatgcgtaatccgctgtatcaagccttcatcgacgcaggtcgtgaggcagggtatggcgttacagaagattacaacggctaccgccaggaaggtttcgggcccatgcatatgacggtccgtggcggtgagcgatgttcgactgatcttgcgtatcttgagccggcaaggcggcggccgaatctcactgtgatcacagaggcaaatgtagatcggttgaccttttccgggatgagagtaacgggagcgcgttaccggcttggtgggcaagagcactcggtcaaagcacatcaagaggtcattattagcgcaggctcaattggctcacccacattactgcagcgctctggcgtgggaccgatgtctgttttgatggcggcgggcgttccggtccgtcatgacctgcccggtgtcggtgagaacttgcaggatcatctggaggtgtactttcaataccggtgtcggcaaccgattaccatcaacggacacctcggattgctgtccaagttgaggatcggggctcaatgggtgctgacaaagtcgggtttgggtgcaacgaatcactttgagtcctgcgggttcattcgttcaagggccggtgtggctgcacccgacatccagtatcactttttgccggctgcgatccgctatgacgggcaagcggccttcgatggccatggtttccaggtgcacgtgggccccaacaagcccgatagccgagggcatgtcagaatttctggccccgactcgattcatgagccactcatccagtttaattacctctcgaccgaaaaggatctcgcagattggcgacaatgcctgcgcttgactcgagaaattttgcagcaaccggcgttggacgagttcagagggggagagattcaaccgg

SEQ ID NO: 210100 - DNA, 820 bp, Unknown
  Bacterial polypeptide expressing nucleotide sequence isolated from the Sargasso Sea
cccaaactccttttgctgtcgggtataggaccggcagcggaactaaaatctaaaggaattacggtagtagctaatcgtcccggggttggaaaaaacttacaagatcacttagagctttatatccaaatggcatcaaaaaaaccagtttctctttacaaattctggaatccgataggaaaagcgtgggtaggtttgcgttggtttatttcaaaatcgggcccaggtgcctcgaaccaatttgaaagtgctgccttcataagatcgaaggctggagtagaatatccggatattcaataccatttcttaccactggccgttcgctatgatggaaaactaccagttaaaggtcacggttttcaagcgcatgttggtcctatgcgtagtcaatccagaggtgatgtagctcttaggtcaagtgatccaaaggaacctccaaaaattcagttcaattatatgtcgcacgagacggattgggccgattttagaaattgtattcggcttacaagagagattttctcccaacctgcgttcgagccctttgctgatagcgaaatttcgccaggtaaagaggttcaaagtgatgaacaattaaatgattttatccgtgataatgtcgaaagtgcttatcatccatgtggaacgtgtaaaatgggtgataaatcagatctgatgagtgtggttgatcctgaaacgcgtgtgattggagttgataaattgcgcgtagctgatagcagtattttccctcaaattacgaatggcaacctgaatggtccctcgataatggtcggagagaaagcttctgatcacatattaggaaaga

SEQ ID NO: 210101 - DNA, 787 bp, Unknown
  Bacterial polypeptide expressing nucleotide sequence isolated from the Sargasso Sea
ggccccgactaccgcctcgactttcgtacccaaatgcccgccgccctggccttcccgctgcagggccggcgctacaactgggcctacgagaccgaccccgagccgtacatgaacaaccgccgcatggaatgcggacgcggcaagggcctgggcggctcatccctgatcaacggcatgtgctacatccgcggcaacgcgttggacttcgacaactgggccacggccaaaggcctggaagactggacctatctcgactgcctgccgtacttccgcaaggcggaaagccgcgacatcggccccaacgattaccacggcgacgacggcccggtcagcgtgaccacgcccaaggccggtaacaatccgctgttccacgccatggtcgaggccggcgtgcaggccggctatccgcgcacggacgatctcaacggctatcagcaggaaggcttcggcccgatggaccgcaccgtgaccccggaaggccgccgcgccagcaccgcgcgcggctacctggaccaggcacgggcgcgccccaacctgaccatcatcacccacgccaccaccgaccgcatcctcttcgatggcaagcgcgccagtggcgtcagctacctgatcggcaacgccaacgatgccaccgaagcccgtgctcgccgcgaagtgctgctatgcgccggcgccatcgcctcgccgcagatcctgcagcgctctggcgtcggccccgccgcgctgctgcgcgagctggacatcgcgctggtacacgaactgcctggcgtcggccagaacctgcagg

SEQ ID NO: 210102 - DNA, 850 bp, Unknown
  Bacterial polypeptide expressing nucleotide sequence isolated from the Sargasso Sea
aaccgatcatctgtcgaagtttggtattgaaactatttgtgacttgccaggtgtaggatcaaatcttcaagatcatttagagttatatattcaacaggaatgtaataagcccattagtctctataaatactggaatccgctctcgaaggcgctgataggcataaagtggctaatttttcgaaccgggctaggtgcgtcaaatcagtttgaagctggtgcatttcttcgttcgtctgctggtgtgccctatcctgatattcaattccattttttacctatagccattagatatgatggcggtttagcaaagggccatgggtttcaaattcatgtgggcccgatgcgttccaaatctagaggaacagtgagattgaaaaatagtgacccacgttcaagtcctgagataaaatttaattatatgagccatgagtccgactgggaggattttagaaaaagcattcggttagtcagagaaattttttctcagaaggcttttgatccatacagaggagaagagatccagcctggtgctaatgttacttctgataaagctcttaaccactttattaaagaaaatgttgaaagtgcatatcatccttgtggaacctgtaagatgggaaaacctaatgaccctatggccgttgttgatagcgaatgcagagtattgggagtaggaaacttaagggtggttgatagttcaattttccctaccataacaaatggtaatattaatgccccgactataatggtgggtgaaaaagcttctgatcatatattaggaaaaaatccacttcccaaacttaatgtactgccctgggaaaataagagatggaaaaaaagtaacaagtag

SEQ ID NO: 210103 - DNA, 919 bp, Unknown
  Bacterial polypeptide expressing nucleotide sequence isolated from the Sargasso Sea
tttaggtggctcctcttctataaatggaatgttttatgtcagaggccacgcatgtgattttgatttctggggagatagcggtgccactggttggaatttcacaaacgtattaccatatttcaaaaaaatggaaaattggaattctcatgaaagagataaaaacatttattggcgaggagatggggggcctttacatatttcacgaggcagttgtaagaatcctttatttagagcttttattgaagctggtattcaggctggttttgaggctactccagattacaatggtgaaaaacaagaaggttttggtgtaatggagcagactatttttcaaggaaggcgttggtcggcctcaaatgcttacttaaagcctgctttgaaaagggaaaatatgaatttagtaagagcttttgcaaggcgtataattttcgaaggtaaagtcgcagttgcggtggaagtatcgcaaggcacacgaatatttcaggtgagagcaaacaaagagattattttggcggcttcagcaattaattctcccaaaattttaatgcattctggcataggaccaggtgagcatttaaaagagcatggaatcaaagttatatctaatagagctggggttggatctaatctgcaagaccatttggaagtttatttgcaacaagaatgtttgaaacctatttctttaaacaagcattggaacattctttcaaagattctgataggtgcaaaatggatattaacaaaaaaaggactgggtgcatctaatcagttcgagagtgcagcctttgttaggtctgctccaggtattaaatatccagatattcagtttcactttctaccaattgctatcaggtatgacggaaaagtcgcaaatttagggcatggatttcaggcacatgtaggacccatgagatccgag

SEQ ID NO: 210104 - DNA, 525 bp, Unknown
  Bacterial polypeptide expressing nucleotide sequence isolated from the Sargasso Sea
gccgcgggcgtatccagctcaagtcgaaagacccgcgccagcacccgagcatcctcttcaactacatgagcgccgatcaggactggcaggaattccgcgacggcatacgcctgacccgcgagatcatggcgcagccggcactcgatccttaccgtgggcgtgaaatcagccctggcgcccatgtgcagagcgacgccgagctggatgccttcattcgcgagcatgccgaaacggctttccacccctcctgctcgtgcaagatgggcgaggacgacatggcggtggtcgatgggcaaggccgcgtgcacggcctgcagggcttgcgcgtagtggatgcgtcgatcatgccggagatcatcaccggcaacctcaacgccaccaccatcatgatcgccgagaagatcgcggatcggattcgcgggcgccagccattgccgcgcagcaatgcgccctatttcgtcgcgggcgaacgcccggtgcgtggtacgccgctgcgcagccagcaagacaggttagtcgggtaat

SEQ ID NO: 210105 - DNA, 430 bp, Unknown
  Bacterial polypeptide expressing nucleotide sequence isolated from the Sargasso Sea
ttggaggcggattatatcattgttggtagtggctcttcagggagtgttttagctgatcgtttgtcaaaaagtggcaaatattcgattattctggtagaatttggtggttcggacaggagccctttgattcagatgccagcagccctgtcttatccaatgaatatggacaagttcgattgggggtatcaatccgagcctgagcccaatctaaataaccgtcggttggctgttccccgaggtaaggttatcggaggctcttcgtcaatcaatggtatggtttatgtaagaggccacgcgtgtgattttgatttttgggctgccaatggtgcgtcaggttggagttatgctgatgttcttccatactttaaaagaatggagaattgtagcaatatagaatcagacgccaactccagttggcgtggtaataaag

SEQ ID NO: 210106 - DNA, 831 bp, Unknown
  Bacterial polypeptide expressing nucleotide sequence isolated from the Sargasso Sea
ggattttaaccacaaaggtcaaacacgaagcgttcaaggtggagaaatcatcagttgtggaggtgccttcaattctcctcaactgctgcagctttcggggatcgggaacccgaacgaccttgagctcctgggtatcgaaatcgttcaagaactcccgggagtgggagaaaacctacaggaccatctggaggtttacgtgcagcacgcgtgcaaccaaccggtttcgatgcagcctgctctgcgttggtggaataaaccttggatcggttttcagtggcttttctttcggaagggccctgcagccaccaatcattttgaagcaggagggtttgcgcgaagcaatgatcaggtggcttaccccaacctgatgattcattttctgcccctggcaatccgttatgatggaacctctccaaccgggggacatggataccaggtccacattggaccaatgtattctaattcccgtggttcagtaaaaatcaaaagtacagatccctttgccaaaccttctttgaggatgaattatctttccacgcctgaggaccgaaaagaatgggtggaagccatccactgcgcaagaaagattctggaacaatctgcatttgatgaattcagcgggggtgaaatatctccgggaccttcagtcgactctgatgaagaaattctcgaatgggttcgaagagatggagaaaccgcctatcatccttcctgcagctgtgccatgggaactggaccccaatccgtagtggatccaaaagattttaaggttcatgggatggaaggaattcgtgtcgtggatgcctcaaccatgccctatgttcccaatgc

SEQ ID NO: 210107 - DNA, 939 bp, Unknown
  Bacterial polypeptide expressing nucleotide sequence isolated from the Sargasso Sea
ggggagaacccaaagttaaaaattctagttttggaatttggtggtctagataagagtccatttattcaaatgcctgccgctctttcttaccctatgaacatggataagttcgattggggttataaagctgaaccagaacaagcattaaacggaaggtctttagcctgtccaaggggtaaagttatcggaggatcctcttcaattaatggaatgatttatgtaagaggaaatgctggtgactataatcagtgggcagagagtggagcaaaaggttgggattatcctaatgttcttccatattttcaaagaatggaagcaagccatggaggaaattctgaatttagagggaaatctggccctttaaacattactcatggcaaaagagataatcctttacacgacgcttttgtaaaagcaactgaacaagcagggtatacatacactgaagattataatggttttcgacaagagggatttggacctgctgacatgaatgtttggaaaggttcacgtttttcaacagctaaagcttatttaaaaccggcattagcaaagaaaaatgttcaccttattactaaagttttagtcgataaaataatatttagtgaagacaaggctaaaggggtggaagtatttcatcaaggccaaaaaaaaatttttaatgccaatatcggtgttgttttatctgccggcgctataaatagcccaacgattcttcaaagatcaggaattggagagggcaatgatttaaataacttaggaattaaggttattaaaaacttacctggtgtaggtaaaaatttacaagatcatttagaagtttattttcaagtgaagtgtttacaaccagtaacacttaacaagtacttaaacccattttctaaattgttaatcggaatgcaatggatgtttcttaaaagagggccagttccacaaacc

SEQ ID NO: 210108 - DNA, 826 bp, Unknown
  Bacterial polypeptide expressing nucleotide sequence isolated from the Sargasso Sea
ggaggtggctacggtagtccattaatacaaatgccagccgctttgagttatccaatgagtatgaaacgctacgattggggctactggtcagaacccgagccgcatttgggcggaagaaagttggcttgtccaagagggaaagtacttggtggatcttctagtataaatggaatggtttatgtcagaggacacccaaaagactttgacaaatgggctgaaatgggtgcccttggatggtcatcttcagatgttttgccatactaccaacgcttagaaaactgggatagtgcaggtcatggtggcgaaaaaatctatcgtggtacaaatgggcccttaaatataaccagaggcacaagaataaacccgttgaattttgcgtttgaaaaggctgggcagcaagcaggttaccagacaaccttggattacaatgggaagcaacaagagggttttggcccaatggaccaaacaataaaaaatggaaaacggtggtccagtgctaaagcttatctggaaccggcaataagatctggtaaatgtcaaattgttagaggtttagttgcaaaaattatcataaatgaaaagcaagccaagggtgttgagtattttcaaaatggaaaaaccgattgtgtttatgcttcaaaagaggtcataattgctgcttccgctataaattctcccaaaattcttttgttgtcaggcatcggcccggcaaaagaattaaaagctaacggaattgaagtaatagtcgatcgtcctggagttgggaaaaatttacaagaccatttagaactttacatccaaatgatggcaaaaactcctgtttcat

SEQ ID NO: 210109 - DNA, 820 bp, Unknown
  Bacterial polypeptide expressing nucleotide sequence isolated from the Sargasso Sea
ggcatatccattgagtaacgattctgttaattgggcatataaatcagaagcagacccatacatgaataatcgtcaaatgtattgcccgagaggcagagttttgggtgggtcgagttcaattaatggaatggcttatgttcgtggacatgcctttgattataatcgttgggcccagattgatggatgtcagggatggtcgtattctgattgcttaccttattttaagcgagcagagagcttggacataggcggtgatacttatcggggtagcgatggcccactcaaagtaacagctggtaagatgaacaatccgttgcataaagcctggatgaaagcgggcaaggaagctggttatccaattaccgaagatcctaatggttatcaacaagaggggtttggacgtatggatatgaccgtggataatggacgccgctgcagtgcggctaaggcttatttgagacaagcatcaactaggaaaggtttgacgaccaaaaagaatacaatcgtaaaccgtataattatagaagatggtaaggccattgggatagagtttataaaaagaggttctaagatatgcgtttacgcggcaaaagaggtaatcttgagtgcaggtgccataaattcgccgcagttattgatgttatctgggataggtccagctaatcatttggcaggtctcggtatacccatagtgcaagatttaccgggtgtgggagaaaatcttcaggatcacctggagatatatcttcaaatggagtgttcgcaaccaatatcactttacggcgtccaaaccccaatttacaaactaatgattggtctt

SEQ ID NO: 210110 - DNA, 1390 bp, Unknown
  Bacterial polypeptide expressing nucleotide sequence isolated from the Sargasso Sea
tttgggccttttattcaaatgccatcagcgctttcgtatccaatgaactttaaccgttataattggggatatgagactgaaccagaagaaggattaaataatcgtagactttcttgcccaagggggaaagttttaggcggctcatcatcaattaatggaatgatatatgtgagggggaatgctgaggattttaatttctgggaggaaagtggtgcaagaggttggggttttgctgatgttttaccttactttaaaaggcaagaaaactctcatgaaggtgattctagttggagaggaaagaatgggcctttacatataactagaggcacaagagaaaatccattaaatgatgttttagttagcgcagcacaagaagcaggatttttagcaactgaggattataacggtttccagcaagaaggatttggtccagctgacagaactatttggaaaggatcaagatggtctgctgcaaaagcatatcttaaaccttctattcaaacaaagaaactaaaaatatttaagaatgctcttgttgataaaataaacttttcaaatagaaaggctataggagtaacattttcacaaaatggcagatcaggaaaaattttagctagaagagaagttatatgttcagcaggtagtataaatagccctttaatattgcaacgttcgggaattggcccttcaaaactattaaaaagtcataacattgatgtactgctagataatcaaaatgttggtgaaaatttacaagatcacttggaagtttattttcaagtaaaatgcaaaaaacctatcactttatacaaatataataattttttttcaaaaggaattataggcttaaattggctgttgttcaaaaaaggaataggtgcctcaaatcattttgaaacacttggatttttaagatcaaataataaagtaaaatatcctgatattcaatttcacttgctaccaattgctattaattatgatggcagttcagctgtaaatgaccatggttttcaattgcatactggtcctatgagatcgaaatctagaggttgggtaaaaatcactagttcaaatccaaaatcaaatccaaaaattaaatttaattatatgaaacatcccgatgattggattgaatttagaaattgtatcaaaattactcggaaaattttaaatcaaccagcgtttaaagatttttatggagaagaaattcaacctggaaagcaaaaaatctctaatgatgatttagataattttatcaaagaggaggctgaaagtgcgtatcatccatgtggcacgataaaaatgggagataaaaatgacccatcatccgttgtggatccaaattgtaaagttattggaattgaaaatctaagaataagtagattcatca

SEQ ID NO: 210111 - DNA, 1663 bp, Unknown
  Bacterial polypeptide expressing nucleotide sequence isolated from the Sargasso Sea
catggaagcagactatataatcgttggtgccggtagtgccggttgtgcaactgctttcagattgtgtgaagctggtcatcgggtaatagttctagaatatggaggcagtgatagaagccctctcattcaaatgccaggagcattaagttatccaatgaatatgcctaaatatgattggggctttttttcagaaccggaaccctatttgaatggtaggaggctggcttgtcctcgcggcaaagttgttggtggttcctcaagtattaatggaatggtgtatgttcgggggcatgctttggattatgatacatggtccgagatgggtgcgtcaggatgggcctatgctgacattttaccatattttaaaaagctagagagttggaattcagccggtcacggtggtgacccagcatggcgaggaaaatcgggaccactacatgtaactcgagggtcacgatcaaataaattagtaaaagcatttgtaaatgccggctgtgaggcaggttatgaggtgactgatgattataacgggagaaaacaggaaggttttggcccaatggatcacaccatctttcagggccaacgttggtcagctgccaaagcgtatttgcgaccagcaatcaaaacgggcttatgtcggctgatttcaggttttgcacgaaaaattataattgagaatggtatagccacgggagtcgaatacgatggcattagtcaggcaaaagccatcttgaatgctaataaagaagtgattttatctgcttcctctataaattctccaaaattgttaatgttatcgggtattgggcctgctagacatttaaaagagaacggaattgaagtcctagctgaccgtcctggtgttggccagaatttgcaagatcatctggaattatacatacaaatggcagccaatgaacctgtaagtttatataagtattggaatttattaggtaaagcctacgttgggctaagatggatgataagcaaaacaggaccaggagcgtctaatcagtttgaaagcgccgctttcattagaacgaaagctggtgttaagtatcctgatattcagtatcattttcttccgattgctgtacggtatgacggaaaggctgcagtaagtgggcatggttttcaagcgcatgttggcccaatgcgaagtccatctcgtgggtcggttactctcaggtcaaatgacccttatgatcaccccgcaatattatttaattatatgtccactgagaaggactgggatgattttcgaatatgtattcgcctaactcgagaaatttttgagcagccatctattaaaaaatttataaagtatgagattcagcccggtgatagtctgcaaacggatgatgaacttgatgaatttatttcgcaaaatgtagaaagtgcttaccacccatgtggtacatgcaagatgggtgacataagtgaccctatggcagtagttgacaaattcacaagagttatcggtgttgaaaaattgagagttgttgatagcagtatattcccacaaataaccaatggtaacctaaatggtccaactataatggtaggcgaaaaagcaagtgaccatattttaggtaaagatccaatgcctcgtgctaatgaaaatgtttgggtgcattccaattgggaagatcagcagcggtaa

SEQ ID NO: 210112 - DNA, 1618 bp, Unknown
  Bacterial polypeptide expressing nucleotide sequence isolated from the Sargasso Sea
catggaagatttcaacaaagcctttgactatatcatcgttggcgctggatcggccgggtgtacattagctaaccggctgactgaagatgtttccaggacagttcttctactagaagctggtggcaaggactcaaacccttggatacatatccctgtcggttttgtaaaaactttggacatgccgggattgaattggaggttcgaaaccgaaccagaacctaattccaaaaataggaggataccaattccgaggggacgtgttttgggcgggtcgagctcaattaatgggatggtatatgttcgggggcagccactcgattatgatacgtggtcgcagttaggcaatcgtggttggtcttatgaatcagttcttccgtatttttcaaaatcagaaaattatgagagctctgatgaggcgtggagaggaaaaaacggcgaactcgtcactgccgaagggagagaaaaagcggagcttttagatgtcgttttagatgctgcagaacagtgcgggtatcctaaaaacgctgactataacagcggcgaacaagagggttttggttattttcaggttacgcaaaaaaatggtagacgctggtctaccgcaaaagcttttctggagccagcgctaaaaagacctaacctgagtttagaaataaatgctcacaccacgggaatactgacagacgggggccgggcaacaggcgtaaagtttgaacagaatggtaagacaagaaccgtgacggcagcaaaaggtgtggtgctgtgcgctggtgcagtgcagtctccccaaattcttgaactatcaggtattggaaatccaaatatactcagacaatatggtgttgaggtggttcaccctctacctggtgttggagagaattatcaagatcattacatggtgcgtcaaacctgggaaataaaaaagaaaataacgctgaatgagcaaacacggggggtatccttaataagggaagctttgcgttatgcgttcacgcggcgaggaataatgacgtatcctgccggaatacttgcgggttttgttcgcactcgtcccgagattgcaactcccgatgttcaatatcatatagctcatgcaagttttttggatgtgaaaaagcgaattctagataaacatcccggtatgacaatttcgccttgccaactgaggccagaatctagagggtcgatacatatcaagtcgtcaaacccagaagaccaacctgcgataaagggaaactttcttgcggaagaaaatgatagaagaaccttaatcgaaggtatgaagattgctaaacggattgcctctgcaccagcccttaaggactttgtcgcaaaagaactcaatccgaacgaagagatccaaagtgatgatgagttgcttgatttcgccagagagcgaggtaacaccgtttatcatcctgtaggaacctgcaaaatgggtagcgaccctaaagccgtagtagacgataggcttcgtgtgatgggaatgcaatcactccgtgttgtagatgcgtcgattatgccgacgttgacgtcagggaatacgaatgcgccaacgatcatgatcgcggaaaaggctgcagatatgattaaagaggacgaagcaagtttaagataa

SEQ ID NO: 210113 - DNA, 1444 bp, Unknown
  Bacterial polypeptide expressing nucleotide sequence isolated from the Sargasso Sea
tatgtatgattatattattgttggtgcgggctcggccggttgcgtgctggctaacagactatctgcaaaccccacgaacaaggttttgcttttagaaactggcggttctgacaaaagcatctttataaaaatgcccacggcgctctcaattcccatgaatactgaaaagtacgcgtggcagtttcaaacagaacaagagccttatttagacaatcgcgaaatgcactgccctcgcggcaaggtgttgggtggttcgtcatccattaacggcatggtgtatgtgcgtggccacgcaaaagactttgatgaatgggaacaacacggcgctaaagattgggattatcagtcgtgcctaccctactttcaaaaagcggaaacctggtacaaaggcacggacacatatcgtggcgacactggcaacattggcgtaaataacggtaatgaaatgaagaacccgctttacggcgcgttcgttaaagctggagagcaagctgggtacgatatcaccagcgactacaatggccagcagcaagagggcttcggcccaatgcatatgacggtaaaaggcggagtgagaagctcaacaagccgcgaatatctcgacccgattaaatttcgcaccaatctaaccatagtcaccggcgcccttgtgactaaggtaatactagacaacaaagttgcaaaaggtgttgagtaccgtgtgaaaggcgaaacccaaatagcatcgtgcgctgaagaggttattttaagcgcgggttcaattggttcaccgcatattttacagctatcaggcattggtgatactgaggtgttgagtaacgcaggcattgatacgcttcatcatttacctggtgtaggaaagaatttacaagatcatcttgagttttactttcagtacaagtgcaaaaagcctattactcttaatcgcaagctagatgttatatctaaaggcatgattggcgctcagtggttagtgaatcgctcaggacttggcgctacaaaccattttgaatcatgtgcatttatccgttctaaagcaggcgtcgaatggccagacattcagtatcacttcttgccagcagcaatacgatatgacggcaaatcagcctttgatggcgacgggtttcaggttcatgttggtcacaacaaaccgaaaagccgtggcagtgtgtcggtagtgtcaagcgaccctaccgttgctccaaaaattcgctttaattatttagagcatcaagatgatatagaggggttccgcgcttgcgtaaggctaacccgagagattatctcgcagcctgcttttgaggcatttagcgatggagaaattcagcctggggaacatgttcaaacagacgagcaaattgatgcgtttgtacgacaagcagtcgaaagcgcctatcacccatcctgttcttgcaaaatgggtgaggacgatatggccagtcgt

SEQ ID NO: 210114 - DNA, 1058 bp, Unknown
  Bacterial polypeptide expressing nucleotide sequence isolated from the Sargasso Sea
catgaacaaaacatacgatttcatcattgtaggaggtggttcggcaggctgtgttttggcaaaccggctcagcgagaatcctgaaaaccatgtattactgctggaagcgggaagaccggattcgatctgggatattttcatccatatgcccgccggactgtcaatccctattggtaaccggttctacgactggatttatgaaaccgaaccggaaccgtacatgaacggtcgtagaatctaccagggccgggggaaagtcctgggaggttccagcagcatcaacggcatgatcttccaacgcgggaatccacaggattacgaacgctgggcggccgatccagggatggaggaatgggactacgcccattgcctgccatatttcaaaaagatggaaaactgtctggcgggaggagacgatttccggggggatcagggaccgctcaaagtggaaagaggtcctgcttcaaccccgttgtttcaggcttttttccaggcagtccaacaggcaggatttgaactgacaaacgatgtgaacggtttccgtcaggaaggctttgccgcctttgataaaaacgtcttccggggaagacgtctcagcgcagctagagcttatcttcatcctgtgatgcatcgacccaacctcgaagtaatctgccgtgcccatgcattatgcatccgttttgagggaaacagggctgtgggtgtggattttaaccacaaaggacaaacacgaagcgttcaaggtggagaaatcatcagttgtgggggtgccttcaattctcctcaactgctgcagctttcagggatcgggaatccggaagaccttgagcccctgggtatcgaaatcgttcaagaactcccaggagtgggagaaaatctgcaggaccatctggaggtgtatgtgcagcacgcgtgcacccagccggtttcgatgcagcctgctctgcgttggtggaataaaccttggatcggttttcagtggcttttctttcggaagggccctgcagccaccaatcattttgaagcaggagggtttgcgcgaaagcatgatcaggtgg

SEQ ID NO: 210115 - DNA, 603 bp, Unknown
  Bacterial polypeptide expressing nucleotide sequence isolated from the Sargasso Sea
tcctgatattcatatcatttcttacactagctgttcgctatgatggaaaactaccaatcaaagggcacggtttccaggcacatgttggcccaatgcgaagcaaatctaggggatatgtggctcttcaatctaatgatccaaaagaagctccaaaaattcaatttaattacatgtctcatgatagtgattgggcagactttcgaaattgtattcgtttaacccgagagattttttcccaacccgcatttgggccctttgcaaggatggaggtttctcctggagacgcccttcaaagtgatgaccaattaaataattatatacgtaataatgttgagagcgcttatcatccatgcggcacttgcaaaatgggtgatagagccgaccgaatgagtgtggtcgatccagaaacgcgtgtaattggagttgataagttgcgcgtcgctgacagcagtatatttccacagattacaaatgggaatttgaatgcaccatcaataatggttggagaaaaagctagtgatcacattcttggtaaaaatcttttacctaaatcaaatgatgtgccatggatccatcctgattgggaaaccacgcagcgctaaa

SEQ ID NO: 210116 - DNA, 1501 bp, Unknown
  Bacterial polypeptide expressing nucleotide sequence isolated from the Sargasso Sea
ttgagtcgtgaaatatgtgggacgattgtgaatacagattacgtgattgttggtgctggtagcgctggttgcgctattgcttttaggctcactgaagccggatacaaagttactgtaattgaatttggaggtggtgacggtagtccattaatacaaatgccagcagctttgagttatccaatgaatatgcagcgttatgattggggctactggtcagaacccgagccgcatctgggcggaagaaagctggcttgtccaagaggaaaagttcttggtggatcttcgagtataaatggaatggtttatgtgagagggcacgcaaaagactttgataattgggctgaaatgggcgccattggatggtcatctgcagatgttttgccctactataaacgcctagaaaactgggatagtgcaggtcacagtggagaaaaaagctatcgtggcacaaatgggcctttaaatataaccaggggtacaagagtaaatccattgaatttggcgtttgaaaaggctgggcagcaagcaggttaccatacaactttggattataatggtaagcaacaagagggttttggtcctatggaccaaacgataaaaaatggaaaacgctggtccagtgctaaagcttatctagaaccggctataaaatctggtaaatgtcagattattagaggtttagtcacaaaaattattataaataaaaagcaagctgagggcgttgaatattttcaaaatggaaaaacggaatatgtttatgcatcaaaagaggtcataattgctgcttccgcaataaactctcccaagattcttttattgtcgggcataggtccggccgaagaattaaaaactaatggaattgaagtaatagcagatcgtccgggagttgggaaaaatttacaagaccatttagaactttacatccaaatgatggcaaaaactccggtttcattatacaaatattggaaccctcttggaaaagctttggtaggtctgcaatggctactttcaaaatcaggtccaggcgcatccaatcaatttgagagtgctgcattcatcagatctaaggctggggttgagtatcctgatattcagtatcatttcttaccactagctgttcgctatgatggtaaactaccggtaaaagggcacggtttccaggcacatgttggtccaatgcgaagtaaatctagggggtatgtggctcttcgatctaataatccaacagaagctcccaaaattcaatttaattacatgtctcatgaaagcgattggtcagactttcgaaattgtatccgtttaaccagagagattttttctcaacctgcatttaagccctttgctgatagcgaaatttctccaggcaaagcaattcaaagcgatgaacaattaaatgattttatcagggataatgttgaaagtgcttatcatccttgtggtacctgtaaaatgggtaataaaacagatccaacgagtgtagttgattccgagacgcgtgtga

SEQ ID NO: 210117 - DNA, 1621 bp, Unknown
  Bacterial polypeptide expressing nucleotide sequence isolated from the Sargasso Sea
tatggaaagttttgattatgtaataattggagcaggatcagcaggatgtgtattagctaatagactttctgcaaatcctaataataaagttttattgttagaggccggagggaaagatacttatccctggatacatattcctgttggatattataagacgatgcataatcctaaagtagattggtgttttcatactgaaaaagatgaaacgatgaataatcgttctattagatatcctaggggtaaaacactgggaggcagctcatctatcaatggtcttctttggataagaggacaaagcaatgattatgataattggagacagcaaggaaataaaggttggggctgggatgatgtgttaccttattttatcaaatctgaaaataacgagctaggtaaagggaaatttcatagtgatagtggaccgattatggttgcaaataaaaagatcaaattaaaaatgttagatgaatttattaatgcagctgaggaaaaaggtatccctaaatcagaggattttaatacaggtgataattttggagttggattttatcaatttaccacaagtcatagtcattttggtttaaagttaaggtgcagcgctgcaaaaggatatctcaatccggttaaatcaagaagtaatttaaaaattattactaatgctcatgtccaaaaaataaattttgaaaataaaaaagtagttagtgtttcatatattcacaatgataaattaattgaaacaaaatcaaataaagaaactattctttcagccggttctattggatcaccgcatattttacaagtatcaggtattggggaaagtaaaaaacttaaagaatttaatattaatataattaatgaattaaaaggtgtgggtaaaaatttacaagatcatctaatgtttagacctgtttataaagttaaaaatctcaaatcattaaatggaaaaattaatagtttatttggaaattttttaattggtcttgaatatatatttaatcaaagtggacctatgacaatgggtgcaagtcaagtatgtggttttgcaaaaagtgatagttctagggaaactcccaatttacaatttcatgtacaaccaattagcacagatatattaggcgcaactaaattacatgactttgatggtataacacctactgtagctaatattagaccaactagtagaggggaaataaatatagttagtaatgacatgaaggactatcccaaaattaaaatgaattatctttcaactgaagatgatagatatgtagcagctcaaggattaaaactaataagaaaaataatgttagaaactaagacatttaaaaaatatgagcctgaagaatatagacctggtattcatataaaagaggatgaggaattagttaaagctggaagtgattatacccaaactatatttcacccagtaggaacttgtaaaatgggtcacgatgaaaatgctgtagtagatgatcgactcaaagttcatggaattgaaaatttaagagtcgtagatgcttctataatgccaaatatcacgtctggtaatactaatgcaccaactataatgattgcagaaaaagcctcagacatgatattagaagatagaagtaaatga

SEQ ID NO: 210118 - DNA, 1702 bp, Unknown
  Bacterial polypeptide expressing nucleotide sequence isolated from the Sargasso Sea
atgacgacacgcgaatacgactacatcatctgcggcgcaggttccgcgggcaacgtgctcgcaacgcgcctgacggaagatccggacgtgacggtgctgctgctcgaagcgggtggccccgactaccgcttcgacttccgcacgcagatgccggccgccctcgcctacccgctgcagggccgccgctacaactgggcctacgaaaccgaccccgagccgcacatggacaaccgccggatggaatgcggccgcggcaaggggctcggcggctcgtcgctgatcaacggcatgtgctacatccgcggcaacgcgctcgactacgacaactggtcgacgcacaagggcctcgagaactggacgtatctcgactgcctgccgtacttcaagaaggccgaaacgcgcgacgtcggcccgaacgactatcacggcggcagcggccccgtgtcggtcacgaccagcaagcccggcgtgaacccgctgttcgaggccatggtcgatgccggcgtgcaggccggctatccgcgcaccgacgacctgaacggctatcagcaggaaggtttcggcccgatggaccgcacggtcacgccgaagggccgccgcgccagcaccgcgcgcggttacctcgaccaggcgaaggtgcgctcgaacctcgagatcgtcacgcacgcgctcgccgatcgcatcctgttcgacggcaagcgcgcgtcgggcgtcacgtacctgcgcggcagcgaacgcgcgaccgcgcatgcgcgccgcgaagtgctcgtgtgcagcggcgcgatcgcgtcgccgcaactgctgcaacgctcgggcgtcggccccggcgcatggctgaaggcactcgacattcccgtcgtgctcgacctccccggtgtcggccagaacctgcaggatcacctggagatgtacatccagtacgagtgcaaggagccggtctcgctgtaccccgcgctcaagtggtggaaccagccgaagatcggcctcgaatggatgctgaacggcaccggcctcggcgcgagcaaccacttcgaggcgggcggtttcatccgcacgcgcgacgacgacctgtggccgaacatccagtatcacttcctgcctgtcgcgatcaactacaacggctcgaacgcaatcgagatgcacggcttccaggcgcacgtcggctcgatgcgctcgccgagccgcggccgcgtgaagctgcgctcgcgcgatccgaacgaccatccgagcatcctgttcaactacatggccgaagcgctcgactggcgcgagttccgcgatgcgatccgtgcgacgcgcgaaatcatgcggcagcccgcgctcgatcgatatcgcggccgcgagctgaatccgggcgccgactgcaagtccgacaaggaactcgacgcgttcgtgcgcgcccgcgcggagaccgcgttccatccgtcgtgctcgtgcaagatgggttacgacgacatggccgtggtcgatgaagaaggccgcgtgcacgggctcgaagggctgcgcgtcgtcgatgcgtcgatcatgccgatcatcacgaccggcaacctcaatgcgccgacgatcatgatcgccgagaagatcgcggacaggattcgcgggcgcaagccgcttgcgcgcgtggatgtgccttacttcgtcgcgaacggggcgatggcccgcaatgtcgcgaaggccgtgcggcagccggaaacggtctgac

SEQ ID NO: 210119 - DNA, 949 bp, Unknown
  Bacterial polypeptide expressing nucleotide sequence isolated from the Sargasso Sea
ctggtgaacggtaaaaccgaaactgccgcctctaacgaagtgattttaagtgccggctctattggctcgccacacatcctgcaactttctggaattggcgacaaagatattcttgaaaaagcaggtgtcgatgttaagcaccacctgccgggtgtgggtcaaaacctgcaagatcatttggaattttatttccagtacaagtgcaaacagccaattacgttaaatcgcaaactgggcttaatttcaaaagggttgatcggcgctcgctggttgctaaaccgttctgggttaggcgctacgaatcactttgaatcttgcgccttcattcgctcgaaagcagacgtagagtggcctgacattcagtaccacttcttgcctgccgctattcgatacgacggaaagtccgcgtttgatggcgatggctttcaagtgcacgtaggtcacaacaaacctaaaagtagaggtagcgtaacccttcagtcggctaacccgacggttccacctaaaattttgtttaactatttgcagcatccagatgatatcgaagggtttagagcatgcgtaagacttacacgagaaatcatcgcacagtcagcattcgacgacttcagagacggcgaaattcagcctggcgagcacattcagacggatgaagaaatggacgcttttgtgcgtgaagccgttgagagcgcttaccatccatcatgctcttgcaaaatgggcgaagacgacatggcagtggttgactctcaaaccaatgttcatggcattgaaggattgcgagtagtggattcttctatcttccccactattccaaacggaaacctaaatgcgccaaccatcatggtggcggaaaaggcggcagacatcattctgggtaaacccgctttgccaccacaaaacgttcccgtggatattcacccgcattggcaaacagagcaacgctaaa

SEQ ID NO: 210120 - DNA, 766 bp, Unknown
  Bacterial polypeptide expressing nucleotide sequence isolated from the Sargasso Sea
gaatgcaaggaaccgggtctcgctatatcccgcgttgcaatggtggaatcagcccgccatcggacttgaatggatgcttaacggcacagggatcggtgcgagcaaccagttcgaagcgggcggctttatccgtacccgcgacgacgatctgtggccgaacatccagtatcacttcctgcctgtggcgatcaactacaacggttcgaacgcgatcaagatgcacggcttccaggcgcacgtcggttcgatgcgctcgccgagccgtggccgcgtgaagctcaaatcacgtgatcctgccgcgcatccgagcattctgttcaattacatggccgatccgctcgactggcgtgaattccgcgacggcatccgcattacgcgcgacatcatgcggcagccggcgctcgatcgttatcgcggccgcgagctgaatccgggcgcggacttgaccaccgacgagcaactcgacacgtttgtgcggatgcgggcggagacggcttttcatccgtcgtgctcgtgcaagatgggttacgacgatatggccgtggtggatggcgagggccgcgtgcacggtatggaagcgctgcgcgtcgtcgacgcgtcgatcatgccgcagatcacaaccggcaatctgaacgcgccgacgatcatgctggcggagaagatcgccgaccggattcgcgggcgagacgcgctggcgcgggtggagacgccgtacttcgtggcccgcggcgtggcgtcgagaaaacgcgaagcggcggcggtttag

SEQ ID NO: 210121 - DNA, 829 bp, Unknown
  Bacterial polypeptide expressing nucleotide sequence isolated from the Sargasso Sea
aatggctgaagaactaaaaaaattagatatttctgttcaacatgacctaagaggtgtaggtgaaaatttacaggatcatcttgaaacttatttacaatatgagtgtacaaagcccgttacactttacacatcatataatccaataagaatggcattcatagggatagagtggtttatttttaaatctggagtggcatcatattcaaacttagagacaggcggcttcgtgagaagtaatgatatggttgattatcctaatattcagtatcacttctttccatcgcttgtattggatcatggaagacaatctccaagctctcattcttttcaagcgcatgtaggaccaatgaggccaacaagtagaggacatgtcaaattaaagtcaaacaatccctcagcttcacccgctatacagtttaattatatgcagacagagcatgatttaaaagaaatgagagatggtattaaaattgcaagggaaatttttcatcaaaaagcttttgataaatatcgaggaaaagaaattaaccctggaataaattcaagctctgagggtgatttaaatgaattcattaaaaataaaggtgatactgcttatcatccttcttgtacatgcaagatgggaaaagatgagttatctgttgtcgatgaagagctcaaagtttatggggttgaaaatttaagagttgtagatgcttcaataatgccaaatatcattacaggaaatctcaatgcaacaactgtgatgatcgctgaaaaggcatctgatctcatcctcaaaaaagaaactttacctgatgtagagaccagtttttatagagcaagctag

SEQ ID NO: 210122 - DNA, 1612 bp, Unknown
  Bacterial polypeptide expressing nucleotide sequence isolated from the Sargasso Sea
aatggagtcttttgattatataatacttggtgctggatcagctggttgtgttttggctaatagactttctgcggaccctaaaaataaagttttacttcttgaagctggtggtaaggataattatccatggatccatattccagttggttattttaaaacgatgcataatccaaaagtcgattggtgttttagaactgaaccagatgaaacaatgaataatagatccataagatatcctagaggcaaaaccctagggggaagttcttctattaatggtcttttatgggtaagagggcaaagtgaggattataatatttggcggcagttaggaaacacaggttggggttggaatgatgttctaccttattttttaaaatcagaaaataatgaactaggcaaaagtgagtttcataataatagtggaccaattacagttgcaaataaaaagatcaatttaaagctacttgatgaatttcaaaatgctgctgaagaatatggaatacccaagacaaatgattttaatactggagataatactggcataggtttttttcaatttacaactagttttaataaacctggtttaaagttaagatgtagtgcagcaaaaggatacttaaagccagcaaaaaaaaggaataatttaaagattgtggtaaaagctcacgttcaaaaaataaattttgagggaaaaaaggctattggtgcaagctattataatggtgataaacttattgaagttaaagccaataaagaagtaattttatcttcaggatcaattggttcccctcatatacttcaagtatcaggcataggaaataaagagaaactaaaaaaacttggtattgacatagttcatgagtctaatggggtaggtttaaacttacaggatcatttaatgtttagacctgtttacaaagtaaaaaatttgaaatctttaaatagaaaagttgagagtatttttggaaggtttatgatgggacttgaatatgttttaaaccaaagtggacctgttacaatgggtgcaagtcaggtttgtggttttgttaaaagtgatccttctagagcaactccaaatttacagtttcatgtttctccagtaagtacggatattttaggggtaacacctatgcatgattttgagggtataactcctactgttgcaaatgttagacctacaagcaggggtgagattaatattgttagtgctgacagcagaatttatccaaaaattaaaatgaactacctatcaactaacgaagatagaaaagttgctgcagaaggtttaaaaataattcgtaaaataatgctagagacagaaactttcaaaaaatatgaacctgaagaatatagacctggagttcatataactgatgatgaggaattagtaaaagaaggatcaaattttactcagacaatttttcaccctgttggaacttgtaaaatgggccaagatgaaatgtcagtagttgacgaaaaacttagagttagaggtgtggataatcttagagtaatcgatgcctccataatgccaaatataacttctggtaatactaatgctccaacaataatgattgcagaaaaaggtgcagacatgatactacagcaataa

SEQ ID NO: 210123 - DNA, 1387 bp, Unknown
  Bacterial polypeptide expressing nucleotide sequence isolated from the Sargasso Sea
atgcagacatttgattacattattgttggagctggttctgccggctgcgtgctagcgaaccgcttatcagaaaacccaaagcacaaggtgttgctactggaaaccggtggctcagataaaagcattttcatcaagatgccaacggcgctgtctattcctatgaataccgacaagtatgcgtggcaattcaacactgaaaaagagccctatttaaacaaccgtgaaatgcactgcccacgcggtaaagtgttgggcggctcgtcatccattaacggaatggtatacgtacgcggccacgctaaagactttgatgaatgggaagctcacggcgcagagggctggaattatcaggcgtgcctaccctatttccaaaaagctgaaacctggtacaaaggtaacgacgcttaccgaggtggcaatggtgaactcggcgttaacaacggtaacgaaatgaagaacccgctttatacggccttcattaaagccggcgaacaggcgggctacgacatcactagcgattacaatggcaagcagcaagaaggcttcggccctatgcatatgaccgtgaaagacggtgtacgcagttcggcaagccgtgaatatcttgacccggtaaaatcgcgtaagaatttaactatagtgactggcgcgctggttactaaagtcgtgctggaagataaagtcgcaaaaggcgttgaatatgtagttaacggtaaagccgaaactgccgccgcatctcacgaagtgattttaagtgccggctctattggctcaccacatatcctgcaactttctggaattggcgacaaagatattcttgaaaaagcaggtgtcgatgttaagcaccacctgccgggtgtgggtcaaaacctgcaagatcatttggagttttatttccagtacaagtgcaaacagccaataacgttaaaccgcaaactgggcttaatttcaaaagggttgatcggcgctcgctggttgttaaaccgttctgggttaggcgctacgaatcactttgagtcttgcgccttcattcgctcgaaagcagacgtagagtggcctgacattcagtaccacttcttgcctgccgctattcgatacgacggaaagtccgcgtttgatggcgatggttttcaagtgcacgtaggtcacaacaaacctaaaagtagaggtagcgtaacccttcagtcggctaacccgacggttccacctaaaattttgtttaactatttgcagcatccagatgatatcgaagggtttagagcatgcgtaagacttacacgagaaatcatcgcacagtcagcattcgacgacttcagagacggcgaaattcagcctggcgagcacattcagacggatgaagaaatagacgcttttgtgcgtgaagccg

SEQ ID NO: 210124 - DNA, 1660 bp, Unknown
  Bacterial polypeptide expressing nucleotide sequence isolated from the Sargasso Sea
atgtttgaaaatcctgattatattgtaattggttctggatcggcaggatcgacaatagcatacagacttggggagaacccaaagttaaaaattctagttttggaatttggtggtctagataagagtccatttattcaaatgcctgccgctctttcttaccctatgaacatggataagttcgattggggttataaagctgaaccagaacaagcattaaacggaaggtctttagcctgtccaaggggtaaagttatcggaggatcctcttcaattaatggaatgatttatgtaagaggaaatgctggtgactataatcagtgggcagagagtggagcaaaaggttgggattatccagatgttcttccatattttcaaagaatggaagcaagccatggaggaaattctgaatttagagggaaatctggccctctaaatattactcatggcaaaagagataatcctttacacaacgcttttgtaaaagcaactgaacaagcagggtatacatacactgaagattataatggttttcgacaagagggatttggacctgctgacatgaatgtttggaagggttcacgtttttcaacagctaaagcttatttaaaaccggcattagcgaagaaaaatgtacatttaattactaaagtcttagtagatagaataatattcagtgaagacaaggctaaaggggtggaagtatttcatcaaggccaaaaaaaaatttttaacgctaatatcggagttgttttatcagctggtgctattaatagtccaacgattcttcaaagatcaggaattggagagggcaatgatttaaataacttaggaattaaggttattaaaaacttacctggtgtaggtaaaaatttacaagatcatttagaagtttattttcaagttaagtgtttacaaccagtaacacttaacaagtacttaaacccattttctaaattgctaatcggaatgcaatggatgtttcttaaaagtgggccaggttccacaaaccaatttgaaacacttggatttattcgttcggataaaaatattctatatcctgatattcaatttcattttctcccggttgcaataagatatgatggtaaagcaccaagtaaaggacatggttttcaattacatgtgggacccatgcgttcaaaatcccgtggatttgtaaaattgaagtctagcaatccttttgaggcacctataataaaatttaattatatgtctcataaagatgattttccaaactttagaaaatcactcagactttctagagaaattcttaaccaagatgctttagctccttttaaaggaagtgaaattcaacctggagataatgtcgtatcagatgagggacttgatgaatttataaaaaataactgcgaaagtgcttaccatccatgtggtacgtgcaagataggagaagaagatgatccttcatcggttgttcaaaatgattgtaaagtaaagggtttttcaaatttttaccttgcagactcctcaatttttcctcaaatctgtaatggaaacctcaatgcaccttccataatgactggtgaaaaagcatcagatcatattttgggaaaacctcttttagctccatctaatttacaaccctatactcatccaaactggcagaattctcagagataaa

SEQ ID NO: 210125 - DNA, 1621 bp, Unknown
  Bacterial polypeptide expressing nucleotide sequence isolated from the Sargasso Sea
atggaaaattttgattacattattattggagcaggctcagctggttgtgttttagctaatcgattatcaaaaaatcctaaaaataaagttttactgttagaggctggtggaaaagataattatccatggatacatatacccgttggttattataagacaatgcataatccaaaagtagattggtgttttcgtacagaaaaagatgaaacgatgaataacaggtctataagatatcctagaggtaaaacattaggaggcagttcatcaataaatggcttgttgtggataaggggtcaaagtaatgattacgataattggcgtcagcaaggtaacaaaggctggggatgggatgatgtattaccatactttataaaatcagaaaacaatgagctaggtaaaggcaaatttcatagtgatgaaggtccaatcatggttgcaaataaaaaaattaaattaaaaatgcttgatgaatttataaatgcagcagaagaaaaaggtattcctaaggtaaatgattttaatacaggtgataattttggtgttggtttttttcaatttactacaacttttaataaattaggattgaaattaagatatagtgcagcaaaaggttacttaaatcctgcaaaaaaaagatcaaatttaaagataataactaatgctcatgttcaaaagattaattttgaaggtaaaaaagcttcaggtattgaatactttcttggagaaaatttgagaaaaatttctgttaataaagaggttatattaagtgcgggctcaattggatcgcctcatatcttacaagtctctggaattggcgatggtgataaattaagtaaaattgggatagatttaataaaaaatcttaaaggagttggtaaaaatttacaagaccacttaatgtttagaccggtatataaagttaaaaatttaaaatcgttaaataagaaaattaatagtctttttggaaaatttttaattggattagaatatatctttaatcaaagtggaccaatgactatgggagcaagtcaggtatgtggttttgctaaaagtgatagttctagagaaactccaaacctacaattccatgtacagcccattagtacagatattttaggagaaactaaactccatgattttgatggaattactccaacagttgctaatattagaccaacaagtaggggagaaattaatattgtaagtaaaaatattaaagataatccaaagattaagatgaattatttatcaactgatgatgataggtatgttgcagcgcaaggattaaagcttgtaagaaaaataatgctagatactgaaacatttaaaaaatatgaaccagaggaatatcgtcctggtgctcatattaaagatgatgaggagctagttaaagcaggtagtgactatgcgcaaacaatttttcatcctgtaggtacttgcaaaatgggtcaagatgagaattcagttgtaaacgataggcttaaagttcatggagttgaaaatttaagagtagttgatgcatcaattatgcctaatattacatcaggaaatacaaacgcaccaactataatgattgcagagaaagcatctgacatgatattagaagacaatctgcaatgaa

SEQ ID NO: 210126 - DNA, 1612 bp, Unknown
  Bacterial polypeptide expressing nucleotide sequence isolated from the Sargasso Sea
atggaaaattttgattacattataattggagcaggatctgcaggatgtgttttagcaaacagactttcatccaatccaaataataaagttttgcttttagaagcaggaggtaaagataattatccatggatacatattccagtaggttattttaaaacaatgcataatccaaaagttgactggtgttttcatactgaaaaagacgaaagtatgaataatagatcaataagatatcctaggggtaaaactttaggtggaagttcatcaattaatggacttttatggattagaggtcaaaaagaagattacgatatatggagacaattaggtaatactggctggggttgggatgatgtattgccttattttttaaagtcagaaaataatgaattgggtaaaagtgaatttcataatgacagtggaccaattactgttgcaaataaaaaaataaatttaaaattacttgatgagtttcaaaatgctgctgaagaatatggaattcctaaaacaattgattttaatacaggtaataattttggaattggattttttcaattcactacaagttttaataaatttggattaaagttaagatgtagtgctgctaaaggttatttaaatccaataaaaaaaagatctaatttaaaaattgtagtaaatgctcatgtgcaaaaaataaattttgaaggaaaaaaagctacaggagtcagttattatactggtgataaactaaatacagtaagtgctaaaaaggaagtaattttatctgctggctcgattggttctccgcatatactgcaagtatctggcattggagatagtcacaaacttaaaaatcttggaataaaagttatacatgagttaaatggtgttggtaaaaatttacaggatcatttaatgtttcgaccagtctataaagttaaaaatttaaaatctttaaatagaaaagttgaaagtttatttggaagatttttaatgggtcttgagtatgtttttaatcaaagtggtcctgtaactatgggtgctagccaagtatgtggttttgtaaaaagtgatgcttctagagctacacctaatttacagtttcacgtttcacctgttagtacagatattttaggagtaactccaatgcatgattttgagggaattactccaacagtagcaaatgtaagacctacaagcagaggtgaaataaatatagtgagtaatgacagtagagtttatcctaaaatcaaaatgaactatttatccactgacgaagataggaaagttgcagctcaaggtttaaaaataattagaaaaataatgttagaaactaaaacatttaaaaaatatgagcctgaagaatataggccaggagttcatattacagaggatgaagagctagttaaagcaggtgcagattttactcaaacaatttttcatcctgttggaacttgtaaaatgggtaatgatgatatggctgttgttgatgattctttaagagtaagaggaattcaaaacttaagagtaatcgatgcatcaatcatgcctaacatcacttctggtaatactaatgctcccacaattatgattgctgaaaagggtgctgatatgatattgaacggataat

SEQ ID NO: 210127 - DNA, 1012 bp, Unknown
  Bacterial polypeptide expressing nucleotide sequence isolated from the Sargasso Sea
atgtttgaaaaacctgattatatcgtaattggttctggatcagcaggatctacaattgcttacagacttggggaaaaccctcaattaaaaattttagtattagaatttggcggcaatgacaatagtccttttatacaaatgcctgcagcactctcatacccaatgaatatgaataaattcgattggggctataaagcagaacccgagcctactttaaatggtaggtctctcgtttgccctagaggtaaagttataggagggtcttcgtcaattaacggaatgatttatgttaggggtaatgctggtgattataatcaatgggcagaaagtggtgcaaaaggttgggattatcccgatgtccttccatattttcaaagaatggaagcaagccatggaggcaattcagagtttagaggaaaatcaggccctctaaacataactcatggcaaaagagataacccattacataatgcttttgtaaaagctacggagcaggcgggatacacttacactgatgactataatggctttcgacaggagggttttggaccggctgatatgaccgtttggagaggctcacgtttttcaaccgcaaaagcttacttaaaaccagcattagcaaaaaaaaatgtacaactcataacaaaggttctagtcgataaaataattttccatgaagacaaagctaatggagttgaagtattccatcgaggccaaaaaaaaacctttagtgcaaatattggtgtaattttatcagctggcgctatcaatagtccaacaattcttcagagatcgggcattggagagggcaatgatttaaatagtttggggattaaagtaattaaaaacttaccaggtgtcggtaaaaacttacaagatcatttagaagtttattttcaagttaaatgtttacaaccagtaacacttaataaatatttaaatcctttttctaaattacttatcggcatgcaatggatgtttctgaaaagtgggcccaaggtgcaacaaacca

SEQ ID NO: 210128 - DNA, 1606 bp, Unknown
  Bacterial polypeptide expressing nucleotide sequence isolated from the Sargasso Sea
ttacataattataggagctggatcagcaggatgtgttcttgctaacagattgactagtaaagaggaaaacaaagttttgcttcttgaggctggtggtaatgatgattatccatggatacacattccagttggatattataaaacaatgcataaccctaaagttgattggtgttttcgtacagagaaagatgaaacaatgaataacagatctattagatatcctagaggtaaaaccttaggcggcagttcttctattaatgggcttttatggataagagggcaaagcaatgattataataactggaggcaaatgggtaacaatggatggggatggaatgatgttctgccctactttttaaaatctgaaaacaatgaattaggtaaaagtgaatatcataacgatagcggtccaattatggtctcaaataaaaaaattgacttaaaaatgttagatgaattccaaaatgcagctgaggagtgtggaatacctaaaactaaagattttaatactggagataatacaggaattggttttttccaatttactactaatcataacaagtcactactcaaacttagatgtagtgctgcaaaaggatatttaaaccctgtcaagaaaaggaaaaatttaaagattataaccgatgcacatgttcaaaagataaattttaagggaactaaggctgatagtgtaagtttttatagaggagataaagtagtaacctctaaagctagaaaagaaataattttatcagcaggttccatcggttctcctcacattcttcaggtatctggcattggtaacgctgataaattaagtaaaattggtattaagactattcacgaattaaaaggcgttggtatgaatttacaagatcaccttatgttcagaccagtctataaagtaaaaaatttaaagtctttaaacggcaaaataaacagcttatttggtaattttttaattggtttagagtatatatttaaacaaagtggtccaatgacaatgggagccagtcaagtatgtggttttgcaaagagtgacccgtcaaaagaaactccaaatttacaatttcatgttcagccaataagtactgatattcttggcgcttcaaaactgcatgactttgatggaattacacctacagtggcgaatattagaccttcaagcagaggagagatttcaatagtaagtaacgatagtagaataaatccaaaaattaagatgaactatttatcaacgcaagatgatagaatagtagctgctcaaggattaaaattagttagaaaaattatgctagaaacagaaactttcaaaaaatatgagccagaggagtatagacctggaattcatattactgaagatgaggagctagtaaaggctggtagcgaatttactcaaacaatttttcatcctgtgggaacatgcaaaatgggtaatgatgaaaatgcagttgttaatgacaaattatatgtacacggacttcaaaatttaagagtaattgatgcatctataatgccaaacattacctcaggaaatacaaatgctccaactataatgattgcagaaaaaggtgcagaattcattttaagtaatcaaacaaaatga

SEQ ID NO: 210129 - DNA, 427 bp, Unknown
  Bacterial polypeptide expressing nucleotide sequence isolated from the Sargasso Sea
atgaacctaaaccgtttaaaggaagaaattgaatttattttaaagaatgctggaaaatacatgactattaagccaaatagagatgatataaaaagcgtatttgcaggactaagaccacttgcagcaacttctgataagaagtcaacaaaagaagtttccagaagtcataaaattgatatttctccctctggtttgataagcgtccttggggggaaatggactacttacagaaaaattgcagaagatgcaattgatgctgcaatttcaataaacaaactcaaaaagaaaaaatgcagaactgaaaaaacaaaactctttggctacaaaaaaaatatagattggtctgatcaaatgcatgtatatggttctctaaagaaaaaggttgaatctttgggggggaaagaggacaataagtcattatcaagta

SEQ ID NO: 210130 - DNA, 661 bp, Unknown
  Bacterial polypeptide expressing nucleotide sequence isolated from the Sargasso Sea
atgagcccaaaacctcttaatgaagaaattgattttattttagataatgctagtagatatatgacattaaaaccaaaaaaatctgatataaaaagcgcttttgcgggattaagaccattagctgcaacatcaaataagaaatctacaaaggaagtctcaagaagtcataaaatagatattgctccttcaggattaattagtgtattgggtggaaagtggactacctataggaaaattgcagaggatgcaattaatgcggcaatttcaatcaatagattgaaaaataagaaatgtaaaacagaaaagctaaaattagctggatacaagaaaatagttaattggaatgatccaatgcatgtttatggttctcaaaagaaaaaagttgaatcccttggtggagtaaatgataataaatcattatctaataagtttcatataacaaataatattattgagtggtcaattatacatgagatggctctaaaaattgaagatgttttagcacgtagaacaaggtgtatatttcttgatgcaaaagagtctaaaagaattgctccacaggtcgctaaaaaaatggctaaggttctagagaaggatcaagagtggattgacgaagagttaaaaaattttaataaattaattaaaaattacatgacatgat

SEQ ID NO: 210131 - DNA, 818 bp, Unknown
  Bacterial polypeptide expressing nucleotide sequence isolated from the Sargasso Sea
gggtgtaatttatcatgacggacaatttgatgactctagaatggcaattactcttgcactaactgcagattcaaaaaaaactgctttattaaattattgcagtgttgaaaaactcttaaaggataaagatgaaataataggtgtggaatttcaggatacattgaactcaaaaaaatataaagtcaaaggtaaagttgttataaatgctactggtgtatttgcagaagagattatcaggatggatcaaccagatatagataaaatgattcaacctagtcagggagttcatatagttttagaaaaaaaatttttaaaaagtaagcatgcaattttaatacctcaaacttctgatggtagggtcctatttgcagttccatggaaaaattatgttgttgttggaactacggatactcaagttaaaacagcaagcatagaaccaagtcctctgaaagatgaaattgaatttatattaaataatgcgagtcaatatatgtcagtaaagcctaagatttctgatataaaatctgtatttgcaggcttaagaccattagcggcaacttcaaataaaaaatctactaaagaagtctcaagaagtcataaaatcgatattgcaccatcagggttaattagcgttcttggtggaaagtggacaacttatagaaaaattgcagaagatgcaattaatgctgcaatttcaataaataaattaaacaaaaagaaatgtaagactcaaaaaactaaactttttggttataagaaaagagttgaatggtcagatccaatgcatgtatatggatctttaaaaaaagaagttgagg

SEQ ID NO: 210132 - DNA, 425 bp, Unknown
  Bacterial polypeptide expressing nucleotide sequence isolated from the Sargasso Sea
gctacccgcgccgctgcgcggttccgccctctaccgccacggcgaccgcacgcctgcctggctgggcgatacccgccagcatcgcagcttaatctgcgaatgcgagatggtgaccgccggagaagtacagtacgcggtggaaaacttagcggttaacagcctgctcgatctacgtcgccgtacgcgcatcggcatgggcacctgccagggagagctgtgcgcctgccgggcggccgggcttctgcaacggtttaacatcaccactcccgcccagtcgctgacccagctttccgattttttaaacgagcgctggaaaggtgtgcagcccattgcctggggcgatgcgctcagggaaagtgaattcacccgctgggtctatctcggactgtgcgggctgccaaaggagtctcaggatgaaatttgat

SEQ ID NO: 210133 - DNA, 631 bp, Unknown
  Bacterial polypeptide expressing nucleotide sequence isolated from the Sargasso Sea
aagtttattttaaaaaatgctggatcatatatgaaaagtgcaccaactattaaagatataaaaagtgttttcgcaggtctaagacccttagcagcaccagaaaacaatgaaaaggctactaaagaaatatctagacatcataaagttacggtaagtacatctggtcttattagtatacttggaggaaagtggaccacatataggaagatggctgaagacacagtcaacaccgctcgatcggtagctggtcttcaagaaagagaatgtattactcataatcttaccattcatggttatgattattcatccaattgggaaaacccaatacacttttatggaacagatatagaaaaaattgaaaacttgtgtaatgaaggtaatatctcgattagtgaaaagttttttatttcaaaaaaccagataatatggtcaattcgaaatgaaatggcaatgactcttgaagatgttatggctagaagaacaagatccttatttctagatgctagagagagtctgaagatttccccaaaagtattagaaattatggctaaagaaatgaaaaaaaatatagattggattaaaaatgaaagcgctaactttgaaaaaatagcaagaaattatatagtatgat

SEQ ID NO: 210134 - DNA, 756 bp, Unknown
  Bacterial polypeptide expressing nucleotide sequence isolated from the Sargasso Sea
aatgaaaagaataaccacacaagtcgtcatcatagggggtggcgccaccggagccggcatcatgcgcgattgcgcactgcgcggcatcgactgcatcctgcttgagcgggacgacatcgccgccggcaccacgggccgcaaccacggcctgctccactccggcgcccgctacgcggtgacggatcaggagtccgcccgcgagtgcattcaggagaaccgcatcctcaagcggatcgccagccactgcgtcgaggacaccggcggcctcttcatcaccctgccggaagatgacatcaattttcaaaataccttcatggacgcctgtgccttggccggcatcgacgcccgccagctggatcccgccgatgcgctgcgcctcgaacccaacgtcaacccggcgctgatcggcgccatccaggtgccggacggcacggtcgatccgttccgcctggccgccgccaacgtgctggatgcgaaagagcacggcgcccgcatcttcacccacagcaaggtgctcgggcttttgcgcacccaggatcgggttcacggggtcaaggcgatcaacacccgcaccggtgaagcgttcgaggtggagtgccaggaggtgatcaacgccgccggcatctggggccagcagatctgcgagtacgccgatctcggcatccgcatgttcccggccaagggatccctgctcatcatggattaccgcatcaatcagctggtgctcaaccgcgcccgcaaaccggcggacgcgga

SEQ ID NO: 210135 - DNA, 1153 bp, Unknown
  Bacterial polypeptide expressing nucleotide sequence isolated from the Sargasso Sea
aatgtcaaaagtattcgatttattcattataggtggtggtataaacggcgctggtttagctagagatgctgctggaagaggtttgtctgtttgtctcgctgacaaaggtgagataggtggagcaacatcttcatggtctaccaaattaattcatggtggtcttagatatttagaaaattatgaatttaaactagttagagagtctctcaaagaaagagaaacaatttacaaaattgcaaaaccaatttcaaaacctattccttttatcatcccatatgttgataaaattagacctgcatggttaattaaaataggtttgtttctttatgataatttaggaggcaaaacaattataccaaagtcaaacactttagatatttcaaaaaaattaccgaatattcttaaaaaaaaatataaaactggtttccaatattttgatgttcaaattgacgataaaaaattgactaaactaaatataaaatctgcaaaaagatataaagctaaagtattagaatataataaagttaaaaaagcagaaattgatggtaatgaatgggtcattcatcttcaaaaaggaaagaaaataaaatcaaaaattttaattaatgcatctggtccatggataaatgaaactttaaaaaaaaatataaaaataaaatcaaaaaataaaattagattagttaaaggaagtcacattataactaaaaaattatataagaaagatgttgcatttacatttcaaaatactgacaagagaataatatttgtaataccctataaaaaaaaattttcactaattggaactactgaggttgaagttaaatcgcctgaaaataaagaaatttcaaaaaaagaaattcaatatttaattcgttcagtaaataattatttagaaaaacaaatcagtacaaaagatatagttgactcttattctggaataagacctttaatagaggatttcaatcaagcttccaaagttacaagagattatatttttgacttaaatataataaaaaaattaccccttcttagtatttatggtggtaaattaactacttacagaaaactggcagaaaatgtcctattagacctagaaaagtttttgcctaaaactaaaatgggaccttggacacataaaaagaatcttttttag

SEQ ID NO: 210136 - DNA, 1383 bp, Unknown
  Bacterial polypeptide expressing nucleotide sequence isolated from the Sargasso Sea
gatgccctgcgcgaagccgaatttacctactggatctacgaggggctgttcggccttggcgagtggacggccccccacctggtggccgagccgcccttcccgctcgacgccagcaccgcaaatcccaccaaggagcgcagccatgaaatttgacagcatcgttatcggcggcggcatggcgggcctctcggcggccctgcgcctggccgaggccggccagaagaccctgctgatggcctctggccagagcgccctgcacttctcctccggctcggtcgatctgctggagagcgagggggatccccgcgccgccctgcccgccttcatggccgccaaccccgagcatccctacaacaaggtggggctgacccatatcgcggcgagcctcgatgatctgcagcgccactgcgccgcgcagggattgccgctgtttcgccaggagcgcaaccaccagcggctgacccccatcggcaccctcaaagccacctggctctctcccgacacctgcgcctgtgtgaccgatgcgccggcccccgacgccatcctgctggccactctggagggatttcgcgactttcaccccgagctcgcggccgccaacctggcgacccacacccgtttcgcccactgccgcatcctgaccggggagctccgcctgccccagctggccgagttcagccgtaatccccacgagtttcgctccgccgacatcgcccgcctgttcgacaagcagggcaatggccagcgtgacctgctgacggatctggcccgcgagatcagccgcctggtgcaagagagcggtgagccgcgctgccaccacctggtgctgcccgcctgcctgtcactcgggctggtcggcccgcgcctggccgagctggagcaacgtaccggctgcatcatcaaggaggtggccaccatgccgccgtcactgatcggcatgcggatgcaggaggcgctcaagcgccgcttcatggcccttggcggcaccttcctcaccagcgagcgggtgctgggcgcccgttacgagggcgatcgcgtcatcggcgtgcacagccagaatggcgacgatcagctgttcgaggcggaccacttcgtgctcgcctccggcagcttcttcagccgcgggctggagtcccgcctgcgcggcattcgcgaacccatcttcaacgccgatgtgctgagcctgcccgagcgggacgcctgggccggccgccgcctgttcgaccaccaccccttcatgggcttcggggtcaagaccgacgacaagctcagagtgctgcgtggcggcaagccactcgccaacctctacggcgccggcagcgtgctggcgcactatgaccccattaaagaaggttccggctccggcgtggccgttgccaccgg

SEQ ID NO: 210137 - DNA, 652 bp, Unknown
  Bacterial polypeptide expressing nucleotide sequence isolated from the Sargasso Sea
gcgtaacgtcagccgtgggattgtactgttcgatcacgcccagcgtgacggactggaagggtttatcaccattaccggcggcaaactgatgacctaccgcctgatggcggagtgggccaccgatgccgtttgccgtaagctgggcaatacccagccttgcacaaccgcagacaccgcgttgcctggctcacaggaatctaccgagcatacgcttaaacgcgtgatctcattgcccgcgccactgcgcggctcggcagtctaccgtcacggcgatcgtaccccagcgtggctgagcgaaggccgtcaacatcgcagcctggtctgtgaatgcgaagcggtcaccgcaggcgaagtgcaatacgccgtcgagaatttaaccgtcaacagtctgctcgatttacgtcgccgtacccgcgtcggaatggggacctgccagggcgaattgtgtgcctgtcgcgccgcaggtttgctgcaacgttttaatgtcactaccgcagcacaatccattactcagctttccgacttcctcaacgaacgctggaaaggtgtgcagcctatcgcctggggagatgcactgcgcgaaagcgaattcactcgctgggtttatcaagggttgtgtggtctggagaaggagcaccaggatgaaatttga

SEQ ID NO: 210138 - DNA, 250 bp, Unknown
  Bacterial polypeptide expressing nucleotide sequence isolated from the Sargasso Sea
gatgaaatttgataccgtcattatcggcggcggcctcgctggactgctatgtggcctgcaactgcaaaaaagcggactgcgctgcacgattgttacccgcggccaaagcgccctgcatttttcctccggctcactggatttgctcagcagcttacccgatggtcaaccggtgacggatatagaagcgggtttgaatgcactgcacactcaggcacccgcacatccgtatagcaccatcgggaacgcagaa

SEQ ID NO: 210139 - DNA, 1153 bp, Unknown
  Bacterial polypeptide expressing nucleotide sequence isolated from the Sargasso Sea
aatgtctaaaaaatttgatttattcataataggtggcggtataaacggtgcaggtattgcaagagatgctgcaggtagaggtttatcagtttgtttagctgacaaaggtgagattggaggagcaacctcatcttggtcgacaaaattagtacatggtggtcttcgttatttagaaaattatgaattcaaactagttagagaatctctgaaagaaagagaaatagtttataaaattgccagacatatttccaaaccgattccttttataattccttatgcagataaaattcgaccagcctggttaattaaaattggtttatttttgtatgataatttaggtggcaaaagcaatataccaaaatcaaaaacgtttgatcttacaaaaaaattttcaaatattcttaagcaaaaatacaaaactggttttcaatattttgacatacaaattgacgataaaaaattaacgaaactaaatgctaaagatgcaaaaagaaataaagctaaaatactagaatataacaaagttaaaaaagctgaaattattggcaatgaatggattattagtcttgaaaaaggtgaaaaagtaaaatcaaaaattttaattaatgcatctggaccatggataaacgaaaccttaaataaaaatataaaaattaaatctaagaaaaaaataagattagttaaaggaagtcatattattacaaaaaaattgtacaaagaaaatgttgcattcacatttcaaaatactgataaaagaataatatttgtgataccttataaagggaagttttctttaattggaactacagaagttgaggttaaatcaccagaaaataaaggaatatcaaaaaaagaaattacatatttaattcgttcagtaaataattacttaaaaaaacaaatcagaacaaaggacattgtagatacttattcagggataagacctctaattgaagattttaatacagcttcaaaagtcacaagagattatgtttttgatttaaaaattataaaaaaattacctttattgaatatatatggaggaaaactaaccacctacagaaaattgtctgaaaaagtcctttttgaccttagaaagtttttacctaaaacaaaaaaaggtccatggacacacaaaaagaagcttctctaa

SEQ ID NO: 210140 - DNA, 1144 bp, Unknown
  Bacterial polypeptide expressing nucleotide sequence isolated from the Sargasso Sea
atgtatgatatttttattataggcggaggtattaatggagcaggaattgcaagagatgctagtggcagagacctaaaagtatacttggcagaaaaaggaaaggtaggttctgcaacatcctcctggtcatcaaaacttatacatggtggcttaagatatcttgagaactatgaacttaaactagttagagagtctttgaaagaaagagaaattattacaaatatcgcacctaacataacaaaatctattccgtttgtaattccgcatactaaaaaattaagatcaaaatttttaattagactcggattatttttatatgataatcttggtggtaaatcaaaaatacctaaatcatctaaaattaattttaataaaaagtatcaaaatatattacaatcaaagttttcagatggtttccagtattatgatgtccaagttgatgacaagaaattagtagaaatgaatatagatgatgcaaaaaaaatgggcgccattattgcagaagatacaaaagtaataaatgcaaatagaatagacaattattgggaaataactcttaataataaaaataaaataaaatcaaaaattttaataaatgcagcaggaccatggattaatgaaaccgttaacaatgtcctcaaaattaatgcaaaaaaatcaattaggcttgtaagaggaagtcacatcattacaaaaaaattatatgaagaggaagtagcgtttactttgcaaaatgatgataatagaattgtttttgtaattccgtataaagacgagtactctctcattgggacaacggaagttgatgttcattcaccagacaatccatcaatttctgatgaagagaaaatttatttaattaatacaattaataatcattttattaggcaaatttctcaagaggatattgttgatacgtactcaggtatacgtcctttgattgaagattttaaagaagcttcaaaagtaactagagactatgtttttgatttaaactgtgaggataataatgtacctttattaaatatttatggtggaaaacttaccacttatagaaagttatcagaaaaggtaatggaagaattatctccttatttacctgatactaaaacaagaaattggacagactctaaaccactataaa

SEQ ID NO: 210141 - DNA, 1153 bp, Unknown
  Bacterial polypeptide expressing nucleotide sequence isolated from the Sargasso Sea
atgtctaaagtattcgatttgttcataataggtggcggtataaacggtgcaggtattgcaagggatgctgcaggcagaggtttatcagtttgtttagctgacaaaggtgaaattggaggagcaacctcatcttggtcgacgaaattagtacatggtggtcttcgttatttagaaaattatgaatttaaattagttagagaatctttgaaagaaagagaaattgtttataaaattgctagacatatttctaaacctattccttttataattccttatgcagataaaattcgaccagcttggttaattaaaattggtttatttttctatgacaatttaggtggcaaaagtaatataccaaaatcaaaaacatttgatttaacaaaaaaatttccaaatattcttaaagaaaaatacaaaactggttttcaatattttgacatacaaattgacgataaaaaattaactaaactaaatgctaaagatgcaaaaagaaataatgctaaaatactagaatataacaaagttaaaaaagctgaaattattggtaatgaatggattattagtcttgaaaatgatgaaaaagtaaagtcaaaaattttaattaacgcatctggaccatggataaatgaaaccttaattaaaaatataaaaattaaatctaagaaaaaaataagattggttaaaggaagtcatattattacaaaaaaattgtacaaagaaaacgttgcattcacgtttcaaaatactgataaaagaataatatttgtaataccttataaggggaagttttctttaattggaactacagaagtggaagttaaatcaccagaaaataaaggaatatcaaaaaaagaaattagatatttaattcaatcagtaaataattacttaaaaaaacaaatcagaacaaaggacattgtagatacttattcagggataagacctctaattgaagattttaatacagcttcaaaagtaacaagagactatgtttttgatttaaaaattataaaaaaattacctttattgaatatatatggaggaaaacttaccacctacagaaaattgtccgaaaaagtccttattgatctcagaaagtttttacctaagacaaaaaaaggtccatggacagacaaaaagaagcttttttgaa

SEQ ID NO: 210142 - DNA, 1153 bp, Unknown
  Bacterial polypeptide expressing nucleotide sequence isolated from the Sargasso Sea
atgtctaaaatttttgatttattcataataggtggcggtataaacggcgcaggtattgcgagggatgctgcaggtagaggtttatcagtttgtttagctgacaaaggtgagattggaggagcaacctcatcttggtcgacgaaattagtacatggtggtcttcgttatttagaaaattatgaattcaaattagttagagaatctctcaaagaaagagaaattgtttataaaattgctaaacatatttccaaaccgattccttttataattccttatgcagataaaattcgaccagcctggttaattaaatttggtttgtttttgtacgacaatttaggtggcaaaagcaatataccaaaatcaaaaaaatttgatcttacaaaaaaatattcaaatattcttaaagaaaaatataaaactggttttcaatattttgacattcaaattgatgataaaaaattaacaaagttaaacgctcaagatgcaaaaagaaacaacgctaaaatactagaatataacaaagttaaaaaagctgaaattattaataatgagtgggtcattagtcttcaaaatggaaaaaaaataaaatcaaaagttttaatcaatgcatctggaccatggataaatgaaactttaaataaaaatataaaaataaaatctaagaaaaaaataagactggttaaaggaagtcatatcattacaaaaaaattgtacaaagaaaacgttgcattcacatttcaaaatacagataaaagaataatatttgtgttaccttataaagggaagttttctttaattggaacaactgaagtggaagtgaaatcaccagaaaataaagggatatctaaaaaagaaattagctatttaattaattcagtaaacaattacttaaaaaaacaaatcagaacaaaggacatcgtagatacttattcaggaatacgacctttaattgaagactttaattcagcttcaaaagttacaagggattatgtttttgatctaaaaattattaaaaaattgcctttattgaatatctatggaggaaaacttaccacctacagaaaattgtccgaaaaagttcttgttgatctaaaaaggtttttacctaagacaaaaaaaggtccatggacacacaaaaagaagcttttttgat

SEQ ID NO: 210143 - DNA, 1153 bp, Unknown
  Bacterial polypeptide expressing nucleotide sequence isolated from the Sargasso Sea
atgtctaaagtatttgatttattcataattggcggcggtattaacggcgcaggtattgcaagagatgcttctggaagaggtttgtctgtatgtttggctgataaaggtgaaattggaggtgcaacttcttcttggtctacaaaattaattcatggtggacttcgttatttagaaaattatgaatttaaattagtaagagagtcacttaaagaaagagaaattgtttacaaaattgcaaaacatatctcaagaccaatcccatttattattcctcataccgataaaattagaccagcctggttgattaaatttggtttgtttttgtatgacaatttaggaggaaaaaccaatattccaaaatcaaaaacatttgatcttaataaaaaatttccaaatattctaaaagaaaaatacaaaactggttttcaatattttgatattcaaattgatgataaaaaattaacaaaactaaatgctcgagatgcaaaaagaaacaaagctaaaattttagaatacaacaaagttaaaaaagctgaaattattaataatgagtgggtcataaatcttcaagatggaaaaaaaataaaatcaaaagttttgatcaatgcatctggcccatggataaatgatactttgaataaaaatataaaaataaaatctaaaaataaaatcagattagttaaaggtagtcacatcattactaagaaattgtataaagaagatgttgcatttacatttcaaaatacagataaaagaataatatttgtaattccttacaaaaaaaaattttcattaattggaacaactgaggtggaagtcaaatccccagaaaataatggaatatcaaatcaagaaattcaatatttaattaaatcagtaaataattatttaaaaaaacaaattaaaaaaaaagatatagtggatacttattcaggaataagacctctaatagaggattttaaagaagcctcaaaagttactagagattatgtttttgatttacacattgtgaaaaaattacctcttttaaatatttatggaggaaaacttactacatacagaaagttatctgaaaaagtcctcatagaccttaaaaagtttttacctaaaaccaaaaaaggcccatggactgataaaaagagacttttttaga

SEQ ID NO: 210144 - DNA, 1153 bp, Unknown
  Bacterial polypeptide expressing nucleotide sequence isolated from the Sargasso Sea
aatgtctaaaatattcgatttattcataataggtggcggtataaacggtgcaggtattgcaagggatgctgcaggtagaggcttatcagtttgtttagctgacaaaggtgagattggtggagcaacttcatcctggtcaacgaaattaatacatggtggtctacgttatttagaaaattatgaattcaaattagttagagagtctttgagagaaagagaaattgtttataaaattgctaaacatatttcaaaacctattccttttataattccttatgcagataaaattcgaccagcctggttaattaaaattggtttatttttgtacgataatttaggtggtaaaagtaatataccaaaatcaaaaacatttgatcttagaaaaaaattttcaaatattcttaaagaaaaatacaaaactggtttccaatattttgacatacaaattgacgataaaaaattaacgaaattaaataccaaagatgcaaaaagaaataacgctaaaatactagaatacaacaaagttaaaaaagctgaaattattggcaatgaatggattattagtcttgaaaatggtgaaaaagtaaagtcaaaaattttgattaatgcatctggaccgtggataaatgaaaccttaaataaaaatataaaaattaaatctaagaaaaaaattagattggttaaaggaagtcatattattacaaaaaaattgtacaaagaaaatgttgcgttcacatttcaaaatactgataaaagaataatatttgtaataccttataaagggaagttttctttaattggaacaactgaagaagaggtgaaatcacctgaaaataaaggaatatcaaaaaaagaaattagatatttaattagttcagtaaataattacttaaaaaaacaaataacatcaaaggacatcgtagatacatattctgggataagacctctaattgaagattttaaaacagcctcaaaagtcacaagagattatgtttttgatttaaaaattataaaaaaattacctttattgaatatttatggaggaaaacttaccacctacagaaaattgtctgaaaaagtccttattgatcttgaaaaatttttacctaaaacaaaaaaaggtccatggacacacaaaaagaagcttttgtaa

SEQ ID NO: 210145 - DNA, 1461 bp, Unknown
  Bacterial polypeptide expressing nucleotide sequence isolated from the Sargasso Sea
catggaaaccaaagatctgattgtgataggtggaggcatcaacggtgccggtatcgcggcagatgccgctggacgcggtttatccgtgctgatgctggaagcgcaggatttagcctgcgccacctcttccgctagctccaaactcatccacggtggcctgcgctacctggaacactacgaatttcgtctggtgagcgaagcgctggccgaacgtgaagtgctgttgaaaatggcaccacacatcgccttccctatgcgctttcgtctgccccaccgcccgcacctgcgtccggcgtggatgatccggattggtttgtttatgtacgatcatctgggcaaacgcaccagtttgccaagttctaccggtttgcgttttggcgcagattccgtaatgaaacctgagattgtgcgcggtttcgaatattctgactgctgggtagacgatgcacgactggttttggcaaacgcccaaatggtcgtacgcaaaggcggagaagtattaacccgcactcgcgccacctctgctcgccgtgaaaacggtttgtggattgttgaagctgaagatatcgataccggcaaaaaacacacctggcaggcgcgtggcctagtcaacgccaccggtccgtgggtgaaagagttctttgacgacggtatgcacctgccatcaccgtacggtattcgcctgattaaaggcagccacatcgtggtgccgcgcgtccatacccagaagcaggcttatattctgcaaaacgaagataaacgcattgtgtttgttatcccatggatggacgaattctcgatcatcgggacgacagacgttgaatacaaaggcgatccgaaagcggtgaaaattgatgaaagcgagatcaattacctgctgaaggtttacaacgcgcactttaagaagcaactgggccgtgatgatatcgtctggacttactcgggcgtgcgtccgctgtgcgatgacgagtctgactcaccgcaggcaatcacccgtgattacacgctggatatccacgacgaaaacggcaaagcaccgctgctgtcggtctttggcggtaagctgacgacctatcgtaagctggctgaacacgcgatggaaaaactggcatcgtactatcagggaattggtccggcgtggaccaaagagtgcattctgccaggcggtgacattggcggcgatcgcgaagactacgcggccaaactgcgccgtcgctacccgttcctgaccgagtcgctggcgcgccattattctcgcacctacggcagcaacaccgaatgggtcatcggcgaagccacctcgcttgccgagttaggtgaagactttggccatgagttttatgaggccgagctgaaatatctggtcgatcacgaatgggttcgtcgtgcggaagatgcgttgtggcgtcgcacgaaagaaggtatgtggctgaacgctgagcagcagtcgcgcatgaccca

SEQ ID NO: 210146 - DNA, 1153 bp, Unknown
  Bacterial polypeptide expressing nucleotide sequence isolated from the Sargasso Sea
catgaatgaaacttttgatattttaattattggtggaggtattaatggtgctggaattgttagagatgcatcaggcagaaatttaaaagtttgtttagttgaaaaaaacacagttggttcagccacttcatcttggtctacaaaattaatacatggcggattaaggtatcttgaaaattatgaatttcgccttgtacgtgaatctctcaaggaaagagaagtaattaaaaaaattgccagtaatataacaacaccattaccttttattataccttatcaaaaatctttaagacctaaatggttaattaaattaggattatttttatacgataatattggtggtaaaatgactataccaaaatcttcaactataaatattaaaaaggaaatgcctaatattttaaaagatcaatttaaaattggtttccaatattatgatttacaagttgatgataaaaaacttgttcagttaaatgttgaagatgcaaagaaaaaaggtgctacgattattcaaaatagaaaagtaatagatgcaaaacgaaataaaaatatttgggatataactttagatgataatactatacttaaatctaaaattcttataaatgctgccgggccttggataaatgaagttttaagcaatgtcattaaattaaattcaaataaatcaattcgacttgtaaaaggtagtcacataataactaaaagtctttacagtcagaaaaaagctttcactttacaaaatgaagataacagaataatttttgttataccttataaagatgaatattctcttattggcactaccgaaacagaagttttctcaccagaaaatccaaaaattgatgaaagtgaaattgattatttattaaattcagtaaataaatatttcattaaacaaatatcaagagttgatgtggtaagttcttattctggaattagaccacttattgaagatttcaaagaagcttcaaaagttacgagagactatatatttgatttaaatgaggatggttcacaggcaccattattaaatatctatggaggaaaactaacgacgtatagaaagttagctgaaaatgttcttttaactcttaataaacatattccaataaataaggaaaattcttggactgctaaacaaaaactataa

SEQ ID NO: 210147 - DNA, 1153 bp, Unknown
  Bacterial polypeptide expressing nucleotide sequence isolated from the Sargasso Sea
atgtctaaagtatttgatttattcataataggtggtggtatcaacggtgcaggtattgcaagagatgctgctggaagaggtttgtctgtttgtctagctgataaaggtgagattggaggagcaacatcatcttggtctacaaaattaattcatggtggtcttcgttatttagaaaattatgaattcaaattagttagagaatccttgaaggaaagagaaattgtttacaaaattgctagacatatttcaaaacctattccctttattattcctcatactgataaaattagaccagcatggttaattaaatttggtttgtttttgtatgacaatttaggtggaaaaaccaatattccaaaatccaaaacatatgatcttgcaaaaaaatttccaaatattcttaaagaaaaatataaaactggttttcagtattatgacattcaaattgatgataaaaaattaacaaaattaaatgctaaagatgcaaaaagaaataaagccaaaatacttgaatatagcaaagttaaaaaagctgaaattattgacaatgagtgggtcatcagtcttcaaaatagaaaaaaaataaaatcaaaagttttaatcaatgcatctggaccatggataaatgaaactttacataaaaatatcaaaatcaaatctacgaaaaaaataagactggttaaaggaagtcatataattacaaaaaaattgtataaagctgatgtagcttttacatttcaaaatacagataaaagaataatatttgttattccttataaaaaaaaattttcattaattgggactacagaaatagaggtaaaatctcctgaaaacaaagggatatctaataaggaaattaaatatttaattaattcagtaaacaattacctaaaaaaacaaatcagtaagaaagacattgtagatacctattcagggataagaccactaattgaagattttaaggcagcttcaaaagttacaagagattatgtttttgatctaaaaattattaaaaaattacctctattgaacatttatggaggaaaacttactacctacagaaagttgtccgaaaaagtcttaattgatctaaaaaagtttttgcctaagacaaaaaaaggaccttggactgacaaaaaaaagcttttttaga

SEQ ID NO: 210148 - DNA, 931 bp, Unknown
  Bacterial polypeptide expressing nucleotide sequence isolated from the Sargasso Sea
gcagggatcgcgcgcgactgtgcgcttcgtgggctgcacgtgacgttagtggaacgccatgatatcgccaccggggcgaccgggcgcaatcatgggctgttgcacagcggcgcgcgctatgccgtaaccgatggcgaatcggcccgggaatgcatcagtgaaaaccgcatcctgcgccgcatcgcccgccactgtattgagcccactaacggactgtttatcacccttcccgaggacgacctggcctggcagcagacctttatcagcgcctgtcagcagaccggtattaagacccgccagctgtcgccagcggaagcgctgcgtattgagccgaccgtgaatccgactctgctcggcgccgttcaggtccccgatggcaccatcgacccgtttcgccttacggcagccaacatgctcgacgcccgggaacatggcgcgaccattctgaccggttgtgaaattaccgggctcatccgccgtggagaacgcgtttgcggggtcgagttttatgatcatcaacagcgtgagagacgcacgctgtacgccggtgtcgtggtcaatgccgccgggatctggggacagcggatcgcggaatatgccgatctgcgcatcgccatgttcccggccaaaggatcgctgctgatcctcgaccaccgtatcaaccggcaggtcatcaaccgctgccgcaaacccgccgatgccgatattctggtgcccggagataccatttcgctgattggcacgacgtcggaacatatcccttacgacgaaattgatgacaaccgggtcacgacggccgaagtcgacaccctgctgcgggaaggggaaaaactggctccggtacttgggcgtactcgcgtgctgcgcgcctattccggcgtgcgtccactggtggccagcgatgatgaccccagcggacgcagcgtcagcc

SEQ ID NO: 210149 - DNA, 892 bp, Unknown
  Bacterial polypeptide expressing nucleotide sequence isolated from the Sargasso Sea
ttaagttccccggaagtgccggtctggccgctgtccgcgcagcgtatatgcgttgtagggattagcgggttactggattttcaggcgcatctcgccgcggcgtcattacgccaacgtaatctcagcgtcgagacggctgaaatcgaactgccggaactggatgttctgcgtgataacccaactgagtttcgcgccgttaatattgcgcgcctgctggataacgaagataaatggtcgctgctctatgacgcattactgccaatggcaaaaacctgcgacatgataatcatgccggcctgctttggtctggcagatgagcgactctggcagtggcttaacgagcgcctcccctgctcgctgacactgttaccgaccctacctccttcggtactgggcatgcgtttacacaacaaattgcagcgccagtttgtgcgccagggcggtgtgtggatgccgggtgatgaagtgaagaaaatcacctgtcaggacggcgtggtcagcgaaatctggacccgaaatcatgccgatatcccgttgcggccacgtttcgccgtgctcgccagcggcagttttttcagcagcgggctggtcgccacgcgtgaggcaatccacgaaccaatcctgggactggatgtacagcaaacagctacccgcgccgagtggtatcagcgtgatgttttcgatccacaaccgtggcaactgtttggcgtcacaaccgatgccacattgcgcccatcactggcgggaaaaacgatagagaacatgtacgccatcggttccgtcctcggcggattcgaccctatcgcccagggttgcggaggcggcgtgtgcgcagtcagcgccttacatgccgcacatcatattgcgaaacgtgcaggaggacagcaatgag

SEQ ID NO: 210150 - DNA, 753 bp, Unknown
  Bacterial polypeptide expressing nucleotide sequence isolated from the Sargasso Sea
aatgaaaactcgcgactcgcaaacaagtgacgtgattatcattggtggaggagcaacaggtgcagggatcgcacgcgattgtgcgctgcgcgggttgcgcgtcatcttagtggaacgccacgatatcgccacaggtgcgaccgggcgcaaccacggcctgctgcacagcggtgcacgctacgccgtcaccgatgctgaatctgcccgtgagtgcatcagcgaaaaccaaattctgaaacgtatcgcccgccattgcgttgagccaacggacggtctgtttattaccctgccggaggatgagctctcctttcaggcgacctttattcgcgcctgtgaagaggcagggattcgcgcagaagcgattgaccctcagcaggcacgtattatcgaaccttccgtgaatccacagctgattggtgcggtaaaagtgccggacggcacggttgatcctttccgcttaaccgccgccaacatgctggatgcgcgtgagcatggcgcggttatcttaacggcgcatgaagtcacgggacttctccgtgaaggggcaacggtttgcggcgttaacgtgcgcaatcatctgacgggcgaaatgcagtccctgcatgcaccggttgtggtcaacgctgccgggatctggggtcaacgcattgcggaatatgccgatctgagcatccgtatgttcccggccaaaggttcgttgctgattatggatcatcgcattaaccagcatgtcatcaaccgctgccgtaaacc

SEQ ID NO: 210151 - DNA, 412 bp, Unknown
  Bacterial polypeptide expressing nucleotide sequence isolated from the Sargasso Sea
atgtctgagttcaacgaacaaagcggaacaagaagagactttttatacgtaagtacagcggctgtgggagcgataacggttggaggagccatctggccgctcataaaccaaatgaacccatcagccgacgtaaaggccctagcgtcgatagaggtcgatgtggctggactagagccaggttcacaattgaccgttaagtggcttggaaaacccgtgtttatcagaagaagaaccaaagatgagatagaagccgcgagatcagttgatttggcccttttaccagatcaaacttccggaaacaaaaacataacagaatcagacgcttccgatgcgaacagaacaattgatcctgcaggtgaatggctcgtaatgataggcgtttgcacgcatttagggtgtgtgccattaggag

SEQ ID NO: 210152 - DNA, 477 bp, Unknown
  Bacterial polypeptide expressing nucleotide sequence isolated from the Sargasso Sea
attgaatacaaatacaaaaaataagccttcccccattgatgaggaaaaaagagattttcttttcatcactacagctggtttagcaatagctggaggaggagcttttgcttggtcaatgatcgacactatgaaccctagtaaagatgttcttgctttgtctaccactgaagttgacctttctccattagaagagggccaaagtctgaccgtaatgtggagaggcaaacctattttcattagacacagatcagaatctgaaattagttcagctgataatgtttcggtagatgacctgcctcacaaagaaacagatgaatctagagttaaaaaccctaaatggttagttgttgtcggcgtctgttctcacctaggatgtgttcctttaggtcaaaaagtaggagacagtaaaggagaatacggtgggtggttctgtccctgtcatggttctcactatgacacttctggaaggattaggaa

SEQ ID NO: 210153 - DNA, 400 bp, Unknown
  Bacterial polypeptide expressing nucleotide sequence isolated from the Sargasso Sea
atgattgttttccaccgactcgcagaatactcgacgacggcggtgaacagcggcgccgtcacgcgggcgctcaagacgccggctcactccatcgagtacgacgtgtccaaccatacggtggccaaggctggtgatccggataagcgcgcgttcacgtatttcgtcatgaccggtggtcgcatgatttacgccagcgccctgcgattggccgtcttgaagtttttgatgtccatgagcgcctcggcggatgtcttggccttggcgtccctcgaggttgacttgtccaaggtggagtcgggctcgacggtgacggtgaaatggcgcggaaagcccgtgttcattcgtcgacgcacgcccgcggaagtcgccaaggaggctgcggtggatgtcgcctctcttc

SEQ ID NO: 210154 - DNA, 127 bp, Unknown
  Bacterial polypeptide expressing nucleotide sequence isolated from the Sargasso Sea
ttggtttgtccatgtcatggttctcactatgatatatctggtagaataagaaaaggcccagcacctgaaaatcttgaagtgccaccatatagttttgtttctgaaaatgtaattaaaataggataaa

SEQ ID NO: 210155 - DNA, 934 bp, Unknown
  Bacterial polypeptide expressing nucleotide sequence isolated from the Sargasso Sea
tttcagaaaatgactgaaaatcctgaattcatcgatatggaattttctacatcttttgctgaaatttcatcatgggctcctctaataacaaaaaatagaaatccatctactaatattgctgctaccagaataggtagaggaactgatattaattttgaggctttaactaaagagtatttgtcattagtttctttaaacaaaaatgttgaaattagatacaaaacagaattagtaaatttaaagaaaattgataaaaaacaatgggaactagaaattagttcagaaggtagaaaatcttcaattagaactggctatgtttttcttggtgctggtggaaaaacaattaattatttacaaaaatcaaaaatcccagaaggaaaaaattatggtggatttcctgttagtgggaagtggcttatttgcgagaaaaaagatctaactgaaaaacataactcaaaagtttatggtaaggctgatattggatccccaccaatgtctgtacctcatttagataccagatggattgataataagaaacttcttttatatggaccttttgctggatttacaacaaaatttttaaagcaaagttcatacttagacttatttagttcaattaaaaagaataatattttttctatgttagacgttggtttcaagaataatgatttaattaattacttaatatcacaatcattaaagaaccataactcaagagttgaaaatttaaagaatatgatgccatcagctaattcgtctgattggtatttaaagaatgctggtcaaagagtccaaataattaaaaaaactgaagctggtggttctttgaaatttggaactgaggttgtgaattcatctgatggatcattatctgctttgttaggggcatctcccggagcaagtaccgcggtctcaattatggtgaggttctaga

SEQ ID NO: 210156 - DNA, 392 bp, Unknown
  Bacterial polypeptide expressing nucleotide sequence isolated from the Sargasso Sea
aatgagcaaagaagaaaagaaagttaatcgaagagattttttatttactgcaagttataccgttggggcagtaggtgtaggggcagttatttggccaatgatcgatcaaatgaacccagataaagcccaacaggcattagccactactgaagttgatattagcaacattgagcctggtaaatcaatcacagttttatggagaggtaagccagtttttttaaaaagaagaacacctgaggaaatagcagaggctagagcagtaaatatggacgatttgcctgatcctcaaaaggatgaagaaagggtaaaagagggcaaagacgaatggttagtcatgttaggtgtctgtacacaccttggatgcgtgcctttaaaagacaaaggagacttta

SEQ ID NO: 210157 - DNA, 403 bp, Unknown
  Bacterial polypeptide expressing nucleotide sequence isolated from the Sargasso Sea
catgagcaactcaaataaaccatcaaacagaaggaaatttttaaccaatcttactcaaataatgggtggtgttggtggtgtttttgctctaatcccttttctatctacaatgtctcctagtgagaaagcaaaatcagcgggtgcccctgttgaaattgatgtttctactttgatgcctggatcttataaagttgtagaatggagaggtaaacctgtatgggtagttaggagaactgaagagatgatactaaacacacttgagaatgatgaaattttaagtgatccgaattctcttgaggaacatcagcctagttacacccaaaataaatatcggtctataaatcctgaatttttagtgttgcttggagtttgtactcatcttggttgctcaccattatacaaa

SEQ ID NO: 210158 - DNA, 655 bp, Unknown
  Bacterial polypeptide expressing nucleotide sequence isolated from the Sargasso Sea
catggagacaaaactaattgatgtgatgggaactgacctgactgtagtaaatgcagccagagtttcctttggaaagaagaaagagaagtttgaaaaaggtgatgagaagttaataaagtatcttgcaaaacacaatcattggagcccttttggacattgtatgttgcaattccatataaaggctcctgtattcgttgcaagacaacttgtcaaacaccaaataggattggtctggaatgagattagtagaaggtacgttgatactgaaccagaattctatgaggtggacaagtggagaggtaaaccgatagataagaaacaggggtcagatggagaagtggagaaacaaggctcctgttatcactcaaaacaaatggtagaaaataatgcaagaattgcatataatagtctactagatgcaggagttgcaccagaacaagctagaatggtactaccacaatcactaatgacagaatggtactggtctggttctctttatgcatttgcaagagtatgtaatttgagatgtgcaaaagattcacaatatgaaaccagattgatagcgaatgaaatagataaacaatgcgagataaaattccctgtgtcatggaaggaattaaggacatgggtagagaaagatacacagaacacttaa

SEQ ID NO: 210159 - DNA, 571 bp, Unknown
  Bacterial polypeptide expressing nucleotide sequence isolated from the Sargasso Sea
atgtcagaagttgatcttaaaaagaggcgtttactacaaagcgccggtgcatggggtgtgctgggtgctgtaggcgcagccgttccttttttacaatcacttaatccgagtagagtcacccgtttgaaagggatgcctgtagaggtggatgtgagtaatatgtctgatgggcagcagaaaacagtaatgtggcgagggaagcctgtatggattatcaagcgctctaaagaaatgctgacttctttagatgtgctaaagggtaatctgaaagaccctagctcagaatcatcatcacaacctagttatgctcaaaaccagtatcgatctgttgaccctaactacctagtcttgttgggtgtatgtacgcatttggggtgtgcacctacgtatcgaccagaaaaaggggcaattgatagtgagtggcagggtggctttttttgttcgtgtcatggctctaagtttgatttagctggacgggtgtttgaaggagttccagcgcctactaatttagaagtacccccacatcattttcaagaaggttctttggtgattggagaagatggtgagtgat

SEQ ID NO: 210160 - DNA, 365 bp, Unknown
  Bacterial polypeptide expressing nucleotide sequence isolated from the Sargasso Sea
tatggataaatcagataaaaaaacaacgagaagagactttttatttaccactagttacacagttggtgcagtaggcctaggagccgtcatatggcctttaatagaccaaatgaatcctgatagagctcaaaaggctttagcaaccactgaagttgatataagtcaaattgagcctggcaaatctataactgttttatggagaggcaaacctgtttttttaaaaaggcgaactcaggaagaaattttagaagcaagatcagtttctctagaagatcttcctcatccagaaaaagatgaagaaagagtaaaaagtggaaaagatgaatggctcgttatgttaggagtctgcacacatcttgggtgtg

SEQ ID NO: 210161 - DNA, 370 bp, Unknown
  Bacterial polypeptide expressing nucleotide sequence isolated from the Sargasso Sea
tatgcctgaagaaaaaaaaactaaaagaagagattttttatttaccgcatcatatacagttggagctgttggaattgctgcatcagtatggccattagtagatcaaatgaacccagatacttctgttaaagcattagctagtacagaagttgatgtaagttcgctagagcctggaaattcaataacagttttatggagggggaaacctgtttttataaaaagaagaacacaaaaagaaattgctgaagcaagagatgtaaaattagaggatctgaaacatcctgaaaaagatgaggatagagcaaagaatcctgaatggctggtaatgctaggagtatgcactcatcttggatgtgtgcctttaggagat

SEQ ID NO: 210162 - DNA, 123 bp, Unknown
  Bacterial polypeptide expressing nucleotide sequence isolated from the Sargasso Sea
tttgcccttgccatggatcacattacgacacctcaggcaggatcagaaaaggacccgcaccaacaaacttagaagttccaaaatatgagtttgtaaacagtaacctaattaaaataggataat

SEQ ID NO: 210163 - DNA, 140 bp, Unknown
  Bacterial polypeptide expressing nucleotide sequence isolated from the Sargasso Sea
agattataacgcttggttctgcccatgtcatggctcacattatgatacgtcaggaaggattagaaagggaccagctccaacaaacttagaaatacctaaatatgaatttgtagacaataatataattaagatagagtaat

SEQ ID NO: 210164 - DNA, 373 bp, Unknown
  Bacterial polypeptide expressing nucleotide sequence isolated from the Sargasso Sea
atgagcaaagaagaaaaaaaagttaacagaagagattttttatttacagctagctatacagtaggagctgtaggggttggagcagttatttggccaatgattgaccaaatgaatcctgataaagctcaacaagctttggctactacagaagttgacgttagtagtatagaacctggcaaatctgttacggttttatggagaggaaagccaatatttataaaaaaaagaacttcagaggaaatagcagaggctagggccgtaaaattggacgatttgcctgatcctcaaaaagatgaagatagagtaaaagagggtaaagatgaatggttagttatgttaggagtttgtacacatcttggatgtgtgccttaaa

SEQ ID NO: 210165 - DNA, 109 bp, Unknown
  Bacterial polypeptide expressing nucleotide sequence isolated from the Sargasso Sea
ctgagcagcaaagcattaggatgtgttccattatcagataaaggtgaatacgatggttggttttgcccatgccatggatctcactatgatacctcaggaagaataagga

SEQ ID NO: 210166 - DNA, 122 bp, Unknown
  Bacterial polypeptide expressing nucleotide sequence isolated from the Sargasso Sea
ctgcccatgtcatggttcacactatgatacatctggaagaataagaaagggtccagcccctaccattttagaaattcctgactatgtattccttaatgataacactattaaaattggataaa

SEQ ID NO: 210167 - DNA, 391 bp, Unknown
  Bacterial polypeptide expressing nucleotide sequence isolated from the Sargasso Sea
atgtcagatcaaaaaaaaccaaaaagaagagattttttgtttacagcctcatatgcaattggagcagttggaattggtgcagcagtttggccattagtggatcaaatgaatccagacagatcggtaaaagcacttgccagcacagaggtagatgttagctcattagaacctggaaaatcgataacagttctttggcgaggaaaaccagtttttataaaaagaagaacacaagacgaaatagcagaagcacgatcagttgatttaaaagatcttccacatcctgaaaaagatgaagatagagcaaaaaaccctgagtggttagtaatgttaggggtttgtacccatctagggtgtgtgcctcttggagataagggtgaatacaatggttggt

SEQ ID NO: 210168 - DNA, 391 bp, Unknown
  Bacterial polypeptide expressing nucleotide sequence isolated from the Sargasso Sea
atgcaagaaaaagataagacaagaagaaaagttttgattggcttaacaagcgctgtaggtttatcaggcttgccttttgctgcaacgccttttatagctgcatggaacccaagtgcaaaagctaaagctgctggagcacctgttaaattagatgtatcaaagatgcaatatgggcaacaaattcaagtggcatggagaaaacaacctgtttttattgttaggcatactaaagaaagtcttgccagtttagatcttaccttgcctaaattagctgatccgaactctgatcagattgttgagctatacaaaggattaaatccttcaagatctaaaagtcctgaatattcagttatgtcaggagtatgcacacatcttggttgtgctccaaaat

SEQ ID NO: 210169 - DNA, 124 bp, Unknown
  Bacterial polypeptide expressing nucleotide sequence isolated from the Sargasso Sea
ttttgtccttgtcatggttctcactatgacacatctggcagaataagaaaaggtccagcaccaacaaatatggaagttccgaaatacgtatttgttaatagtacaactataaaaataggttaga

SEQ ID NO: 210170 - DNA, 158 bp, Unknown
  Bacterial polypeptide expressing nucleotide sequence isolated from the Sargasso Sea
attaacaaataaaggagactatgagggtggatggttctgcccttgtcatggttcgcattatgatacctctggtagaattagaagtggacctgcacctactaatttagaggttcctgagtacaaatttgtggatagcaatacgattaaaataggataaa

SEQ ID NO: 210171 - DNA, 583 bp, Unknown
  Bacterial polypeptide expressing nucleotide sequence isolated from the Sargasso Sea
atgcaagataaagataaaactagaaggaaagtattaattggcctaacaagtgcagttggtttgtcaggtttaccatttgctgcaactccatttattgctgcatggaatccaagtgcaaaggcaaaagctgcaggtgcggcagttaaattggatgtttctaagatgcaatacggacaacaaatacaagtttcatggagaaaacaacctgtttttattgtaagacatactgaagaaagtattgccagcttagatttggctttaccaaaattagcagatccaaatagcgatcagattgaagaaccttacagaggtctaaatccatctagatcaaaaagtccagagtattcagtattttcaggtgtatgtactcatttgggttgcgcaccaaaatattttcctgaaattgaacctaagccttgggacgcttcatggaatggtggatttttttgtccttgccatggttcaatgtttgatattgttggaagagtttttaaaggagttcctgcaccaacaaatcttatagtaccaccccatatgttcgatggaagtatattaacaattggagaggataaggagttataaa

SEQ ID NO: 210172 - DNA, 151 bp, Unknown
  Bacterial polypeptide expressing nucleotide sequence isolated from the Sargasso Sea
atctgataaaggagagtataatggttggttctgtccatgccatggttcacattatgatacttccggaagaataagaaaaggacctgcgccaacaaatatggaagtgcctaaatacgaatttgtaaatagcaatacaataaagataggttaa

SEQ ID NO: 210173 - DNA, 514 bp, Unknown
  Bacterial polypeptide expressing nucleotide sequence isolated from the Sargasso Sea
atggataaatcaggaaaaaaagacagaagagattttctttttactgcaagctatacagttggggctataggtataggtgcaacagtttggccctttattgaccaaatgaatcctgatagttcagtcaaagcacttgcctcaaccgaagttgatctaagccaaattcagccgggaaaagcaataacagttttatggagaggtaaaccagtttttatcaaaagaagaacctccgaagaaatcgctgaggcaaaaaaagttaatttagaagatttaaaacatccagaaaaggatgaagatagagttaaaaaagaggaatggttagttatgttgggcatttgtacacatcttggctgtgtgcctttatcagataaaggtgatttcaacggttggttctgtccgtgtcacggatctcactatgatacgtctggaaggataagaaaaggaccggcaccaacaaatatggaagtaccaaaatatgaatttgttgataacaacacaattaaaattggataat

SEQ ID NO: 210174 - DNA, 446 bp, Unknown
  Bacterial polypeptide expressing nucleotide sequence isolated from the Sargasso Sea
aatgtctgatattaatgaccaaccgactaggcgagattttatccatgttgctagtgtctcggcagcggctctcggtgcagcttgcgtcgcgtggccactaatcgatcaaatgaatccagctgcagacacgttggctctttcaacaactgaatttgatgtctcaggagtccaggaagggatgtccgtatctgttgtgtggcgcggaaaacctgtgtttgttcggcatagaacaaaagcagagatagaagaggccgcagcagtcgagttatcagacttgccagatccacaaactgatgctgatcgtactccgcgacccgaaatacttgtgttgctaggtgtatgtactcacctaggttgcgtcccactaggtcaaaaagcaactgacccgaagggtgaatggggggggtggttttgtccatgtcatggatcgcattacgatacatcgg

SEQ ID NO: 210175 - DNA, 368 bp, Unknown
  Bacterial polypeptide expressing nucleotide sequence isolated from the Sargasso Sea
aatggaagaagacaaaaaaactaaccgaagagattttatatttacagcatcatacgcgctcggcgcagtaggagtaggggcagctgtgtggccattaattgaccaaatgaatcctgatgcatctgtaaaagcactcgcgagcacagaagtagatataagtggagtggaaaaaggtcagtcaataactgttctttggagaggtaaaccagtttttataagaagaagaacggatgaagaaattgaaaaagccaaagatgtaaaattagaggatctaccacatcctgaaacagatgaagagagagcaaaaaatcctgaatggttagttatgttaggtgtttgtactcacctgggttgtgttcctttaggag

SEQ ID NO: 210176 - DNA, 399 bp, Unknown
  Bacterial polypeptide expressing nucleotide sequence isolated from the Sargasso Sea
aagtttcatggagaaaacaacctgtttttattgtaagacatactgaagaaagtattgccagcttagatttggctttaccaaaattagcagatccaaacagtgatcagatagaagaaccctatagaggtctcaatccatctagatcaaaaagtccagagtattcagtattttcaggtgtatgtactcatttaggttgcgcaccgaaatattttcctgaaattgaacctaagccatgggatgctacatggaatggtggatttttttgcccttgtcatggatcaatgtttgatattgttggtagagtttttaaaggagttcctgcaccaacaaatctcatagtaccaccacacatgtttgatggaagcatattaacaattggagaggataaggagttataaa

SEQ ID NO: 210177 - DNA, 250 bp, Unknown
  Bacterial polypeptide expressing nucleotide sequence isolated from the Sargasso Sea
aagaatccagaatttttcattgttgaaggagtatgcacccatcttggatgcgctccgattgagaagtttgcaattgcacctgcggatatgggcccagattggaagggtggtttttattgcccgtgccacggatcaaagtttgacttatcgggaagagtttatgctggcgtcccagctccatcaaatctgagggtcccagctcatcaatttattgacgaaaccactttacttgtgggcgagaatagttaag

SEQ ID NO: 210178 - DNA, 583 bp, Unknown
  Bacterial polypeptide expressing nucleotide sequence isolated from the Sargasso Sea
atgcaagataaagataaaactagaagaaaagtgttaattggtttaacaagtgcagttggattgtcgggtataccttttgcagcaaccccttttatagctgcatggaatccaagtgcaaaagcaaaagctgcaggcgcaccagtaaaacttgacgtatctaaaatgcaatatggtcaacaaatacaagtttcttggagaaaacagccagtgtttatagtgagacatacagataatagtcttaaaagtttggatctttcagtatcaaagttagctgatccaaattctgatcaaattgaagagccatatagaggtttaaatctttcaagatcaaagagtcctgaatattcagtattttcaggagtatgtactcatttaggctgtgccccaaaatattttccagagattgagccaaagccatgggatgcttcttggaaaggtggatttttctgtccatgtcatggttcaatgtttgatatagttggaagagtttttaaaggtgttcctgctccaacaaacttgttggtaccaccacacatgtttgatggaagtattttaacaattggagaggatagggagttataga

SEQ ID NO: 210179 - DNA, 577 bp, Unknown
  Bacterial polypeptide expressing nucleotide sequence isolated from the Sargasso Sea
aatgtcagagaatcttaatagaagaaagtttttatcaattgctacgagtgttaccagcgctgttggaggaatatttgctctaggagcttttgtttcaacttttcagccaagcaagaaagcaaaagcacttggtgcatctattagagttagcctatcaaaattagagcctggctcgatcataaaggtaatttatagaggcaaacccatatgggttttacgaagaactgagcaaatgatcaatgagctcgataatgaaaactctaacctaagagatcctgaatctgacttatctgttcagccagattttgctaagaatagatttcgatcaaagaacccagaattttttgttgttgaaggtgtttgcactcatttgggttgtgctccaattgagaagtttgcgattgctcctgcagacatgggtccagactggaaaggaggtttctattgtccatgccatggatcaaaatttgatttatctggaagggtgtatgctggcgttcctgctccatcaaatctaagagttccagctcatcaatttattgacgaaaccactttattagtcggcgagaatagttaa

SEQ ID NO: 210180 - DNA, 514 bp, Unknown
  Bacterial polypeptide expressing nucleotide sequence isolated from the Sargasso Sea
tatgagcaaagaaattaagcctaaaaggagagattttttgtacacggctacctatacaattggtgccgtaggtctgggcgcaactatatggccgttagtagatcaaatgaatccagattcttcagtaaaagcgctatcaactacagaaattgatattagcagcattgaagcaggaaagactattacagtcttgtggagaggaaaaccaatatttattagaagaagaacaaaaaaagaaattagtgaagcatctaaagttgatttgaaagacttaaaagatccagaaaaagattccgacagaactaaaaatccagaatggttagtaatggtaggggtatgcactcatcttggttgtgttcctttaggagacaagggagaatataaagcatggttttgcccatgtcatggttcacactatgatacttctggaagaattcgaaaaggacccgctccaaaaaatttagaaatacctaagtatgaatttgtaaatagtagcacaatcaaaataggttaa

SEQ ID NO: 210181 - DNA, 407 bp, Unknown
  Bacterial polypeptide expressing nucleotide sequence isolated from the Sargasso Sea
gaatcctgatgcatcagtaaaagcattagcgagtacagaggtagatattagttcagttgagccaggaaatacaataactgtactttggagaggtaaaccagtttttatcagaagaagaactcaagatgaaatttctgaagcaagatcagttaagttggaagaattaccacatccagaaaaagatgaggatagagctaagaatccggaatggttagtaatgttgggaatatgtactcatttaggctgtgttcctttaaatgataaaggtgactacgatggatggttttgcccttgtcatggttcacattacgatacatcgggaagaataagaaaaggacctgcaccaacaaatatggaagttccaaaatatgagtttgtaaattctaacacaattaaaattggataaa

SEQ ID NO: 210182 - DNA, 394 bp, Unknown
  Bacterial polypeptide expressing nucleotide sequence isolated from the Sargasso Sea
ctcatggagaaagcaaccagtgtttattgttaggcacactaaagaaagcatagccaacttagaacttggtttaacaaaacttgctgatcctaattcagatcaaatagaagagccttataaaggactcaatccatcaagatcaaagagtccagaatattcggtcttctcaggagtttgtacacatttaggctgtgctcctaaatattttccagaggttgagccgaagccttgggatgcgacatggaatggaggatttttttgtccgtgtcatggttcaatgtttgacatagtcgggagagtttttaaaggtgttccagcgccaacaaatttaattgtgccacctcatatgtttgaaggaagcattttaacaattggagaggataaggagctataa

SEQ ID NO: 210183 - DNA, 469 bp, Unknown
  Bacterial polypeptide expressing nucleotide sequence isolated from the Sargasso Sea
aatgcaagaaaaagataagacaagaagaaaagtattaattggcttaacaagtgcagttggattatctggtattccttttgcagcaacgccatttattgcagcatggaatcctagcgcaaaagcaaaagcagctggggctccagtaaaacttgatgtatcaaaaatgcaatttgggcagcaaattcaagtttcatggagaaagcaaccagtgtttattgttagacatactgaagaaagcattgccaacttagaacttggtgtaaccaaacttgctgatcctaattcagatcaaatagaagagccatataaaggactcaacccatcaaggtcaaagagtccagaatattcggtcttctcaggagtttgtacacatttaggttgtgctcctaaatattttccagagattgagcccaagccttgggatgcaacatggaatggaggattcttttgtccatgtcacggttcaatg

SEQ ID NO: 210184 - DNA, 577 bp, Unknown
  Bacterial polypeptide expressing nucleotide sequence isolated from the Sargasso Sea
tatggagaaggtaggagtgactgactcagaatcccaagaaaacgatagtagccctcacgaggaaacacgtcgtgattttttgatgatttcaactgtttctgttggtgctattggagcgggtcttgctgcttggccatttatagacttgatgaacccctcaaaagacgttttagccctcgcatccacggaaattgatctgtcaggtatagaagaagggcaatcaattaccgctatgtggagaggaaaacctattttcatcagaagaagaaccgatagggaaataaatgaggcacagacagtaaagctgtctgatttgaaagatcccgaaacagatgatcaaagagttaaaaaaggaaagtctcaatggctagttatggtcggcatatgcacccatcttggttgtattccgatgggtaataagtcaggacaaacaagaggagaatataatggttggttttgtccttgccatggatcccattacgatacttccgggcgaattagaaagggtccagcacccaaaaattttcctataccaccctacaaattcttatccgataatactatattgattggatag

SEQ ID NO: 210185 - DNA, 586 bp, Unknown
  Bacterial polypeptide expressing nucleotide sequence isolated from the Sargasso Sea
atggaagaaaaaaataccacgcgaagaaaagtactcataagtatgacctcagctgtcggcgcagtcggtgcatcattcgcagttgttccatttatcgcttcctggaatccaagtgcaaaagctaaagcagttggtggtcctgtaaaagttgatgtttcaaaaatgcaggttggacaaaaaattcaggtttcttggagaaagcagccagtttttgttatccgtcatagcaaagaagcattggcaggtctttcaaaagttgaatccaagctagatgatccaagttcgttaaagattgatgagccatatagagatgtgaatccaacaagatcaacatcaaatgaatatactgtaattgctggagtttgtacccatctcgggtgtgctccaaaatattatcctgaaatggaatctcagccttgggatgagtcttgggttggtggatttttctgtccttgccatggatcaatgtttgacattgttgggagagtattcaaaggagttcctgctccaactaatttaaaggttccgccacattattttgacggaagtatattaacaataggggaagaaagaggcactgcataat

SEQ ID NO: 210186 - DNA, 361 bp, Unknown
  Bacterial polypeptide expressing nucleotide sequence isolated from the Sargasso Sea
aatgtcagacaaaaagccaaaaagaagagaatttctatttactgcatcttatgctgtaggtgcggttggtcttggtgctgctgcatggcctctagtagaccaaatgaacccagatgcttcagttaaagcattagcaagtactgaggtggatgtaagttcagtccaacctggaaacacgattacagttctttggagaggaaaaccagttttcattagaagaagaacaaaagaagagattgaagaagcaagatctgttaaaatggaagaattaattcatccagaaaaagatgaggatagagcaaaaaatcctgaatggttagtcatgcttggggtttgtactcatttaggatgtgtgcctttg

SEQ ID NO: 210187 - DNA, 514 bp, Unknown
  Bacterial polypeptide expressing nucleotide sequence isolated from the Sargasso Sea
aatgtctgacaaaaaaaagattcatagaagagacttcatattcactgcctcttatgcccttggtgcagtaggagttggttcagttgtttggccactggtagatcaaatgaatccagataggtcggttaaagctcttgcaagtactgaagtagatattagttcactagagccgggaaaatcaattacagttttatggagaggaaagcctgtttttattaaaagaagaactcagaaagaaattgaagaggcaagaaatgtaaaaattgaggaccttccacatccagaaaaagatgaggatagagcaaaaaatccagagtggttagtaatgttaggaatatgtacacatctaggatgtgtaccacttggagacaaaggtgagtacaacggatggttttgtccatgtcatggctcacactatgatacatcaggcagaataagaaaaggtccagctccaacaaatttagaagttcctaaatacgaatttgtaaataacaacacaattaaaattggttaa

SEQ ID NO: 210188 - DNA, 136 bp, Unknown
  Bacterial polypeptide expressing nucleotide sequence isolated from the Sargasso Sea
gtttaacggttggttttgtccatgtcatggttctcattacgacacatcaggacgaattagaaaaggtcctgcacctgaaaacctggcggtacccaaagccgtctttgttgatgatactactatcaagttaggataa

SEQ ID NO: 210189 - DNA, 371 bp, Unknown
  Bacterial polypeptide expressing nucleotide sequence isolated from the Sargasso Sea
agaggtagatataagccaaattgacccaggaaaatcgattacggttttgtggagagggaagccagtctttataaagaggagaacagactcagaaatttccgaagcacaatcagtaagtttagatgatctaaaacatcctgaaaaagatgaagatagagttaaaaaagcagagtggttagttatgatgggaatttgttctcatcttgggtgcgtacctctttctgataaaggggaatacaatggatggttttgtccttgtcatggatctcattacgatacatcaggcaggattagaaaaggtccggccccaacaaatatggaaattccaaagtatgcttttgttgatgaaaatacaattaggattggataat

SEQ ID NO: 210190 - DNA, 199 bp, Unknown
  Bacterial polypeptide expressing nucleotide sequence isolated from the Sargasso Sea
tggcttgttatgcttggagtttgtactcacttgggatgtgttcctttaacagacaaaggcgattacaatgcttggttttgtccttgtcacggttcgcactatgatacttcaggaagaataagaaagggacccgctccaacaaatttagaaattccaaaatacgtatttcttaatagcacaactattaaaataggataaa

SEQ ID NO: 210191 - DNA, 130 bp, Unknown
  Bacterial polypeptide expressing nucleotide sequence isolated from the Sargasso Sea
ggttggttctgtccttgtcatggttcgcattatgatacttctggaaggattaggaaaggtccagcaccgcttaacttagaaattcctccttatgaatttgttagtgacgatattataagaataggttaaa

SEQ ID NO: 210192 - DNA, 562 bp, Unknown
  Bacterial polypeptide expressing nucleotide sequence isolated from the Sargasso Sea
aatggaagataatagcgaagataaaaaaggaaatagacgggactttttatatatctcaacagctgctgtcggggcggtaacagttggagctgctgtttggcctttggtcaatcaaatgaacccttccgccgatgttgcagcgttatcatctatagaggtggatctcaatgacttggagccgggatcacagctaacagtaaaatggttgggaaaacccgtttttatccgaagacgtacagacgaagagatttctgctgcacgagaggtaaactttgaggacttgcctgataagagcgcacaaaacgcaaacataaaagatggcgatgcatcagataaattcaggacaattgatgaaaaaggcgaatggctagtaatgatgggagtatgtacacatctaggatgtgttccacttggcgacgcaggggattttgggggatggttttgtccctgccatggttcccactatgacacagcaggtaggatcagaaggggtccggctcctacaaacttacccattcccgttgcatcgttgtccgatgacggaatattaaaattaggttaa

SEQ ID NO: 210193 - DNA, 514 bp, Unknown
  Bacterial polypeptide expressing nucleotide sequence isolated from the Sargasso Sea
tatgagtaaagaaattaagccaaaaagaagagattttttgtttacagctacatacactattggagctgttgggctaggtgcagcagtctggccactaattgatcaaatgaatccagattcctctgtaaaggcactttctacaactgaagttgatataagtaatgtagaacctgggaaaactataacagttttatggagagggaagccaatatttattagaagaagaacccaaaaggaaattgaagaagctgcaaacgtagatttaaaagatttaaaggatccagaaaaagattctgacagagcaaaaaatccagagtggttagttatggttggggtttgcacgcaccttggctgcgttcctcttaatggaaaaggagagtacaatgcttggttttgcccttgtcatggcacacattatgatacttcaggtagagttcgtaaaggacccgcaccaaaaaatttagaaattcccaaatacgaatttgttgataacagtacaattaaaataggctaa

SEQ ID NO: 210194 - DNA, 368 bp, Unknown
  Bacterial polypeptide expressing nucleotide sequence isolated from the Sargasso Sea
gatgtctgaatcagataacaaaaagcccaatagaagagattttattgtaacagcaacaactgcggctggtgcagtgggagtaggagtagcagcttggccattaattgaccaaatgaacccagacgcatcagtaaaagctttggcaagcaccgaagtggacataagtgaagttcaaccaggccaatccataactgttttgtggagaggcaaaccagtatttattaaaagacgaacaaaggaagagatagacagcgcaagagcggtagatttaaaagatttgaaacatccagagaaagatgaagatagagcaaaaaatccagagtggcttgtaatgctaggagtatgcactcatttaggatgcgtgcctt

SEQ ID NO: 210195 - DNA, 427 bp, Unknown
  Bacterial polypeptide expressing nucleotide sequence isolated from the Sargasso Sea
tggccaattgtaagtcaaatgaatcctgactattctgtaaaagctatgtccacagtcgaagttgatattagcaaggttgataagggtaaagaaattacagtaatgtggagaggtaagccagtatttatcaaaagaagaactgaggatgaaataacgaaagcaagaaatatcagtttagaggaattgcctcatcctgagaaagataaaaaaagagtaataaaagatgagtggttagttgtagttggtatatgtactcatctaggatgtgttccaataaacggcaaaggggaatatggtggttggttttgtccttgtcacggttcgcattatgatacctctggaagaattagaaagggtcccgctcccacaaatttggaggtaccaaaatataagtttgttggaaaggataaaataattataggataaa

SEQ ID NO: 210196 - DNA, 160 bp, Unknown
  Bacterial polypeptide expressing nucleotide sequence isolated from the Sargasso Sea
gtacctttatctgacaaaggtgaatataacggttggttttgtccgtgccacggatcgcactatgatacatctggaagaattagaaaaggacctgctcctaccaatatggagattcccaagtatagttttgtagacgataacacaattaagattggataaa

SEQ ID NO: 210197 - DNA, 357 bp, Unknown
  Bacterial polypeptide expressing nucleotide sequence isolated from the Sargasso Sea
gcgcagtagaacctggtcaatcaataaccgttttgtggagaggtaaaccagtttttattaaaagaagaactaaagaggaaatcgacagtgcaagagctgtagatttaagtgaattgaaacatccagaaaaagatgaggacagagcaaaaaaccctgagtggcttgtaatgttaggagtatgcactcaccttggatgtgtacctttaactgataaaggggactatggtgcatggttttgtccatgtcatggttcacattatgatacatctggaagaattagaaaagggccagcacctactaatatggaagtgccaaaatatgaatttgtaaatagcaatactataaagattggataaa

SEQ ID NO: 210198 - DNA, 335 bp, Unknown
  Bacterial polypeptide expressing nucleotide sequence isolated from the Sargasso Sea
aaacgaactaagagatcctggttcagatttatcggtacaaccaaattttgctaagaatgaattcagatctatgaagccaaaatatttggttgttgaaggcgtttgcacacatcttggttgtgctccaattgaaaaattctctgtagcacccacagatatgggtccagactggaatggaggattttattgtccttgtcatggttctaagtttgatctatcaggtagagtttatagcggtgtaccagcaccttctaatctaagagttccccctcacagatttgaaaatgattcaatacttgttgtgggagagaacccaggtgaagctgatgtctgaa

SEQ ID NO: 210199 - DNA, 517 bp, Unknown
  Bacterial polypeptide expressing nucleotide sequence isolated from the Sargasso Sea
tatgaataattcaggaaaaaaaaataatagaagagattttctatttaccgcaacttacacaattggtgcagtgggcataggtgcaacaatttggccatttgtagaccaaatgaacccagatagttctgtaaaagcattggccaccacagaagtagatataagtcaaattgagccaggaaaatcgatcacagtcctatggagaggcaaacctgtattcattaaaagacgaacacagacagaaatttctgaggcacagtctgttagtttagatgaactaaaacatcctgagaaagatcaggatagagttaaaaaagcagagtggttagttatgatgggcatttgttctcaccttggatgcgtacctttatctgacaagggagagtataatggttggttttgtccatgtcatggatcacattatgatacatctggaagaattagaaaaggtccagccccaactaatatggaaattccaaaatatgcttttgttgatgataatactattaagattggataa

SEQ ID NO: 210200 - DNA, 340 bp, Unknown
  Bacterial polypeptide expressing nucleotide sequence isolated from the Sargasso Sea
ctgtccggtttgacttcagtgatatcaaagcttgctgatccaaattcagataatattgatgaaccttacaaaaatattaatgctacaaggtccttaagctctgaatattctgtactatctggggtttgcactcatttaggatgctcgcccaaatactacccagaagttgaacctaagccatgggattcctcttgggagggtggttttttctgtccttgccatggctcaatgtttgatttagtaggcagagtttataaaggtgttcctgcacccactaatttaactgtaccccctcatttctttgaagggagtattttaacaatcggagaagaagcataat

SEQ ID NO: 210201 - DNA, 418 bp, Unknown
  Bacterial polypeptide expressing nucleotide sequence isolated from the Sargasso Sea
atggctaaaaaacccaaaaataagagaagagatttcctacaacttagtacagtaacgcttggtgctgtaggaacagctgcatttatatggccatttctaaaaagtatgagtccagcagaagatacattagctgcaggatcaaccgaagtagatattagcgctattgaagaaggtcaaagtataacaataaaatggcgaggaaaaccagtttttataaagaagagaacaaaagatgagatcgaagctgctaaaatggttcaggccggtgatttaagagacccacaagatgatgcagatcgagtacaaaaagaagaatggttagttttagttggagtatgtacacacttaggttgtgttccacttggccagaaagtttcagacatgaaaggtgagtacgatggttggtactgtccatgcc

SEQ ID NO: 210202 - DNA, 442 bp, Unknown
  Bacterial polypeptide expressing nucleotide sequence isolated from the Sargasso Sea
tttgggtgcaactatttggccttttatcgatcagatgaatccagatagttcagttaaagcattggcgacaacagaggtagatataagtcaaattgaaccaggaaaatcgattacggttttgtggagagggaagccggtctttataaagaggagaacagactcagaaatttccgaagcacaatcagtaagtttagatgatctaaaacatcctgaaaaagatgaagatagagttaaaaaagcagagtggttagttatgatgggaatttgttctcatcttgggtgtgtacctctttctgataaaggggaatacaatggatggttttgtccttgtcatggatctcattacgatacatcaggtaggattagaaaaggcccggctccaacaaatatggaaattccaaagtatgcttttgttgatgaaaatacaattaggattggataa

SEQ ID NO: 210203 - DNA, 290 bp, Unknown
  Bacterial polypeptide expressing nucleotide sequence isolated from the Sargasso Sea
aaacgcagcaaaaatagttcaagcttctgaattaaaagatcctcaggatgactctgaaagagttcaaaaagaagaatggttagttttggttggtgtttgtactcaccttggttgtgtaccactaggtcaaaaaatatctgatatgaagggagaatatgatggttggtattgtccatgccatggttctcattatgatacctcaggaagaattagaaaaggtccagctccaaaaaaccttgacgttccgccatacacttttttaaacgatactacgataaaaattggttaga

SEQ ID NO: 210204 - DNA, 544 bp, Unknown
  Bacterial polypeptide expressing nucleotide sequence isolated from the Sargasso Sea
aatgcaaaaaaaagataaaacaagaagaaaagttttattaggcctaacaagtattacaggccttgctggactgccatttgctgcaactccttttatcgctgcatggaatccaagtgcaaaggctaaagcacaaggagcatctgtaaaaattgatgtttcaaaaatgcaatatggacaacaaatacaaattgcatggagaaaacaaccagtttttgttgtaaggcacactatagaaagcttaaaaaatcttgaattatccttgtcaaaattagatgaccccaattcagacaaaattgaggaaccatacaaaaatataaacgcaacaagaagccaaagtaaagaatatacagttttaacaggagtttgtactcacttggggtgttcaccaaagtactatccagaagtagaaccaaaagcatgggattcgtcatggacaggtggctttttttgtccatgtcatggatcaatgtttgatatggttgggaagagtttttcaaggtatgccggcaccatcaaatttactagtaccacctcatttttttga

SEQ ID NO: 210205 - DNA, 281 bp, Unknown
  Bacterial polypeptide expressing nucleotide sequence isolated from the Sargasso Sea
agaaatagatagtgcaagagcagtagatttaaaagatttaaaacatccagaaaaagatgaggacagagcaaaaaatccggagtggcttgtgatgcttggagtttgcactcatctaggatgcgtgcctttaactgataaaggagactataatgcttggttttgtccatgtcatggatcgcattatgatacttcaggaagaataagaaaaggtccggctcctacaaacttagaagttccaaaatatgtatttctcgatagcaaaacaattaaaataggataaa

SEQ ID NO: 210206 - DNA, 526 bp, Unknown
  Bacterial polypeptide expressing nucleotide sequence isolated from the Sargasso Sea
atgtcagattcagaaccaaaaaaaccgtctaaaagaagagattttatcttaacggcaactactgcagcgggagctgttggagttggagctgttgtttggccattagtggatcaaatgaatcctgatgcttctgttaaagctcttgcgagtacagaagttgatatcagcggagtccaaccaggtcaatcaattacagttttgtggaggggaaaaccagtttttattaaaagaagaacagacgatgaaattgaaagtgcaagaaaagtagatttaaaagatttgaaacatccagagaaagatgaagatagagcaaaaaatcctgagtggcttgtaactcttggaatttgcacacatcttggatgtgtgcctttaacaaaccagggtgactatgagggaggttggttttgcccgtgtcatggttcgcattatgatacatctggcagagtcagaagtggcccagctcctacaaaccttgaagtaccagaatataaatttgttgatagtaatactataaagataggataaa

SEQ ID NO: 210207 - DNA, 517 bp, Unknown
  Bacterial polypeptide expressing nucleotide sequence isolated from the Sargasso Sea
atggatcaaaaacaagaaaaaaaaaatagaagagattttttgtatactgcgagctatactttaggtgctgtcggtttaggtgccgctatttggccttttatagatcaaatgaatcctgacaaatcagtagaagctttagcttcaaccgaagtaaacataagctcagttgaacctggaaaatcaattactgttctttggagaggtaaaccagtttttattaaaagaagaactccagaagaaatagctgaagctaaaaaagttaaattagaagaattaaaacatcctgaaaaagatgaagatagagtaaaaaaagaggaatggcttgtaatgttaggtatatgtactcatcttggctgtgttccattatcgaacaaaggagaatacaacggttggttttgtccttgtcacggatcgcactatgatacttctggaagaattagaaaaggtccagcacctacaaacatggaagttccaaagtatgaatttgttgatagcaatacgattaaaataggataaa

SEQ ID NO: 210208 - DNA, 573 bp, Unknown
  Bacterial polypeptide expressing nucleotide sequence isolated from the Sargasso Sea
tttgaatgaaaatgaaaacaaaaattctcaaacaaccaacgaacctgatcaaggaagaagaaaggttttaattggtcttactgctggtgttgctgctgctggtgttgcttttgcagctactccatttgtaacaacttggaatccaagcgctagagctaaagcaataggatcagcggttaaagttgatgtttcaaaaatgatggttggtcagcagatacaagtttcatggagaaaacagcctatattaattattaggcattcatcatcagcattgtctggtcttgcatcagtgacatcaaaacttgctgatccaaattcagacagcattgatgaaccttacaaaaacattaatgcgacaaggtctctaagtacggaatattctgtattatctggagtttgcacccatctgggctgctcccctaaatactatcccgaagttgaacctaagccttgggactcatcctgggcaggtggtttcttttgcccttgtcatggttctatgtttgatttagtagggagagtttataagggtgttcctgcgcaacaaaatttactgtacccccccattttttt

SEQ ID NO: 210209 - DNA, 509 bp, Unknown
  Bacterial polypeptide expressing nucleotide sequence isolated from the Sargasso Sea
aaaaagaagaagttttttacagttaagtactatttctttaggtgcagtaggaactgcagcttttatgtggcctttccttaaaagtatgaatcctgctgaggataccttagctttaggctctacagaagttaatattgctgacattgaagaaggtcagggtattacagtaaaatggagaggaaaacctgtttttattcgtaaaagaacacaacaagaaatcagtgaagcaaaaactgttaatctagaggacttaaaagatccagctattgatgatgatcgtgtcaaaaaagatgaatggttggtacttgttggaatttgtacacacttaggttgtgtacctcttggtcaaaaaattacagacatgaagggtgagtataatggttggtattgcccttgtcatggctcgcactatgactcttcaggtcgtattagaaagggaccagcaccaactaacctcgctgttcctccctatagctttataaacgatacaacaattaaaataggttaag

SEQ ID NO: 210210 - DNA, 256 bp, Unknown
  Bacterial polypeptide expressing nucleotide sequence isolated from the Sargasso Sea
aagagatccacaagatgatgcagatagagtacaaaaagaagaatggttagttttagtgggagtatgtacacacttaggttgtgttccacttggtcagaaggtttctgatatgaaaggtgagtacgatggttggtactgcccatgtcatggttcacattacgatacatcaggtaggataagaaagggaccagctccaaaaaacttggacgttccgccctatacctttttaaatgataatactataaagataggataa

SEQ ID NO: 210211 - DNA, 640 bp, Unknown
  Bacterial polypeptide expressing nucleotide sequence isolated from the Sargasso Sea
atgaagcatagtgaggaatttcaaggccgcgaccgtaatgtggttgtcggccaaaacggagttcagagaggggaatcccagatgagcgacaacgcggaaacggctagctctgccgaattcgacgagaaaacacggcgtgacttcttgttcacgaccacagcaactgtgggagccgttggggcggcaacagccgtatggccctttatcgatcagatgaacccagccgccgacaccttggcactctcgtcgactgaagtggaccttgagcccatcgcggaaggccaaagcatcactgtcgtttggcgaggcaaacccgtgttcattcgccatcgcacggcccccgagattgaggctgcacagagagatgacaaagccgacctacctgatccacaggcagacttagaccgcgtccaaaacgcgaaatggcttgtcatggtgggtgtttgcacccatttcggttgtatcccgttagggaacaagtctggggaaagcaagggtgagttcggtggctggttttgcccctgtcacggctcacattacgatacttcgggccgcatccgcaaaggccctgcgccgaaaaatctcgaagtgccagactacaaatttctgtccgatacgcagctcaaaattggtgaggagc

SEQ ID NO: 210212 - DNA, 401 bp, Unknown
  Bacterial polypeptide expressing nucleotide sequence isolated from the Sargasso Sea
aatgtcagatccagaaaaaaaaaagccaaatagacgagattttatagtgactgcaacaacggcagcaggcgcagtaggagtgggcgctgttgtttggccgttagttgatcaaatgaaccctgatgcgtctgttaaagcattagcgagtacagaagttgatataagtgcagtagaacctggtcaatcaataacagttttgtggagaggtaaaccagtttttataaaaagaagaactcaagatgaaatcgatagtgcaagagctgttgatttaagtgaattaaaacatcctgaaaaagatgaggatagagcaaaaaatccagaatggcttgtgatgctaggagtatgcactcaccttggatgtgtacctttaaatgataaaggagattatggggcatggtttt

SEQ ID NO: 210213 - DNA, 282 bp, Unknown
  Bacterial polypeptide expressing nucleotide sequence isolated from the Sargasso Sea
tatataaaggattaaacccttcaagatctagaagtcctgaatattcggttatgtcaggagtatgcactcatcttggctgtgctccaaaatattttcctgaagtagagcctaagccatgggatgcaacatggagtggaggttttttctgtccatgtcatggatctatgtttgatatagtcggtagggtttttaaaggagtgcctgcaccaacaaatttagtggtacctcctcatatgtttgatggaagtatattaacaattggagaagataaagatttataaa

SEQ ID NO: 210214 - DNA, 571 bp, Unknown
  Bacterial polypeptide expressing nucleotide sequence isolated from the Sargasso Sea
accacgcgcagaaaagttctcataggtatgacagctggtgtcggtgctgtgggcgcgtcattcgcagtagttccatttattgcttcttggaatcctagcgctaaagcaaaggctgtcggaggtcctgtgaaagttgatgtttccaaaatgcaagtaggacaaaagatccaagtttcttggagaaagcaaccagtttttgtcatccgtcacagcaaagaggcgcttgctaatctagttcaagttgaatccaagctagatgatcctagttcaatgaaaattgatgagccatacagaggcgctaacgcaactcgatcaacctcaacagaatacaccgtcatagccggagtttgtacacatctaggttgtgctcctaagtattatccagagatggaatctcagccatgggatgaatcctgggttggcgggtttttttgtccttgccatgggtcaatgtttgatatagtaggcagagtattcaaaggagttccagctccaaccaatttaaaggttccaccacattattttgatggaagtatattaacaataggggaagaaagagggacagcataat

SEQ ID NO: 210215 - DNA, 652 bp, Unknown
  Bacterial polypeptide expressing nucleotide sequence isolated from the Sargasso Sea
gataatcttcgaagcattttggatggttttggtatctctatttcaaaagaaaatgcatataaaaaatctgatatcagcaatgaaccagatcaaggaagaagaaaggttctgattggccttactgctggttttgccgcagctggtgttgcttttgcagctactccatttgtaacaacttggaatccaagtgcaagggctaaagcaataggatctgccgtgaaagttgatgtttctaaaatgatggttggtcagcagattcaagtttcatggagaaagcaaccaatattaattattaggcattcaccatcagcattgtctggtttggcttcagtgacatcaaaacttgctgatccaaattcagatagtattgacgaaccttataaaaacattaatgctacaaggtctttaagtgcagaatattccgtgctatcaggagtctgtacccacttgggctgctcccctaaatattatcctgaagtcgaacctaagccgtgggattcctcttgggaaggtggtttcttttgtccatgtcacggttcaatgttcgatttagtgggcagagtttacaaaggtgttcctgcaccaacaaatttaaccgtaccccctcacttctttgaagggagtattttaacaattggagaagaagcataat

SEQ ID NO: 210216 - DNA, 353 bp, Unknown
  Bacterial polypeptide expressing nucleotide sequence isolated from the Sargasso Sea
agttgagccagaaaaaacaatcactgttctttggagaggaaaaccagttttcataaaaagaagaacgccagaagaaattcaagaggcaagaaatgtaaaattagaggatcttcctcatcctgaaaaagacgaagatagagcgaaaaatcctgaatggttagttatgctaggtatttgtactcatttaggatgtgttcctctaaatgacaaaggagattacaatggatggttttgtccttgtcatggatctcattatgatacatcaggtagaattagaaaaggtcctgcaccaacaaatatggaagttcctaaatatgaatttgttaatagtaatacaattaaaattggataat

SEQ ID NO: 210217 - DNA, 217 bp, Unknown
  Bacterial polypeptide expressing nucleotide sequence isolated from the Sargasso Sea
gctaaaaaacctgaatggttagttacattgggaatttgcactcatttaggatgtgttcctttaacaaacaaaggagatttcgagggaggatggttttgtccatgtcatggatctcattacgatacttcaggtagaattagaagtggtccagctcctactaatttagaaatcccagaatatacttttgttgataataacacaattaagataggataaa

SEQ ID NO: 210218 - DNA, 436 bp, Unknown
  Bacterial polypeptide expressing nucleotide sequence isolated from the Sargasso Sea
atggctaaaaaacctaaaaataagagaagagatttcctacaacttagcactgtaacgcttggtgctgttggaacagctgcttttatatggccttttctaaaaagtatgagtccagcagaagacacattagctgcaggatcaaccgaagtagatattagtgctattgaagaaggtcaaagtataacaataaagtggcgtggaaaacctgttttcattaaaaaaagaacaaaagatgagattgatgcagctaaaatggttcaagcttctgacttaagagatccacaagatgatgcagatagagtacaaaaagaagaatggttagttttagttggagtatgtacacacttaggttgtgttccacttggtcagaaggtttctgatatgaaaggtgagtacgatggttggtactgcccatgtacatggttcacattacgat

SEQ ID NO: 210219 - DNA, 452 bp, Unknown
  Bacterial polypeptide expressing nucleotide sequence isolated from the Sargasso Sea
tatggcagaaaatcgcaataataaaagacgagattttttacaacttagtacgatatctattggagctataggaacggcagcgtttgtctggccatttctttcaagcatgaatccagctgaagacacccttgcacttggaactacagaagtagatataagttctattgcagaaggtcaaagtataacagtaaaatggagaggtaaaccagtatttattcgtaaaagaaccaaagaagagattgaagaagccaaagaagttgactttacagatttgatagatccagaacaagatatcgacagggtaaaaaaagaagaatggttagttctaattggtgtatgcacgcatctaggctgcgtacctcttggtcaaaagttaactgacaataagggagaatataatggttggtattgcccatgtcatggatctcactatgacacatcaggtagaatac

SEQ ID NO: 210220 - DNA, 181 bp, Unknown
  Bacterial polypeptide expressing nucleotide sequence isolated from the Sargasso Sea
aggctgcgttcctttaggtcaaaaactagcagatacaaaaggagaatataatggttggttttgcccttgccatggatcacattatgatacctcaggaagaattcgcaaaggcccagctcctgaaaatttagctgttcctccgtatgagttcataaacgatacacttataaaaatagggtag

SEQ ID NO: 210221 - DNA, 364 bp, Unknown
  Bacterial polypeptide expressing nucleotide sequence isolated from the Sargasso Sea
gattattaggcattcaccatcagcattgtctggtctggtatcagtgacatcaaaacttgctgatccaaattcagatagcatcgatgaaccttacaaaaacattaatgccacaagatctttaagtaaggaatattctgtattatcaggagtttgtactcatctgggctgttcccctaaatactatcccgaagttgaacctaagccttgggactcatcctgggcaggtggtttcttttgcccttgtcatggctctatgtttgatttagtaggcagagtttataagggtgttcctgcgccaacaaatttaactgtaccccctcatttttttgaaggaagtttattaacaatcggagaagaagcttaa

SEQ ID NO: 210222 - DNA, 439 bp, Unknown
  Bacterial polypeptide expressing nucleotide sequence isolated from the Sargasso Sea
ttgtcggataagcctgttacaagaagaaattttttgtacatcacaactggaacatttactgccgctggggctgcttcattggtatggccttttgtagatcaaatgaacccagatgcatcagtaaaagcacttgcttctacggaagttgacttaagacctattgcgccaggccaaagtattacggttttgtggagaggtaagcctgtttttattagaagaagaacacctgaggagatatcagaagctaaagctgtatctttagacgaattaccggatcctcaagacgatgcagctagggctaaaaacccagagtggctagtaatggtgggaatatgtactcatttggggtgtataccacttggtcaaaagggtgaatataatggttggttctgcccatgccatggttcacattatgatacatcaggaagaataagaaagg

SEQ ID NO: 210223 - DNA, 430 bp, Unknown
  Bacterial polypeptide expressing nucleotide sequence isolated from the Sargasso Sea
tatgtcaaaaaataataacgaagctaaaagagatttcctaataatttcaacatatgcaatggctggtattggagccgcatcagttgcgtggcctttaattgatcaaatgaaccctgctgcagatactttagcattagcatctactgaggtagatctgtcctcgctagaagaaggtcaagctataactgtaacttggagaggtaagcctgtatttgttcgtcatagaacacctgaagaaattaagttagctaaggaagtttctttagatgaaatgagacaccctgaaacagacaaagaaagggttccgaacgaaaaatttattgtattagtaggtgtttgtacacatttagggtgtgttccacttggtcaaaaaaccggtgatgtaaaaggacagtatggtggttggttttgtccttgtcacggatctcac

SEQ ID NO: 210224 - DNA, 577 bp, Unknown
  Bacterial polypeptide expressing nucleotide sequence isolated from the Sargasso Sea
atgtcagagaatcttaatagaagaaagtttttatcaattgctacgagtgttaccagcgctgtaggaggaatatttgctctaggagcttttgtttcaacttttcagccgagcaagaaagcaaaagcacttggtgcatctattagagttagtctatcaaaattagaacctggatcgatcataaaggtaatttatagaggcaaacccatatgggtcttacgaagaactgagcaaatgatcaatgagcttgataatgaaaactctaacctaagagatcctgaatctgacttatctgttcagccagattttgctaagaatagatttcggtcaaagaatccagaattttttgttgttgaaggagtttgtactcatttgggatgtgctccaattgagaagtttgcgattgctcctgcagacatgggtccagactggaaaggaggcttctattgtccatgccatggatcaaaatttgatttgtctggaagggtgtatgctggcgttcctgctccatcaaatctaagagttccagctcatcaatttattgacgaaaccactttattagtcggcgagaatagttaag

SEQ ID NO: 210225 - DNA, 182 bp, Unknown
  Bacterial polypeptide expressing nucleotide sequence isolated from the Sargasso Sea
aggttgtgttccattaggtcaaaagattggggatagcaaaggtgaatacggaggttggttctgcccatgtcatgggtctcactatgatacttccgggagaattagaaaaggaccagctccacttaatcttgagattccgccttacaagtttgttagtgatgatataattaggattggatagt

SEQ ID NO: 210226 - DNA, 595 bp, Unknown
  Bacterial polypeptide expressing nucleotide sequence isolated from the Sargasso Sea
tatgcaacccaaaagtcctcctaatcctggtagaaggaaatttcttacatatacaacttctttcctgggcgtcataggtgctttttttactgctataccttttgtgagtgctttcaaaccaagtgctaaagctgaggcagcaggcgctcccgttaaagttgatgtttctaagttactccctggagaaatgatgactgtcgagtggagaggaaaaccagtttttgtcgtcaatattccagaagaaaatacaaatttcataacaaaaaatttagagagacttgcagatcctgatatggaagatccctctcaacccgagtatgcaaaaaatgaaataaggtcaagaaaaaaaggaattgctgttctgactggagtttgtactcatttggggtgtgctccaaaatattatccagaagcaaagccagaggattttgattcaaattggcaaggaggatttttttgtccctgccatggttcaaaatttgatttagttggaagagtatatgcaaacgttccggctcctacgaatttagttgtgcctccacatttttttgaaaaggataacttattggttatcggttcagacggagtaagttaa

SEQ ID NO: 210227 - DNA, 350 bp, Unknown
  Bacterial polypeptide expressing nucleotide sequence isolated from the Sargasso Sea
tattacagtaaaatggagaggaaaacctgtttttattcgtaaaagaacacaacaagaaatcagtgaagcaaaaactgttaatctagaggacttaaaagatccagctattgatgatgatcgtgtcaaaaaagatgaatggttggtacttgttggaatttgtacacacttaggttgtgtacctcttggtcaaaaaattactgacatgaagggtgagtataatggttggtattgcccttgtcatggctcacactatgattcttcaggtcgtattagaaagggaccagcaccaactaatcttgctgttcctccctataagtttataaatgatacaacaattaaaataggttaag

SEQ ID NO: 210228 - DNA, 523 bp, Unknown
  Bacterial polypeptide expressing nucleotide sequence isolated from the Sargasso Sea
aatgactaaattaaaaaaaacaaaaaaaaaagctagaagaagtttcattcatcaagcctcaggagcaatgggtattgcagcagtaggggcagcaggatggcctctaatagatcaaatgaatccttctaaggatgttgaagccttatctaaaatagaggttgatgtctctggtttaaaagagggagatagtaaaactgttttatggcgtggaaaacctttatttattaagcataggtctcaaaatgaaattaatgaagctaaaaaagttaaattatctgacttgctggatccggaaaaagacgaagatagagcgataaatccaaaatttttggttttagtaggaatttgcacacacttaggttgcgttcctgcttccaataaaggtgaattcaatggctggttttgtccttgccatggatctcactatgatacctctggtagaattagaaaaggacctgcaccaaagaatttagaaatacctccttataaatttactagtgataacacaattttgataggttaa

SEQ ID NO: 210229 - DNA, 460 bp, Unknown
  Bacterial polypeptide expressing nucleotide sequence isolated from the Sargasso Sea
tatggataaatcaggaaaaaaaaatagaagagattttctcttcacagctagttataccgtaggtgcagttggtcttggagcaacaatatggccccttattgatcaaatgaatcctgataattcagtaaaagcgttggctaccacagaagttgatataagccaaattcagccaggaaattctattaccgtactatggagaggtaaaccggtttttataaaaagaagaacagagacagaaattgcagaggccaaaaaagtgaaattgacagatttaaaacatcccgagaaggatgaagatagagcaaaaaatccagagtggcttgtgatgttaggtatatgtacacatttgggatgcgttcctttagcagacaaaggtgaatacaatggatggttctgtccatgccatggttcacattatgatacatccggcagaataagaaaaggtcctgctcccagttaa

SEQ ID NO: 210230 - DNA, 449 bp, Unknown
  Bacterial polypeptide expressing nucleotide sequence isolated from the Sargasso Sea
tatgtctgatcaaataaaacctaaaagaagagattttttattcactgcttcttatgcaataggtgcagttggagtgggagcggccgtatggccattgatagatcagatgaatccagacacctcagttaaagcgcttgctagtaccgaggtagatgtaagtactgttgaaccaggaaaatcaattacagtgctttggagaggaaaacctgtttttataaaaagacgaacaccagaggaaatcactgaggcaagaaaagtaaaaatagaagaactaaaacatccagagaaagatgaagatagagcaaagaatcccgaatggctagttatgcttggagtctgtactcacttaggctgcgttcctttgggagataaaggagattataaaggttggttctgtccttgccatggttcacactatgatacatctggtagaatagaaaaggaccagc

SEQ ID NO: 210231 - DNA, 460 bp, Unknown
  Bacterial polypeptide expressing nucleotide sequence isolated from the Sargasso Sea
gcggttggtgcagttggagtagctggagttgtttggccttttgtggatcaaatgaatcctgatgcttctgtaaaggccctagccagcactgaagtagatattagctctgtagagccaggtaaatcaataacagttttatggagggggaaacccgtttttattaaaagaagaacacaagaagaaattgataaagctagatcagttgacattaatgaattaaaacttcctgaaaaagatgaggacagagctgcaattcctgaatggttagttatgcttggaatttgtactcatttaggatgtgtacctttaaatgacaaaggtgattatgatggatggttttgtccatgtcatggttcacattatgatacgtctggaagattcagaaaagggcctgccccaactaacatggaagtccccaaatatgaatttatcaattctaaaacaattaaaataggataat

SEQ ID NO: 210232 - DNA, 577 bp, Unknown
  Bacterial polypeptide expressing nucleotide sequence isolated from the Sargasso Sea
gatggaagaaacaattaccacgcgaagaaaagtactgattggtatgactgcaacagtaggcgcagtgggcgcatcgtttgcggcagttccatttatagcttcttggaatcctagtgcaaaagcaaaagcagtcgggggtcctgtaagaatagatgtatccaaaatgcaaattggccaaaaaatccaagtttcatggagaaagcaacctatatttattattcgtcatagtaaagaggcaattgaaaatctttccaaagtcgaatcaaagttagatgatccaaattcattaaatatagaagagccatacagagatttaaatcctactagatctacttcagaagaatatacagtagtggctggagtttgcactcacctaggctgcgcacctaaattttatccagaaatacaacctcagccatgggatgactcgtggattggaggatttttttgcccatgtcacggatcaatgtttgatattgttggcagggtgtttaaaggtgttccagcgccaacaaacttaaaggttccaccacacttttttgatggaagcattctaactataggggaagagaggtaa

SEQ ID NO: 210233 - DNA, 517 bp, Unknown
  Bacterial polypeptide expressing nucleotide sequence isolated from the Sargasso Sea
tatggataaaccagaaaaaaagggcaatagaagagattttatttttacggctagctatacagttggtgctattggtataggcgcaactatttggcctttgattgaccaaatgaatccagatagctcagtcaaagcattggcatcaaccgaagttgatataagccaaatcgaacctggaaaatcagttacagttttatggagaggaaaaccagtttttattaaaagaagaacccaagaggagattgctgaagcgcaatcagtaagtctggacgatctacctcatcccgaaaaggatcaagatagagtaaaaaaccctgaatggttagtaatgttgggtatttgcactcatttaggatgtgtacctctatctgataaaggtgaatacaatggttggttttgtccatgccacggatcacattatgatacctctggaagaataagaaaaggaccagctcctactaacatggagatccctaaatatgctttcgttgacgataacacaattaagattggataa

SEQ ID NO: 210234 - DNA, 577 bp, Unknown
  Bacterial polypeptide expressing nucleotide sequence isolated from the Sargasso Sea
aatggcagagaatcttaatagaaggaagtttttatcaattgcgacgagtcttaccagcgcagttggaggaatatttgctgttggagcatttgtttcaacttttcagccaagcaagaaagcaaaagcacttggtgcttccattaaagtaagcctatccaaactagagcctggttcgattataaaagtaatctatagaggtaaaccaatttgggttttaagaagaactgatcaaatgataagcgagttagccaatgaaaatgcctacctgagagatcccgaatctgatttatctatccaaccagattttgccaaaaataaatttcgatcaaagaatccagaattttttgttgtggaaggggtttgcactcatttagggtgtgctccaattgagaagtttgctattgcacctgcagatatgggcccagactggaaaggcggtttctattgtccgtgccatggatcaaaatttgatttatctggaagagtatatgctggcgttcctgctccatccaacttaagggttcccgcacatactttcattgatgaaaccactttattagtgggcgagaatagttag

SEQ ID NO: 210235 - DNA, 583 bp, Unknown
  Bacterial polypeptide expressing nucleotide sequence isolated from the Sargasso Sea
atgcaagaaaaagataaaacaagaagaaaggttttgattggtcttactagtgcaattggtctatcaggagttccttttgctgctacaccatttatagctgcatggaatccaagcgcaaaagcaaaagctgctggagcccctgtaaagttagatgtttcaaaaatgcaatttggacagcaaattcaagtttcttggagaaaacaacctgtctttattgtgagacacacaaaagaaagcatagccagcttagatctcgcattaccaaaacttgctgacccaaattctgacgatattattgagccatataaaggtttaaatccatcaagatcaaaaagcccggaatattcagttttttcaggtgtttgtactcatcttggatgtgcaccaaaatattttccagaagtagagccaaagccatgggatgcttcttggtctggtggttttttttgtccttgtcacggatctatgtttgacatggtaggaagagtttttaaaggtgttccagcacctacaaatttagttgtgcctcctcatatgtttgagggaagcatacttacaattggagaggataaggagttataaa

SEQ ID NO: 210236 - DNA, 478 bp, Unknown
  Bacterial polypeptide expressing nucleotide sequence isolated from the Sargasso Sea
gcccagtgctcgagctgaagctgctggagcacctgtaaaagttaatataagcaagctaagcccaggagaattaatgactgtggaatggagaggtatgcctgtatttgtttacaaggtctcaagcgaagctcaaaacgctttatccgcagataaatccaaattagctgaccctaattcagatcaacaacaacaacctgagtacgcacaaaacgatacaagatctagaaaaaagggtatcgccgttgtaaaaggagtttgtactcatttaggctgtgccccaaagttttatccagaagccacctcacaggattttgatcctaattggcagggtggttttttctgtccatgccatggatcaaaatttgatctcgctggaagagtttatgccaatgtacctgccccaaccaaccttgaagtcccacctcattattttgagaccgattctacgttggtaatcggttccgatggagcaagttaa

SEQ ID NO: 210237 - DNA, 595 bp, Unknown
  Bacterial polypeptide expressing nucleotide sequence isolated from the Sargasso Sea
atgagcgatacggaaaataactcaaataggagaaaatttcttacacgatcaacccaaatcttggggggagttggtggtgtttttgcattaatacctttcttgtctactatgtcgcctagcgagagagcaaagtccgcaggagctcctattgaagttgatgtttctaatattcagcctggcatgtacaaagtttttgaatggagaggtaaaccagtctgggttgttagaagaactcaagaaatgattaatcaaattgcagatagagatgataagttgagtgatcctatgtctaatgaggaatttcaaccttcatacgcaaagaataagtaccgttcaatcaaaccagaatttttagttttagttggagtctgtactcatctgggttgttcgccattatataaaccaaattctcaatcaactgagttgggattagattggaagggaggcttcttctgcccgtgtcacggctctaagtttgacctttctggaagagtacataaagctatgcccgcgccatcaaatcttgaggtaccgccatattattttgctagtgagacaaaaatcgtaattggacaagatggagagtcagcgtaat

SEQ ID NO: 210238 - DNA, 520 bp, Unknown
  Bacterial polypeptide expressing nucleotide sequence isolated from the Sargasso Sea
aatgtccgatccagaaaaaaagaagacaaatagaagagattttatagtgactgcaacaacggcagcaggcgcagtaggcgtcggagcggttgtttggccgttagttgaccaaatgaaccctgatgcatctgtaaaggcattagcaagtacagaagttgatataagtacagtagaacctggccaatcaataaccgttttgtggagaggaaaaccagtttttataaagagaagaactcaagatgaaattgatagcgcaagagctgttgatttaagtgaattaaaacatcctgaaaaagatgaggatagagcaaaaaatcctgagtggcttgttatgttaggaatttgtactcatctgggttgtgttcctttgaatgacaaaggggattatggggcatggttttgtccatgccatggttcacactacgatacatctggaagaattcgaaaaggaccagcgcctacaaatatggaagtgccaaaatatgaatttgtaaatagtaacactattaaaattggatag

SEQ ID NO: 210239 - DNA, 550 bp, Unknown
  Bacterial polypeptide expressing nucleotide sequence isolated from the Sargasso Sea
attgattggcctaacaagtgcagttggtttgtcaggtttgccatttgctgcaactccatttattgcagcatggaacccaagtgcaaaggcaaaagctgcaggtgccgcagttaaattggatgtttctaagatgcaatacggacaacaaatacaagtttcatggagaaaacaacctgtttttattgtcagacatactgaagaaagtatcgcaagcttagatttggccttaccaaaattagcagatccaaatagtgatcaaattgaagaaccctacagaggcctcaatccatctaggtcaaaaagtccagaatattcagtattttcaggtgtatgtactcatttaggttgcgcaccaaaatatttccctgaaattgaacctaagccatgggatgctacatggaatggtggatttttttgcccttgtcatggttcaatgtttgatattgttggtagagtttttaaaggagttcctgcaccaacaaatctcatagtaccaccacatatgttcgacggaagtatattaacaattggagaggataaggagttataa

SEQ ID NO: 210240 - DNA, 433 bp, Unknown
  Bacterial polypeptide expressing nucleotide sequence isolated from the Sargasso Sea
atgtatcaaagatgcaatattgggcaacaaatacaagttgcatggagaaaacaaccagtctttattgttagacataccaaagaaagtttatctagtttagatctaagtgtatcgaaattagctgatccaaattcagatcaaattgaagagccttacaaaggtcttaatgcttcaagatctcgaagtcctgaatattctgtcttttctggtgtatgcacccatttgggctgtgcaccaaaatattttcctgaggttgaatcaaaaccatgggatgcaacatggaatggtggctttttttgtccatgtcatggatcaatgtttgatatagttggaagagtttttaagggtgttccagcgcctacaaacttgatagtacctccgcatatgtttgaaggaagtatattaacaattggagaggataaggagttataaa

SEQ ID NO: 210241 - DNA, 244 bp, Unknown
  Bacterial polypeptide expressing nucleotide sequence isolated from the Sargasso Sea
agagtattcagtattttcaggtgtatgtactcatttgggttgcgcaccaaaatattttcctgaaattgaacctaagccttgggatgctacatggaatggtggatttttttgtccttgccatggttcaatgtttgatattgttggaagagtttttaaaggagttcctgcaccaacaaatcttgtagtaccaccccatatgttcgatggaagtatattaacaattggagaggataaggagttataa

SEQ ID NO: 210242 - DNA, 253 bp, Unknown
  Bacterial polypeptide expressing nucleotide sequence isolated from the Sargasso Sea
ttggagatcttaaacatcccagaaaaagatgaagatagagccaaaaatccagagtggttagtaatgctaggtatatgtactcacctagggtgtgttccactaggtgataaaggagaatacaacggttggttttgcccttgccatggttcacattacgatacatctggcagaataagaaaaggtcctgctccaacaaatctagaagttcctaaatatgaattcgtaaatagcaatacaattaaaataggttaat

SEQ ID NO: 210243 - DNA, 277 bp, Unknown
  Bacterial polypeptide expressing nucleotide sequence isolated from the Sargasso Sea
aatggttcaagcttctgacttaagagatccacaagatgatgcagatagagtacaaaaagaagaatggttagttttagtgggagtatgtacacacctaggttgtgttccacttggtcagaaggtttctgatatgaaaggtgagtacgatggttggtactgcccatgtcatggttcacattacgatacatcaggtaggataagaaagggaccagcacccaaaaacttggacgttccgccctatacctttttaaatgataatactataaagataggataa

SEQ ID NO: 210244 - DNA, 529 bp, Unknown
  Bacterial polypeptide expressing nucleotide sequence isolated from the Sargasso Sea
tatggcggaagttaagaataataaaagaagaagttttctacagttaagcactatatctttaggcgcaataggaactgcgggttttatatggccttttcttaaaagtatgaatcctgctgaagataccttagctttaggttctactgaagtaaatattgctgatattgaagaaggtcagggcattacagttaaatggagaggaaaaccggtttttattcgtaaaagaacacaagaagaaatcagtgaagcaaaagcagttaaacttgaggacttaaaagatccagctattgatgatgatcgtgtcaaaaaagatgaatggttggtgcttgtgggaatttgtacacatttaggttgtgtacctcttggtcaaaaaattacagacatgaagggtgagtataatggttggtattgcccttgtcatggttcacactacgattcttcaggtcgtattagaaaggggccagcaccaactaatctcgctgttcctccctatagctttataaacgatacaacaattaaaataggttaa

SEQ ID NO: 210245 - DNA, 268 bp, Unknown
  Bacterial polypeptide expressing nucleotide sequence isolated from the Sargasso Sea
gcttctgatttaagagatccacaagatgatgctgatagagtgcaaaaagaggaatggttagttttagtaggagtatgcacacacttaggatgtgttccacttggtcagaaagtttcagatatgaaaggtgagtatgatggttggtattgcccatgtcatggttcacattacgatacatcaggtaggataagaaagggaccagcaccaaaaaacttggacgttccgccctatacctttttaaatgataatactataaagataggataac

SEQ ID NO: 210246 - DNA, 583 bp, Unknown
  Bacterial polypeptide expressing nucleotide sequence isolated from the Sargasso Sea
atgcaaaataaagataaaactagaagaaaagtgttaatcggcttaacaagtgctgttggattgtcaggtttgccctttgcagcaactccttttatagccgcttggaatccaagtgctaaagcaaaagctgctggagcatctgtaaaattagatgtatcaaaaatgcaatatggtcaacaaatacaagtttcttggagaaagcagccagtctttatcgtgagacatacagacaatagccttaaaagcttagatctttctgtatccaaattagctgatcctaactctgataatattgaagaaccttacagaggattaaatgcttctagatcaaaaagtccagagtattctgtattttctggtgtatgcacccatctaggctgtgccccaaaatatttcccagagattgaaccgaagccttgggatgcaacatggaaaggtgggtttttttgtccatgtcatggatcaatgttcgacttagttggaagagtttttaaaggtgttcctgcaccaactaatttaatcgtacctcctcacatgtttgagggcagtattttaacaattggagaggataaggagttataaa

SEQ ID NO: 210247 - DNA, 260 bp, Unknown
  Bacterial polypeptide expressing nucleotide sequence isolated from the Sargasso Sea
agtaagcctggatgatttaaaacatcctgaaaaagacgaagatagagtgaaaaagccagagtggttagtcatgatgggtatttgttcacatcttgggtgtgtgcctctttcagacaaaggagaatataatggttggttttgtccgtgccacggatctcactatgatacctcaggtagaattagaaagggtccagcgccaacgaatatggaaattccaaagtatgcttttattgatgataacacaatcaggattggataga

SEQ ID NO: 210248 - DNA, 341 bp, Unknown
  Bacterial polypeptide expressing nucleotide sequence isolated from the Sargasso Sea
aaatactataacagtccttttgagaggtaagccagtttttataaggagaagaacccaatctgaaattgatgaggccaaaaaagttaaattagaagaattaaagcatccagaaaaagatgaggatagagctaaaaatccagagtggttagtaatgttaggaatatgtactcacttaggatgtgttcctttaaatgataaaggtgattataatgggtggttttgtccatgtcatggatcacattatgatacatctggaagaataagaaagggtcctgcgccaacaaacatggaagttccaaagtatgagtttgtaaatgataagacaattaaaattggttaaa

SEQ ID NO: 210249 - DNA, 232 bp, Unknown
  Bacterial polypeptide expressing nucleotide sequence isolated from the Sargasso Sea
gaaaaagacgaagatagggcaaaaaatccagaatggctgtttatgttaggaatatgtacccaccttggatgtgttcctctaggagataaaggggaatacaatggatggttttgtccttgtcatggatctcactatgatacatcgggcagaataagaaaaggtccagccccaacaaacatggaaattcctaaatatgaatttgttaatagcaacacaattaagattggttaga

SEQ ID NO: 210250 - DNA, 583 bp, Unknown
  Bacterial polypeptide expressing nucleotide sequence isolated from the Sargasso Sea
aatgcaagaaaaagataaaacaagaagaaaggttttaattggtttaactagtgcgataggtctttcgggaatcccttttgcagccaccccttttattgctgcatggaatcctagtgcaaaagctaaagctgctggagcaccagttaaactagatgtttcaaaaatgcaatttggtcagcaaatacaagtgtcatggagaaaacaacctgtttttatagttaggcatactaaggagagcattgaaagtttaaatcttgctttatcaaaattagcagatcctaattctgataatatagatgaaccctacaaaggtctaaatccatcaagatctaaaagcccagaatattcagtattttcaggagtttgtacgcatttaggttgtgcaccaaagtattttccagaagtagaaccaaaaccttgggatgctacatggacaggtgggtttttctgtccttgtcacgggtctatgtttgacattgttggtagagtttttaaaggtgttccagcaccaacaaatttagtagtgcctcctcatatgtttgagggaagcatacttacaattggagaggataaggagttataa

SEQ ID NO: 210251 - DNA, 433 bp, Unknown
  Bacterial polypeptide expressing nucleotide sequence isolated from the Sargasso Sea
actatttggcctttaattgaccagatgaatccagatagttcagtcaaagcattggcatctacagaagttgatattagccaaattgaacctggaaaatctgtcacagttttatggagaggaaaaccagtttttattaaaagaagaacacaagaagagatcgcagaagctcaatcggtaagcttagacgatctacctcatcccgaaaaagaccaagatagagtaaaaaatcctgaatggttagtaatgcttggaatatgtactcaccttggatgtgtacctctatcagacaaaggtgaatataatggatggttttgtccatgccatggatcccattacgatacctctggaagaataagaaagggtcctgctccaactaatatggagatacctaaatatgcttttgttgatgataacacaattaagattggataaa

SEQ ID NO: 210252 - DNA, 637 bp, Unknown
  Bacterial polypeptide expressing nucleotide sequence isolated from the Sargasso Sea
atggggtgcgccgtgaacgcagttcagcagcaggaaagcgtggacgacaaccgtcgcgcgtggctcatcgcaacgtccgtcgcggggggcattgcgggggtggcgacactcgcgcccttcgtcgactcgttggcgccgtcggaacgggcgaaggcagcgggcgcgccggtcaccgcagacatcggcaacctgcgtggaggtgagatgatgacggttgcctggcgcggtatgcctgtgtttctcgtcaaccgaaccgacagaatgctggctgacgtggccgcggcggactcgatggtcgcggaccccgccacccgacatccgttctcgatgccgctgccgggctactgcaggaacgaataccgttcgcgctccgatcatcggaatctcctcgttgtcatcggcgtctgcacacatctgggctgtacaccaggagcgcgatttcaggaaggcccgcagcccagtctgcccgacaactggccaggtggatttctctgtccatgccatggctctacctacgatctcgctggccgcgttttcaggaacaagcccgcaccacaaaacctcgacgtgccacgctttatgtttccgtcgcccaccactgtttcgattgggcgagacgagcagggcgacgcgtgat

SEQ ID NO: 210253 - DNA, 580 bp, Unknown
  Bacterial polypeptide expressing nucleotide sequence isolated from the Sargasso Sea
ataaacaatgaacctgatcaaggaagaagaaaggttttaataggtcttacagctggttttgctgctgcaggtgttgcttttgcagctactccatttgtgacaacatggaatccaagtgccagagcgaaagcaataggatctgcagtcaaggttgatgtttccaaaatgatggttggtcagcagatacaagtttcatggagaaaacagcctatattaataattaggcattcaccatcagcattgtctggtctggcatcagtgacatcaaaactcgctgatccaaattcagatagtatcgatgaaccttacaaaaacattaatgccacaaggtctttaagtactgaatattcagtattatcaggagtttgtactcatttgggctgttcccctaaatactatcccgaagttgaacctaagccttgggactcatcctgggcaggtggtttcttttgcccttgtcatggctctatgtttgatttagtaggcagagtttataagggtgttcctgcaccaacaaatttaactgtacctcctcatttttttgaagggagtatattaacaatcggagaagaagcttaat

SEQ ID NO: 210254 - DNA, 577 bp, Unknown
  Bacterial polypeptide expressing nucleotide sequence isolated from the Sargasso Sea
atgtcagagaatcttaatagaagaaagtttttatcaattgcgacaagtgttactagcgctgttggagggatatttgctctaggagcttttatttcaacttttcagccaagcaagaaagcaaaagcacttggtgcatctattagagttagcctatcaaaattagaacctggctcgataataaaggtaatttatagaggcaaacccatatgggtcttacgaagaactgagcaaatgatcaatgagctcgataatgaaaactctaacctaagagatcctgaatctaacttatctgttcagccagattttgctaagaatagatttcggtcaaagaacccagaattttttgttgttgaaggagtttgcactcatttgggttgtgctccaattgagaaatttgcgattgctcctgcagacatgggtccagactggaaaggaggtttctattgtccatgccatggatcaaaatttgatttatctggaagggtgtatgctggcgttcctgctccatcaaatctaagggtaccagctcatcaatttattgacgaaaccactttattagtgggcgagaatagttaaa

SEQ ID NO: 210255 - DNA, 560 bp, Unknown
  Bacterial polypeptide expressing nucleotide sequence isolated from the Sargasso Sea
cacgcgaagaaaagttttaattggcatgactgcagctgtaggtgcagctggagtatcaatggcagcagttccattcatagcctcatggaatccaagcgccaaagcaaaagcagttgggggtcctgtaagaatagacgtatcaaaaatgcaaatcggacaaaagatccaagtctcatggagaaaacaacctatattcatcattcgtcacagtaaagaggcaatagaaaacctttctaaagtcgagtcaaaattagatgacccaagctcattaaaaatagatgaaccatacagagacataaatcctactagatctacttcaaaagaatacacagtaatagcaggagtttgcactcaccttggttgcgcacctaaattctatccagaaatacaacctcagccatgggatgattcatggattggaggatttttttgcccatgtcacggatcaatgtttgatatagttggcagggtatttaaaggtgttccagcgcctacaaacttaaaggttccgccacactattttgatggaagtattctaactataggggaagagaggtaaa

SEQ ID NO: 210256 - DNA, 595 bp, Unknown
  Bacterial polypeptide expressing nucleotide sequence isolated from the Sargasso Sea
catgagcaactcaaataaaccatcaaaccgaaggaaatttttaaccaatctcactcaaataatgggtggtgttggtggagtttttgctctaatcccctttttatctacaatgtctcctagtgaaaaagcaaaatcagcgggtgcccctgtagaaattgatgtttctactttgatgcctgggtcttataaagttgtagaatggagaggtaagcctgtatgggtggttaggagaactaaagagatgatacaaaacacgcttgaaaatgatgagattttaagtgacccgaattctcttgaggaacttcagcctagttacacacaaaacaaatatcggtctattaatccagaatttttagtgttgcttggtgtttgtactcaccttggttgctcaccactatataaacccagccctaaatcagcagaacttgggttggactggaatggaggttttttctgtccatgtcatggttcaaaatttgatttgtcgggaagagttcataaagctatgcctgcaccttcaaacttagaagttcctccatattactttgcatcagaaaataagattattgtaggcgaagacggagaagagagctaa

SEQ ID NO: 210257 - DNA, 342 bp, Unknown
  Bacterial polypeptide expressing nucleotide sequence isolated from the Sargasso Sea
ccagcttagatttggctttaccaaaaatagcagatccaaatagcgatcagattgaagaaccttacagaggtctaaatccatctagatcaaaaagtccagagtattcagtattttcaggtgtatgtactcatttgggttgcgcaccaaaatattttcctgaaattgaacctaagccttgggacgcttcatggaatggtggatttttttgtccttgccatggttcaatgtttgatattgttggaagggtttttaaaggagttcctgcaccaacaaatcttatagtaccaccccatatgttcgatggaagtatattaacaattggagaggataaggagttataaa

SEQ ID NO: 210258 - DNA, 331 bp, Unknown
  Bacterial polypeptide expressing nucleotide sequence isolated from the Sargasso Sea
aactgttatatggagaggtaagccagtttttattaaaagaagaactcaagatgagattgatagcgctagagcagtcgatttaagtgaattaaaacatccagaaaaagatgaagacagagcaaaggatcctgagtggcttgtaatgttaggagtatgcacacatcttggatgtgttccattaactgataaaggtgattacaatgcatggttttgtccatgtcatggttcacattatgatacatcaggaagaattagaaaaggtcccgcaccaacaaatatggaagtcccaaaatacgaatttgtaaatagtaacaccataaaaataggataa

SEQ ID NO: 210259 - DNA, 583 bp, Unknown
  Bacterial polypeptide expressing nucleotide sequence isolated from the Sargasso Sea
atgcaagaaaaagataaaactagaaggaaagtattaattggcctaacaagtgcagttggtttgtcaggtttgccattcgctgcaaccccatttattgcagcatggaacccgagtgcaaaggcaaaagctgcaggtgctgcagttaaattggatgtttcaaagatgcaatatggacaacaaatacaagtttcatggagaaaacaacctgtttttattgttagacatactaaagaaagtattgccagcttagatttggctttaccaaaattagcagatccaaatagtgatcagattgaagaaccttacagaggcctcaatccatctagatcaaaaagtccagaatattcagtattttcaggtgtatgtacgcatctaggttgcgcaccgaaatattttcctgaaattgaacctaagccatgggatgctacatggaatggtggatttttttgtccttgtcatggatcaatgtttgatattgttggtagagtttttaaaggagttcctgcaccaacaaatctcatagtaccaccacatatgtttgatggaagtatattaacaattggagaggataaggagttataaa

SEQ ID NO: 210260 - DNA, 451 bp, Unknown
  Bacterial polypeptide expressing nucleotide sequence isolated from the Sargasso Sea
gatgtcagaccaaaaacacgaaaaaaagaccaacagaagagatttcttgtttactgctactgccgctgctggtgcagttggagttggcgctgctgtttggccattagtcgatcaaatgaacccagatgcctctgtaaaagcattagcaagcacagaagtagatgtgagttcaatgcaacccggacaatctttaacggttctttggagaggtaaacctgtttttataaagagaagaacggatgatgaaattaaaaaagcgagagcagttgacatcaatgatcttaagcatcctgaaaaagatgaagatagagcaaaaaatcctgaatggttagtgatgcttgggatttgtactcatctaggatgtgttccattaacagataaaggtgattatgatggttggttttgtccttgccatggttctcattatgatacatctggtagaatagaaaag

SEQ ID NO: 210261 - DNA, 577 bp, Unknown
  Bacterial polypeptide expressing nucleotide sequence isolated from the Sargasso Sea
aatggcagagaatcttaatagaaggaagtttttatcaattgcgacgagtcttaccagcgcagtaggaggaatatttgctgttggagcatttgtttcttcttttcaaccaagtaagaaagcaaaagcacttggcgcttcaattaaagtaagcgtgtcaaaactagagcctggctcaatcataaaagtaatctacagaggtaaaccaatttgggtcttacgaagaactgaacaaatgataagcgagttaggcaatgaaaattcctacctaagagatcccgaatctgacttatctattcagccagatttcgccaaaaataaatttcgatcaaagaatccagagtttttcgttgtggaaggggtttgcacgcatttggggtgtgctccaatagagaagtttgcgattgcacctgcagatatgggtccagactggaaaggtggtttctattgtccttgtcatggatcaaaatttgatttatctggaagagtctatgcaggcgttcctgccccttccaacttaagagttcctgcacacaatttcattgatgaaactactttattagtcggcgagaatagttag

SEQ ID NO: 210262 - DNA, 583 bp, Unknown
  Bacterial polypeptide expressing nucleotide sequence isolated from the Sargasso Sea
aatgcaagaaaaagataagacaagaagaaaagtattaattggcttaacaagtgcagttggattatctggtattccttttgcagcaacgccatttattgcggcatggaatcctagcgcaaaagcaaaagcagctggggctccagtaaaacttgatgtatcaaaaatgcaatttgggcagcaaattcaagtctcatggagaaagcaaccagtgtttattgttagacatactgaagaaagcatagccaacttagaacttggtgtaacaaaacttgctgatcctaattcagatcaaatagaagagccttataaaggacttaatccatcaaggtcaaagagtccagaatactcggttttctcaggagtttgtacacatttaggttgcgctcctaaatattttccagaggttgagcccaagccttgggatgcaacatggaatggaggatttttttgtccttgtcatggttcgatgtttgatattgtcgggagagtttttaaaggtgttccagcgccaacaaacttaattgtgccacctcatatgtttgaaggtagtattttaacaattggagaggataaggagctataa

SEQ ID NO: 210263 - DNA, 340 bp, Unknown
  Bacterial polypeptide expressing nucleotide sequence isolated from the Sargasso Sea
atgtggagaggaaaacctatttttattagacacagatcagaatcagaaattaactcagctagtattgtatcggttgatgacttacctcataaagaatcagatgaatcaagagtacaaaaccctaggtggttagtggttgtcggtgtatgttctcatttgggttgcgttccgttaggtcaaaaaattggggacagcaaaggtgaattcggaggttggttctgcccatgccatggatctcactatgatacttcaggaaggattagaaaaggcccagccccacttaaccttgagatccccccttacaaatttgttagtgatgatattattaggataggatagt

SEQ ID NO: 210264 - DNA, 514 bp, Unknown
  Bacterial polypeptide expressing nucleotide sequence isolated from the Sargasso Sea
tatggataaatcaggaaaaaaaaatagacgagattttctttttacggcaagctataccgttggggctataggtttaggcgctacagtttggccctttattgatcaaatgaatcctgataaatctgtgaaagctttagcttcaactgaagttgatttaactacaattcaacctggaaattccgtaactgtattgtggaggggaaagccggtttttattaaaagaagaaccccagatgaaatagccgaagctaaaaacgtaaatattaaagatcttaaacatccagaaaaagatgaagatcgagtaaagaaagaagaatggttggtcatgttaggtatttgtacgcacctaggttgtgtacccttatcagataagggagaatataatggttggttttgtccttgccacggttcccattatgatacatctggaagaataagaaaaggaccagccccaacaaatatggaaattccaaaatatgaatttgttgacaacaacactataaaaataggttaa

SEQ ID NO: 210265 - DNA, 517 bp, Unknown
  Bacterial polypeptide expressing nucleotide sequence isolated from the Sargasso Sea
atggataaaccagaaaaaaagggcaacagaagagattttatttttacggctagctatacagttggagctattggtataggtgcaactatttggcctttaattgaccaaatgaatccagatagttcagtcaaagcattggcatcaaccgaagttgatataagccaaatcgaacctggcaaatcagttacagttttatggagaggaaaaccagtttttattaaaagaagaactcaagaggagattgctgaagcgcaatcagtaagtctggacgatctacctcatcccgaaaaggatcaagatagagtaaaaaaccctgagtggttggtaatgttgggaatttgtactcacctcggatgcgtacctttatctgataagggtgaatacaatggatggttttgtccatgccatggatcacattacgatacctcaggaagaataagaaagggacctgctccaactaatatggagattcctaaatatgctttcgttgacgacaacacaattaagattggataaa

SEQ ID NO: 210266 - DNA, 577 bp, Unknown
  Bacterial polypeptide expressing nucleotide sequence isolated from the Sargasso Sea
tatggcagagaatcttaatagaaggaagtttttatcaattgcgacgagtattaccagcgcagttggaggaatatttgcagttggtgcatttgtttcaactttccaaccaagcaaaaaagcaaaagcacttggcgcttctatcaaagtaagcctctccaaactagagcctggctcgattataaaagtgatctacagaggtaaaccaatttgggttttacgaagaactgatcaaatgataagcgagctagacaatgaaaattcctatctacgagatcctgagtctgatttatctatccaaccagatttcgctaaaaataaatttcgatcaaagaatccagaattttttgttgtggaaggggtttgtacacatttaggctgtgctccaattgagaagtttgctattgcacctgcagatatgggtccagactggaaaggtggtttctattgtccttgtcacggatcaaaatttgatttatctggaagagtatatgctggcgttcctgctccatccaatttaagggttcctgcacatacttttattgatgaaaccactttattagtaggcgagaatagttag

SEQ ID NO: 210267 - DNA, 871 bp, Unknown
  Bacterial polypeptide expressing nucleotide sequence isolated from the Sargasso Sea
atgacagaaattactgaaaaatatcttactctcagaggagctaacaatgatatttatttctttcaaaaaagagttagtgaaaaggttgcagatattattggtacaagttttgtaaagatatcacttaggacaaaaaatctcagtgaagctatttcaaccagggatgatctcttagatgcgctaaatgaactagaaaattgtgacacacttgagattagtgataattcccgaagaacaatggatagccttggcatttcacttttgaatgaaaatgaacacaaaaattctcaaacaaccaacgaacctgatcaaggaagaagaaaggttttaattggtcttactgctggtgttgctgctgctggtgttgcttttgcagctactccatttgtaacaacttggaatccaagcgctagagctaaagcaataggatcagcggttaaagttgatgtttcaaaaatgatggttggtcagcagatacaagtttcatggagaaaacagcctatattaattattaggcattcatcatcagcattgtctggtcttgcatcagtgacatcaaaacttgctgatccaaattcagacagcattgatgaaccttacaaaaacattaatgcaacaaggtctctaagtacggaatattctgtattatctggagtttgcactcatctgggctgctcccctaaatactatcccgaagttgaacctaagccttgggactcatcctgggcaggtggtttcttttgcccttgtcatggttctatgtttgatttagtagggagagtttataagggtgttcctgcgccaacaaatttaactgtacccccccatttttttgaagggagtatattaacaatcggagaagaagcttaat

SEQ ID NO: 210268 - DNA, 772 bp, Unknown
  Bacterial polypeptide expressing nucleotide sequence isolated from the Sargasso Sea
ggtaccagctttgttaagacatcgctaaagactaacgatctcactgaggctatatctagcagagatgagcttgtagatgcgttaaatcaacttgagaattctgacatattggatattagtgataaccttcgcaacatattggatggttttggtatctctattacaaaaaaaaatgcacataaaaaatctgatactagcaatgaaccagatcaaggaagaagaaaggttctgattggccttactgctggttttgccgctgctggcgttgcttttgcagccactccatttgtaactacttggaatccaagtgcaagggctaaagcaataggatctgcagtgaaagttgatgtttctaaaatgatggttggtcagcagattcaagtttcatggagaaagcaaccaatattaattattaggcattcaccatcagcattgtctagtttggcttcagtaacatcaaaacttgctgatccaaattcagatagtattgacgaaccttataaaaacattaatgctacaaggtctttaagtgcagaatattccgttctatcaggagtctgtacccacttgggctgctcccctaaatattatcctgaagtcgaacctaagccgtgggattcctcttgggaaggtggtttcttttgcccatgccatggttcaatgtttgatttagtgggcagagtttacaaaggtgttcctgcaccaacaaatttaactgtaccccctcacttctttgaagggagtattttaacaatcggagaagaagcataat

SEQ ID NO: 210269 - DNA, 826 bp, Unknown
  Bacterial polypeptide expressing nucleotide sequence isolated from the Sargasso Sea
atgatatttatttcttccaaaaaagagtcagtgaaaagggttgcagatattattggtactagctttgtaaagacatcacttaggacaaaagatcttagtgaagctatttcaatcagagatgatctcttagatgcgttaaatgaacttgaaaattctgtcacacaagagataagtgataattcccgcagcgtaatggattgctttggtatttcacttttgaatgaaaatgaacataaaagttctcaaataatcaatgaacctgatcaaggaagaagaaaggttttaataggtcttacagctggttttgctgctgcaggtgttgcttttgcagccactccatttgttacaacttggaatccaagcgcaagagctaaagcaataggatcagcggttaaggttgatgtctctaaaatgatggttggtcagcagatacaagtttcatggagaaaacagcccatattaattgttaggcattcaccgtcagcattgtctggtctgacgtcagtgacatcaaagctcgctgatccaaattcagataacatcgatgaaccttacaaaaacattaataccacaaggtctttaagtgctgaatattcagtattatcaggagtttgtactcatttgggctgttcccctaaatactatcctgaagtcgaacctaagccttgggactcatcctggggaggtggtttcttttgcccttgccatggctctatgtttgatttagtaggcagagtttataagggtgttcctgcaccaacaaatttaactgtaccccctcatttttttgaagggagtatattaacaataggagaagaagcttgat

SEQ ID NO: 210270 - DNA, 451 bp, Unknown
  Bacterial polypeptide expressing nucleotide sequence isolated from the Sargasso Sea
atgtcggacaataacgataaaaaaaagacagaacgaagagatttcctttttacagcaacagcagcagcaggagttgtgggagttggagcagctatttggcctgtagtagaccaaatgaacccggatgcatcagtaaaagctcttgcaagcacagaggttgatattagctctgttcaaccggggcaatctctcacagtgctttggagaggaaaacctgtttttattaagagaagaacagatcaagaaattcagaaagccagagaagtaagtttaggagatttaaaacacccagaaaaagatgaagatagagttaaaaagcccgagtggcttgtaatgcttggagtgtgtacccatttaggttgtgtacctcttacagataaaggtgactatgacggatggttttgcccatgtcatggatctcattatgatacctctggaagaattagaaagg

SEQ ID NO: 210271 - DNA, 460 bp, Unknown
  Bacterial polypeptide expressing nucleotide sequence isolated from the Sargasso Sea
atggataaatcagaaaaaaaaaagaatagaagagattttatttttactgcaagctacacgattggcgccgtcggattgggagcaactatttggccgcttatagaccaaatgaacccagatagctctgttaaagccttggcgactacggaagtagacataagtcaaatccaacctggaaaatctataacagttttgtggagaggaaaaccagtttttattaaaagacgaactcaatctgaaatttctgaagctcaatcagttaaactagaagaactgaagcatcctgaaaaagaccaagacagggtaaaaaaaccagagtggttggttatgctgggtatatgtacccatctaggatgtgtgcctttgtccgacaagggagaatataaaggttggttttgtccttgtcacggttcacattatgatacatcaggacggatcagaaaaggtccagcgccagtta

SEQ ID NO: 210272 - DNA, 523 bp, Unknown
  Bacterial polypeptide expressing nucleotide sequence isolated from the Sargasso Sea
aatgagcaaagaagaaaaaaaagttaatagaagggattttttatttacagctagttatactgtcggcgcagtaggcgttggagcagtcatttggccaatgattgaccaaatgaatccagataaagcacaacaagctttagctacaactgaagttgatatcagcaacattgaacctggcaaatcggttacagttttatggagaggtaagccagtttttttaaaaagaagaactcctgaggaaatagcagaggcaagagctgtaaaaatggacgatttgcctgatcctcaaaaggatgaagaaagggtaaaagaaggtaaagacgaatggttagtcatgttaggagtctgtacacatcttggatgcgtgcctttaaaagataaaggcgactttaatggttggttctgtccttgtcatggttcacattatgatgtatcaggcagaattagaaaaggacctgcgccaacaaatatggaaataccaaagtttgaatttgtagatagtaatacgataaagattggttaa

SEQ ID NO: 210273 - DNA, 520 bp, Unknown
  Bacterial polypeptide expressing nucleotide sequence isolated from the Sargasso Sea
gatgtcagaatcagataaaaaaaagccaaatagaagagattttattttaacagcaactactgcggcaggagcggtgggggtaggagctgctgtttggcctttaatagatcaaatgaacccagatgcttcagttaaagctttagcaagcacagaagtggatataagtggagttgagccgggacagtcaataactgttttgtggagaggaaaaccagtatttataaaaagaagaacacaagaagaaatagatagtgcaagatcagtagatttaaaagatttaaaacatccagaaaaagatgaagacagagcaaagaatcccgagtggttagttatgcttggagtttgtactcacctaggatgcgtacctttaacagacaagggagattataatgcatggttctgtccatgccatggttcacattatgatacttcaggaagaataagaaaaggtccagcaccaacaaatatggaagttccgaaatacgtatttgttaatagtacaactataaaaataggttag

SEQ ID NO: 210274 - DNA, 520 bp, Unknown
  Bacterial polypeptide expressing nucleotide sequence isolated from the Sargasso Sea
atgtccgacacagaaaaaaaaaagccaaatagacgtgattttatagtgactgcaacaacggcagcaggtgctgtaggagtgggcgcggttgtttggccgttagttgatcaaatgaaccctgacgcatctgtaaaggcattagcaagtacagaagttgatataagtgcagtagaacctggtcaatcaataaccgttttgtggagaggcaaaccagtatttataaaaagaagaactcaagatgaaattgatagtgcaagagctgttgatttaagtgaattaaaacatcctgaaaaagatgaggatagagcaaaaaatccagaatggcttgtaatgttaggagtatgcactcacctcggatgtgtacctttaaatgataaaggagactatggggcatggttttgtccatgtcatggttcacactacgatacatctggaagaattagaaaaggaccggcacctacaaatatggaagtgccaaaatacgagtttgtaaatagtaacactattaaaattggataga

SEQ ID NO: 210275 - DNA, 450 bp, Unknown
  Bacterial polypeptide expressing nucleotide sequence isolated from the Sargasso Sea
ttgtgggtattggtgcagtagcatggcctttgattgaccaaatgaatcctgatgcgtctgtgaaggcgttggcaagtactgaggttgatgttagttcagttgaaccaggaaatacaataactgtactatggagaggtaaaccagtttttattagaagaagaactcaagatgaaataactgaggcaaagaaagttaaaatggaagaattaaagcatcctgaaaaagatgaggatagagcaaaggatccagagtggctagtaatgctaggtatttgcacacacttagggtgtgtacccttaaatgacaaaggggactataacggttggttttgcccttgtcatggttctcactacgatacatcaggtagaataagaaaaggacctgctccaacaaacatggaagttccaaaatatgagtttgtaaatactaacacaattaaaattggataaa

SEQ ID NO: 210276 - DNA, 340 bp, Unknown
  Bacterial polypeptide expressing nucleotide sequence isolated from the Sargasso Sea
aaaactattactgttttatggagaggtaaaccagtttttattagaagaaggaccgaagatgaaattgcagaagctagatcagttaaactagaggatttaaaacatccagagagtgatgaagaaagagccaaaaatcctgagtggctagttatgttgggtgtatgtactcatcttggttgcgttcctttagatcaaaaaggagattataacggttggttttgcccgtgtcatggatcacattatgatatatctggaagaataaggaaaggtcctgcaccgactaatatggaaattcctaaatacgagttcgttaattcaaatacaatcaaaattggataat

SEQ ID NO: 210277 - DNA, 493 bp, Unknown
  Bacterial polypeptide expressing nucleotide sequence isolated from the Sargasso Sea
acgagattttttatttacagcaagctatacgataggcgcagtaggggttggagcagcgatttggcctttaattgaccagatgaatcctgataaagcgcaaaaagcattagctactactgaagtcgatattagtcaaattgaacctggaaaatcaattactgttttatggagaggaaagccagtttttttaaaaagaagaacacaagaagaaattcaagaagctagatcagttaatgttttagatctacctgaccctcaaaaagatgaggatagagttaaagatggaaaagatgagtggttagtaatgctcggagtatgtactcatttagggtgtgtaccacttaaagacaaaggagattacaaaggatggttttgtccttgccacggttcacattatgatctatcgggcagaataagaaaaggaccggcaccaaaaaatatggaagttccaaaatatgaatttgtagataacaatacaattaaaataggttaa

SEQ ID NO: 210278 - DNA, 474 bp, Unknown
  Bacterial polypeptide expressing nucleotide sequence isolated from the Sargasso Sea
aatggaagaagacaaaaaaactaaccgaagagactttatatttacagcatcatacgcgctcggcgcagtaggagtgggagctgctgtgtggccattaatagatcaaatgaatcctgatgcctcggtaaaagcacttgctagtacagaagtagatataagtggagtggaaaaaggtcagtcaataactgttctttggagaggtaaaccagtttttataagaagaagaacagaggaagaaattgtaaaagctaaagatgtaaaattagaagatttaccacatcccgaaacagatgaagagagagcaaaaaatcctgaatggttagttatgttaggtgtttgtactcacttgggctgcgttcccttaggagataaaggagaatatggcggatggttttgtccttgccatggatctcattatgatacttcaggaagaataagaaaagggcctgcgccaacgaatatggaagttccaaa

SEQ ID NO: 210279 - DNA, 461 bp, Unknown
  Bacterial polypeptide expressing nucleotide sequence isolated from the Sargasso Sea
agtaacccaaatgaacccatctgctgacgttaaagcactcgcatctattagagttgatgtttcagatgtggagccgggaacacagttaactgttaaatggttaggcaagccagtatttatacgcagacgtactgaagatgagattcaagaagcccgatccgtttctttaaacgatttgcctgatggtactgcacgtaatgaaaacatacctgaatcaagcgcagctgatgaaaatcggtctttggacgaagccggtgaatggcttgtgatgatgggtgtttgtacccatctcggctgcgttccattgggggatggcgctggtgagtttggtggttggttttgtccatgccacggttctcattacgattcttcggggcgcattcgaaagggtccggcaccagagaacttgcccgtgcctgtggcctcatttgttgacgaaactacgataaaacttggttaaa

SEQ ID NO: 210280 - DNA, 494 bp, Unknown
  Bacterial polypeptide expressing nucleotide sequence isolated from the Sargasso Sea
gatgtcagattctgataaaaaaaaaccaaatagaagagattttataataactgcaacaactgccgcaggtgccgtgggagtaggggctgctgtttggccattagttgaccaaatgaatcctgatgcatctgtaaaagcgctagcaagtaccgaggtagatataagttctattgagcctggacaatcaatcacagttttgtggagagggaaaccagtttttatcaaaagaagaaccaagaaggaaattgaaagcgcaagatcagtagatttaaaagatttaaaacatccagaaaaggatgaggaccgagcaaaaaatcctgaatggcttgttatgttaggagtttgtactcacttaggatgtgttcctttgactgataaaggagattataatgcttggttttgtccttgtcatggttcgcattatgatacttcaggaagaattagaaaaggtccagctccaacaaatatggaagttcctaaatatgaattcgtta

SEQ ID NO: 210281 - DNA, 421 bp, Unknown
  Bacterial polypeptide expressing nucleotide sequence isolated from the Sargasso Sea
tatgattgatcaaatgaatccagatgcttcagttaaggctcttgcaagcacggaagttgatgttagtaatgttaatcctggcaaaaccataacagtgttgtggagaggtaagccggtttttattcgaaggagaacaacagaggaaatatcagaagcgaaatcagttaatttagaggatttaaaagaccctcaaaaagatgaagatcgcgctaaagatcctgagtggttagttatgcttggagtttgtacccacttaggctgtgttcctttagatcaaaagggtgattacaatggttggttttgtccttgtcacgggtcacattatgatacatcagggagaattagaaaaggtccggcaccaacaaatatggaaattcctaaatatgaatttgtcaacgctaatacaattaaaattggataa

SEQ ID NO: 210282 - DNA, 523 bp, Unknown
  Bacterial polypeptide expressing nucleotide sequence isolated from the Sargasso Sea
aatgagcaaagaagaaaaaaaagttaacagaagatattttttatttacagctagctatacagtaggagcagtgggtgttggagcagttatttggccaatgattgaccaaatgaatcctgataaagctcaacaagccttagccacgacagaagttgacattagtaatatagaacctggtaaatctattactgttttgtggagaggaaaaccagtattcttaaaaagaaggacttcagaggagatcgctgaggccagagcagtaaagttggacgatttgcctgatcctcaaaaagatgaagatagagtaaaagagggtaaagacgaatggttggtcatgttaggcgtttgtacacatctaggatgtgtgcctttaaaagacaaaggtgattttaatggttggttttgtccttgtcatggttcacactatgatgtatcaggcaggataagaaaaggaccagcgccaacgaacatggagataccgaagtttgaattcgttgacagtaatacgataaagattggttaa

SEQ ID NO: 210283 - DNA, 507 bp, Unknown
  Bacterial polypeptide expressing nucleotide sequence isolated from the Sargasso Sea
gatgtcagaccaaaaagacgaaaaaaagaccaacagaagagatttcttatttaccgctacagctgctgctggtgcagtcggagtaggtgctgctgtttggccattagtcgatcaaatgaacccagatgcctctgtaaaagcattagcaagcacagaagtagatgtgagttcaatgcaacccggacaatctttaacagttctttggagaggtaaacctgtttttataaagagaagaacggatgatgaaataaaaaaagcaagagcagttgacatcaatgatcttaagcatcctgaaaaagatgaagatagagcaaaaaatcctgagtggttagtgatgcttgggatttgtactcatctaggatgtgttccattaacagataaaggtgattatgatggttggttttgtccttgccatggttctcattatgatacatctggtagaattagaaaaggaccagctccaactaatatggagatacctaaatacgaatttgtaaatactaacac

SEQ ID NO: 210284 - DNA, 523 bp, Unknown
  Bacterial polypeptide expressing nucleotide sequence isolated from the Sargasso Sea
gatgagcaaagaagaaaaaaacgttaatcgtagagattttttatttacagcaagctacactgttggagcagtgggtttgggggctgtcgtgtggcctttaatacaccagatgaatccagatagagctcaaaaagcactagcaaccacagaggttgatataagccaagttgaacctggaaaatctataactgttttatggagaggaaagccagtttttttaaaaagaagaacccaagaagaaattgctcaggcaagagcagtgagcttagaagatttaccagatcctgaaaaagatgaagaaagggttaaagagggcaaagacgagtggcttgtaatgttaggtgtgtgtactcatttagggtgtgtaccattaaaagacaaaggagattatcaaggctggttttgtccttgtcatggttctcattatgatgtttcaggaagaattagaaaaggtccagcaccaaaaaatatggaaataccaaaatttgaatttgttgataataatactataaaaattggataa

SEQ ID NO: 210285 - DNA, 519 bp, Unknown
  Bacterial polypeptide expressing nucleotide sequence isolated from the Sargasso Sea
aatgtctgaatctgataaaaaaaaaccaaatagaagagatttcatattaacagcaacaacagccgcaggagctgtaggtgttggtgcagctgtttggccattagtagaccagatgaatcctgacgcctcagtaaaagcattagcaagtacagaagtagatgttagttcagtccagcctggacaatcaataactgttatatggagaggtaagccagtttttattaaaagaagaactcaagatgagattgatagcgctagagctgtcgatttaagtgaattaaaacatccagaaaaagatgaggacagagcaaaagaccccgagtggcttgtaatgttaggagtatgtacacatcttggatgcgttccattaactgataaaggtgattacaatgcatggttttgtccatgtcatggttcgcactatgacacatcaggtagaattagaaaaggcccagctccaacaaatatggaagttcctaaatacgaatttgtaaacagtaacactataaaaataggata

SEQ ID NO: 210286 - DNA, 529 bp, Unknown
  Bacterial polypeptide expressing nucleotide sequence isolated from the Sargasso Sea
atggctaaaaaacccgatcaaaagaaaagagactttctccaactaagtacaataacacttggtgctgttggtacggctgcatttatatggcctttcataaaaagcatgagtccagccgaagatacattagctgccggatcaactgaagttgatataagtgctatagaagaaggtcaaagcattactattaaatggagaggcaaacccgtttttataaaaaaaagaactatagaagaaattgaagcagcaaaaactacaaaagcatctgatttaaaagatcctcaagatgatgcagatagagttcaaaaagatgagtggttagtattggtaggtgtatgtacacatctaggttgtgttcctttaggacagaaagtttctgatatgaaaggtgagtatgacggttggtattgtccttgtcatggatcacattacgacacatctgggagaattagaaagggaccagctccaaaaaatcttgatgttcctccctatacatttttaaatgatacaactataaagattgggtaag

SEQ ID NO: 210287 - DNA, 325 bp, Unknown
  Bacterial polypeptide expressing nucleotide sequence isolated from the Sargasso Sea
ttattggagaggcaaaccagtttttataagaagaagaactcaagaggaaataacagaagcaagatcagttaagttagaagatcttaaagatcctcaaaaagatgaagaaagagctaaaaatccagaatggttagtcatgcttggcgtttgtactcatttagggtgtgttcctttggatcaaaaaggtgactacaatggttggttttgtccatgtcacggttctcattatgatacatcaggaagaattagaaaaggaccagcgccaaccaatatggaaataccaaaatacgaatttgttaatgctaatacaattaagatcggttaa

SEQ ID NO: 210288 - DNA, 547 bp, Unknown
  Bacterial polypeptide expressing nucleotide sequence isolated from the Sargasso Sea
aatgtctactaatccaacttctaaaacaaaaaaatctgaaggtaaaagagactttctgataatttctacctacgctatggccggtatcggtgcagcttcagttgcatggcctctgattgaccaaatgaaccctgccgcagacacattggctttagcttcaacggaagtagatctatcctctcttgaagaaggtcaagcaatcacagttaaatggagaggtaagcctgtttttgttcgccatagaacaccagatgagataaaacaggctaaagaagtttctcttgatggtatgagagatccggaatccgatgaagatagagttgcgaacgaaaaatatattgtattagttggtgtttgcacacatctcggctgtgttccactcggtcaaaaatcaggagatgtaaaaggccaatatggaggttggttctgtccttgtcatggatctcattatgatcattcaggaagaattagaaaaggtcctgcccctactaacctagaagtaccttcctataaatttttgtcagataatgttattaaaattggttaa

SEQ ID NO: 210289 - DNA, 544 bp, Unknown
  Bacterial polypeptide expressing nucleotide sequence isolated from the Sargasso Sea
atgtctaaaaactctaagtcaaaaaatataagggaaggtaaaagagatttcttaataatctcgacttatgctatggctggcattggtgctgcaagtgttgcttggcctttaattgatcaaatgaatcctgctgcagatactttagcattagcatctactgaagttgatttgtcctcgttagaagaaggtcaagctataactgtaacttggagaggcaaacctgtgtttgttcgtcatagaacacccgaagaaattaagttagctaaagaagtttctttagacgaaatgagacaccccgaaacagatgaagaaagagttactaacgaaaaatttattgtattagtaggtgtttgtacacacttaggttgtgttccacttggtcaaaaatctggagatgtaaaaggacagtatggtggatggttttgtccttgtcatggatctcactatgaccattcaggaagaattagaaaggggccagcaccgactaatctagaagttccatcatacaagtttttgtctgataacattattaaaattggttaat

SEQ ID NO: 210290 - DNA, 409 bp, Unknown
  Bacterial polypeptide expressing nucleotide sequence isolated from the Sargasso Sea
agacactttggcattagcatctacagaagttgatttagaacaattagaagaaggtcaagccatcacagttacatggagaggcaaacctgtatttattagacatcgtacaaaagaagaaatagcttcagcaaaggatcaattgttagatggattaagagatcctcaaacagatgacgaacgtgttcaaaatgaaaagtatattgtacttgtgggtgtttgtactcatctaggttgtgttccacttggacaaaaatcaggtgacgttaaaggtgaatatggaggttggttttgcccatgtcacggttcacattacgatcattctggaagaattagaaaaggaccagcaccaacaaacttagagataccgcaatactcatttttgtcaaatacattaattaaaataggataa

SEQ ID NO: 210291 - DNA, 266 bp, Unknown
  Bacterial polypeptide expressing nucleotide sequence isolated from the Sargasso Sea
aagagaagtagatataaaaaatttaaaacatccagaaaaagatgaagatagagcaaaaaatccagaatggttagtgatgctaggtgtttgtactcatttaggatgtgttcctttaggagacaaaggtgaatatggtggttggttttgtccttgccacggctcacattatgatacatcaggaagaattagaaaaggaccagcaccaactaatatggaaattccaaaatatgagtttgttaatacaaatacaattaaaattggatgat

SEQ ID NO: 210292 - DNA, 453 bp, Unknown
  Bacterial polypeptide expressing nucleotide sequence isolated from the Sargasso Sea
aatgtcagaaaaaaaaactaaaagaagagactttttattcactgctacatatgctgtaggagctgtgggtgttggtgcaactatatggccaatgattgatcaaatgaacccagatgcttcagttaaagcattagctagcacagaggtagatgtgagttctgtgaacccaggaaagactataactgtactgtggagaggtaaacctgtttttattagaagaagaacacaagaggaaattgctgaggcgaaagcagtaagcttaaaagatttaaaacatcctgaaaaagatgaagaccgagcaaaagatcctgagtggttagtaatgcttggtgtctgtacacatctaggatgtgttccattagatcaaaaaggagattacaatggttggttttgcccatgccatggatcacattatgatacatccggtagaataagaaaaggtcctgctccaac

SEQ ID NO: 210293 - DNA, 523 bp, Unknown
  Bacterial polypeptide expressing nucleotide sequence isolated from the Sargasso Sea
atgagcaaagaagaaaaaaaagttaatagaagagattttttatttacagctagttataccgttggggcagtaggtgtaggggcagttatttggcctatgatcgatcaaatgaatccagataaagctcaacaagctttagcaactacagaagttgacattagtagcatagaacctggtaagtctattactgttttatggagaggtaagccaatatttattaaaaaaagaacttcagaagaaatagcagaggccagggcggtgaaattggacgatttgcctgatcctcaaaaagatgaagatagagtaaaagagggtaaggacgaatggttagttatgttgggtgtctgtacacatcttggatgtgtgcctttaaaagataaaggggactttaatggttggttctgtccttgtcacggttcgcattatgatgtatcaggcagaattaggaaaggacctgcgccaacaaatatggagataccaaagttcgaatttgtagatagtaatacgattaaaataggttaaa

SEQ ID NO: 210294 - DNA, 481 bp, Unknown
  Bacterial polypeptide expressing nucleotide sequence isolated from the Sargasso Sea
ttttttatttacagcaacctatgccgtaggagcagtaggggtgggagcaacaatttggcctatgattgatcaaatgaatcctgatgcctctgtaaaagcacttgcaagtacagaagtagatgtgagcgcggttaatccaggcaaaactataacagttttgtggagagggaaaccagtttttattagaagaagaactcaagatgagatagctgaagcgagatcagtcaagctggaggaattaaaacatcctgaaagcgatgaagaccgagctaaagatccagagtggcttgtcatgttgggtgtatgcactcatcttggatgtgttccattggaccaaaaaggtgattacaatggttggttttgtccatgtcatggatctcattatgatacatctggaagaattagaaaaggtcctgctccaactaatatggaaattcctaaatatgaatttgtcaatagtaacacaattaagattggataa

SEQ ID NO: 210295 - DNA, 466 bp, Unknown
  Bacterial polypeptide expressing nucleotide sequence isolated from the Sargasso Sea
agctgtaggaacggcagcgtttatttggccttttctttcaagcatgaatccagctgaagacacccttgcacttggcactacagaagtagatataagttctatcgaagaaggtcaaagtataacagtaaaatggagaggtaagccagtatttattcgtaaaagaaccaaagaagagattgaagaagctaaagaagttaactttacagatttgatagatccagaacaagatattgacagggtaaaaaaagaagaatggttagttctaattggtgtatgcacgcatctaggttgtgtacctcttggtcaaaagttaactgacaataagggagaatataatggctggtattgcccttgtcatggatctcactatgacacatcaggtagaatacgtaaaggtcctgctccaaacaatcttcctgttcctccatattcgtttttaaatgatacaactattaaaattggttaa

SEQ ID NO: 210296 - DNA, 448 bp, Unknown
  Bacterial polypeptide expressing nucleotide sequence isolated from the Sargasso Sea
gttggtgctgctgcagtagtgtggccaatgatagatcaaatgaatccagatgcttctgttaaagcattggctagtacagaggttgatataagttcattaacacctggaaatacattgactgttttatggagaggtaaaccagtatttataagaagaagaactcaagaagaaattgatgaagcaagatctgtgaagatggaggatttaattcatcctgaaaaagatgaagatagagcaaaaaaccctgagtggcttgttatgttaggtgtatgcactcacctcggatgtgtacctctaaatgataaaggtgattataatggttggttctgcccatgtcatggatctcattatgatacttctggaagaattagaaaaggaccagcaccttggaatatggaagtgcctaaatatgaatttgtaaatacaaatacaattaaaattggataaa

SEQ ID NO: 210297 - DNA, 514 bp, Unknown
  Bacterial polypeptide expressing nucleotide sequence isolated from the Sargasso Sea
aatgtcagataaaaaaaaagttaatcgaagagactttatttatacagcctcaacagtagtcggtgttgttggtgtcggtgcggctgcttggcctctaatagatcaaatgaatcctgatgcctctgttaaggcattagccacaactgaagttgatgtaagtttggttaaaccaggtcagtcaataactgtactatggagaggtaagcctgtgtttattaaaagaagaacagagaatgaaattactgaggcaaaagcagtgagtttaactgaactaaaacatccagagaaagatgaagatagagcaacaaaccccgaatggcttgttatgcttggagtatgtactcatcttggatgtgtgcctcttgcagataaaggagattataatggctggttttgtccttgccatggctcccactatgatacttcaggtagaattagaaaaggtccagctccaactaatttagagatacctaaatacgaattcgttaacagtaatacaattaaaattggataa

SEQ ID NO: 210298 - DNA, 511 bp, Unknown
  Bacterial polypeptide expressing nucleotide sequence isolated from the Sargasso Sea
atgtcagataaaaacccaaaaagaagagaatttttatttacagctacatatgcaataggagtggttggagttggtgctgtggcttggccattgattgaccagatgaatcctgatgcttcagtcaaggctttggcaagtacagaagttgatgttagctcagttgaacctggaaacacaataactgtactttggagaggtaagccagtttttattagaagaagaactcaagatgaaatagctgaagcaaaggcagttaaaatggaagaattgaaacatcctgaaaaagacgaggatagagcaaaggacccagagtggttagtgatgcttggtatttgtactcatttaggatgtgtgcctttaaatgataaaggtgactataatggttggttttgtccatgtcatggttctcattacgatacatcaggcagaataagaaaaggacctgctccaacaaatatgaaagttcctaaatacgagtttgtaaatgctaacacaattataatcggataaa

SEQ ID NO: 210299 - DNA, 400 bp, Unknown
  Bacterial polypeptide expressing nucleotide sequence isolated from the Sargasso Sea
tgatcgttcagtcaaagctttagcaacgactgaagtagacataagtcaaatcgagccaggtaaatcaattacagttctttggagagggaaacctgtttttattaaaagaagaaccgagtctgagatttctgaggcagagtcagttagtttaaatgaattaatacatcctgaaaaggatcaagacagagttaaaaaatccgagtggttagtcatgctaggtgtttgcacgcatcttggttgtgttcccttggcagacaaaggagaatataatggctggttttgtccttgccatggatcacactatgatacatcaggaagaatcagaaagggacctgctcctacaaatatggaaataccgaaatatgagtttgaagatagcaacactataaagattggataa

SEQ ID NO: 210300 - DNA, 463 bp, Unknown
  Bacterial polypeptide expressing nucleotide sequence isolated from the Sargasso Sea
ttgatcaatcaaatgaacccttcagcagatgttaaagcgttggcatcaattagggtagacatatctgatatcgaacctggcactcaacttactgtaaaatggttaggaaagcctgttttcattcgccgtagaaccgaagcagaaatagaagaagctcaaagtgtcaatttggatgagttgctcgacaacacagcccgaaacgacaacattgcggaagcatctgccgacgatcggaacagaagccttgacgaaaacggtgaatggctggttatgatgggtgtttgcacccatcttgggtgtgtcccgttaggtgacggtgcgggcgaatttaatggttggttttgcccatgtcatggttctcattacgacacttcagggcgaattagaaaaggtccagcacctgaaaacttagcggtgcccaaagccattttcgttgacgataccactatcaagttaggataag

SEQ ID NO: 210301 - DNA, 201 bp, Unknown
  Bacterial polypeptide expressing nucleotide sequence isolated from the Sargasso Sea
ggctagtgatgatgggtgtttgtactcacctaggttgtgttcctttaggagacggtgcgggcgagtttaacggttggttttgtccatgtcatgggtctcattacgacacatcagggcgaattagaaaaggtccagcacctgaaaacctggcggtacccaaagccgtctttgttgatgatactactatcaagctaggataag

SEQ ID NO: 210302 - DNA, 610 bp, Unknown
  Bacterial polypeptide expressing nucleotide sequence isolated from the Sargasso Sea
tttgaagtgttattttatcaatcacactgaaactttatggagacagcctgtgtcagatactcacgcagcagatggtactagacgagatttcttatattatgcaacggcaggggctggagctgtgacggctacggcggcagtatggccattaataaaccaaatgaacccatccgctgacgttaaagcactcgcatctattagagttgatgtatcagatgtggagccaggaacacagttaactgttaaatggttaggtaagccagtatttatacgcagacgtactgaagatgaaattcaagaagcccgatccgtttctttaaacgatttgcctgatggtactgcacgtaatgaaaacatacctgaaacaagcgcagctgatgaaaatcggtctttggacgaagccggtgaatggcttgtgatgatgggtgtttgtacccatctcggctgcgttccattgggggatggcgctggtgagtttggtggttggttttgtccatgccacggatctcattacgattcatcggggcgtattcgaaagggtccggcaccagagaacttacctgtgcctgtggcctcatttgttgacgaaactacgataaaacttggttaa

SEQ ID NO: 210303 - DNA, 385 bp, Unknown
  Bacterial polypeptide expressing nucleotide sequence isolated from the Sargasso Sea
aagctcttgcagtactgaagttgatataagcaatattgagaagggccaatcaataactgttttatggagaggcaaaccagtttttataagaagaagaactagtgaagaaattgcaaaagctaaaaatgtaaaattagaggatctaccgcatcctgaaactgatgaagatagagcaaagaatccagagtggttagttatgttaggagtatgtactcacctcggatgcgttccgcttggtgataaaggagaatatggtggttggttttgcccttgccatggatcccattatgatacttctggaagaataagaaaaggacctgcgccaacaaatatggaagttccaaagtacgaatttgttaatagcaacactataaagattggataa

SEQ ID NO: 210304 - DNA, 500 bp, Unknown
  Bacterial polypeptide expressing nucleotide sequence isolated from the Sargasso Sea
aatgtccgaaaaagataaaaaagaccctaatagaagagatttcattataaccgcaacaacaacagtgggtgccgtaggagcaggagctgctgtttggcctttaatagaccaaatgaatcctgatgcatcagtaaaagcattagcaagcaccgaagttgatgttagcaacatacagccaggccaatccattacagttttatggagaggaaaacctgtttttattaaaagaagaacaaacgaagaaatagagaaggcaaggtcagttgaccttaaagaattaaaacatccagagaaagacgaagagagagcaaaaaatcctgaatggctagtaatgttagggatttgtactcatcttggatgtgtacctttaggtgataaaggagattataatggttggttttgtccttgccatggatcgcattacgatacatctggcaggattagaaaaggtcccgcaccaaccaaccttgaagttccaaaatacgaatttgtaaatagta

SEQ ID NO: 210305 - DNA, 523 bp, Unknown
  Bacterial polypeptide expressing nucleotide sequence isolated from the Sargasso Sea
atgagcaaagaagaaaaaaaagttaatagaagagattttttgtttacagctagttatacagtaggagcagtgggggttggagcagttatttggccaatgattgaccaaatgaatcctgataaagcccaacaagctttagcaactacagaagttgacattagtagcatagaacctggtaagtctattactgttttatggagaggtaagccaatatttataaaaaaaagaacctcagaagaaatagctgaggcaagggcggtgaaattggacgatttgcctgatcctcaaaaagacgaagatagagtaaaagagggtaaagatgaatggttagtcatgttaggagtttgtacacatcttggatgtgtgcctttaaaagataaaggagacttcaatggttggttttgtccttgtcatggttcacattacgatgtatcaggcagaataagaaaaggaccagctccaacaaatatggaaataccaaagtttgaatttgtagacagtaatacgattaagattggttaag

SEQ ID NO: 210306 - DNA, 520 bp, Unknown
  Bacterial polypeptide expressing nucleotide sequence isolated from the Sargasso Sea
atgtcagaatcagataaaaaaaagccaaataggagagattttattttaaccgcaactactgcagctggagcagtgggggtgggagctgctgtatggccattaattgaccaaatgaacccagatgcttcagttaaagctttggcaagtactgaagtagacataagtggcgttgagccaggacagtcgataactgttttatggagaggaaaaccagtatttataaaaagaagaactcaagaagaaatagatagtgcaagatcagtagatttaaaagatttaaaacatccagaaaaagatgaagacagagcaaaagatccagagtggctagtcatgctaggagtatgtacacatttaggatgtgtgcctttaacagataaaggcgattataatgcttggttttgtccttgtcatggctctcactatgatacatcgggcagaataagaaaaggtcctgcgccaacaaatttagaagttccaaaatacgtatttgttaatagcaaaactattaaaatagggtaag

SEQ ID NO: 210307 - DNA, 316 bp, Unknown
  Bacterial polypeptide expressing nucleotide sequence isolated from the Sargasso Sea
gatggccgctcggtcgacgttggtcaattgatcgataaaaccgcccagaaccccaataaggacgaggtcgttccggcaacggatgaaaaccgcacccttgatgaagcgggcgaatggctggtgatgatcggggtctgcacgcaccttggctgtgtaccgatcggtgacggcgcaggcgagtttggcggctggttctgcccttgccacggctcgcactacgacaccgcaggccgtatccgcaaaggtcctgcaccgcagaacctgcatattcccgtcgccgcctttgtcgacgacaccacgatcaaattgggttaag

SEQ ID NO: 210308 - DNA, 460 bp, Unknown
  Bacterial polypeptide expressing nucleotide sequence isolated from the Sargasso Sea
ttgatcaatcagatgaatccttctgccgatgttcaagcactttcttcgatagaagtggacgtttctgatttggaaccaggagcccaaattactgtgaaatggctcggtaagcctgtttttatcagacgaagaacagaagatgaaattgaagaggccagagccgtagatcttgccgatctacccgatatttctgccgaaaataaaaatctcaaagaagcagatgcaaatgatgccaataggacaattgacgaagaaggtgaatggctagtgatggtaggtgtgtgcacacatttaggttgtgtgcctctaaataatgctggcgaatttggcggctggttttgcccctgtcacggatcccactatgatatatctggccgaataaggaagggccccgccccaaaaaaccttgaggtgcctgtggcaaaatttattgatgatggaatcataaaactaggttaag

SEQ ID NO: 210309 - DNA, 511 bp, Unknown
  Bacterial polypeptide expressing nucleotide sequence isolated from the Sargasso Sea
aatgtcagaaaaaaaaatcaatagaagagatttcttgttcacagcaacgtatgctgtaggagctgttggtgcaggtgcggtagtatggccaatgatcgatcaaatgaatccagatgcctcagtcaaagctcttgcaagtacagaggtagatattagttcagtaaatcctggaaaaacaattacagtattatggagaggtaaaccagtttttataagaagaagaacagaggatgaaataatggaggctagatcagttaaacttgaggaattaaaacatccagaaactgacgaagatagagcaaaaaatccagaatggcttgtgatgttgggagtatgcactcatctaggctgtgttcctctagatcaaaagggtgactataatggatggttctgtccatgtcatggatcacattatgatatttcaggaagaattagaaaaggtccagcaccaacaaacatggaaattcctaaatacgaatttgttgatgctaatacaattaaaattggataa

SEQ ID NO: 210310 - DNA, 514 bp, Unknown
  Bacterial polypeptide expressing nucleotide sequence isolated from the Sargasso Sea
atgactgatataaaaaaaccaaaaagaagagattttttacttacagttactgcagcaacaggagcagtaggggtgggtgcagcagcttggcctttaattgatcaaatgaatccagatgcttcagttaaagccttagctagcacagaagtagatattagttcagtagagccaggtcaatcaattacagttttatggagaggtaaaccagtttttattaaaagaagaactcaagaagaaataaagaaagcaagatctgttgttgttaaagatttgaaacacccagagaaagacgaagatagagctaaagatcctgagtggttagttatgcttggagtttgcacacatcttggctgtgttccattaagtgacaaaggcgagtatggaggttggttttgtccttgccatggatcacattatgatacatctggaagaataagaaagggaccggcaccaactaatatggaagtacccaagtatgaatttttgaatagcaatactatcaagattggataat

SEQ ID NO: 210311 - DNA, 448 bp, Unknown
  Bacterial polypeptide expressing nucleotide sequence isolated from the Sargasso Sea
agttggagttgcgcagcagcatggccgcttatcgaccaaatgaaccttgatgcttcagtaaaagctcttgcaacgacagaggttgatgtaagtttagtaaaacctggtcagtcaataacagtattatggaggggtaaacctgtgtttattaaaagaagaacagagaatgaaatcagtgaggcaaaatctgtgagtttaactgaactaaaacatcctgagaaagatgaagacagagcagcaaacccagaatggcttgtaatgcttggggtatgtacccatctaggatgcgtgcctcttgcagacaaaggagattataatggttggttttgtccttgtcatggttctcactacgatacatcaggtagaattagaaaaggtcccgcaccaaccaatttagagatacccagatatgaatttgttaacagcaacacaataaaaattggataaa

SEQ ID NO: 210312 - DNA, 523 bp, Unknown
  Bacterial polypeptide expressing nucleotide sequence isolated from the Sargasso Sea
aatgagcaaagaagaaaagaaagtaaatcgaagagattttttattcaccgccagctatacagttggagcagttggtctaggcgcaattgtttggcctttggttcatcagatgaatccagataaggcacaacaagctttagctacaactgaggtagatataagtcaaatcgaacctggtaaatctattacggtattatggagaggaaaacctgtttttctaaaaagaagaacacaagaagaaattaatgaagctaggtcagttaatttacaagatctgcctgatccagaaaaagacgaagatagagttaaaaaaggaaaagatgaatggttggtaatgttaggagtttgcacgcatcttggttgtgtgcctttaaaagataaaggagattataaaggttggttttgtccatgtcatggttctcattatgatttatcaggaagaattagaaaaggacctgcgccaacaaatatggagatacctaaatttgaatttgtagacagtaatacaattaaaattggataa

SEQ ID NO: 210313 - DNA, 511 bp, Unknown
  Bacterial polypeptide expressing nucleotide sequence isolated from the Sargasso Sea
aatgtctgataaaaaacctaatagaagagactttttaaccacagtaactgctgcaacaggtgccgtgggagttggagcagtagtttggccacttattgatcaaatgaaccccgatgcatctgttaaagctttggcgagtacggaggtcgatataagtctggtagaaccaggccagtccataactgtgctttggagaggaaaaccagtttttattaaaagaagaacgctggaagaaattgaaaaggcaaggcaggtaaatcttgaggatttaaaacatcctgaaaaggatgaagatagggcaaagaatccagaatggttagtcatgttaggagtatgcactcacctcggatgtgtccctttaggagataaaggtgaatatggtgggtggttttgtccttgccatggatctcattacgatacttcaggaagaattagaaaaggcccagcaccaacaaatatggaagttccaaagtatgaatttgtcaatagcaacacaataaaaattggataa

SEQ ID NO: 210314 - DNA, 331 bp, Unknown
  Bacterial polypeptide expressing nucleotide sequence isolated from the Sargasso Sea
actgtactatggagaggaaaaccagtttttatcagacgaagaactcaagaagaaatagcagaagctaaatctgtaaagatagaagatttaaaacatccagagaaagacgaagatcgagcgaaaaatccagagtggcttgttatgctgggtgtttgtacacatttgggttgtgtacctctagatcaaaaaggagattacaatggatggttctgtccttgtcatggttctcattatgatacttcaggtagaattagaaaaggtccagccccaacaaatatggaaattccagaatataaatttgttgatgctaacacaattaagatcggataat

SEQ ID NO: 210315 - DNA, 436 bp, Unknown
  Bacterial polypeptide expressing nucleotide sequence isolated from the Sargasso Sea
tgcagtggtgtggccaatgatagatcaaatgaatccagactcttttgttaaagcattagctagtacagaggttgatgtaagttcattaacacctggaaatacattgactgttttatggagaggtaaaccagtctttataagaagaagaactcaagaagaaattgatgaggcaagagccgtaaagatggaggatttaattcatccagaaaaagatgaagatagagcaaaaaaccctgagtggcttgttatgttaggtgtatgtacacaccttggatgtgtacctctaaatgataaaggtgattataatgggtggttctgtccatgtcatggatctcattatgatacttctggaagaattagaaaaggaccagcaccttggaatatggaagtgcccaaatatgaattcgttgatgcaaacacaattaaaattggataa

SEQ ID NO: 210316 - DNA, 514 bp, Unknown
  Bacterial polypeptide expressing nucleotide sequence isolated from the Sargasso Sea
aatggaagaagacaaaaaaaccaaccgaagagattttatatttacagcatcatatgcgctcggcgcagtaggagtgggagctgttgtgtggccattaatagatcaaatgaatcctgatgcatcggtaaaagcactcgcaagtactgaagtagacgtaagcggagtggaaaaaggtcagtccataactgttctttggagaggtaaaccagtttttataagaagaagaacagaggaagaaattgcaaaagcaaaagatgtaaaattagaagatctaccacatcctgaaacagatgaagagagagcaaaaaatcctgaatggttagttatgctaggtgtttgcactcacttaggctgtgttcctttaggagataaaggagaatatggcggatggttttgtccttgccatggatctcattatgatacttcaggaagaataagaaaagggcctgcaccaacaaatatggaagttccaaaatacgaatttgttaatagtaatacaataaagattggataa

SEQ ID NO: 210317 - DNA, 475 bp, Unknown
  Bacterial polypeptide expressing nucleotide sequence isolated from the Sargasso Sea
gtatcagccactacagccgctggcgcagtgggcgttggtgctgctgtttggcctttaattgaccaaatgaatcctgatgcttcagtaaaagctttagcgagcactgaagtagatataagtgggttgcaacctggccagtcaataactgttttatggagaggaaaaccagtatttataaaaagaagaaccaaagaagaaatagatagtgcaagagcagtagatttaaaggaattaaaacatccagaaaaagatgaagacagagcaaaaaatccagaatggcttgtaatgcttggagtttgtactcatctaggatgcgtgcctttaacagataaaggtgattataacgcttggttttgtccttgtcatggttcacactatgacacttcaggaagaataagaaaaggtcccgctccaacaaatttagaggttcccaaatacgaatttgttaatagtaatacaattaaaataggataaa

SEQ ID NO: 210318 - DNA, 492 bp, Unknown
  Bacterial polypeptide expressing nucleotide sequence isolated from the Sargasso Sea
aatgtctgattcagataaaaagaaaccaaatagaagagattttatattaacagcaacaacagctgcaggggctgttggtgtaggtgcagcagtttggccactagtcgatcaaatgaaccctgatgcctcagtcaaagcgcttgcaagtacagaggtagatattagttcagttcagcccggtcaatcaataactgttatatggagaggtaagcccgtttttatcaaaagaagaactcaagatgaaattgatagtgcaagagcagttgatttaagtgaattaaaacatccagaaaaagatgaagacagagctaaaaatccagaatggcttgtaatgttaggagtctgtactcaccttggttgtgttcctttaactgataaaggtgactacaatgcatggttttgtccatgccatggttctcactatgatacatctggtagaattagaaaaggtccagcccctacaaatatggaagtaccaaaatatgaatttgt

SEQ ID NO: 210319 - DNA, 491 bp, Unknown
  Bacterial polypeptide expressing nucleotide sequence isolated from the Sargasso Sea
aatgtctgaatcagataaaaaaaaaccaaatagaagagatttcatattaaccgcaacgacggctgcaggcgctgtaggtgttggtgcagctgtttggccgttagttgatcaaatgaatcctgacgcctctgtaaaagcattagcaagtacagaggtagatgttagttcagtccagcctggacaatcaataactgttatatggagaggtaagccggtttttattaaaagaagaactcaagatgagattgacagtgctagagcagtcgatttaagtgaattaaaacatccagaaaaagatgaggacagagcaaaaaaccctgagtggcttgtaatgttaggagtatgcacacatcttggatgcgttccattaactgataaaggtgattacaatgcatggttttgtccatgtcacggttctcactatgacacatcaggtagaattagaaaaggtccagctccaactaatatggaagtacctaaatacgaatttg

SEQ ID NO: 210320 - DNA, 523 bp, Unknown
  Bacterial polypeptide expressing nucleotide sequence isolated from the Sargasso Sea
aatgagcaaagaagaaaagaaagtaaatcggagagattttttatttacagctagctatacagttggagcagttggtctaggagcagtagtgtggcctctagttcatcaaatgaatccagataaagcgcaacaagctcttgcaacaactgaagtagacattagtcaaattgaaccaggaaaatcaattacagttttatggagaggaaaaccagtttttcttaaaagaagaacagaagaagaaataactgaagcaagatctgttagcttaaaagatttgccagatcctcaaaaagatgaggatagagttaaaaaaggtaaagaggagtggttagtaatgttgggcgtgtgtacacaccttggctgcgtgcctttaaaagacaaaggtgattataaaggttggttttgtccatgtcacggctcccactatgatttgtctggaagaattagaaaaggaccagcgccaactaatatggagatacctaaatttgaatttgtagataacaatacaattaaaattggataa

SEQ ID NO: 210321 - DNA, 511 bp, Unknown
  Bacterial polypeptide expressing nucleotide sequence isolated from the Sargasso Sea
aatggcggaaaaaaaaactaatagaagagattttttatttacagctacgtatgctgttggagcggttggggtaggcgctacagtttggccgatgatcgatcaaatgaacccagatgcttctgtaaaagcgttagctagtacagaagtagatgtgagttccgtaaatccgggaaaaacaattacagttctttggaggggaaaaccagtttttataagaagaagaacagatgacgaaattgcggaagcaagatcagtcaaattggaagatctaaaacatcctgaaaaagatgaagatcgtgcacaaaatccagagtggcttgttatgcttggagtttgcactcatcttggatgtgtgccccttgatcaaaagggagattataacggttggttttgtccatgtcatggatcacattatgatacgtcgggtagaattagaaaaggaccagccccaacaaacatggaaatacctaaatacgaatttgtaaatgcaaatacaatcaaaattggatag

SEQ ID NO: 210322 - DNA, 472 bp, Unknown
  Bacterial polypeptide expressing nucleotide sequence isolated from the Sargasso Sea
atggctgaaaatcctgataataaaagaagagactttttacaactaagtactgtaacaattggagcggttggtactgcagcatttatatggccgttccttaaaagcatgaaccctgcagaagatactatagcccttggaactacggaagttgatatcagtcaaatagaagaaggacaaagtataactgtgaaatggagaggaaagccagtatttattcgcaagaggacaagtaatgaaattgaagaagcaaaaactgttaatatttctgacttaaaggatccagaagaagatatagatcgtgtaaagaaagatgaatggctagttttggttggcgtttgtactcatctaggttgtgtgcccctaggtcaaaaattaacagatagtaaaggtgaatataatggctggtattgtccttgtcatggatcgcattacgatacatcaggcagaataagaaaaggacctgcacctgaaa

SEQ ID NO: 210323 - DNA, 471 bp, Unknown
  Bacterial polypeptide expressing nucleotide sequence isolated from the Sargasso Sea
tcactacaggtgcatttgcagctgcgggagcggcttcattggcatggcctttcgttgatcaaatgaatcctgatgcatcagtcaaagctttagcgtctactgaaattgatctcagacctataatacctgggcagagcatcactgtaatgtggagaggtaaacccgtatttattcgaaggcggacacaggctgaaattgatgaagcaaagaaagttaatttagctgatttgccccacccagaagccgatagtgatcgagcacaaaatcctgagtggcttgttatggttggtatttgcacacatcttggttgtgttccacttggacagaaaggtgattacaatggatggttctgtccatgccatggttctcattatgatacatcaggtaggataagaaagggacctgcacctacaaatcttgagattccggattatgtattcttaaacgaaactactataaaaattggataaa

SEQ ID NO: 210324 - DNA, 511 bp, Unknown
  Bacterial polypeptide expressing nucleotide sequence isolated from the Sargasso Sea
atgtcagaaaaaaaaaccaagagaagagatttcttatttactgccacttacgcagtaggtgcagtaggtgtaggggcaacagtttggccgatgatcgatcagatgaatccagatgcctccgttaaggctcttgctagtacagaagtagacgtgagcgcagttaaccctggaaaaacgataactgtattgtggaggggtaaaccagtttttattagaagaagaactcaagatgaaattgcagaagcaaggtctgttaaactagatgatttgaaacatcctgaaactgatgaggatagagctaaaaaccctgagtggttagtaatgcttggtgtgtgtactcatttaggatgtgtaccattagaccaaaagggtgattacaatggatggttttgtccatgtcatggatcacattatgatacatcagggagaataagaaagggtcctgcaccaactaatatggaaattcctaaatatgagtttgttgatgcaaacacaattaagattggataaa

SEQ ID NO: 210325 - DNA, 523 bp, Unknown
  Bacterial polypeptide expressing nucleotide sequence isolated from the Sargasso Sea
atgagtaaagaagaaaaaaaagtaaatcgaagagattttttatttacagctagctacactgtaggagcagttggtttgggagctgtagtttggcctttggttcatcaaatgaatccggataaagctcaacaggcacttgcaacaacagaggttgatattagtcaaattgaacctggcaaatctataacagtattatggagaggaaaacctgttttcttaaaaagaagaactcaagaagaaatagctgaagctagatctgtcaatttaaaagatttaccagaccctcaaaaagacgaagatagagttaaaaaaggtaaagatgaatggttggtaatgttgggcgtatgcactcatcttggttgtgtgcctttaaaagataagggagattacaaaggatggttttgcccttgccatggttctcattacgatttatcaggaagaattagaaaaggtcctgcaccaacaaatatggagatacctaaatttgaatttgtagataataatataattaaaattggataga

SEQ ID NO: 210326 - DNA, 511 bp, Unknown
  Bacterial polypeptide expressing nucleotide sequence isolated from the Sargasso Sea
aataaaagaagagactttctacaattaagtactgttacaatcggcgcagttggaacagctgcattcatttggcctttcttaaaaagcatgaatcctgcagaggatacaatagctctagggacaactgaggttgatgtaagtcaaatagaagaggggcaaagtattacagttaaatggcgaggaaagcctgtattcattcgtaaaagaacaaaagatgaaatagatgaggcaaaaactgtcaacatgtctgatttaaaagatcctgaggaagatgttgaccgtgtaaaaaaagatgagtggttagtgcttgttggagtatgtacccacttaggttgtgttccacttggacaaaaattaactgactcaaaaggtgaatacaacggctggtattgtccatgccacggatcacactatgatacatctggtagaataagaaaaggacctgctcctgaaaatcttgcagtacctccttattcctttttaaacgatacaacaattaagattggttaga

SEQ ID NO: 210327 - DNA, 477 bp, Unknown
  Bacterial polypeptide expressing nucleotide sequence isolated from the Sargasso Sea
aatggctaaaaaacccgataataagagaagagattttttacagttaagtactgtaactctaggagcagttggaactgctgcattcatttggccatttctaaaaagtatgagtccagcagaagatactctagctgcaggatcaacagaagttgacataagttcaattgaagaaggccaaagtattactgttaagtggagaggcaaacctgtttttattaaaaaaagaaccaaagaagagatagaagcagctaaaatagtaaaagcatctgatttaagagatccccaagatgattctgatagagttcaaaaagaagaatggttaatattagtaggtgtttgtacacatttgggttgtgtaccacttggtcaaaaggtatctgatatgaaaggtgaatataatggttggtattgtccttgtcatggatctcattacgatacttcaggcagaattagaaaaggtccagctcctaaaaattt

SEQ ID NO: 210328 - DNA, 488 bp, Unknown
  Bacterial polypeptide expressing nucleotide sequence isolated from the Sargasso Sea
aagagattttttattcacagctaccacagctgtaggagctgtaggagctgccgcagtagtttggcccatgatagaccaaatgaatccagatgcttctgtcaaagcattagctagcacagaggtagatgtaagttcattaacacctggaaatactttgactgttttgtggagaggtaagccagtatttattagaagaagaaccaaagaagaaattgaagaggcaagagccgtgaagatggaagatctaattcatcctgagaaagatgaagatagagcaaaaaatccagagtggcttgttatgttgggtgtttgtacacatttaggatgtgtgccattaaatgataaaggagattacaatggttggttctgtccatgtcatggatctcattatgacacttcgggaagaattagaaaaggtccagcaccttggaatatggaagtccccaaatatgaatttgttaatgcaaatacaattaaaattggataaa

SEQ ID NO: 210329 - DNA, 511 bp, Unknown
  Bacterial polypeptide expressing nucleotide sequence isolated from the Sargasso Sea
aatgtcagaaaaaaaaaccaatagaagagactttttatttacagcaacttatgctgtaggagcagtaggagtaggtgcaacgatttggcctatgatagatcagatgaatcctgatgcttctgttaaagcacttgcaagcactgaggttgatgtaagttcggttaatccaggaaaaactataaccgtattatggagaggaaagccagtttttattcgaagaagaactcaagacgaaatatcagaagcaagatcggtcaaactagaggatttaaaggatccgcaaaaagatgaagatcgtgctaaggatcctgagtggttagtgatgcttggagtttgtacccatttaggatgtgttcctttagatcaaaaaggtgattacaatggttggttttgtccttgtcacggttcacattacgatacgtcaggaagaattaggaaaggtccagcaccaacaaacatggaaatacctaagtatgaatttgttaacgcaaacacaattaaaattggataa

SEQ ID NO: 210330 - DNA, 382 bp, Unknown
  Bacterial polypeptide expressing nucleotide sequence isolated from the Sargasso Sea
ccttgccagtaccgaggtcgacctttcagctattgagcaaggacaggctattaccgtgatttggcgtgggaaaccagtattcatcagacaccggactgccaaagaaatttctcaagccgaagacactaacttagaagctcttcctgatccgcaggctgactcggagagagttcaaaaggccgagtggctgatattggtaggggtgtgcacccatttgggctgcgtccccctaagccatactggcgaatacgaaggttggttctgcccgtgccatggctctcactatgatacctcaggaagaatccggaaaggacctgcaccggctaacttggccgttcctgagtatgtatttattgatgatttgaaagtaagaattggctag

SEQ ID NO: 210331 - DNA, 514 bp, Unknown
  Bacterial polypeptide expressing nucleotide sequence isolated from the Sargasso Sea
aatgtctgaagaaaaaaaaactaatagaagagatttcatatttacagcatcatacgcattaggagcagtcggagtaggagcggctgtgtggcctttagtggatcaaatgaatccagatgcttcagttaaagcattagctagcacagaagtagatgtaagcggtgtagaagttggtcaatcgataacagttttatggagaggaaaaccagtttttataagaagaagaactagtgaagaaattgcaaaagctaaagatgtaaatttagatgatctaccacatcctgaaactgacgaagatagagcaaagaatccagagtggttagttatgttaggagtatgtacacacctaggatgtgttcctttgggagacaaaggagaatatggtggatggttttgcccttgccatggatcgcattatgatacttctggaagaataagaaaaggcccagcacctacaaatatggaagttcccaaatacgaatttgtaaatagtaatactataaagattggataa

SEQ ID NO: 210332 - DNA, 307 bp, Unknown
  Bacterial polypeptide expressing nucleotide sequence isolated from the Sargasso Sea
gtttttatccgaagaagaacacaagatgaaatagcagaggcaagatctgtaaaattagaggacttgaaagatcctcaaaaagatgaagatcgggcaactaatccagagtggctggttatgcttggagtttgtactcatttaggttgcgtacctctagatcaaaaaggtgactttaacggatggttttgcccatgtcatggctcacattatgatacttctgggagaataagaaagggtcctgcaccaactaatatggaaattcctaaatacaaatttgtagatgctaacacaatcaaaattggataaa

SEQ ID NO: 210333 - DNA, 511 bp, Unknown
  Bacterial polypeptide expressing nucleotide sequence isolated from the Sargasso Sea
gatgtcagaaaaaaaaactaatagaagagatttcttatttacagctacctatgctgtcggagcagtaggagcgggcgcagtaatttggccaatgatagatcaaatgaacccagacgcatcagttaaagcgttagcaagcactgaagttgatgtaagtacggtgaatcccggaaaaactataactgttttatggagaggaaaaccagtttttatcagacgaagaactccagaggaaatagctgaagcaaaatctgtaaagattgaggatttaaagcatccagagaaagacgaagatcgagcaaaaaatccagagtggcttgttatgctaggagtatgtacacacttgggttgtgtgcctttagatcaaaaaggagattacaacggatggttctgtccgtgtcatggttctcattatgacacctcaggtagaattagaaaaggtccagctccaacaaatatggaaattccagaatacaaatttgttgatgccaacacaattaagattgggtaa

SEQ ID NO: 210334 - DNA, 340 bp, Unknown
  Bacterial polypeptide expressing nucleotide sequence isolated from the Sargasso Sea
taaatggagaggcaagcctgtatttataagaagaagaacccaagaagaaatagttgaatcaagaaatgtttcaatagactctcttagagaccctcaaaaagatgaggaaagagttcaaaaagatgaatggcttattgtattaggtgtttgcactcatcttggatgtgtgcctctaggtcaaaaagctagtgatataaaaggtgagtatgggggatggttttgcccatgccatggttctcattatgattcatctggaagaataagaaaaggtccggcacctcaaaatcttgaaataccaccttataattttatatcagatagtatagttaaaattggttga

SEQ ID NO: 210335 - DNA, 467 bp, Unknown
  Bacterial polypeptide expressing nucleotide sequence isolated from the Sargasso Sea
catgtctgataaaaaaccaaaaagaagagaatttttatttaccgcaacatatgcattaggagcggttggtgctggtgcagtagtctggccattgatagaccagatgaatcctgatgcatcagttaaggcgttggcgagcacagaagttgatgttagttcagtagagccaggaaatactataactgtactttggagaggtaaaccagtttttataagaagaagaactcaagatgaaatagctgaagcgaaagcagttaaaatggaagaattaaaacatcctgaaagagatgaggatagagcaaaagatccagagtggttagtgatgcttggcatttgtactcatttagggtgtgtgcctttaaatgataaaggagactataatggatggttttgtccgtgtcatggttctcactatgatacatctggtagaataagaaaaggacccgctccaacaaatatggaagttc

SEQ ID NO: 210336 - DNA, 520 bp, Unknown
  Bacterial polypeptide expressing nucleotide sequence isolated from the Sargasso Sea
gatgtcggattctgataaaaaaaaacccaatagaagagactttattttaactgcgacagctgcggcaggtgctgtaggggttggggctgcagtttggcctctagtagatcaaatgaatcctgatgcatcggttaaagcacttgcaagtactgaagttgatataagctcaattgagccaggccaatcaattacagttttgtggagaggaaaacctgttttcataaaaagaagaaccgaagatgaaataaaaagtgctagggcagtagatttaaaagatttgaaacatccagagaaagacgaagatcgagctaaaaacccagagtggttagtgatgcttggtgtttgtacgcacttaggatgcgtgcctttaacggataagggagattataatgcttggttttgtccttgtcatggatctcattatgatacttcggggagaattagaaaaggaccagctccaactaacatggaagttcctaaatatgaatttgttaataacaatactataaaaattggataa

SEQ ID NO: 210337 - DNA, 514 bp, Unknown
  Bacterial polypeptide expressing nucleotide sequence isolated from the Sargasso Sea
aatgtctaaagaaaaaaaaattaaaagaagagatttcatatttacagcatcttatgttttgggcggggttggagtaggagcggctgtttggccattaattgaccagatgaatccagacgcctctgtgaaagcactagccagcactgaggtagatgtaagttcagtacaaccaggtcagtcaatcacagttttatggagaggtaagccggtctttataaagagaagaactcaagatgaaatagctgaagccaaagctgttgatttaaaagatttaaaacatccagaaaaagacgaggatcgtgcaaaaaatcctgagtggcttgttatgcttggtatttgtactcacctagggtgcgtccctttaggggacaaaggagaatataatggctggttctgtccatgtcatggctctcattacgacacctctggaagaattagaaaaggacctgctccaacaaatttagaaataccaaaatacgaatttgtaaataacaacacaataaaaattggataa

SEQ ID NO: 210338 - DNA, 565 bp, Unknown
  Bacterial polypeptide expressing nucleotide sequence isolated from the Sargasso Sea
aatgagcaaagaagaaaaaaaagttaatcgaagagattttttatttacagccagttatacagtaggcgcggttggcttaggcgcagttatttggcctcttattgaccaaatgaacccagacaaagctcaacaagctttagccacaactgaggtggatataagtaatattgaacctggaaaagaaatcacggttctatggagaggaaaaccagtttttttaaaaagaagaacccctgaagaaattgcagaggctagagcagtaagcttggacgatttgcccgatccacaaaaagatgaagaaagagtaaaacaaggtaaggatgaatggctagttatgctaggtgtctgcacacatttaggttgtgttccgctaaaaaataaaggtgaatataaaggttggttctgtccttgtcacggttctcattatgatgtttcaggaagaataagaaaaggaccagcgccaaaaaatttggaaatacctaaatttgagtttgttgacagtaacacgattaaagatcgggataaaaatatgaagcgaacacgggatatacaacaaaaatctaaa

SEQ ID NO: 210339 - DNA, 523 bp, Unknown
  Bacterial polypeptide expressing nucleotide sequence isolated from the Sargasso Sea
aatgagcaaagaagaaaagaaagtaaatcgaagagattttttatttacagctagttacactattggagcagtaggagttggagcggtaatttggccaatgatagaccaaatgaatccagataaagctcaacaagctttagcaactacagaagttgacattagcagtatagaacccggaaaatctattactgttttatggagaggaaagccaatatttataaaaaaaagaacctcggaggaaatagctgaggccagggcggtaaaattggacgatttgcctgatcctcaaaaagatgaggatagagtaaaagaaggaaaagatgaatggttagtcatgctaggagtttgtacacaccttggatgcgttcctttaaaagataaaggagatttcaatggttggttttgtccttgccatggttcacattacgatgtatcaggcagaataagaaaaggaccagctccaacaaatatggaaataccaaagtttgaatttgttgatagcaatacaattaaaattggataa

SEQ ID NO: 210340 - DNA, 513 bp, Unknown
  Bacterial polypeptide expressing nucleotide sequence isolated from the Sargasso Sea
tggaagaagacaaaaaaactaaccgaagagactttatatttacagcatcatatgcgctcggtgcagtaggagtgggagctgccgtgtggccattaatagaccaaatgaatcctgatgcatcggtaaaagcacttgccagtacagaagtagacgtaagtggagtggaaaaaggtcagtcaataactgttctttggagaggtaaaccagtttttataagaagaagaacagaggaagaaatttcaaaagccaaaaatgtaaaattagaagatctaccacatcctgaaacagatgaagatagagcaaagaatcctgaatggttagttatgttaggtgtttgtactcacttgggctgtgttcctttaggagataaaggagagtatggtggatggttttgtccttgtcacggctcacattatgatacctcaggaagaataagaaaaggacctgcaccaacaaatatggaagttccaaaatacgaatttgtaaatagtaatacaattaagattggataaa

SEQ ID NO: 210341 - DNA, 536 bp, Unknown
  Bacterial polypeptide expressing nucleotide sequence isolated from the Sargasso Sea
taaaatcaaatgtcaaacagtagaaaaccaaagaagagattttataaaattatctgcaatgactctggagggggtcggagctgctagcttactaataccttttatatctagcatgaatccaggaaaagatactcttgccttagcatcgacagagatagatttatcccctcttgaagaaggtcaaagtttgacagtaatatggagaggcaaaccagtttttataaagcatagaactaaaagtgaaattgatatagcaaaaaacacatctttagatgaacttccggacgctgaagaggattcagcaagagttcaaaaagataattggttagttgttcttggtgtttgcactcatttaggttgcgttcctctcggtcaaaaagcttcagatacaaaaggagattacggtgggtggttctgtccatgtcatggttctcattatgatacttcgggaagaatccgtaagggacctgcaccaactaatttacctgttcccccgtatgtatttttaacagataacagaataaagataggataaa

SEQ ID NO: 210342 - DNA, 400 bp, Unknown
  Bacterial polypeptide expressing nucleotide sequence isolated from the Sargasso Sea
gatgcatcgggtaaaagcacttgccagcacagaagtagacgtaagtggagttgaaaaaggtcagtcaataactgttctttggagaggtaaaccagtttttataagaagaagaacagatgaagaaattacaaaagccaaaaatgtaaaattagaagatctgccacatcctgaaactgatgaagagagagcaaaaaatcccgagtggttagttatgttaggtgtttgtactcacttgggctgtgtacctttaggagataaaggggaatatggcggatggttttgtccttgtcacggatcacattatgatacttccggaagaattaggaaaggtcctgcgccaacgaatatggaagttccaaaatatgaatttgttaacagtaatacaattaagattggataa

SEQ ID NO: 210343 - DNA, 445 bp, Unknown
  Bacterial polypeptide expressing nucleotide sequence isolated from the Sargasso Sea
atttggccttttttaaaaagtatgaatcctgcagaggatacgatagctcttggaacaactgaagtggatattagtcaaatagaagagggacaaagtataacagtaaaatggcgaggaaaaccagtctttattcgtaaaagaactaaaggtgaaatagatgaagcaaaaacagtcaacatatcagatttaaaagatcctgaaaaagatgttgatcgtgtaaaaaaagatgaatggttagtgttggtaggagtttgcactcatttaggctgtgttccccttggtcaaaaattaactgactctaagggtgaatacaatggttggtattgtccttgccacggatcacattatgatacatctggaagaattagaaaaggacctgccccagaaaatcttgcagtacctccttattcttttttaaatgattcaacaattaagattggttaat

SEQ ID NO: 210344 - DNA, 310 bp, Unknown
  Bacterial polypeptide expressing nucleotide sequence isolated from the Sargasso Sea
gtacaaggccgaaatcgacgaagcggccggcgtcaagctgactgacctgcccgatccggagcccgattccaaaagggtaaagaagggcgaggccgaatggctggtcctggtcggtgtctgcacccatctgggctgcatcccgctggggacgtcccagggtgaaaccaagggcgaatatgacggctggttctgcccgtgccacggttcgcactatgattcatccgggcgcatcagaaagggcccggcgccccgtaatctggaagtgccggattacaacttcatcagcgactccgtcatcaagatcggctga

SEQ ID NO: 210345 - DNA, 282 bp, Unknown
  Bacterial polypeptide expressing nucleotide sequence isolated from the Sargasso Sea
atgagatagatgaagctagatcagtaaaaatggaagaattaattcatccagaaaaagatgaagatagagcaaaaaatccagagtggcttgttatgttgggtgtttgcacacatttaggatgtgtgccattaaatgataaaggagatttcaatggttggttctgtccatgtcatggatctcattatgatacttcaggaagaattagaaaaggaccagcaccttggaacatggaagttcccaaatatgaatttgttaatgcaaatacaattaaaattggataaa

SEQ ID NO: 210346 - DNA, 484 bp, Unknown
  Bacterial polypeptide expressing nucleotide sequence isolated from the Sargasso Sea
agacaaaaaaccaaaaagaagagatttcttatttacagcttcatatgctgttggagcagttggagcagctgcagtagtttggccgcttgtagaccaaatgaatcctgatgcatcagtaaaagcattggcaagtacagaagtcgatattagctctttaacaccaggcaatacaataactgtgctttggagaggaaaaccagtttttataagaagacgaactcaggaagaaatagctgaagcaagatctgttaaaatggaggatttaatacacccagaaaaagatgaagatagagcaaaaaatcctgaatggttagtaatgcttggtgtatgcactcaccttggatgtgttcctttaaatgataaaggagattataatggatggttttgtccttgtcatggttcacactatgatacatctggaagaattagaaaggtccagcaccatggaacatggaaatttccaaatatgaatttggttaacact

SEQ ID NO: 210347 - DNA, 520 bp, Unknown
  Bacterial polypeptide expressing nucleotide sequence isolated from the Sargasso Sea
atgtctgaatcagataaaaaaaaaccaaataggagagatttcatattaactgcaactactgctgcaggcgctgtaggtgttggtgcagctgtttggcctttagttgatcaaatgaatcctgacgcctcagtaaaagcattagcaagtacagaagtagatgttagctcagttcaacctggtcaatctataactgttatatggagaggtaaacctgtttttattaaaagaagaactcaagatgagattgatagcgctagagcagtcgatctaagtgaattaaaacatccagaaaaagatgaggacagagcaaaagaccccgagtggcttgtaatgttaggagtatgtacacatcttggatgtgttccattaactgataaaggtgattacaatgcatggttttgtccatgtcatggttctcactatgatacatcaggtagaattagaaaaggcccagctccaacaaatatggaaatacctaaatacgaatttgtaaacagtaacactataaaaataggataat

SEQ ID NO: 210348 - DNA, 533 bp, Unknown
  Bacterial polypeptide expressing nucleotide sequence isolated from the Sargasso Sea
atttatggcagaaaattccaataataaaagaagagactttcttcaattaagtactgttacaatcggcgcagtaggaacagctgcattcatttggcctttcttaaaaagtatgaatcctgcagaggataccatagctcttgggacaactgaggttgatgtaagtcaaatagaagagggacaaagtattacagttaaatggcgaggaaagcctgtatttattcgtaaaagaacaaaagatgaaatagatgaagcaaaaactgttaacatgtctgatttaaaagatcctgaggaagatgttgacagggtaaaaaaagatgagtggttagtgcttgttggagtatgtacccatttaggttgtgttccacttggacaaaaattaactgactcaaaaggagaatacaacggttggtattgtccatgccacggatcacattatgatacatctggtagaataagaaaaggacctgctccagaaaatcttgcagtacctccttattcctttttaaatgattcaacaattaagattggctaga

SEQ ID NO: 210349 - DNA, 526 bp, Unknown
  Bacterial polypeptide expressing nucleotide sequence isolated from the Sargasso Sea
tatgtacaaatcagagaaaaagacaactactagaagagactttttatttacgactagttatacacttggagcggtcggtttaggtgcagtaatatggcctttgatagaccaaatgaatcctgataaagctcaaaaagctttggcaactactgaagtggatataagccaaattgaacctggtaagtctataactgttttatggagagggaaaccagtatttttaaaaagacgaactcaagaggaaattttagaggcaagatcagtttctttagacgatcttcctcatccagagaaagatgaagaaagggtcaaaagtggaaaagacgagtggctagttatgcttggagtatgtacccatcttggatgtgtgcctttatctgacaaaggtgattacaaaggatggttttgtccttgtcatggatcacattacgatttatctggaaggattagaaaaggtccagctcctaaaaatatggaaattcctaaatatgaatttgttgacgctaacacaattaagattggataa

SEQ ID NO: 210350 - DNA, 514 bp, Unknown
  Bacterial polypeptide expressing nucleotide sequence isolated from the Sargasso Sea
aatgtcagataaaaaaccaaaaaatagaagagattttatagttaccgcaactactgcagcaggcgcagtaggagtgggtgctgcaatatggcctttagttgaccaaatgaatcccgatgcttctgttaaagctttagcaagtactgaagtcgatataagttcagttaaaccaggtcaatcgataacagttgtttggagaggcaaaccagtttttatcaaaagaagaacacaagatgaaatagataaagcaagatctgtatctttaaatgaattaaagcatccagagaaagatgaggacagagttaaaaatcctgaatggctagttatgcttggtatttgcacacacttaggatgtgttcctttatcagacaaaggagaatatgacggttggttttgtccatgtcacggatcacattatgatacttctggaagaattagaaaagggccagcaccaataaatatggaaatccctgagtatgtttttttaaatgagagtacaattaaaattgggtaa

SEQ ID NO: 210351 - DNA, 520 bp, Unknown
  Bacterial polypeptide expressing nucleotide sequence isolated from the Sargasso Sea
gatgtcagaatcagataaaaaaaagccaaatagaagagattttattttcacagctacagcggcagcaggagctgtaggtgtaggtacggctgtttggcctttaatagaccaaatgaatcctgacgcatcagtaaaagccatggctagcactgaagttgacataagttctgtacaaccgggtcaatcaataactgttttatggagaggcaagccagtatttataaagagaaggactcagaaagaaatagatagcgcaagatctgtagacttaaaagatctaaaacatcctgaaaaagatgaggacagagcaaaaaatccagagtggcttgtgatgcttggagtatgtactcatttaggatgtgtgccattaactgataaaggagattataacgcctggttttgtccttgtcatggttctcactacgatacatcgggaagaataagaaaaggccctgctccaacaaatttagaagttcccaaatatgtatttgttgatagcaaaactataaaaataggataa

SEQ ID NO: 210352 - DNA, 334 bp, Unknown
  Bacterial polypeptide expressing nucleotide sequence isolated from the Sargasso Sea
agaggaaaaccagtttttattcgtagaagaactgaagaagaaattttagaagcaaaaagtgtagatttaaatattttaaaagatcctatgtctgatgaagatagagtaaaaaaagaagagtggcttgtattggaaggtgtctgcacacatttaggatgtgtacctcttggtcaaaaaatgtctgatacaaaaggtgaatataatggatggttttgtccttgtcatggttctcattatgattcttctggaagaatacgtaaaggtcctgctcctgacaatttagcaatacctccatatcaatttattaacgatacaactattaagattggataaa

SEQ ID NO: 210353 - DNA, 409 bp, Unknown
  Bacterial polypeptide expressing nucleotide sequence isolated from the Sargasso Sea
aatgaatcctgatgcatcagtaaaagcattggcaagtacagaagtcgatattagctctttaacaccaggcaatacaataactgtgctttggagaggaaaaccagtttttataagaagacgaactcaggaagaaatagctgaagcaagatctgttaaaatgaaggatttaatacacccagaaaaagatgaagatagagcaaaaaatcctgaatggttagtaatgcttggtgtatgcactcaccttggatgtgttcctttaaatgataaaggggattataatggatggttttgtccttgtcatggttcacattatgatacctctggaagaattagaaaaggcccagcgccatggaatatggaaattccaaagtacgaatttgtaaacgctaatacaatcaaaattggataa

SEQ ID NO: 210354 - DNA, 476 bp, Unknown
  Bacterial polypeptide expressing nucleotide sequence isolated from the Sargasso Sea
ttcaattggtgggattggtactgcagcatttatttggccttttttaaaaagtatgaatcctgctgaagatacgcttgctttaggctccactgaagtagatatttcagaaataggtgttggtgaagcaataacagttaaatggcgtggtaaaccaatttttattagaaggagaacacaggaagaaatccaagaagcaaaaattgttgatattaaatctttgaaggatccagaaaatgattctgacagaattgaaaaagaagaatggttagtagttttaggagtttgtactcatttaggttgtgttcctttaggtcaaaaaatgtctgatagtaaaggtgaatataatggatggttttgtccttgtcatggttcacactatgattcatcagggcggattagaaaaggacctgcaccagataacttagccgttcctccttattcttttataaatgaaacaacgattaagattggttaaa

SEQ ID NO: 210355 - DNA, 491 bp, Unknown
  Bacterial polypeptide expressing nucleotide sequence isolated from the Sargasso Sea
aagaagagattttttatttacagccaccacagctgtaggagctgttggtgctgctgcagtagtgtggccaatgatagatcaaatgaatccagatgcttctgttaaagcattggctagtacagaggttgatataagttcattaacacctggaaatacattgactgttttatggagaggtaaaccagtatttataagaagaagaactcaagaagaaattgatgaagcaagatctgtgaagatggaggatttaattcatcctgaaaaagatgaagatagagcaaaaaaccctgagtggcttgttatgttaggtgtatgcactcacctcggatgtgtacctctaaatgataaaggtgattataatggttggttctgcccatgtcatggatctcattatgatacttctggaagaattagaaaaggaccagcaccttggaatatggaagtgcctaaatatgaatttgtaaatacaaatacaattaaaattggataaa

SEQ ID NO: 210356 - DNA, 487 bp, Unknown
  Bacterial polypeptide expressing nucleotide sequence isolated from the Sargasso Sea
atgagcaaagaagaaaagaaagtaaatcgaagagattttttatttacagctagttacacaattggagcagtaggagctggagcgataatttggccaatgatagaccaaatgaatccagataaagctcaacaagctttagcaacgacagaagttgacattagtagtatagaacccggcaaatctattactgttttgtggagaggaaagccgatatttataaaaaaaagaacctcagaggaaatagctgaggccagggcggtaaaattggacgatttgcctgatcctcaaaaagatgaggatagagtaaaagaaggaaaagacgaatggttagttatgctgggagtttgtacacaccttggatgtgtgcctttaaaagataaaggagatttcaatggttggttttgtccttgccacggttcacattacgatgtatcaggcagaataagaaaaggaccagctccaacaaatatggaaataccaaagtttg

SEQ ID NO: 210357 - DNA, 514 bp, Unknown
  Bacterial polypeptide expressing nucleotide sequence isolated from the Sargasso Sea
atgtctgataaaaaacaaaaaaacagaagagattttatatttacagcaactgcagcggccggagctgtaggggttggggccgcggtatggcctcttgtagaccaaatgaatcctgatgcctcagttaaagctttagctagtactgaagttgatattagttctgttaaacctggtcaatcgataacagtagtttggagaggtaaaccagtatttattaaaagaagaactcaagatgaaataaataaagcaagatctgtatccttagatgaattgaaacatccggaaaaagatgaagatagagttaaaaaccccgaatggttagttatgttgggtatttgtacccacctaggatgtgttccattgtcagacaaaggtgaatacgatggttggttttgtccgtgtcatggttcacattatgatacatcaggaagaataagaaaaggtccagcaccaatcaacatggaaattccagagtatgtttttctaaatgataatacgattaaaattggataat

SEQ ID NO: 210358 - DNA, 464 bp, Unknown
  Bacterial polypeptide expressing nucleotide sequence isolated from the Sargasso Sea
cacagctgtaggtgctgttggcgccgcagcagtagtgtggccaatgatagatcaaatgaatccagatgcttccgttaaagcattggctagtacagaggttgatgtaagttcattaacacctggaaatacattgactgttttatggagaggtaaaccagtatttataagaagaagaactcaagaagaaattgatgaggcaagaaaagttaaaatggaagatttaattcatccagaaaaagatgaagatagagcaaaaaaccccgagtggcttgttatgttaggtgtatgtacccatcttggatgtgtacctctaaatgataaaggtgattataatggttggttctgtccatgtcatggatctcattatgatacttctggaagaattagaaaaggaccggcaccttggaatatggaagtgcctaaatatgaattcgttgatgcaaacacaattaaaattggataaa

SEQ ID NO: 210359 - DNA, 463 bp, Unknown
  Bacterial polypeptide expressing nucleotide sequence isolated from the Sargasso Sea
ttatgctcttggtgcagttggtgttggtgcagctgtatggccattgatagatcagatgaatccagatagctcagtaagagctctagcaaatactgaagtagatgtaagtacaattgaacctggaaaatcaataactgttctttggagaggaaaaccagtttttataaagagacgaactgaagaagaaatagcagaagcaaaagcagtaaatttaaaagacctaaaacaccctgaaaaagatgaagatagagcaaaaaatcctgaatggttagtgatgattggagtatgtactcatcttggatgtgtgcctttaggagataagggtgagtacaatggatggttctgtccatgccatggatcacattatgatacttcaggaagaattagaaaaggtcctgctccaacaaatttggaaataccaaaatatgaatttgttaatagcaatacaattaaaattggataa

SEQ ID NO: 210360 - DNA, 511 bp, Unknown
  Bacterial polypeptide expressing nucleotide sequence isolated from the Sargasso Sea
atgtcagagaaaaaaactaatagaagagattttttatttacagctacttatgcagttggagctgtaggagcgggtgcagtgatctggcctatgatagatcaaatgaacccagatgcttcagtaaaagctttagcaagcactgaagttgatgtaagtgctgttgatcttggaaaaactattactgtgctgtggaggggaaagccagtttttattagacgaagaactcaagaagaaatagctgaagcgaggtctgttaaaatggaagatttaaaacatccagaaaaagatgaagatcgagcgaaaaatccagagtggcttgttatgcttggagtatgtacgcacttaggttgcgttcctttagatcaaaaaggagattacaatggttggttttgcccatgtcatggttctcattatgatacttcaggaagaattagaaaaggtccagccccaacaaatatggaaattcctgaatataagtttgttgatgctaacacaattaagattggataat

SEQ ID NO: 210361 - DNA, 523 bp, Unknown
  Bacterial polypeptide expressing nucleotide sequence isolated from the Sargasso Sea
atgagcaaagaagaaaaaaaagttaatagaagagattttttatttacagccagttataccgttggggcagtaggcgtaggcgcagttatttggccaatgatagatcaaatgaatccagataaagctcaacaagctctagctaccactgaagttgatataagcaagattgagcctggtaaatcgatcacagttttatggagaggtaagccagtttttttaaagagaaggacagctgaggaaatagcagaagctagggcagtaaatatggacgatttgcctgatcctcaaaaggacgaagaaagagtaaaagagggtaaagacgaatggttagtcatgttaggagtctgtacacaccttggatgtgtgcctttaaaagataaaggagactttaatggttggttctgtccttgtcacggttcacattatgatgtatcaggtagaattagaaaaggacctgcaccaacaaatatggaaataccaaagttcgaatttgtagatagtaatacgatcaagattggttaaa

SEQ ID NO: 210362 - DNA, 310 bp, Unknown
  Bacterial polypeptide expressing nucleotide sequence isolated from the Sargasso Sea
ccagtttttataaaaagaagaacccaaaaagaaatttcggaagcaagagatgtaaaattagaagacctgaaacatcctgaaaaagacgaagatagagcaaagaatcctgaatggctggtaatgctaggagtgtgtactcatcttggatgtgtgcctttaggagataaaggagaatacaaaggatggttttgtccttgccacggttcacattatgatacttcagggagaattagaaaaggaccagctccaacaaatttagaagtacccaaatatgaatttgtaaatagcactacaattaaaataggttaaa

SEQ ID NO: 210363 - DNA, 385 bp, Unknown
  Bacterial polypeptide expressing nucleotide sequence isolated from the Sargasso Sea
ggcaactacagaagttgacataagcaatatagaacctggcaaatcaatcactgttttatggcggggaaagccagtatttttgaaaagaagaacttcagaagaaatagcagaggccagatcagttaacttggacgatttgcctgatcctcaaaaagatgaagatagagtaaaagaaggtaaagatgaatggttagtcatgttaggagtttgtacacatcttggatgtgtacctttaaaagataaaggtgattttaacggttggttttgcccttgtcatggttcgcattacgatgtatcgggtagaataagaaaaggaccagctccaacaaacatggaaataccaaagtttgaatttgttgatagtaatacaattaaaattggataa

SEQ ID NO: 210364 - DNA, 485 bp, Unknown
  Bacterial polypeptide expressing nucleotide sequence isolated from the Sargasso Sea
agattttatagtaacagcgactacagcagcaggggcagtgggcgttggggcggccgtttggcctttaattgatcaaatgaatccagatgcttcagtaaaagctttggcaagcacagaagtagacattagcggattgcagcctggtcaatcaataactgttttatggagaggcaaacctgtatttataaaaagaagaactcaggaagaaatagatagtgcaagagaggtagatttaaaagatttaaaacatccagaaaaagatgaagacagagcaaaaaatcctgagtggcttgtcatgcttggagtttgtactcatcttggatgtgtgcctttaacagacaaaggagactataatgcttggttttgtccttgtcatggctcacactatgatacttcaggaagaataagaaaaggtcccgcaccaacaaacttagaagttccaaaatatgtgtttattgatagtaaaacaattaagataggataaa

SEQ ID NO: 210365 - DNA, 500 bp, Unknown
  Bacterial polypeptide expressing nucleotide sequence isolated from the Sargasso Sea
aaaaacaaaaagaagagattttttatttacagctaccacagctgtaggcgccgttggtgctgctgctgtagtctggccaatgatagatcaaatgaatccagatgcttctgttaaagctttggctagcacagaggttgatgttagttcattaacgcctggaaacacattgactgttttatggagaggtaaaccggtttttattagaagaagaactcaggacgaaattaatgaagcaagagctgtaaagatggaggatttaattcatcctgagaaagatgaagatagagcaaaaaaccctgagtggctcgttatgttgggtgtatgtactcacctaggatgtgtgcctctaaatgataaaggtgattataacggatggttttgtccatgtcatggatctcattatgatacatctggaagaattagaaaaggaccagcaccttggaacatggaagttcccaaatatgaatttgtaaatgcaaatacaattaaaattggatagg

SEQ ID NO: 210366 - DNA, 526 bp, Unknown
  Bacterial polypeptide expressing nucleotide sequence isolated from the Sargasso Sea
aatgtcagatagtaaaaaaccaagaagagattttattaaattatcagcaatgactctaggaggggttggtgctgctagtttacttattccttttatatcaagcatgaatccaggcaaagatactctagccttggcatcaactgaaatagatttatctcccttggaagagggccagagtttgacagtaatatggagaggtaaacctgtttttataaagcatcgaacaaaaagtgaaattgacagtgctagaaatatttctttagaggaactaccagatgcagaggaggactctgctagagttcaaaaagataattggttagttgtattaggtgtttgtactcatttaggttgtgtacctcttggacaaaaagcttcggatacaaaaggagactatggcggatggttttgcccttgtcatggttctcattatgatacttctggcaggataagaaaaggaccagctccgactaacttacctgttcccccttacgtttttttaactgataacagaataaagataggataa

SEQ ID NO: 210367 - DNA, 517 bp, Unknown
  Bacterial polypeptide expressing nucleotide sequence isolated from the Sargasso Sea
tatggataattcaggaaaaaaaaacaatagaagagactttcttttcacagcaacatacgcagttggtgcagttggaataggcgcaacaatttggccatttatagatcaaatgaatcccgatagctctgtaaaagctttagcaacaactgaagttgatataagtcaaattcagcctggaaaatcaatcacagtcctttggcgaggaaagccagttttcattaaaagaagaacagaagacgaaatctccgaggcacaaatggttagtctggatgatttgaagcacccagaaaaagacaaagatagagtaaagaaacctgagtggttagttatgatgggaatctgtacgcacttgggatgtgtaccgctgtcagataagggagagtataaaggatggttttgtccctgtcacggatcacattatgatacttctggaagaattagaaaaggaccagcgcctactaacatggaaattccaaagtatgcatttgttgacgaaaatacaattaagattggttaa

SEQ ID NO: 210368 - DNA, 514 bp, Unknown
  Bacterial polypeptide expressing nucleotide sequence isolated from the Sargasso Sea
atgtctgaagaaaaaaaaactaatagaagggactttatatttacagcttcatatgctctaggagcagttggagtaggagctgtagtgtggcctttaattgatcaaatgaatcctgatgcttcagttaaagctcttgcaagcaccgaagtagatataagtaatgttgagaaaggccaatcaataactgttttatggagaggaaaaccagtttttataagaagaagaactagtgaagaaattgcaaaagctaaaaatgtaaaattagaggatctaccgcatcccgaaacagatgaagatagagcaaagaatccagagtggttagttatgttaggagtatgcacacacctaggatgtgttccacttggtgataaaggagagtatggtggttggttttgcccttgccatggatcccattatgatacttctggaagaataagaaaaggaccggcaccaacaaatatggaagttccaaagtacgaatttgttaatagcaatactataaagattggataat

SEQ ID NO: 210369 - DNA, 511 bp, Unknown
  Bacterial polypeptide expressing nucleotide sequence isolated from the Sargasso Sea
gatgtctgaaaaagaacctaaaagaagagaatttttatttactgcaacttatgctgtaggggcggttggagtgggggcggttgtttggcccatgatagatcaaatgaatccagatgcatctgttaaagcattggctagtactgaggtagacattagctctgtcactccaggaaaaacaataaccgtactttggagaggtaaaccagtttttatcagaagaagaacacaagatgaaattgatgatgcaaagtctgtaaaattagaggaattaaaagatccagaaaaagacgaggatagagcaaaaaatcctgaatggttagttatgcttggagtttgcacgcatctgggatgcgttcctcttaatgacaaaggagattataatggatggttctgtccctgtcatggatcgcactatgatacatctggaagaattagaaaaggtccagcacccactaatatggaagtaccaaagtatgaatttgttaatgctaatactataaagattggataa

SEQ ID NO: 210370 - DNA, 514 bp, Unknown
  Bacterial polypeptide expressing nucleotide sequence isolated from the Sargasso Sea
catggcggaagaaaaaaaaactaaaagacgtgattttatatttactgcctcttatacacttggtgcagttggagtgggtgcagcagtttggccccttatagaccaaatgaacccagatgcatctgtaaaggcattagctagtactgaagttgatataagttcattacaacctggccaatcaataactgttctctggagaggaaaaccagtttttattaaaagaagaactgaagaggaaatattagaagcaagaaaagtggaacttaaagaattgcctgatccagaaaaggatgaagatagagctaaaaatccagaatggcttgttatgttaggaatgtgtactcatttaggatgtgttcctttagcagataaaggagaatatggaggatggttttgcccttgtcatggatctcattacgacacatctggaagaataaggaaaggtcctgcaccgacaaatttggaaataccaaaatacgaatttttaaacactaacataattaaaattggttaa

SEQ ID NO: 210371 - DNA, 520 bp, Unknown
  Bacterial polypeptide expressing nucleotide sequence isolated from the Sargasso Sea
atgtccgattctgataaaaaaaaaccaaatagaagagattttattgtaactgcaacaacagctgctggcgcggttggtgttggagctgctatttggcctttagttgatcaaatgaatccagacgcttctgtaaaagctttagcaagtacagaagtcgatattagcgatatgctaccaggtcaatcaataacagtattatggagaggaaaacccgtatttataaaaagaagaactcaagaagaaatagatagtgcaagagaagtggatttgaaagatttaaaacatccagaaaaagacgaagacagagccaaaaatccagagtggcttgtaatgcttggagtttgtactcatttaggatgcgtacctttaacagataaaggagactataatgcttggttttgtccttgtcatggttctcactatgatacttcaggaagaattagaaaaggccccgcaccaacaaacctagaagttccaaaatatgtatttgttgacagcaaaacaattaaaataggataga

SEQ ID NO: 210372 - DNA, 250 bp, Unknown
  Bacterial polypeptide expressing nucleotide sequence isolated from the Sargasso Sea
ttgcctgatcctcaaaaagatgaagatagagtaaaagagggtaaagatgaatggttagtcatgttaggagtttgtacacatcttggatgtgtgcctttaaaagataaaggagacttcaatggttggttttgtccttgtcacggttcacattacgatgtatcgggcagaataagaaaaggaccagccccaacaaatatggaaataccaaaatttgaatttgtagacagtaatacgattaagattggttaaa

SEQ ID NO: 210373 - DNA, 511 bp, Unknown
  Bacterial polypeptide expressing nucleotide sequence isolated from the Sargasso Sea
gttgtcagaaaaacaagttacaagaagaaattttctttatgtcactacaggtgcatttgcagctgcgggagccgcttcattagcatggcctttcgttgaccaaatgaaccctgatgcatcagttaaagcgttagcatcaactgagattgatctaaggcccataatacctggacaaagcattactgtgatgtggaggggtaaaccggtatttattagaaggcgaacacaggctgaaattgatgaggcaaagaaagtgaatttagctgatttaccgcacccagaggaagatagcgatcgggcacaaaatcctgaatggcttgttatggttggaatttgtacccatcttggatgtgtgccgcttggacaaaaaggtgattataatggttggttttgtccatgtcatggttctcattatgatacatcaggtaggataagaaagggacctgcacctacaaatcttgagattccggattatgtattcttaaacgaaactactattaaaattggataa

SEQ ID NO: 210374 - DNA, 529 bp, Unknown
  Bacterial polypeptide expressing nucleotide sequence isolated from the Sargasso Sea
aatggctaaaaaacccaaaaataagagaagagatttcctacaacttagcaccgtaacgcttggtgctgttggaacagctgcttttatatggccttttctaaaaagtatgagtccagcagaagacacattagctgcaggatcaaccgaagtagatattagtgctattgaagaaggtcaaagtataacaataaagtggcgtggaaaacctgttttcattaaaaaaagaacaaaagatgagattaatgcagctaaaatggttcaagcttctgacttaagagatccacaagatgatgcagatagagtacaaaaagaagaatggttagttttagtgggagtatgtacacacttaggttgtgttccacttggtcagaaggtttctgatatgaaaggtgagtacgatggttggtactgcccatgtcatggttcacattacgatacatcaggtaggataagaaagggaccagcaccaaaaaacttggacgttccgccctatacctttttaaatgataatactataaagataggataa

SEQ ID NO: 210375 - DNA, 511 bp, Unknown
  Bacterial polypeptide expressing nucleotide sequence isolated from the Sargasso Sea
ttgtcagacaaacctgttacaagaagaaactttttgtacatcacaaccggaacatttactgctgctggagctgcttcattggtatggccttttgtagatcaaatgaatccagatgcatcagtaaaagctctggcttcaacggaagttgacttaagacccattgctccaggccaaagcattactgttttgtggagaggtaagcctgtttttattagaagaaggacacctgaagagatttcagaagctaaagctgtatctctcgatgacttaccggatccccaagatgatgccgctagagctataaatccagagtggttggtaatggtaggaatatgtactcacctagggtgtattccacttggtcaaaagggagaatataacggttggttctgtccatgccatggttcacactatgatacatctggtagaataagaaaaggtccagcccctaccaatttggaaattcccgactatgtatttcttaatgataacactattaaaattggataaa

SEQ ID NO: 210376 - DNA, 514 bp, Unknown
  Bacterial polypeptide expressing nucleotide sequence isolated from the Sargasso Sea
aatgtcagacaaaaaaaaacctaatagaagagactttatttttacagctacagctgctgtaggagcagttggtgcgggagctgctgcatggcctttaattgatcaaatgaatccagatgcctcggttaaggctcttgctagcacagaagtagatgtaagtagtttgcagccaggtcagtcaattactgttttatggagaggcaaaccagtgtttataaagagaagaacagaaaatgaaattagcgaagcaagaaacgtaaaaatttctgatttgaaacatcctgaaaaagatgaggatagagcgcaaaatccagagtggttagttatgttaggtgtttgcactcacttaggatgtgtaccattagcagataaaggggaatatggtggttggttttgcccatgtcatggttctcattatgatacatcaggaagaataagaaaaggtccagccccaaccaatttagaaattccaaaatacgaatttgtaaatagtaatacaattaagataggttaa

SEQ ID NO: 210377 - DNA, 490 bp, Unknown
  Bacterial polypeptide expressing nucleotide sequence isolated from the Sargasso Sea
atgtcagaaaaaaaaactaaaagaagagattttttatttacagctacctatgctgtcggagcagtgggtgctgcagctgttgtgtggcctatgatagaccaaatgaatccagatgcatctgttaaagcattggctagcacagaagttgatattagttcaatgaaccctggaaaaactattacggtattatggagaggtaagccggtttttattagaagaaggacgcaaaaggaaattgctgaggcaaaggcagttaaattggaagatttaaaacatcctgaaaaagatgaagatcgagctaaaaatccagagtggctcgtaatgcttggtgtctgcacacatttaggttgtgtacccttagatcaaaaaggagactacaatggttggttctgcccgtgccatggatcacattatgatacgtctggtagaataagaaaaggtccagcaccaacaaatatggaaatacctgaatataagtttgtaaatacaa

SEQ ID NO: 210378 - DNA, 463 bp, Unknown
  Bacterial polypeptide expressing nucleotide sequence isolated from the Sargasso Sea
acagcagctggggctgtcggggtaggcgcagcaatttggccattggttgatcaaatgaatccagatgcatcggttaaagcattagcaagcacagaagtggatattagttcaattgaacccggtcaatctataactgtgttatggagaggaaaaccagtatttattaaaagaagaactgatgaagaaattaaaagtgcaagagcagtaaatttaaaggatctcaaacaccctgaaaaagacgaagatagagcaaaaaatcctgagtggttagttatgctcggagtttgtactcacttagggtgcgtaccattgactaataaaggagattataatgcttggttctgcccttgtcacggatctcattatgatacctcgggcagaattagaaaaggtcctgcaccaacaaatatggaaattcctaagtacgaatttgttaatgcaaacataataaagatagggtaat

SEQ ID NO: 210379 - DNA, 438 bp, Unknown
  Bacterial polypeptide expressing nucleotide sequence isolated from the Sargasso Sea
gagcggcggtatggcctttagttgaccaaatgaaccccgatgcatccgtcaaagctttagcaagtactgaagtagacattagttccgtcaaacctggtcaatcaataacagttgtttggagaggtaaaccagtttttatcaaaagaagaactcaagatgaaattgataaagcacgttctgtatctttgaatgaattaaaacacccagaaaaagatgaagacagagttaaaaatccagagtggttagttatgcttggtatctgcactcatcttggatgtgtgcctctttcagacaaaggagaatacgacggatggttttgtccttgtcatggttcacattacgatacttctggaagaattagaaaagggccagctccgataaatatggaaattccagaatatgtttttctaaatgaaaatacaattaaaattggatagt

SEQ ID NO: 210380 - DNA, 511 bp, Unknown
  Bacterial polypeptide expressing nucleotide sequence isolated from the Sargasso Sea
aatgtccgagaaaaaagttaaaagaagagattttatattcacagcaacttatgctgttggtgcggtgggtgttgcagctacagtatggcccttagtagatcaaatgaaccctgatgcatctgtaaaagctttagctagcacagaagtagacgtgagttcagttgaacctggcaaaaccataactgttttatggagaggcaaaccagtatttattaaaagaagaactcaaaatgaaattgatgaagcaaggtctgtaaggatggaagatttaccagatccagaaaaagatgaggatagagcgaaaaatccagagtggcttgtgatgttaggagtttgtactcatcttggctgcgtacctttaaatgataaaggagactacaatggttggttttgtccatgtcacggatcacattacgatacatctggaagaattagaaaaggacctgcaccaacaaatatgtcaatcccgaactatgaatttttagaaaataacataattaaaattggataa

SEQ ID NO: 210381 - DNA, 520 bp, Unknown
  Bacterial polypeptide expressing nucleotide sequence isolated from the Sargasso Sea
atgtcagattcagataaaaaaaaaccacctagaagagattttattttaactgcaacaactgcggcaggagctgttggagtaggggctgcagtttggcctttgattgatcagatgaacccagatgcttcagttaaagcattggctagcactgaagtggatataagtggtgttgaaccaggtcaatcgataacagttttgtggagaggtaagcctgtatttattaaaagaagaactcaagaagaaattgatagcgcaagatctgttgatttaaaagatttaaaacatcctgaaagagatgaggatagagcaaaaaatcccgagtggttagtaatgcttggagtttgtactcaccttggatgtgtgccactaactgataagggagattataatgcatggttctgtccttgccatggttctcattatgatacttcaggaagaataagaaaaggtccggcaccaacaaatatggaagttccaaaatacgtattccttaatagtaaaactattaaaataggataaa

SEQ ID NO: 210382 - DNA, 520 bp, Unknown
  Bacterial polypeptide expressing nucleotide sequence isolated from the Sargasso Sea
atgccagaatcagataaaaaaaagcagaatagaagagattttattttcactgccacggcagctgcaggagcagtgggagttggggctgcagcttggcctttaatagatcaaatgaacccagatgcctcagtaaaagctatggcaagtacagaagttgatataagtgcagttcaacctggacaatcaataacagttttatggagaggcaaaccagtatttataaaaagaagaacacaggaagaaatagatagcgcaagatcagtagatttaaaagatttaaaacatccagaaaaagatgaagacagagcaaaaaatccagagtggcttgtaatgcttggagtgtgcactcatctaggttgtgtgcctttgacagacaaaggagattataatgcttggttttgtccttgtcatggttcacactatgatacttcaggaagaataagaaaaggtcctgctccaacaaatctagaagtacctaaatacgaatttgttaatagcaatacaattaaaataggataaa

SEQ ID NO: 210383 - DNA, 514 bp, Unknown
  Bacterial polypeptide expressing nucleotide sequence isolated from the Sargasso Sea
atgtcagataaaaaaccgaaaaatagaagagattttatatttaccgcaactgcagcagcgggagctgtgggcgtaggagcagctgtatggcctttagtagatcaaatgaatccggatgcgtctgttaaagctttagcaagtactgaagtagacattagttctgttaaacctggccaatcaattacggttgtctggagaggaaagccagtatttataaaacgaagaactcaagatgagatagataaagcaagatcagtatcattagatgaattgaaacatccagaaaaagatgaagatagagttaaaaaccctgagtggttagttatgttaggcatttgcacacatcttggatgtgttccattgtcagacaaaggtgaatatgatggttggttttgtccatgtcacgggtcacattatgatacttcaggaagaataagaaaaggcccagcaccaatcaacatggaaattccagaatatgttttcttaaatgataatacgattaaaattggataat

SEQ ID NO: 210384 - DNA, 523 bp, Unknown
  Bacterial polypeptide expressing nucleotide sequence isolated from the Sargasso Sea
aatgagcaaagaagaaaaaaaagtaaatcgtagagattttttatttaccgcaagctacacagttggggctgttggtttaggcgcagtagtttggcctttggttgatcaaatgaatccagacaaagcgcaacaagctcttgcaactactgaagttgatatcagccaaattgaaccaggtaagtctattacagtattatggagaggaaagcctgtttttcttaaaagaagaactcaagaagaaataactgaagcaagatcagtcaacttaaatgatttaccagatcctcagaaagacgaagatagagtcaaaaagggtaaagatgagtggttagtaatgttaggagtatgcacccaccttggctgcgttccattaaaagacaagggagactataaaggttggttttgtccttgtcatggttctcattacgatttatcaggaagaattagaaaaggacctgcaccaacaaatatggaaatacctaagtttgaatttgttgacaacaacacaattaagattggataa

SEQ ID NO: 210385 - DNA, 529 bp, Unknown
  Bacterial polypeptide expressing nucleotide sequence isolated from the Sargasso Sea
atggctgataatccagataataaaagaagagactttttacaactgagtaccatttcgattggagcagttggtacagcggcatttatatggccgttcattaaaagtatgaatccagcagaagatactattgcacttggaacaacagaagttgatgtaagtaatatagtagaggggcaaagcgtaacagttaaatggagaggaaaacctgttttcattagaaaaaggacaaaagatgaaattgatgcagcaaaaaaagttaatattgctgatttgccagatcccgaagaagatgttgatcgtgtaaaaaaagatgaatggctagtattggtcggggtatgcactcatctaggctgcgttcctctaggtcaaaaattaacagatagcaaaggggaatataatggctggtactgcccttgtcatggatctcattatgatacatctggtagaataagaaaaggacctgcaccagaaaatcttgcagtaccaccttattcttttttaaatgatacaactattaagattggttaac

SEQ ID NO: 210386 - DNA, 511 bp, Unknown
  Bacterial polypeptide expressing nucleotide sequence isolated from the Sargasso Sea
ttgtctgaaaagcaagtcacgagaagaaattttttgtatgtaactacgggagcattcacagctgcaggtgcagcttcgatagcatggcctttcatagatcagatgaaccctgatgcttcagttaaagctcttgcatcgactgagatagatctgaggccaattgttcctggtcagagtattacagttctatggagaggcaaaccagtttttataagaagaagaacccaagaagaaattaatgaggcgcaaatggtatcattaactgatctaccagatccacaagatgacagtgagagggctttaaatcctgagtggttagtcatggttggaatctgtacacacctaggatgtatacctttaggacaaaaaggtgattataatggatggttttgtccttgtcatgggtcacactatgacacctcaggaagaataagaaaaggaccagcacctacaaatctagagattcctgaatatgtatttttaaatgataacacaattaaaattggataaa

SEQ ID NO: 210387 - DNA, 511 bp, Unknown
  Bacterial polypeptide expressing nucleotide sequence isolated from the Sargasso Sea
gatgtctgaaaaaaaaactaatagaagagatttcttatttacagcaacctatgccgtaggagcggtaggtgtgggtgctacagtctggcctatgatagatcaaatgaatccggatgcctctgttaaagcattagctagtacagaagtagatataagttcagtaacgcctggaaaaacaattacagttctttggagaggcaaaccagtttttatcagaagaagaacacaagaagaaataactgaggcaaaatccgtcaagatggaagaattaaaagatccagaaaaagatgaggatagagctaagaatcctgagtggctagtaatgctaggcgtttgtactcacttaggttgtgttccacttaatgataaaggagattataacggttggttttgtccatgccatggttcacattatgatacttcaggtagaattagaaaaggtccagcaccaacaaatatggaagttccaaaatatgaatttgttaactctaatacaattaaaattggataa

SEQ ID NO: 210388 - DNA, 523 bp, Unknown
  Bacterial polypeptide expressing nucleotide sequence isolated from the Sargasso Sea
atgagccaaaaagaaaaaaaaactaatagaagagactttctatataccgcaagttatacagtaggagcggtaggactgggtgccgttatatggccattgattgatcagatgaaccctgacaaggctcaaaaagcattagcgacgactgaagtagatattactaatattgaaccagggaaggaaattacagttttgtggagaggaaagccagtttttttaaaaagaaggaccccagaggaaattgctgaagccagatcagtaaaaatggacgatttgcccgatcctcaaagagatgaggagagagtaaaagaaggtaaggatgaatggcttgtaatgctaggagtgtgtacacaccttggatgtgtgcctttaaaaaacaaaggagattataaaggctggttctgcccttgtcatggttctcactatgatgtctcaggcaggattagaaaggggccagcaccgaaaaatatggaaatacctaagtttgagtttgtcgataataacacaattaagattggataaa

SEQ ID NO: 210389 - DNA, 523 bp, Unknown
  Bacterial polypeptide expressing nucleotide sequence isolated from the Sargasso Sea
tatgtctgatactttagacgatgataaaccaactagacgcgattttttgtacataactaccggcgcttttggcgtagttggtgctgcttctgttgcatggcctttaattgatcagctaaatccagatgcctctgttaaagctgtttcaacgatcgaagttgatatatcatcgattgagccaggtagctttcttaaagtagcctggagaggtaaacctatatacatcagaagaagaactaatgaagagattgctgatgcagaaaaagatgacaatttgaatttaccggatcctcaaaaagatatagatagagttcaaaaaaaggagtggttagttgtcgtaggagtttgcactcatttggggtgtatacctatagctaaccaaggagaatatgaagggtggttctgcccttgtcatgggtctcattacgatatttctggtagaattaggaagggcccggctcctactaatcttgaagttcctccttacgaatttgtgagtgatagcttaataaaaataggataa

SEQ ID NO: 210390 - DNA, 514 bp, Unknown
  Bacterial polypeptide expressing nucleotide sequence isolated from the Sargasso Sea
aatggaagaagacaaaaaaaccaaccgaagagactttatttttacagcatcatatgcgcttggcgcagtaggagtaggagctgttgtctggccattaatagatcaaatgaatcctgatgcatcagtaaaagcacttgccagtaccgaagtagatgtaagtggagttgaaagaggacaatcaattacagttttgtggagaggcaaacccgtttttattagaagaagaacagaagaagaaattgcaaaagccaaagatgtaaaattagaggatctgccacatcctgaaaccgatgaagatagagcaaagaatcctgaatggctagttatgctaggtgtttgtactcacttgggctgtgttcctttaggagataaaggagaatatggtggatggttttgtccttgtcatggatctcattatgatacttctggaagaataagaaaaggacctgcaccaacaaatatggaagttccaaaatacgaatttgttaatagtaatacaataaagattggataa

SEQ ID NO: 210391 - DNA, 299 bp, Unknown
  Bacterial polypeptide expressing nucleotide sequence isolated from the Sargasso Sea
cagaagaagaactagtgaagagattgctgaagcagaaaaagacgataatgttagtcttcctgatcccgaaaaagatgttgatagagttttgaagaaggagtggttagtggttgttggtgtatgcactcatttggggtgtatacctatagcaaatcaaggcgagtatgaagggtggttctgtccctgtcacggatctcattatgatatttcaggtagaattaggaaaggcccagccccaactaaccttgaagttccaccatatgaattcgtaagtgatagcttaataaaaataggataat

SEQ ID NO: 210392 - DNA, 337 bp, Unknown
  Bacterial polypeptide expressing nucleotide sequence isolated from the Sargasso Sea
tactgttttatggagaggaaaaccagtatttataaaaaaaagaactttagaggaaatagctgaggccagggcggtaaaattggacgatttgcctgatcctcaaaaagatgaggatagagtaaaagacggaaaagatgaatggttagtcatgctaggagtttgtacacaccttggatgcgtgcctttaaaagataaaggagacttcaatggttggttttgtccttgccatggttcacattacgatgtatcaggcagaataagaaaaggaccagctccaacaaatatggaaataccaaagtttgaatttgttgatagcaatacaattaaaattggataa

SEQ ID NO: 210393 - DNA, 505 bp, Unknown
  Bacterial polypeptide expressing nucleotide sequence isolated from the Sargasso Sea
atgtccgaagataaaaaaaccaatagaagagattttatatttacggcatcctatgctttaggggcagtaggagtaggagctgcagtatggccgttgattgatcaaatgaaccctgatgcttcagtaaaagcactagctagcaccgaagttgatataagtggagtagaagtaggtcagtcaataacagttttgtggagaggaaaaccagtttttattagaagaagaaccagtgaagaaattgcaaaagctaaagatgtaaatttagacgatctaccacacccagaatctgatgaagatagagcaaaaaatccagaatggttagttatgttaggagtttgtacgcacctaggatgtgttcccttaggagataaaggagaatatggaggctggttttgcccttgtcatggatctcactatgatacttcaggaagaataagaaaaggaccagcaccaacaaatatggaagttcctaaatatgaatttgttaacaataatattataaaga

SEQ ID NO: 210394 - DNA, 370 bp, Unknown
  Bacterial polypeptide expressing nucleotide sequence isolated from the Sargasso Sea
cgctattgaagaaggtcaaagtataacaattaaatggcgcggaaaacctgtcttcataaaaaaaagaacaaaggatgagattgatgcagcaaaaatggttgaagctgctgatttaagagacccacaagatgattcagatcgggtacagaaagaagaatggttagttttagttggagtatgcactcacctcggttgtgttccacttggtcagaaagtctcagatatgaaaggtgagtatgatggttggtattgcccatgtcatggttcacattatgatacgtctggaagaattagaaaggggccagcgccgaaaaacttggacgttccgccctatacctttttaaatgatactacgataaagattggataa

SEQ ID NO: 210395 - DNA, 511 bp, Unknown
  Bacterial polypeptide expressing nucleotide sequence isolated from the Sargasso Sea
atgtcagaaaaaaaaactaatagacgagatttcttattcacagcaacttatgcagttggtgcggttggtgttggtgcaacgatatggccaatgattgatcagatgaacccagacgcatcagtcaaagctttggcgagcaccgaggttgatgtaagtgcggtaaatccaggtaaaacaattacagttttatggagaggtaaaccagtttttattcgtagaagaacacaagatgagatagctgaagcaagatctgtaaagttagaagatttaaaacatccagaaaaagatgaggatcgtgcagcgaaccccgagtggttagtcatgcttggagtgtgcactcacttaggctgtgttcctttagatcaaaaaggcgaatacaatggatggttttgtccttgtcatggttcgcactatgatatctctggaagaattagaaagggaccagctccgactaatatggagatccctaaatacgaatttgttaatgctaatacgattaaaattggataat

SEQ ID NO: 210396 - DNA, 514 bp, Unknown
  Bacterial polypeptide expressing nucleotide sequence isolated from the Sargasso Sea
atggcggaacaaaaaaaatcaaaaagaagagattttattttcacagcatcatatgcacttggagccgtaggcgtaggagcaacagtttggcccttaattgatcagatgaatcctgatgcatctgttaaagctctagctagtacggaagtagatataagttcaattgaaagaggtcaatcaattactgtattgtggagaggtaaaccagtttttattagaagaagaacagaagaagaaatagcaaaagcgaaggaagttaatctaaaagatttaaaacatcctgaaaaagatgaagacagagcaaaaaatcccgaatggttagttatgttaggagtttgtacacatttaggatgcgtacctttgggtgataaaggagaatatggaggttggttttgtccttgccatggatctcattatgatacttcgggaagaattagaaaaggtccagcgcctacaaatatggaagtcccaaaatacgaatttgttaataataatacaataaaaattggataaa

SEQ ID NO: 210397 - DNA, 511 bp, Unknown
  Bacterial polypeptide expressing nucleotide sequence isolated from the Sargasso Sea
atgtcagataaaaagccaaaaagaagagagtttttatttacagcaaccacagctgtaggtgccgttggagcagcagcagtagtgtggcccatggtagatcaaatgaacccagatgcttcagttaaagcattagcaagtacagaggttgatgtaagttcggttaaacctggaaatacaattacagttctgtggagaggaaaaccagttttcattagaagaagaacaaaagaagagatcgaagaagcaagatctgtaaaaatggaagaattaattcatccagaaaaagatgaggatagagcaaaaaatcctgaatggttagtgatggtaggagtctgtactcatttaggatgtgtacctttgaatgacaaaggtgattataatggatggttttgtccatgtcacggttctcactatgatacatctggaagaattaggaaaggaccagctccttggaatatggaagttccaaaatatgaattcgtaaacgcaaacacaattaaaataggatagt

SEQ ID NO: 210398 - DNA, 514 bp, Unknown
  Bacterial polypeptide expressing nucleotide sequence isolated from the Sargasso Sea
aatggaagaagacaaaaaaaccaaccgaagagattttatatttacagcatcatatgcgctcggcgcagtaggagtgggagctgtcgtgtggccattaatagatcaaatgaatcctgatgcatcggtaaaagcactcgcaagtacagaagtggatgtaagtggggtagaaaaaggtcagtccataactgttctttggagaggtaaaccagtttttataagaagaagaactgaagaggaaatagcaaaagctaaggatgtaaaattagaagatctaccacatcctgaaactgacgaagagagagcaaagaatcctgaatggttagttatgctaggtgtttgtactcacttgggctgtgttcctttgggagataaaggagaatatggcggatggttttgtccttgtcatggatctcattatgatacctcaggaagaataagaaaagggcctgcgccaacgaatatggaagttccaaaatacgaatttgttaatagtaatacaataaagattggataa

SEQ ID NO: 210399 - DNA, 529 bp, Unknown
  Bacterial polypeptide expressing nucleotide sequence isolated from the Sargasso Sea
atggctgaaaattccaaaaataaaagaagagactttcttcaattaagcactgtaacgatcggcgcagtaggaacagctgcattcatttggcctttcctaaaaagtatgaatcctgcagaggatacaatagctcttggaacaacagaggtagatgtaagtcaaatagaagaggggcaaagtattacagttaaatggcgaggaaagcctgtatttattcgtaaaagaacaaaagatgaaatagatgaagcaaaaactgtcaacatgtctgatttaaaagatcctgaggaagatgttgaccgtgttaaaaaagatgagtggttagtgctggttggagtttgtactcatttaggttgtgttccacttgggcaaaaattaactgactcaaaaggtgaatataatggctggtattgtccatgccatggatcacactatgatacatctggaagaataagaaaaggacccgctcctgaaaatcttgcagtaccgccttattcttttttaaatgatacaacaattaagattggttaat

SEQ ID NO: 210400 - DNA, 523 bp, Unknown
  Bacterial polypeptide expressing nucleotide sequence isolated from the Sargasso Sea
aatgagcaaagaggaaaaaaaagttaatagaagagattttttatttacagctagctatacagttggagcagtaggtgttggagcagttatttggccgatgattgaccaaatgaatcctgataaagctcaacaagccttagctacgacagaagttgacattagtagtattgaacctggtaaatctattactgttttatggagaggaaaaccagtatttttaaaaagaagaacttcagaggaaattgctgaggccagagcagtaaagttggacgatttgcctgatcctcaaaaagatgaagatagagtaaaagagggtaaagatgagtggttagtaatgttaggcgtttgtacacatctaggatgtgtgcctttaaaagacaaaggcgattttaatggttggttttgtccttgtcatggttcacactatgatgtatcaggcaggataagaaaaggaccagcgccgacgaacatggagataccaaagttcgaatttgttgataacaatacaattaaaattggataa

SEQ ID NO: 210401 - DNA, 367 bp, Unknown
  Bacterial polypeptide expressing nucleotide sequence isolated from the Sargasso Sea
agtagatataagcggagtagaaaaaggtcagtcaataactgtcctatggagaggcaaaccagtttttataagaagaagaactgaggaagaaattgcaaaagccaaagatgtaaaattagatgatctaccacatcccgaaacagatgaggagagagcaaaaaatcctgaatggttagttatgttaggtgtttgcactcacttaggttgtgttcctttaggagataaaggagaatatggtggatggttttgtccttgtcacggctcacactatgatacttcaggaagaataagaaaaggaccagcgcctacaaacatggaaattccaaaatacgaatttgtaaacagtaacacaattaaaatagggtaa

SEQ ID NO: 210402 - DNA, 520 bp, Unknown
  Bacterial polypeptide expressing nucleotide sequence isolated from the Sargasso Sea
atgtccgattcagaaaaaaagaagccaaatagaagagattttatagtgactgcaacaacggcagcaggcgcagtaggcgtcggagcagttgtttggccgttagttgatcaaatgaaccctgatgcatctgtaaaggcattagcaagtacagaagttgacataagtgcagtagaacctggtcaatcaataactgttttgtggagaggcaaaccagtttttataaaaagaagaactcaagatgaaattgatagtgcaagagctgttgatttaagtgaattaaaacatcctgaaaaagatgaagatagagcaaaaaatccagaatggcttgtaatgttaggagtatgcactcaccttggatgtgtacctttaaatgataaaggagattatggggcatggttttgtccatgtcatggttcacactacgatacatctggaagaattagaaaaggaccagcgcctacaaatatggaagtaccaaaatacgaatttgtaaatagtaacactataaaaattggataga

SEQ ID NO: 210403 - DNA, 511 bp, Unknown
  Bacterial polypeptide expressing nucleotide sequence isolated from the Sargasso Sea
aatgtcagacaaaaaaccagaaagacgagactttttatttacagcctcatatgctgtaggtgctgtaggtgctgccgcagttgtttggccacttatagaccagatgaatccagatgcatctgttaaagcattagctagcacagaagtagatattagctcagttaagcgaggaaatacaattacagttctatggagaggtaaaccagtttttatcagaagacgaacagaagaagaaattaaagaagctagatctgtaaagatggaagatttaatacatcctgaaaaagatgaagatagagcaaaaaatccggaatggcttgttatgcttggcgtttgtactcacttaggttgcgttccattaaatgataaaggtgattatgatggatggttttgtccttgtcatggttctcattatgatacttctggaagaattagaaaaggtcctgcaccattaaacatggaagttccaaaatatgaatttgttaacgctaatacaattaaaattggataa

SEQ ID NO: 210404 - DNA, 511 bp, Unknown
  Bacterial polypeptide expressing nucleotide sequence isolated from the Sargasso Sea
aatgtcagataaaaaagtcaaaagaagggatttcatttttaccacgagttatgcacttggagcagttggagttggagcggctgtttggccattaattgatcaaatgaaccctgatgcctctgttaaagctttagctagcactgaggtggatgttagttcagttgaacctggccagtcaattactgttttgtggagagggaaaccagtttttataaaaagaagaacacaagaagaaatagctaaagcaagagaagtagatataaaaattttaaagcatccagaaaaagatgaagatagagcaaaaaatccagaatggttagtgatgctaggtgtttgcactcacttaggatgtgttcctttaggagacaaaggcgaatatggtggttggttttgtccttgccatggctcacattatgatacatcaggaagaattagaaaaggaccagcaccaacaaatatggaaataccaaaatatgagtttgttaataccaacacaattaaaattggatga

SEQ ID NO: 210405 - DNA, 334 bp, Unknown
  Bacterial polypeptide expressing nucleotide sequence isolated from the Sargasso Sea
tgtcttatggagaggtaagcctgtttttcttaaaagaagaacctctgaagaaatagctgaagctagagctgtaagcttggacgatttgcctgatcctcagaaagatgaagatagagtaaaagatggtaaagacgagtggttagtaatgcttggagtctgtactcaccttggatgcgttccactaaaagacaaaggtgattataaaggttggttttgtccttgtcatggctctcattacgatatctcaggccggataagaaaaggtcctgcgcctaagaatatggaaataccaaagtttgagtttgttgacaacaacacgataaaaattggataa

SEQ ID NO: 210406 - DNA, 511 bp, Unknown
  Bacterial polypeptide expressing nucleotide sequence isolated from the Sargasso Sea
ttgtcagacaaacctgttacaagaagaaattttttgtacattacaactggaacatttactgccgctggggccgcttcattagtatggccttttgtagatcaaatgaacccagatgcatcagtaaaagcacttgcctctacggaggtagacttaaggcctattgctccaggccaaagtatcactgttttgtggagaggtaagcctgtttttattagaagaagaacacctgaagagatatcagaagctaaagctgtatctttagatgaattaccggatcctcaagatgattcagctagggctaaaaacccagagtggctggtaatggtgggaatatgtactcacttgggatgtataccacttggtcaaaagggtgaatataatggctggttctgcccatgtcatggttcacactatgatacatcaggaagaataagaaagggtccagcccctaccaatttggaaattcctgactatgtatttcttaatgataacacgattaaaattggataga

SEQ ID NO: 210407 - DNA, 360 bp, Unknown
  Bacterial polypeptide expressing nucleotide sequence isolated from the Sargasso Sea
tgagcacagtcaatccaggaaaaacgataactgtgttatggagaggaaagccagtttttattagaaggagaactcaagaggaaatagctgaagccaaatctgttaagttggaagatttaaagcatcctgaaaaagatgaagatcgtgcaaaaaatccagagtggcttgttatgcttggagtatgcacgcacttaggttgtgtgcctttggatcaaaaaggtgattacaatggatggttctgtccatgtcatggttctcattacgatacttctggaagaattagaaaaggtccagctccaacaaatatggaaattccagaatacaaatttgttgatgctaacacaattaagattggataat

SEQ ID NO: 210408 - DNA, 514 bp, Unknown
  Bacterial polypeptide expressing nucleotide sequence isolated from the Sargasso Sea
atgtcagaagaaaaaaaaactaatagaagagatttcatatttacagcatcatatgcactaggagcagttggagttggagcagctgtatggcctttggtagatcaaatgaatcctgatgcatctgttaaagcgttagctagcactgaagtagacataagcggtgtagaagttggccaatcaattactgttttatggagagggaaaccagtttttatcagacggagaactagtgaagaaattgcaaaagctaaagatgtcaaaatagatgatttacctcacccagaaactgatgaagatagagctaagaatccagagtggctagttatgttgggagtatgcacacatttaggatgtgttccacttggtgataagggagagtacggaggttggttctgcccttgtcatggttcacactatgatacatctggaagaattagaaagggaccagctcctaccaatatggaagttccaaaatatgagtttgtcgatagcaatacaataaaaattggataaa

SEQ ID NO: 210409 - DNA, 514 bp, Unknown
  Bacterial polypeptide expressing nucleotide sequence isolated from the Sargasso Sea
aatgtcagatcaaaaaaaagttaatcgaagagactttatttatacagcctcaacagtagtcggtgtagttggtgtcggtgcggccgcttggcctctaatagatcaaatgaatcctgatgcctctgttaaggcattagccacaactgaagttgatgtaagtttggttaaacctggtcaatcaataactgtactgtggagaggtaaacctgtatttattaaaagaagaacagagaacgaaattaccgaggcaaaagcagtgagtttaactgaactaaaacatccagagaaagatgaagatagagcatcaaaccccgaatggcttgttatgcttggagtatgtactcatcttggatgtgtgcctcttgcagataaaggagattataatggctggttttgtccttgccatggctcccactacgatacttcaggtagaattagaaaaggtccagctccaactaatttagagatacctaaatacgaattcgttaacagcaatacaattaaaattggataa

SEQ ID NO: 210410 - DNA, 526 bp, Unknown
  Bacterial polypeptide expressing nucleotide sequence isolated from the Sargasso Sea
aatgtcagacagtagaaaaccaagaagagattttataaaattatctgcaatgactctgggaggagtaggagcagctagtttactaataccttttatatctagcatgaatccaggaaaagatactctagccttagcatcgacagagatagatttatctcctcttgaagaaggtcaaagtttgacagttatatggagaggcaaaccagtttttataaagcacagaactaaaagtgaaattgatattgcaaaaaacacatctttagatgaacttccggacgctgaagaggactctgcaagagttcaaaaagataattggttagttgtccttggtgtttgcactcatttaggttgcgttcctctcggtcaaaaagcttcagatacaaaaggagattacggtgggtggttctgcccatgtcatggttctcattatgatacttcgggaagaatccgtaagggacctgcaccaactaatttacctgttcccccgtatgtatttttaacagataacagaataaagataggataa

SEQ ID NO: 210411 - DNA, 511 bp, Unknown
  Bacterial polypeptide expressing nucleotide sequence isolated from the Sargasso Sea
aatgtcagataaaaaaccaaaaagaagagaatttttatttactgtaacatatgcaataggagcagttggtgctggtgcagtagtatggccactgattgaccagatgaaccctgacgcgtctgttaaggcgttagcgagtacagaggttgatgttagcttagttgaaccaggaaatactataactgtactttggagaggaaaacctgtttttataagaagaagaactcaagatgaaatttctgaagcaaaagcagtcaaaatggaagaattaaaacatcctgaaaaagatgaagatagagcaaaaaatccagaatggttagtgatgcttggtatttgcactcatttaggatgtgttccattgaatgataaaggtgattataatggatggttctgtccatgtcatggatcacattatgatacatcaggcagaataagaaaaggacctgccccaacgaatatggaagttccaaaatatgaattcgtaaatgcaaacacaattaaaattggataa

SEQ ID NO: 210412 - DNA, 511 bp, Unknown
  Bacterial polypeptide expressing nucleotide sequence isolated from the Sargasso Sea
atgtcagagaaaaaagtcaaaagaagagaatttatctttacagcaacttatgcagttggagcagttggagtaggggcaacaatttggcctttaattgatcagatgaatccagatgcatcagttaaagctctagcaagcaccgaagtagacataagcaatgttgaaagaggtcaatcaataacagttttgtggagaggaaaaccagtattcattagaagaagaactgaagaggaaatttcaaaggccaaagaagtcgatttaaaagatttaaaacatccagagagagatgaggatagggctaaaaatccagaatggcttgtcatgttgggagtttgtacacatttaggatgtgtacccttaggggatacaggagaatatggtggatggttttgtccttgtcatggttcacattatgatacttctggaagaattagaaaaggtcctgctcctacaaatatggaagtgccaaaatacgaatttgttaataacaatataattaagataggctaaa

SEQ ID NO: 210413 - DNA, 421 bp, Unknown
  Bacterial polypeptide expressing nucleotide sequence isolated from the Sargasso Sea
catgattgatcagatgaaccctgatgcatcagtaaaagccctagctagcacagaagtagatgttagctctgtcaatccaggaaaaactataactgtgttatggagaggtaaacctgtttttataagaagaagaactcaagatgaaatcgcagaggcaaaatcagtaagcttaaaagatttaaaacatcctgagaaagatgaggatcgagctaaaaatccagaatggttagtgatgctgggtgtttgtactcatttaggttgtgtgcctttagatcaaaagggtgattataacggttggttttgtccatgtcatgggtctcattacgatatttctggaagaattagaaaaggtcctgcaccaacaaacatggaaattcctaaatacgaatttgtaaatgcgaacacaattaagatcggataa

SEQ ID NO: 210414 - DNA, 514 bp, Unknown
  Bacterial polypeptide expressing nucleotide sequence isolated from the Sargasso Sea
ttgtcagaagataaaacagtcacaagaagaaactttttatacataaccactggatcattctttgcagctggatcagcagctgttgtatggcctttcgttcatcagatgaacccagatgcttctgttaaagcattagcttcaactgaagttgatttaactccaattcttccaggacaaagtataactgttttgtggaggggcaagcctgtatttattagaagaagaacatcggaagaaatagctgaagctaagaaagtttctctcactgaattacctgaccccgaagtagatgaggatagggtcaaaaatcctgaatggcttgttatggttggaatatgtactcacttaggctgtatacctctcggacaaaaaggtgaatataatggttggttttgtccatgtcatggatctcactacgatacatcaggaagaataaggaaaggtccagctccaaaaaatttagaaattcctcaatacgtttttttagacgaaaacacagttaagattggataaa

SEQ ID NO: 210415 - DNA, 646 bp, Unknown
  Bacterial polypeptide expressing nucleotide sequence isolated from the Sargasso Sea
actgacgaatgattgttttccaccgactcgcagaatactcgacgacggcggtgaacagcggcgccgtcacgcgggcgctcaagacgcccgcgcactccatcgagtacgacgtgtccaccacacggtggccaaggctggtgatccggataagcgcgcgttcacgtatttcgtcatgactggtggtcgcatgatttacgccagcgccctgcgattggccgtcttgaagtttttgatgtccatgagcgcctcggcagatgtcttggccttggcgtccctcgaggttgacttgtccaaggtggagtcgggctcgacggtgacggtgaaatggcgcggaaagcccgtgttcattcgtcgacgcacgcccgcggaagtcgccaaggaggctgcggtggatgtcgcctctcttcgcgacccgcaggcggattctgaacgcgcccaaaatcccgaatggctcgtcgccgtcggcgtgtgcacgcacttggggtgcgtccccatcgccaacgcgggggattacaacggatggttctgcccgtgccacgggtcgcactacgacgcgtccggacgcatccgtaagggtccggcgcccgaaaacttggaagtccccgagtacaagtttttggagggtgacaagatgctcatcggctag

SEQ ID NO: 210416 - DNA, 529 bp, Unknown
  Bacterial polypeptide expressing nucleotide sequence isolated from the Sargasso Sea
atggctaaaaaacccaaaaataagagaagagatttccttcaactaagcactgtaacacttggtgctgtaggtacagctgcatttatatggccatttctaaaaagtatgagtccagcagaggataccttagcagcgggatctacagaagtagatattagtgctattgaagaaggccaaagtataactataaaatggcgtggaaagccagttttcataaaaaaaagaacaaaggaagaaatagatgctgcaaaaatggttcaagcttctgatttaagagatccagaagatgatgctgatagagtgcaaaaagaggaatggttagttttagtaggagtatgcacacacttaggttgtgtcccacttggtcagaaagtttcagatatgaaaggtgagtatgatggttggtattgcccatgtcatggttcacattatgatacatcaggaagaataagaaaaggaccagcgccaaaaaacttggacgttccgccctatgcttttttaaatgataacactataaagattggataac

SEQ ID NO: 210417 - DNA, 523 bp, Unknown
  Bacterial polypeptide expressing nucleotide sequence isolated from the Sargasso Sea
atgagcaaagaagaaaaaaatacaaatcggagagatttcctgtttaccgctagctatactgtaggagcggttggtataggagcaattatttggccgcttatagaccaaatgaatcccgacaaagctcaacaagctttagctaccaccgaagtagatattagcagtgtagaacctggaaaatccataactgttttatggagaggtaaacctgttttcttaaaaaggagaactaaagaagaaatagcagaggctagaaatgtaaatctggacgatttgccagatcctcaaaaagatgaagatagagtaaaagaaggtaaagatgaatggctagtaatgttaggtgtctgcacccatctaggttgcgttccattaaaagataaaggagattacaatggttggttttgtccttgccacggttcacactatgatgtttcaggaagaattagaaaaggaccagcaccaactaatatggaaatacctaaatttgaatttgttgataataacactataaaaattggataat

SEQ ID NO: 210418 - DNA, 601 bp, Unknown
  Bacterial polypeptide expressing nucleotide sequence isolated from the Sargasso Sea
tctgtgtcattgttaccatagaaatatctcttttttattatatgaaatcatatattaccaaagatataaaatattaaagatgtcagaccaaaaagacgaaaaaaagaccaacagaagagatttcttgtttactgctacagccgctgcgggcgcagttggagtaggtgctgctgtttggccattagtagaccaaatgaacccagatgcctctgtaaaagcattagcaagcacagaagtagatgtgagttcaatgcaacctggacagtctttaacagtactttggagaggtaaaccagtttttattaaaagaagaactgaagacgaaattaaaaaagcgagaacagttgatattaatgatcttaagcatcctgagaaagacgaagatagagcaaaaaatcctgaatggttagtgatgcttggaatttgtactcatcttggatgtgtaccattaacagataaaggtgattatgatggttggttttgtccttgccatggttctcattatgatacatctggtagaattagaaaaggaccagctccaactaatatggagatacctaaatacgaatttgtaaatactaacacgattaagattggataa

SEQ ID NO: 210419 - DNA, 601 bp, Unknown
  Bacterial polypeptide expressing nucleotide sequence isolated from the Sargasso Sea
ctgtgtcattgttaccatagaaatatctcttttttattatatgaaatcatatattaccaaagatataaaatattaaagatgtcagaccaaaaagacgaaaaaaagaccaacagaagagatttcttgtttactgctactgccgcagcaggtgcagttggagtaggtgctgctgtttggccattagtcgatcaaatgaacccagatgcctctgtaaaagcattagcaagcacagaagtagatgtaagttcaatgcaaccaggacaatctttaacggttctttggagaggtaaacctgtttttataaagagaagaacggatgatgaaattaaaaaagcgagagcagttgacatcaatgatcttaagcatcctgaaaaagatgaagatagagcaaagaatcctgaatggttagtgatgcttgggatttgtactcatctaggatgtgttccattaacagataaaggtgattatgatggttggttttgtccttgccatggttctcattatgatacatctggtagaattagaaaaggaccagctccaactaatatggaaatacctaaatacgaatttgtaaatactaacacgattaagattggataaa

SEQ ID NO: 210420 - DNA, 866 bp, Unknown
  Bacterial polypeptide expressing nucleotide sequence isolated from the Sargasso Sea
caagtggcacgaggtttatacggcccacttgttgtttacgatcacgacccaaatgaaaatgacattggtagtaatattgtgatcttagcagatgattggctactcaattcagatgaacaaattgacgcgaacagctttggcaatcttggtcattggtctcacggtggccggcttggcaatgcactatcaattaatggcaaatttaaaccagctattcacgtatcctcacatggtccagtaagattaaggtttttaaacgcagcgaatgctagaattttaaattttgaactctcagggggagtaatgatgaaggtgatttgcttggacggttctccatgcgaatcattcgacacaaatagaatcacattgggaccagctcaacgggttgacgtgttgattgaagatgcttcacagttagtcgagttattagaggtaagttcaagcaaagcgttaaatgcagctatttttaaaccaatttcctcacaacttactagcgttaaaaactctttatcttctgaaccattttattcatggcccgatactaagaacgcaaaaaagattgacgttcatatgcaaggtggtgcgatgggcaatttgtctaaggccaccttcgaaggcgaagagcgcagcttacgtgaccttgccttgaaagaggcaaagctttgggcgtttaatggaaatataggaggctacggccttaacctagctgaaattgaaatcggtgaagtggtggtcataaaagcctggaatgatacagcttggcctcacgcgatgcacctgcacggccatcatttttgggtggactcttctgaatttggaacaaaaaagagagccttgcttcgggacacctatttaatgcagcctgg

SEQ ID NO: 210421 - DNA, 1228 bp, Unknown
  Bacterial polypeptide expressing nucleotide sequence isolated from the Sargasso Sea
atgataaatagaagaaaatttcttcaatctgtatctgcttgtattagttttttcgttcttcgaaatagtgaagttaatgcatctttaataactcgatatgaacttatcgctagcaaatcttcgcataaatttgcttataatttaccagcatcaaatttgtggctttataataatgtttgtcctgggccgatactcacagcccgaaaaggagaaattttagaggtgcttttcacgaacaaccttgaacagccttcaacaattcattggcacgggattcgtaacattaatggaatggatggtgtccctgaattgactcaaccagcaattgaaccaggagacagtttcacttatcgcttccctgttaacgattcaggtacattttggtatcatgcacattttaaagcatgggagcaagtggctagaggactttatggagccttaatagtgactgagcaggaggatgaactaaatgaacaagatatattgataattgcagatgactggaaatttactgatgattatcagattgatgtagattcttttggaaacctacatgactggtcacatggtggtcgatttggaaccggattaaccataaatggtgaaagtgaaataataaaaataccagtaccaacgaatggacaattacgtttacgttttataaacaccgctaacgcaagaatccttcaatttcaaattctggaaaaacacccatttcatgtaatttctcttgatggagcaccatgtgagccatttgagcaagacattattacacttagtccagggcaacgtatggatgttatcatcaacgatatctcagatctttgtaccctctatgaagttagtactggtaaattttttgaggcggctaaaattgttccaaaaatttcattaaagcaaaagattttcaattttaaatactctactccttggtatccaatgccgtcattagataatgcaaaagtaatagatattcacatgcaaggtggggctatgggaaatctggcatcagctgtttttgaaggaaacgaaagatcacttcgtgatctggctatgaatgaatctaaattatgggctttaaatggaaaaattggaggttatgatcatacattagctgaagtttctctaggggaaactgtgattcttcgtatttggaatgatacaagttgggagcatagtatgcatcttcatggtcatcacttttgggttcaatctagagaatttaatg

SEQ ID NO: 210422 - DNA, 841 bp, Unknown
  Bacterial polypeptide expressing nucleotide sequence isolated from the Sargasso Sea
atgaaaggcgcgcacgacgccgaggtaggagcgctacaagccacttccatcgccgccctagcagcagcagaatccgcgaacaccgccgccctagcagcaaaagaagacgagcacgccgccgctaaaacagaggcaaaagatgcgcacaacaaagccatagaaggtatgaaaggcgcgcacgacgccgaaataaaacagctacaagccgcgcaagccgtcgaaacaacacagctacaattatcgcacgccgtcgaaacaacaaatctacaaaataatcacaccgccgccctagcagcgctacaagccaaactagaggagcaaggatccgcacaccaagaacagacagcagcgctagccgccgagcaagccgccgccctagcagcaaaagaaaacgagcacgccgccgccctagcagccacccaatccgcgtacgccgccctagaagagctaaaactctcgcacgccgccgaaataaaacagctacaagccgcgcaagccgtcgaaacaacacagctacaattatcgcacgccgccgaaataaaacagctacaagccgcgcaagccgtcgaaacaacacagctacaattatcgcacgccgtcgaaacaacaaatctacaaaataatcacaccgccgctctagaagcagagcgaaaaaaatcaacaattgattcgctgcaaaaacaagttaatcatcttgatggcatcaaagagataagattcgcgcatgccgccgaaacaaaacagctacaagacaagcacgccgccgccctagcagagaaagatgccgcgcatgaagccgataaagccgccacccaatccgcgcacgccgccgctctagaag

SEQ ID NO: 210423 - DNA, 954 bp, Unknown
  Bacterial polypeptide expressing nucleotide sequence isolated from the Sargasso Sea
cgcaatttctacgccaatggctggggcgggcttggcggcacgggggccggtatcggcacgcctgcttcggggctgcaaagccaggatcgttcaactgacctgtccggaaccgaattcgctctgacaattgggcgcacacccgtcaatttcacggggcatttacggtacgcgcttacggtaaacggatcaattcctgcgcccatcctgcgttggaaacaaggttccgaggtaacgctgcgggtcaccaacacactggccacgcaaacttcgatccactggcatggcatcctcgttccgtttgccatggatggcgtgcctggcgtgtcctttcccggcattcctgctcaccagaccttcgtctacaaattcaaggtccgacaggccggtacatactggtaccacagccacacccgctttcaggagcaactcggcctctatggcccattggtgatcgagccacaaaggccggcccccatacctagcgacagggactacgtcgttatgctgagtgattggactgacgaagatcctgaaaacgtcttccttcacttgaagcagtcgagtgatttttacaatttccaattaccgacggtcactgattttgtggccgacgtcagggcggcgggcctctcaaaagcactggctcgacggcgtatgtggaaccagatgcgcatgaatcccacggacctcgccgatgtctctgctgcaacctactgctacttggtcaatggcgccacacccttcactaactggacagctatcgcggaggcaggcgaatacgtacgtttgcgcttcatcaatggatcggccaccacaacgtttgatgttcgcatcccgggcctgaccatgcgagtttgtgcggcggacggacaagatgtcgaacccgtgaacgtcgacgagtttcggattggtgtagcggagacctacgatgtgttggtgcagatgccccgggaa

SEQ ID NO: 210424 - DNA, 478 bp, Unknown
  Bacterial polypeptide expressing nucleotide sequence isolated from the Sargasso Sea
cgccggtagctcttttaaagacaatgccgcgacaggttatgcaccagaattaagcggcaaagttatcgagctaactattgctgagtccttagtcaattttaccggtgtagtacgtacagcaaccaccattaatggctctattccggcaccaacgctgcgcttacgcgaaggcgatgaggtgacgattaaagtgaccaataccttatcggtgcctagctctattcactggcatggcattattttaccttatcaaatggatggggtaccaggcttaagctttaagggcattatgcccggtgaaacctttgtctataagtttaacctgcagcaaagcggtacttactggtatcactctcatagtggcttccaagaaatgactggcatgtacggtgcactaatcatcgagcctagagagcaagatatcatcgttgctgatagggagtatgtggtacagctttcagactggaccgatgatgac

SEQ ID NO: 210425 - DNA, 820 bp, Unknown
  Bacterial polypeptide expressing nucleotide sequence isolated from the Sargasso Sea
aatgacaaacagtgaactcaacaacagccgacgccggtttgtgtttggtgcatccgccatgttggcattgatgtcgatccctttccctaaaaatgccgttgccaatgcgttaagccaatcgttgagccagctctctggcaaagtgtttgacttaacaattgactataaaatggttaattttaccgggaaatctgctcgagctactgtggtaaaccaattactgcccgcgccgttattacgttggaaagaaggtgaaacagtcaccttaagagtaaaaaataatctcgaccatgatagctctattcactggcacggtattattttacccaccgaaatggacggtgtgcctggctttagctttgatggcattaaacccggtgaaacatttgagtatcaatttaccgtccagcaaagtggcacatattggtatcacagtcattcaggctatcaagaacaaaccggtttattcggcgctattgtgattgatccagcgacccccgatccggttatatatgaccgtgactatgtgatcatgctgtctgattggtctgacgaagcccctgaaaacatttatgccaaattaaagaaacaagccgattactataattaccgtgagcgtacggtaatggattttttctctgacgtgaataaaaatggcttagccaatacgtggaacgctcgttcgatgtggaataacgcgcgcatgagtgacagagacatatctgatgttacgggttcaacttacacctatttaatgaatggcaatcctccgcaacagggctggcaagggttgtttgaacaaggtgagaaggtgcgctta

SEQ ID NO: 210426 - DNA, 721 bp, Unknown
  Bacterial polypeptide expressing nucleotide sequence isolated from the Sargasso Sea
ggggccgctccggtgctgaagggtaacgagttcgatttggtgatcgccgagtccgccgtgaactttacgggcaagccagggatggcgacaacgatcaatggatcgcttcctgcaccaaccctgcgctggcgagagggggagacggtgacgattcgcgtcacgaacaagctgcgcgaggccacttctattcattggcacggcattatcttgccctaccagatggacggagttccaggcatcagctttgcgggcattcctcctggagagacgtttacctaccgtttcaaggttcagcaaagcggttcctactggtatcactcacattcaggcatgcaggaactcaccggcatgtatggagcgatcatcattgatcccgcaggacctgagactatccgtgcagatcgtgatcatgtcgtgctcttctctgactggactgacgaagaccccatgcgcgttttcgcaaagctcaaggttcagggcgactactacaactacaaccagcccacggtctttgatttcttccgtgatgcatcgcgtgatggcgtgtcagcggcattagacaagcgcaagatgtggaacgagatgcgcatgaatccaacggatttagccgacctctcttctgcgaccctgacctacctcgcaaatggcgtcacacctgcaggcaattggactgctcttttccgtccgggcgagcgtgtccggctgcgcatggtcaacggcg

SEQ ID NO: 210427 - DNA, 733 bp, Unknown
  Bacterial polypeptide expressing nucleotide sequence isolated from the Sargasso Sea
tccctcagccaaacatctctatggcacaacgtttaacctagagattaatgaactacctgttaatttcacgggctcaacggtcatggcgaccgcgattaatggacaattgccagcccccactcttcattggcgagagggggatacgatcactattaatgttactaatcgtttgaaagagtccacctccattcattggcatggcatcattttgcccagtgaaatggatggagtgccgggacttagttattccggcattgggccaggtgaaaccttccaatatcgctttaaggttcagcaagcgggtacctattggtaccacagccacacacgctttcaagaacaaacgggaatttatggtgccattgtcattgaaccccgcgagccccgtttttcgagtgaccaagatcacgtcgtattgctttctgattggtcggatactgatccagaaacaatatttaccaatctgaagaaaatgagcagttactacagccaaactgaaccgacgacttcagaattactaaactcaaccacattcaccgatgcatggaatatgcgcatgatgtggaacaaaatgcgcatgagcccccgtgacttatcggatgtgacgggctacacgtatacctttctaacgaatggcgtcacgccagcaggaaattggaccgtattgtttaagcgtggtcaaaaaatccgtctccgctttgtgaatgcgtcggcaatgacctatttcgatgtt

SEQ ID NO: 210428 - DNA, 688 bp, Unknown
  Bacterial polypeptide expressing nucleotide sequence isolated from the Sargasso Sea
atggatgataacaagttcaaattacctgcttctatctcgcggcgccgctttgtacaaggtcttgccgtcggaggcgttatagcgagtttcccgcatgttgttcgcgccggtagctcttttaaagacaatgccgcgacaggttctgcaccagaattaagcggcaaagttatcgagctaactattgctgagtccttagtcaattttaccggtgtagtacgtacagcaaccaccattaatggctctattccggcaccaacgctgcgcttacgcgaaggcgatgaggtgacgattaaagtgaccaataccttatcggtgcctagctctattcactggcatggcattattttaccttatcaaatggatggggtaccaggcttaagctttaagggcattatgcccggtgaaacctttgtctataagtttaacctgcagcaaagcggtacttactggtatcactctcatagtggcttccaagaaatgactggcatgtacggtgcactaatcatcgagcctagagagcaagatatcatcgttgctgatagggagtatgtggtacagctttcagactggaccgatgatgacccgatgaaagtatttagtaaactaaaagtgcaaggtgatatctacaattataatcaaccaacagtacgagattttttccgagacaaagtcagaaaaagggcttagt

SEQ ID NO: 210429 - DNA, 937 bp, Unknown
  Bacterial polypeptide expressing nucleotide sequence isolated from the Sargasso Sea
aaagaaggtcagcatgtcactataaatgtaactaacaacttgcttgaaagtacgtcaatccactggcacggattgatactcccttacacgatggacggtgtacctggcgtatcgtttcccggtatcgccgctggcagtacctttacctatgaattcgatattgaacaaaacggtacatattggtaccacagtcattcaggtcttcaggagcagcttgggcaccttggtcccatggttattgaaccaaaagacggcgacatcggtgcagatcgggagcacaccattattctcagcgactggaccttcgaagatccgcatgatgttttccgtcaccttaaagttgctgagggctattataattatcagcaacgtacagtcgaaaacacgattaaagatattaagagccaaggactgatcaatacggtcaaagaacgagcaatgtggtcccgtatgcgcatgaacccaagagatatactcgatgtaactggcgcgacctatacatacctgatgaacggccgtgacccacaaacaaactggactgcattgtacaaacccggagaaagcatacgccttaggcttattaacgggtcagcaatgacctattttgacttccaagttcccgggttggatctgacagttgttgcagtagatggtcagcctgttaagccagtaacagtaggtgaaatacggatcgctgttgcagagacctatgatgtcatcgtaaaacccaaagatactaaaacctatactatttttgcacaaagcatggacagaagcggctatgccagaggcacattggcaacatctgtcggcaaagaagcaagtatcccagcacttcgcccaatgcctgaattaggtatggatgctatggggatgtcgggaatggatgaaatggctaacatggattcgatggccgctacgaacaacaaggagactt

SEQ ID NO: 210430 - DNA, 686 bp, Unknown
  Bacterial polypeptide expressing nucleotide sequence isolated from the Sargasso Sea
tatgagcgatagacatttctatgcaggtgtgtccaggcggcgctttatccaaggagctgccacgatgggacttcttgccggtttcgacagcttgttgccggcctatgctagaggacaactggacaacacgaacgcatttcacaccgtgcgtaatggcgctgacatctacgacctgaccgtcgcgagaacacctctcaagatagggggcacagtctcggaacagcccatcaccatcaacggcactctgccagcgcctctggtgcgcctcaaacaggggcgcgaggcaatcttgcgtgtcaccaatacgctaccggaggcaacatccattcactggcacggtctgattctgccgtaccagatggatggcgttcctggcgtcagctttcccggcatcatgcccggcgaaacgtttgagtaccgtttcccggtcgaacagcatggcacctactggtaccacagccactctggccttcaggaacagctaggccactatgggccgattatcattgatcctgccgagccggaatcggtggcctatgatcgcgaatacgttgtggttctatctgactggacctttgactctcccgaggacgtattccgcaacctgaaagtggcagagggctactataactacaaccagcgcaccgttagcgacttcttcaaggatgttgaaaccatgggctggg

SEQ ID NO: 210431 - DNA, 783 bp, Unknown
  Bacterial polypeptide expressing nucleotide sequence isolated from the Sargasso Sea
aatgacaaacagtgaactcaacaacagccgacgccggtttgtgtttggtgcatccgccatgttggcattgatgtcgatccctttccctaaaaatgccgttgccaatgcgttaagccaatcgttgagccagctctctggcaaagtgtttgacttaacaattgactataaaatggttaattttaccgggaaatctgctcgagctactgtggtaaaccaattactgcccgcgccgttattacgttggaaagaaggtgaaacagtcaccttaagagtaaaaaataatctcgaccatgatagctctattcactggcacggtattattttacccaccgaaatggacggtgtgcctggctttagctttgatggcattaaacccggtgaaacatttgagtatcaatttaccgtccagcaaagtggcacatattggtatcacagtcattcaggctatcaagaacaaaccggtttattcggcgctattgtgattgatccagcgacccccgatccggttatatatgaccgtgactatgtgatcatgctgtctgattggtctgacgaagcccctgaaaacatttatgccaaattaaagaaacaagccgattactataattaccgtgagcgtacggtaatggattttttctctgacgtgaataaaaatggcttagccaatacgtggaacgctcgttcgatgtggaataacgcgcgcatgagtgacagagacatatctgatgttacgggttcaacttacacctatttaatgaatggcaatcctccgcaacagggctg

SEQ ID NO: 210432 - DNA, 875 bp, Unknown
  Bacterial polypeptide expressing nucleotide sequence isolated from the Sargasso Sea
aatgacaaacagtgaactcaacaacagccgacgccggtttgtgtttggtgcatccgccatgttggcattgatgtcgatccctttccctaaaaatgccgttgccaatgcgttaagccaatcgttgagccagctctctggcaaagtgtttgacttaacaattgactataaaatggttaattttaccgggaaatctgctcgagctactgtggtaaaccaattactgcccgcgccgttattacgttggaaagaaggtgaaacagtcaccttaagagtaaaaaataatctcgaccatgatagctctattcactggcacggtattattttacccaccgaaatggacggtgtgcctggctttagctttgatggcattaaacccggtgaaacatttgagtatcaatttaccgtccagcaaagtggcacatattggtatcacagtcattcaggctatcaagaacaaaccggtttattcggcgctattgtgattgatccagcgacccccgatccggttatatatgaccgtgactatgtgatcatgctgtctgattggtctgacgaagcccctgaaaacatttatgccaaattaaagaaacaagccgattactataattaccgtgagcgtacggtaatggattttttctctgacgtgaataaaaatggcttagccaatacgtggaacgctcgttcgatgtggaataacgcgcgcatgagtgacagagacatatctgatgttacgggttcaacttacacctatttaatgaatggcaatcctccgcaacagggctggcaagggttgtttgaacaaggtgagaaggtgcgcttacgctttataaatagttctgctatgaccatatttgatgtacgtataccgggtctca

SEQ ID NO: 210433 - DNA, 1703 bp, Unknown
  Bacterial polypeptide expressing nucleotide sequence isolated from the Sargasso Sea
tccacgcgcctggaaatcatggagtcgacgtcggttcattgggaccggcggtcgggccgtgcttgccgcctatgcgttgtcggtccccggtattgcgcgcgcgtctgccgaactcgcgcgagggacaggcccggagctcgacgccacctcgccagagggtgtcgatctatttattgagcggaaaacgattgacatcggtggtcgtccgtcgtctgcgatcacaatcaatggaggcatcccgggccctctgatccgcatgcgtgagggccgggatgcgttgatccgtgtgcataatcgccttgacgaatcaacatcgatccattggcacgggcttctggtgccattcacaatggacggcgtgcctggagtcagcttcgaggggatcgatccgggaacgacattcgagtatcggttcccggttcgtcagaacgggacctactggtatcacagccattccgggctccaagagcagctcggccactacgggcagttgatcatcgatccagccgacaaggatcccgtcgagtacgacatcgaatactcggttgtcttgtcagactggacgcacatggacccgtatgtggtgatgcacaagctcaagacgatggagggctatttcaactttcaacgccccacgcttgcgaacctgaagacgcaagccgaggctacggggcaaagcatcaccgaggttctcaagacgcgcctgagctggcagcgcatgcggatggatccgacggacattgccgatgtgaccggttcgacatacaccttcctcatgaatgggcggaccccagatgaaaactggaccgctgttgcgcagcccggccagcgtgttcgccttcggatcgtcaatgcctctgcattgacgtactacgacttcagggtcaacggtctgcccatgactgtggtccaagccgatggccaaaacatcgagcccgtggaaaccgacgagctccggattgccgttgcggaaacctacgatgtcatcgtcacgcttcccgacgatcgcccgaggacgctctttgccgaagcgatggaccgaagcgggttcgcacgtggcacgatcgggcctcggcctgatatcgaagcggcgataccagagcgtcgtcggcgaccgatgctcacaatggcggacatggggatgatgcacgccgtgatgaatgacaactcctcggacgcgggttcaatggagcacgggtcgcacgggaacatgagtgtcgcagccgatactgcgcacatcaacgaggggtctgcgagttcggtcgaagatctaccgacatcgggattgccggagcaggtcgagcacggacccgacacgcacggcccggggagtattgtgatggggcgcacgaagtatcgccaactgagcgatccgggccccgggcttggggatgatgggcggcgcgttctcacctattcgcaactccgatgcctggagacacccgcagatcggcgtccaccaacccgacagttcgatcttcacctgactggcaatatgcacaagtacatctgggggttcgacggcaagaagtggtcggaagcggacatgatccgctttcaatacggcgagcgcctgcgcatcaacatggtcaatgacaccatgatgaatcatccgattcacttgcatggcatgtggatggacctctatgcaggcaataaatacgccaagaatccacgcaagcacaccgtgaatgtccagcctg

SEQ ID NO: 210434 - DNA, 1597 bp, Unknown
  Bacterial polypeptide expressing nucleotide sequence isolated from the Sargasso Sea
catgcaaagcaaaaccacaaggcgcaccttcgtcaaaggcctggcagccaccggtattatcggcggacttggcctgtggcgcacgccggtctgggcggtgaacagccccggccagcccaacgtactgactggtaacgaattcgacctattcatcggtgaaaccccggtgaacatcaccggcgcagcgcgcacggccatgaccatcaacggctcgctccctgggccgattcttcgttggcgcgaaggcgataccgtcacattgcgcgtgcgcaaccgcctcaaggaggacacctccatccattggcacggcatcatcctgccggcgaacatggatggtgttcctggcctgagcttccatggcatcgcccctgatggcatgtatgagtacaagttcaaggtcaaccagaacggtacctactggtatcacagtcactcggggctgcaggagcaggtcggcgtatacggcgcgctggtcatcgatgccaaggagcccgagcccttcagttacgaccgtgattacgtcgtgttgctgagcgactggacggatgaaaatccaacgcgggtactggccaagctcaagaaacagtcggactactacaaccagcacaaacgcaccgttggtgacttcatcgatgacgtaagcgagatgggttggtccgccgccgtagccgatcgcaagatgtgggccgagatgaagatgagcccgacggatctcgctgacgtcagtggctacacctacacctacctgatgaatggccaggcacccaatggcaactggaccggcatattcaaaccaggcgaaaagatccgcctgcgcttcatcaacgcctcggcgatgacctatttcgatgtgcgcatcccgggcctgaagatgactgtggttgcggccgatggtctgcacgtcaaaccggtcagcgtcgacgagttccgtatcgccgtggccgagacctacgacgtgatcgtcgaaccagacagcgaacaggcgtataccgtgtttgcacaatccatggatcgcactggctatgcgcgcggcacccttgctgtacaggaggggttgagtgcaccagtacccagccccgacccgcgtccgctgattgccatgggcgacatgggtatggatcacggcagcatgggcggtatggatcacgggaacatggccgggatggatcagggcaatatggcgggaatggatcatggcagcatgcagggtggcatggctggtatggatcacagccagatggccggaatggatcattcaaacatggctggcatggctggcatggctggcaacatgcaggcacacccggcctcagagaccaacaatcctttggtcgacatgcagaccatgacgccgacgcacaagctggacgacccaggtatcggcctgcgtgataacggccggcgcgtgctgacgtactctgacctgcgcagcaccttccctgatccggacgggcgtgagccaagtcgcaccatcgagctgcacctcaccgggcatatggagaaattctcctggtccttcgatggaaatcagttctctgacgccgagcctctacgcctcaagtacggcgagcgtgttcgcatcacgctggtcaacgac

SEQ ID NO: 210435 - DNA, 1091 bp, Unknown
  Bacterial polypeptide expressing nucleotide sequence isolated from the Sargasso Sea
tatgaatgatgttcatagtaaaaatggatttaatccttctatctcaagaagaaagtttgttaaagggatagctgctggcggagttgtggcatcgattcctatgtcaattaacgctaaagaagaactgccgcaaaaggtttacagctcagttttaagtggaacagtaatcgatctggtagttgaagaagttgttgtcaactttactggaagtacaagaattgccacggttgtcaatcgctccatacctgcaccgacattacgcttaaaggaaggcgatgaggttactcttcgtgttaccaataagctcagtgagcctacctctattcattggcatggtataatacttccatttgaaatggatggcgtgcctggtattagtttcaatggcattaaaccaggatcgacattcacatataaattcacgttggaacagtctggtacatattggtatcactctcactctggttctcaagaacagacgggaatgtatggcgctttaattatagagcccaaagaaggtgagattatatcagccgatagagattatgttgttctcttgtcagactggacagatgagcacccgatgcgcattttgtcaaagttaaaatcacaaagtgattactataatttcaatcagcctacagctatcaatttcattaacgatgtcagcaacagtggattaaaagttgccttcaccaaacgccagatgtggaatgaaatgagaatgaattctacagatttggctgacttatcctccgcaactttaacctatctaatgaatgggacaacccctaatggaaattggactggtgtctttaataaaggtgagaagatcagacttagatttataaatggtgctggagggtctttttacgatgtcagaattccaggcataaaaatgacggttgtacaaaccgatggtgttgatattgaacctatagacgtagatgagtttcgtttcggccctggtgaaacttacgatgtcattgttcaacccatcgataacgcccatacgattttcgcacagtcgatggatcgtactggttttgcccgaggtacgttgtcgacggcgattggcctttcagctccga

SEQ ID NO: 210436 - DNA, 1594 bp, Unknown
  Bacterial polypeptide expressing nucleotide sequence isolated from the Sargasso Sea
aatgccgggcccgttgattagattgaaagaaggacagagagcgcacctcaatgtaactaaccacctaaaccaagatacttcaatacactggcacgggattattttaccaccagatatggatggcgttccgggagtttcctttgccggaataaaacctggcgaaacatttaaatatgcattcgatgtcgagcaaaacggcacctactggtaccacagtcattcaggcctccaggaacagttgggccatttaggacctcttgtgatcgaccccgcagatggggacattggggctgatagggaacatacaattattttaagcgattggacgttttcagacccccatgacgttatgcgaaaactgaaggtagcggaaggttattacaattatcaaaagcgaactattttcgacacgttagaagacgtaaagaaaaaagggcttgccgatacatgggaagagcgtgctatgtggggtgcaatgcgtatgagccctcgcgatatagctgacgttacaggcagtacatatacatacttaatgaatggccggacaccacaagataattggcaagccctgtttaaagtaggcgagaaaatccggttgaggatcataaatggttctgcgatgacttatttcgactttcgcatcccagggcttgaaatgacggttgtagctgcagatggtcagcctgttaaaccagtaaatgtggatgagtttcgaattgcagtagcggaaacttatgacgtaatcgttcagccaaaagagcgaaaagcttataccttttttgcggaaagttttgatagaagtggatatgcgcgtggcaccctaaccccgtcaattggccttactgcagaggttcccccacagcgagttatcacagagcgtggcatggcggcgatggggatggacatgtctggtatgaaaggcatgaatatggataagtccaaggtcgacagctcgggcatggctgctccaaaaggtgaaatgaaaggaatggggcagcatagcgcccatacaatgcatggcacccaaatggaaggagaaatgaccccctccaaaaagctcccagtagaaagcatagacattgtccacagcgaagacgggcacggcgctggtgcagcgatgattgctaaaaatccaagttctaggttggatgaacctgggatcggtttggaagacagcccacatcgtgtccttgtttatacagatttagtcggtgaaagtccttggcctgacgaaagagagccggaacgtcaaattgagcttcacttaacgggcaatatggaaaggtacatgtggtcgttcgatggcaaaaagtttagtgaagtagacggatatgtacgtttcaattatggcgagagactacgtctgatcttggttaatgacactatgatggatcaccctattcatttacatggtatgtggatggaacttgaaaacggccaatatccaagacctcgtaaacacacgatcagcctcaagcctggagagaaggtctcgttacaaatcagcgcagatgcccccggtgagtgggcgtttcattgtcacctgctataccacatggaagcaggtatgtttcgtgttgtacaggtcgcatag

SEQ ID NO: 210437 - DNA, 1984 bp, Unknown
  Bacterial polypeptide expressing nucleotide sequence isolated from the Sargasso Sea
atgacaaacagtgaactcaacaacagccgacgccggtttgtgtttggtgcatccgccatgttggcattgatgtcgatccctttccctaaaaatgccgttgccaatgcgttaagccaatcgttgagccagctctctggcaaagtgtttgacttaacaattgactataaaatggttaattttaccgggaaatctgctcgagctactgtggtaaaccaattactgcccgcgccgttattacgttggaaagaaggtgaaacagtcaccttaagagtaaaaaataatctcgaccatgatagctctattcactggcacggtattattttacccaccgaaatggacggtgtgcctggctttagctttgatggcattaaacccggtgaaacatttgagtatcaatttaccgtccagcaaagtggcacatattggtatcacagtcattcaggctatcaagaacaaaccggtttattcggcgctattgtgattgatccagcgacccccgatccggttatatatgaccgtgactatgtgatcatgctgtctgattggtctgacgaagcccctgaaaacatttatgccaaattaaagaaacaagccgattactataattaccgtgagcgtacggtaatggattttttctctgacgtgaataaaaatggcttagccaatacgtggaacgctcgttcgatgtggaataacgcgcgcatgagtgacagagacatatctgatgttacgggttcaacttacacctatttaatgaatggcaatcctccgcaacagggctggcaagggttgtttgaacaaggtgagaaggtgcgcttacgctttataaatagttctgctatgaccatatttgatgtacgtataccgggtctcaaaatgagtgttgtcgccagtgatggtcagaacattcaaccggtatctgtggatgaatttcgaatcggtgttgctgaaacctatgatgtggttattgagccagaggttgataatgcctattgtattttcgctcaaagtattgaccgcaccggctttacggtaggtaaccttacctcagatgccagtttacatgctcctattcccccaatggatccaaggccagtccttggccacagtgatatgggcatggatatgagtgatatggatatgagcggtatggatcatagcaaaatggacatgggcgctggtgatatgtcaggcatggatcacagcaagatggctatgggtggcggtgatatgtcaggcatggatcacagcaagatggctatggacggcggtgatatgtcaggcatggatcatagcaagatggctatgggcagcggtgatatgtcaggcatggatcacagcaagatggctatgggtggcggtgatatgtcaggcatggatcacagcaaaatggccatggacgctgcgaaagcgacagtctcaggactagggcttgcaggctttggcagtaacaatgaaattaaacacattgacaccgagttcggcccacaagtggatatgcgtgcagatgcgccaaaaagtggtttacacgatcccgggattggattgcgtgaccatcaacaacaatttaatcgcaaagtattaacttatggcgatattaaaggcttacatcctacctacgacacgcgccaacctagccgcgaaattcaactgcatttaaccggcaatatgaaccgatatatgtggtctgtgaatggggtgaaatttatggacgccgcgccattagagtttgaatacggagaaagactgcggatcaccttagtgaacgacacgatgatgactcaccctatgcatttgcatggtatgtggagtgagttagagacaggcgaccctgattttattccccgtaagcacacggtattagttcagccgggttctaagatcagttacttagtcaccgccgatgcaaaagggcaatgggcatatcattgccacttgttattccacatgccaggcatgttcagaaaagtcgtggtgaaataag

SEQ ID NO: 210438 - DNA, 316 bp, Unknown
  Bacterial polypeptide expressing nucleotide sequence isolated from the Sargasso Sea
atgactcaattaagttccaatgatgtcccttctatgggtcgaaggcaatttatgaatcttcttacatttggtactgcaactggtgtagctttaggagccctttaccctgtagcgaattatttcatgcctttaagagcaggcggtggtggaggtggaacttctgctaaagatgaattggggaatccaataactaagacaggttggttagctacccatccggcaggagacagaagtctagttcagggtctaaagggagatccaacttatttaatagttaatgagggtggggaaataggagaatttggtttaaatgcaa

SEQ ID NO: 210439 - DNA, 316 bp, Unknown
  Bacterial polypeptide expressing nucleotide sequence isolated from the Sargasso Sea
atgactcaattaagttccaatgatgtcccttctatgggtcgaaggcaatttatgaatcttcttacatttggtactgcaactggtgtagctttaggagccctttaccctgtagcgaactatttcatgcctctaagagcaggcggtggtggaggtggaacttctgctaaagatgaattagggaatccaataactaagacaggttggttagctacccatcaagcaggagacagaagtctagttcagggtctaaagggagatccaacttatttaatagttaatgagggtggggaaataggagaatttggtttaaatgcaa

SEQ ID NO: 210440 - DNA, 682 bp, Unknown
  Bacterial polypeptide expressing nucleotide sequence isolated from the Sargasso Sea
tttggaaactcagaatgacgaagaagtagaaatcgtggagacagttcctccagaaccatttgttactcctgatcctatgacagtaggtgtttcacgtagacagttttttaatcgtgggatagtaggaatgatgggtctttcaatagcaggtttcggaggagcctctttagctttcctatggcctcaaggagtaagcggctttggttcaaaaattaaagttggaaatatccccgaaattcttgcagaaatcaaagctaataatggtttcttatataaacctgaaggacgaatgtggctgactgcttacccaaatggcgcagttgaaaaagcaagaagcacatactcttctagtgaaatatctggaatggctgctggagttgatcaaggttttgaagcaggtgtggttgctctttatcaaaagtgccctcacttgggttgcagggttccaaattgtgtttcatctcaatggtttgaatgcccatgtcatggctcacagtacaaccaggtaggcgaaaaacgtggtggacctgctcctcgcggaatggatcgctttgctgtaacggtaaatgacggtgttcttacggttaatacaggtgcgattattcaaggaccaccaattggtgtaaataccacaggtcaagaagctgaaggcccgaactgtatcgggcaaagcgatcattaa

SEQ ID NO: 210441 - DNA, 681 bp, Unknown
  Bacterial polypeptide expressing nucleotide sequence isolated from the Sargasso Sea
cctgagtaaagaaactcgccaaagcgatataagtagtgagaagcctgaaccagaagaaacaggaatttcgcaaatttccggtaaggagattgagcgagcagctgtcattgaacgtcaagggggtaaggagattgttgtacaagagcaatctactcccgtgccttgggttgcgcctgatgaagaaactgtgggtattgcccggaggcagttcttgaatagaagcatcgtagccttaatgggaatttctctcagtagttttggtgcagcgtgtatcgcgtttctctatggcggtgggggcggtggagggtttggttccaaaatcacggttggaaacattaccgatattcaagctcggatcgatgctgcaaacggatttctctatgtccctgaaggacgtatgtgggttacgaagtatcctgctggatcagtgaaaaaagctgaaacagcctactcttcccaagaacttgcagggatgcgatctggactagtggctttgtaccagaagtgcccacacctagggtgtcgtgttcctgagtgccaaacttcccaatggtttgaatgcccgtgtcatggttctcaatacaaccgagtaggagaaaaacgtggtggcccagccccgagagggaaggaccgctttgccatggaagttaaagatggagtattcatcgtgataccggaacc

SEQ ID NO: 210442 - DNA, 490 bp, Unknown
  Bacterial polypeptide expressing nucleotide sequence isolated from the Sargasso Sea
aatgaaaaattatatttttcaaattttcacaatcttttcaatcattacattatctcaagcattttataacaatttaagattaagtaagaaagttattttaaaaaatagtaaaaataatgaattacctattccagacattcaaaaaagacatttaatgaatagtattcttttaaagagtgtctatttatcttgtggttctttactgggtggatatttgtcattcttttatcctgtagttaatagtgattcatcagggggattagtagcaaaagataaagatggaaatgatgttttattagatgattggttgaaaaatcatccatatcctaatagagaattaatacaaggttttaaaggtgatccatattatattattacaactgataataataacctagaaaaatttgcacttaatgctatttgcactcatctaggttgtgttgttccttggaataaagctgaacaaaaatttatgtgtccttgccacgga

SEQ ID NO: 210443 - DNA, 163 bp, Unknown
  Bacterial polypeptide expressing nucleotide sequence isolated from the Sargasso Sea
ccttgtcatggcagtcagtatgatactaatgggaaggtagtaagagggcctgctcctttatctttagctctagctcatgtcgatattgaagatgataatgtactcgtcaaacaatggtcagaaactgactttagaactaatgaaaatccatggtgggcataaa

SEQ ID NO: 210444 - DNA, 183 bp, Unknown
  Bacterial polypeptide expressing nucleotide sequence isolated from the Sargasso Sea
gtgcaaataaatatatgtgtccatgtcatggaagtcaatacgattcaacaggaaaagttgttagaggaccagcccctctatctctagccatagctcatgtctcaattgaggatgatcaagttctagtaagtcagtggacagaaactgattttcgaactggtactgatccttggtggggatgat

SEQ ID NO: 210445 - DNA, 538 bp, Unknown
  Bacterial polypeptide expressing nucleotide sequence isolated from the Sargasso Sea
atgactcaattaagttccaatgatgtcccttctatgggtcgaaggcaatttatgaatcttcttacatttggtactgcaactggtgtagctttaggagccctttaccctgtagcgaattatttcatgcctttaagagcaggcggtggtggaggtggaacttctgctaaagatgaattagggaatccaataactaagacaggttggttagctacccatcaagcaggagacagaagtctagttcagggtctaaagggagatccaacttatttaatagttaatgagggtggggaaataggagaatttggtttaaatgcaatttgtactcatttaggttgtgttgtcccatgggatagtggtgctaataaattcatatgtccttgtcatggcagtcagtacgatactaacgggaaggtagtaagagggcctgcgcctttatctttagctctagctcatgtcgatattgaagatgatgctgtactcgtcaaacaatggtcagaaactgactttagaactaatgaaaatccatggtgggcataaa

SEQ ID NO: 210446 - DNA, 531 bp, Unknown
  Bacterial polypeptide expressing nucleotide sequence isolated from the Sargasso Sea
aatgactcaattaagttccaatgatgtcccttcaatgggtcgaaggcaatttatgaatcttcttacatttggtactgcaactggtgtagctttaggagccctttaccctgtagcgaattatttcatgcctttaagagcaggcggtggtggaggtggaacttctgctaaagatgaattagggaatccaataactaaaacaggttggttagctacccatcaagcaggagacagaagtctagttcagggtctaaagggagatccaacttatttaatagttaatgagggtggggaaataggagaatttggtttaaatgcaatttgtactcatttaggttgcgttgtcccatgggatagtggtgctaataaattcatatgtccttgtcatggcagtcagtacgatactaatgggaaggtagtaagagggcctgctcctttatctttagctctagctcatgtcgatattgaagatgatgctgtactcgtcaaacaatggtcagaaactgactttagaactaatgaaaatccatggtg

SEQ ID NO: 210447 - DNA, 538 bp, Unknown
  Bacterial polypeptide expressing nucleotide sequence isolated from the Sargasso Sea
atgactcaattaagttccaatgatgtcccttcaatgggtcgaaggcaatttatgaatcttcttacatttggtactgcaactggtgtggcgttaggagccctctaccctgtagccaattatttcatgcctttaagagcaggcggtggtggaggtggaacttctgctaaagatgaattagggaatccaataactaagacaggttggttagctacgcatcaagcgggagacagaagtctagtgcagggtttaaagggagatccaacttatttaatagttaatgagggtggggaaataggagaatttggtttaaatgcaatttgtactcatttaggttgcgttgtcccatgggatagtggtgctaataaattcatatgtccttgtcatggcagtcagtacgatactaatgggaaggtagtaagagggcctgctcctttatcattagctctagcgcatgtagatattgaagatgatgctgtactcgtcaaacaatggtcagaaactgactttagaactaatgaaaatccatggtgggcataaa

SEQ ID NO: 210448 - DNA, 184 bp, Unknown
  Bacterial polypeptide expressing nucleotide sequence isolated from the Sargasso Sea
ggtgcgaataaattcatatgtccttgtcatggaagtcaatatgacacaaatgggaaagtagtaagaggacctgcgcctttatctttggccttggcgcatgttgatgtagatgatgatgctgtacttgtaaaacagtggtcagagacagattttagaactaatgaaaatccctggtgggcctaag

SEQ ID NO: 210449 - DNA, 538 bp, Unknown
  Bacterial polypeptide expressing nucleotide sequence isolated from the Sargasso Sea
aatgacccaactttcctcgagcgatgtgcccggaatgggtcgtcggcagttcatgaacctgctgaccttcggatcggtaactggagtcgccctgggggctctctatccagttgtgaattacttcatccctcctaaggcagctggatcgggtggcggtaccagtgcaaaagacgagctcggcaaccccgtcacggcaagcgggtggctctccaatcatgccgacggcgaccgcagcttggtccagggcctcaaaggtgatcccacctatctgatcgtcgaaggtgatgacgccatcggcagttacgggatcaacgccatctgcacgcaccttggctgtgtcgttccctggaacagcggagccaacaaattcatgtgcccctgtcacggcagtcagtacgacgccaccggaaaggtggtccgcggaccagcacctctgtccctggctctggccaatgtgagcgtcgaaaacgacaacgtcttcgtcagccagtggtcggaaaccgacttccgcaccggcgacaaaccctggtgggtctga

SEQ ID NO: 210450 - DNA, 511 bp, Unknown
  Bacterial polypeptide expressing nucleotide sequence isolated from the Sargasso Sea
tatgaaaaaacgcatattgatgaataaaattctattgtatggtggtgtctatcctactcttggtggattagctgttccatacttaatgttctttgttcccaagacgaaaagtggtgggaactcacagtttgctcttgaccgaaacggcaacagtataggtcttgaggattggatcgatagtcatggaatcaattcaagaagcctggtgcaaggattggatggagatccgagttatctaatcgtggatgataataaaaacataaaggattttgcattgaatgctatatgcacacatcttgggtgtgttgttccgtgggttccagcagaaaataaatttatgtgtccctgtcatggctcgcagtatgatacaaatggatatgtggttcgcgggcctgcacctctgcctctaaaactgcaggaagtatcggtagatgaaaataagaaaatcactatatcaaaatggaccaagacggatttcagaaacggaatggaaccatggtgggttaaataa

SEQ ID NO: 210451 - DNA, 487 bp, Unknown
  Bacterial polypeptide expressing nucleotide sequence isolated from the Sargasso Sea
tatgaatcttcttacatttggtactgcaactggtgtagccttgggagccctttaccccgtagcaaattatttcatgcctttaagagcaggtggtggtggtggtggaacttctgctaaagatgaattagggaatccaataactaagacaggatggttggctacccatcaatcaggagacagaagcctagtgcaaggtctcaaaggagatccaacttatttaatagttaatgaggatggtgaaataggagaatttggtttaaatgccatttgtacgcatttaggttgcgttgtcccatgggatagtggagctaataaatttatatgtccttgtcatggcagtcagtacgatactaatgggaaggtagttcgagggccagctcctttatctttagcactagctcatgtcgatattgatgatgatgctgtacttgtcaagcaatggtcagaaactgactttagaactaatgaaaatccttggtgggcataa

SEQ ID NO: 210452 - DNA, 538 bp, Unknown
  Bacterial polypeptide expressing nucleotide sequence isolated from the Sargasso Sea
atgacccaactttcctcgagcgatgtgcccggaatgggtcgtaggcagttcatgaatctgctgacctttggatccgtcacaggcgtcgctctcggggctctgtaccccgtggccaactacttcatcccgcccaaagccgccggcagcggcggtggcacgagtgccaaagatgaactcgggaacgacgtcagcgccagcggctggctggcgtctcaccccgagggagaccgcagcctcgttcagggcctcaaaggagatcccacgtatctgatcgtggagggtgaggatgccatcggcagctacggcatcaacgcgatctgcacccatctgggctgcgtggtgccctggaacagtggcgcgaacaagttcatgtgcccctgccacggcagtcagtacgacgccaccggaaaggtggtccgcggcccagcccccctgtccctcgccctggcgaacgtcagcgtcgagaacgacaacgtctttgtcagccagtggaccgagaccgacttccgcacgggcgacaagccctggtgggcctgac

SEQ ID NO: 210453 - DNA, 538 bp, Unknown
  Bacterial polypeptide expressing nucleotide sequence isolated from the Sargasso Sea
atgactcaattaagttccaatgatgtcccttcaatgggtcgaaggcaatttatgaatcttcttacatttggtactgcaactggtgtagccttaggagccctttaccctgtagcgaattatttcatgcctttaagagcaggcggtggtggtggaggaacttctgctaaagatgaattagggaatccaataactaagacaggttggttaaccaaccatcaagcaggagacagaagtctagttcagggtctaaagggagatccaacttatttaataattaatgagggtggggaaataggagaatttggtttaaatgccatttgtactcatttaggttgcgttgtcccatgggatagtggtgctaataaattcatatgtccttgtcatggcagtcagtacgatactaacgggaaggtagttagagggcctgcccctttatctttagctctagctcatgtcgatattgaagatgatgcagtactcgttaaacaatggtcagaaactgactttagaactaatgaaaatccatggtgggcataaa

SEQ ID NO: 210454 - DNA, 337 bp, Unknown
  Bacterial polypeptide expressing nucleotide sequence isolated from the Sargasso Sea
ttggttagctacccatcaagaaggagacagaagtctagttcggggtctaaagggagatccaacttatttaatagttaatgagggtggtggaataggagaatttggtttaaatgcaatttgtactcatttaggttgtgttgtcccatgggatagtggcgctaataaatttatatgtccttgtcatggcagtcagtacgatactaacggaaaggtagtaagggggcctgcgcctttatctttagctctagctcatgtcgatattgaagatgatgctgtactcgtcaaacaatggtcagaaactgactttagaactaatgaaaatccatggtgggcataa

SEQ ID NO: 210455 - DNA, 538 bp, Unknown
  Bacterial polypeptide expressing nucleotide sequence isolated from the Sargasso Sea
atgactcaattaagttccaatgaagtcccatccatgggtcgaaggcaatttatgaatcttcttacatttggaacagcaactggtgtcgcattaggagctttatatcctgtagcaaattattttatgccactaagagctggcggcggtggcggcggaacttctgcaaaagatgaattaggtaatccagtaacaaagaccggttggctagcaagtcatcaagcaggagatagaagtttagttcaaggtctcaaaggagatccaacttacttaattgttaacagtgaaggagagataggagaattcggactaaatgctatatgcacccatttaggatgcgttgttccatgggatagcggtgcgaataaattcatatgtccttgtcatggaagtcaatatgacacaaatgggaaagtagtaagaggacctgcccctttatctttggccttggcgcatgttgatgtagatgatgatgctgtacttgtaaaacagtggtcagagacagattttagaactaatgaaaatccctggtgggcctaag

SEQ ID NO: 210456 - DNA, 262 bp, Unknown
  Bacterial polypeptide expressing nucleotide sequence isolated from the Sargasso Sea
gaagggcccgatgccatcggtagttacggcatcaacgccatctgcacccacctgggctgcgtggtgccctggaacagcggcgccaacaagttcatgtgcccttgccacggcagtcagtacgacgccaccggcaaggtggttcgcggccccgcacccctctcccttgctctggccaacgtgagcgtcgagaacgacaacgtctttgtgagccagtggactgaaaccgatttccgcacgggcgataagccctggtgggcctgat

SEQ ID NO: 210457 - DNA, 411 bp, Unknown
  Bacterial polypeptide expressing nucleotide sequence isolated from the Sargasso Sea
tatgacccagatttcggcgaaggacgttcccgggatgggccgtcggcagttcatgaacctgctgacctttggatcggtcaccggggttgcactgggcgccctctacccggtggtcaattacttcattccccccaaggctgctggcgctggtggcggcaccaccgccaaagacgaactgggcaatcccgtcaccgccagcggctggctggctgaccacaaagaaggcgatcgcagccttgtgcagggcctcaaaggcgatcccacatacctaattgttgacggccctgattccatcggcgactacggcatcaacgccatctgcacccacctcggttgcgtcgtgccctggaacgctggcgccaacaaattcatgtgcccctgccacggctcccaatacgacgccaccggcaa

SEQ ID NO: 210458 - DNA, 499 bp, Unknown
  Bacterial polypeptide expressing nucleotide sequence isolated from the Sargasso Sea
catgagtgacgtctatgcattcgaggccgattcgttaaccggccagcgcgtgccgctgtcgcagtacaagggcaaggtcctgctgatcgtcaacacggcgagcaagtgcggattcacgccgcagtacgcggggctggaggcggtgtacaagcggctgcacgacaaagggctagaggtgctcggctttccgtgcaaccagttcggcaagcaggaaccgggcggcgaagacgagatcggcgccttctgcgaaaagaactacggcgtctcgtttccgatgttcggcaagatcgacgtgaatggctccaacgcgcatccgctctacaagtggctgacctcggaaaagcccggcgtgctcggtatcggagccatcaaatggaatttcaccaagttcctgctgcgccgcgacggcacggtctacaagcgctacgcgcccatgaccaagccggaagagattgccgacgatattgagcggctgctggcggagcccgatcccgcctga

SEQ ID NO: 210459 - DNA, 475 bp, Unknown
  Bacterial polypeptide expressing nucleotide sequence isolated from the Sargasso Sea
atggcgatcagcgtaagctccgtctccgtcaccacccctgacggcagcagcaaatccctgggcgattacgccggcaaggtgctgctgatcgtgaacgtggccagccgctgtggcttcaccaagcagtacgccggtctgcaggccctaaacgaggcctacgccgccaaggggctggcggtgctgggtttcccctgcaacgacttcggggcccaggagcccggcaccctggacgagatcaagagcttctgctccaccacctacggcgccgacttcgaactgttcgacaaggtgcatgccaaggggagcaccacagagccctacaccaccctcaatcagatggatccggccggtgatgtggagtggaacttcgagaagttcctggtgggcaaggacggcaccgtgatcgcccgcttcaagagcggcgtcacccctgaagacctcaagtcggcgattgaggcggcgctggcggcttgag

SEQ ID NO: 210460 - DNA, 481 bp, Unknown
  Bacterial polypeptide expressing nucleotide sequence isolated from the Sargasso Sea
atgacatcgatttattcgttttcggcacgcacgctgggcggcgaggaagtgagtctcgagcgctatcaaggcaaggtcttgctgatcgtcaatacggcaagtgaatgtggcttcacgcctcagtacgcgggtttgcaaaagctctatgacacctacgcggcgcgcggcctcgcggtgctgggttttccgtgcaaccagttcggcaagcaggaaccgggtgacgctgcgcagatcggcagtttctgcgaaaagaattacggcgtgaccttcccgatgttcgagaagatcgacgtgaacggcgccaatgcgcatccgctgttccgctatctgacgggcgaggcgccgggtctgctggggctcgaagcgatcaaatggaatttcaccaagttcctgatcggccgcgacggcaatgtggtgaagcgctatgcgccgctgaccaagcctgaggcgattgtcgaggacatcgaaaagctgctgtaac

SEQ ID NO: 210461 - DNA, 481 bp, Unknown
  Bacterial polypeptide expressing nucleotide sequence isolated from the Sargasso Sea
gatgtccaccctgtattcgttcagcgcagagacgcttgccggcgcgccggcctcgctcgacgcgtatcgcggcaaggtgctgctgatcgtcaacaccgcgagcgagtgtggcttcacgccgcagtacgcgggcctgcagaagctgtacgaccagtacgcggcgcgcggcttctatgtgctcggcttcccgtgcaaccagttcggcaagcaggagcccggcgacgccacgcagatcggtgcgttctgcgagcgcaactacggcgtcacgttcccgatgttcgcgaagatcgacgtgaagggcgaccatgcgcatccgctgtaccgctacctgaccgacgaggcgcccggcattctcggcctcaaggcaatcaagtggaatttcacgaaattcctggtcgatcgtgatgggcgcatcgtcaagcgctatgcgccgtcgaccaaaccggaagaaatcgccgcggatatcgacaagctgctctga

SEQ ID NO: 210462 - DNA, 553 bp, Unknown
  Bacterial polypeptide expressing nucleotide sequence isolated from the Sargasso Sea
atgcaaaacactatccttgatacagaagtgacgaccatcgacggcgaggttacctcactgcagccgtattccggaaatgtgctgttaatcgtcaacgttgcttcaaaatgtggactgacgccgcagtacgagcaactggagaatctgcagaaaacctggcaccaacagggcttcagcgttcttggtttcccttgcaatcagtttctgggccaggagccgggcagcgaagaggaaataaaaacgtactgcagtaccacctggggcgtaactttcccgatgttcagcaaaattgacgtcaacggcgagggacgccatccgctgtatcagaagctgattgatgccgcaccaacggccgttgcacctgcggacagtgggttctatgagcgaatggcgagcaaaggtcgtgcgccgctctacccggacgatattctgtggaatttcgagaagtttttagtggggcgcgatggaaaagtgctgcaacgattctcaccggatatgacgcctgaggatcccattctggtgcaaaccatcaagcaggcgctggcaaactaat

SEQ ID NO: 210463 - DNA, 481 bp, Unknown
  Bacterial polypeptide expressing nucleotide sequence isolated from the Sargasso Sea
tatggaaactatttataatttttcagttaaggacgcagacttaacagatatttctttgaaaaagtatgagaataaaattattttaatagtaaacgttgcaagtttttgtggacttacatatcaatataagggcttagaaaatatttataaaaaatacaaagacgaaggttttgaaattataggattcccttgcaatcagttcgcttttcaggaacctggtagtaaccaagaaattaaagaattctgtgatactaactatggagtaacttttgaaatcatgagcaagataaaagttaatgggcctaaggctgatccattgttcaagtttctaaaaaaacaaaagtctggaattgcaggaactcctcaaataaaatggaattttacaaaattcttaattaatagagatggtgaagtcataaaacgatttggtccaaaaattgaagcaaaagatatagagtcaactattcaaaaaattttataa

SEQ ID NO: 210464 - DNA, 391 bp, Unknown
  Bacterial polypeptide expressing nucleotide sequence isolated from the Sargasso Sea
catgaagaaaattgatggaacggaccaggacctaagtgactacagtggcaaggttgtgctcgtagtgaatgtcgcgagccaatgcggctacacatcgcagtatgctggactgcagaagctatacgacacgttcaaggacaaaggttttgtcattcttggatttcccgcaaatgatttcggcgcacaagagcccggaagcaacagtgagattgcatcgttttgttcaaaaaactatggcgttacatttgatatgttttcaaaaatatcagtgaagggttcgggcaaggcgaatctttataagacgcttaccgaatccgctaatccgtcaggcgaggtgggttgggattttgagaagttcctgattgatcgtaatggtgcagtcgtcggacgt

SEQ ID NO: 210465 - DNA, 481 bp, Unknown
  Bacterial polypeptide expressing nucleotide sequence isolated from the Sargasso Sea
tatggaaacaatttataatttttcagttaaggacgcagaattaacagatatttctttgaaaaagtatgagaataaaattattttaatagtaaacgttgcaagtttttgcggacttacatatcaatataagggcttagaaaatatttataaaaaatacaaagacgaaggttttgaaattataggattcccttgcaatcagttcgcttttcaggaacctggtagtaaccaagaaattaaagaattctgtgatactaactatggtgtaacttttgaaataatgaacaagattaaggttaatgggcccaaagctgatcctttattcaagtttctaaaaaaacaaaggtccggaattgctggaactcctcaaataaaatggaattttacaaaattcttaattaatagagatggtgaagttatcaaacgatttggtccaaaaattgaagcaaaagatatagagtcaactattcaaaaaattttataa

SEQ ID NO: 210466 - DNA, 481 bp, Unknown
  Bacterial polypeptide expressing nucleotide sequence isolated from the Sargasso Sea
tatgaagactatttatgatttttctattaaagattctgaactgaacgacatttcactagagaattttaaaggaaaggttttattgatagtaaatgttgcaagttattgcggactcacatatcaatataaaggtttagaaaaattatataaaaaatatcgagataaagacttcgaaattttaggatttccatgcaatcaatttgcgctacaagaacccggcagtaacaaagatattaaggatttttgtgatacaaaatatggtattacatttaaaatcttaaacaaaattaatgtgaatggctctaaagaagatcccttctatacctttctaaaaaaagaaaaacctggtgttggaggaacaaaacaaattaagtggaactttacaaaatttcttattaacagaaatggagaggttataaatagatttagtccgcaagctgaaccgaaagatattgagtcaagtatcttagaacttctttaa

SEQ ID NO: 210467 - DNA, 301 bp, Unknown
  Bacterial polypeptide expressing nucleotide sequence isolated from the Sargasso Sea
aatgactaaaaacatctatcaattctcttgcaatgacaataaaggcaatgaagtaaatctaaatgacttcgaaggaaaagtactactaattgtaaatacagcaagtcaatgtggttttacacctcaatatgaaggcctggaaaaattacaaaagttgtttccagaagatagcttttcagtacttgcttttccttgcaatcaattcgggggacaagaacctggatcgaatgaggagatagttgagttttgtagaattaactatggtactactttccctgtattcagtaagattgatgtaaag

SEQ ID NO: 210468 - DNA, 490 bp, Unknown
  Bacterial polypeptide expressing nucleotide sequence isolated from the Sargasso Sea
aatgactaaaaacatttaccaattctcctgtgaggactcatctggtcaagaaataaacttaggcgatttcaaaggaaaaaccttactgatagttaatactgcgagccagtgtggttttacgcctcaatacaaaggactagaacaacttcaaactaaatattcgtctgagaaattttctgttttagccttcccttgtaatcaatttggcggtcaagagcccgggtctaatgaagaaattgtagaattttgcagcttaaattatggaagtacttttccaatctttagtaaaattgatgtaaatggagacaatgcccatcctttatttaaattcttaactactgaaaagaaaggtcttcttggaactgaaaaaattaaatggaatttcaccaaattccttataaataaagatggtgaacctgtgaatcgatacggatcttcaacaacgccggagcagatccagactgatattgaaaagttgattaactcttag

SEQ ID NO: 210469 - DNA, 248 bp, Unknown
  Bacterial polypeptide expressing nucleotide sequence isolated from the Sargasso Sea
tatgccaaaggttcatcattttaaagtgaaggatagtcaggatcaggacgtggatttagcccaatacagggataaagtggtgctgatagtcaacacagccagtcagtgcggctttacctctcagtatcaggaattagaagccttgtatcagcaatacaaagatcagggttttgtggtgctggcttttccctgtaatcagtttggggcgcaggaacctggctctaatgcagagatccagcaattttgtc

SEQ ID NO: 210470 - DNA, 481 bp, Unknown
  Bacterial polypeptide expressing nucleotide sequence isolated from the Sargasso Sea
atgtcaaagatttatgaatataagataagagataaagataactctgagatcaaaatgagcgaatacaaggataaagtcttactgattgtaaatacagccagtaaatgcggattcactcctcaatacgatggattaaatgaattacagaaaaaatattcagatcagggcttttcagttctagcattcccttgcaatcagtttggtaaacaggagccaggatcaaatgaagacatccaagaattttgctctcttaattttgatgttagctttcctgtattaggaaaaattgaggtcaatggtgataatgaagagcctttatttgagcatctgaaatcagagcaacccgggataatggggtcaaagggaattaaatggaactttacaaagtttttggtgaatagagatggtgaagttctgcatcgattcgcgcctaaaacaacgccggcagaaattgaaaagcagattcagtcaattctttgag

SEQ ID NO: 210471 - DNA, 481 bp, Unknown
  Bacterial polypeptide expressing nucleotide sequence isolated from the Sargasso Sea
tatgtcaaagatttatgaatataagataagagataaagataactctgagatcaaaatgagcgaatacaaggataaagtcttactgattgtaaatacagccagtaaatgcggattcacccctcaatacgatggattaaatgaattacaaaaaaaatatgcagatcagggcttttctgttctagcatttccttgcaatcagtttggaaaacaggagccaggatcaaatgaagacatccaagaattttgctctgttaattttgatgtcagctttcctgtattggcaaaaattgaggtcaatggtgataatgaagagcctttatttgagcatctgaaatcagagcagcccgggataatgggatcaaagggaattaaatggaactttacaaagtttttggtgaatagagatggtgaagttctgcatcgattcgcgcctaaaacaacgccggcagaaattgaaaagcagattcagtcaattctttga

SEQ ID NO: 210472 - DNA, 481 bp, Unknown
  Bacterial polypeptide expressing nucleotide sequence isolated from the Sargasso Sea
tatgtcaaagatttatgaatataagataagagataaagataactctgagatcaaaatgagcgaatacaaggataaagtcttactgattgtaaatacagccagtaaatgcggattcactcctcaatacgatggattaaatgaattacagaaaaaatatgcagatcagggcttttcagttctagcattcccttgcaatcagtttggtaaacaggagccaggatcaaatgaagatatccaagaattttgctctcttaattttgatgtcagctttcctgtattaggaaaaattgaggtcaatggtgataatgaagagcctttatttgagcatctgaaatcagagcagcccgggataatgggatcaaagggaattaaatggaactttacaaagtttttggtgaatagagatggtgaagttctgcatcgattcgcgcctaaaacaacgccggcagaaattgaaaagcagattcagtcaattctttga

SEQ ID NO: 210473 - DNA, 481 bp, Unknown
  Bacterial polypeptide expressing nucleotide sequence isolated from the Sargasso Sea
atgactaagatttatgaatacactgtgaaagacaaagataactctgaaatcaaaatgagtgattacagggataaagttttgctgattgtaaacacagcaagtaaatgtggattcactcctcagtatgatggactgaatgaattgcaaaaaaaatatgccggtaatgggttttctgttctagcatttccatgcaatcaatttggaaaacaggaaccgggttccaatttagagatccaagagttttgttcaatgaattatgatattagttttcctgtcttagcaaaaattgaagtcaatggggaaaaagaggaacctttatttagtcacctgaaatcagaacaaccaggaataatggggtcaaaaggaatcaaatggaattttacaaaattcttggtgagtagagatggtaaggtcctacatcgatttgcaccaaaaacaacgccagctgaaattgaaaaagaaatcgaatcaattctctgat

SEQ ID NO: 210474 - DNA, 481 bp, Unknown
  Bacterial polypeptide expressing nucleotide sequence isolated from the Sargasso Sea
atgactcagatttatgaatacactgtgaaagacaaagataactctgaaatcaaaatgagtgattacagggataaagttttgctgattgtaaacactgcaagtaaatgtggattcactcctcagtatgatggactgaatgaattgcaaaaaaaatatgccggcaatgggttttctgttctagcatttccatgcaatcaatttggaaaacaggaaccgggttccaattcagagatccaagagttttgttcaatgaattatgatattagttttcctgtcttagcaaaaattgaagtcaatggggaaaaagaggagcctttatttggtcacctgaaatcagaacaaccaggaataatggggtcaaaaggaatcaaatggaattttacaaaattcttggtgagtagagacggtaaggtcctgcatcgatttgcgccaaaaacaacgccagctgaaattgaaaaagaaatcgaatcaattctctgat

SEQ ID NO: 210475 - DNA, 481 bp, Unknown
  Bacterial polypeptide expressing nucleotide sequence isolated from the Sargasso Sea
tatgtcaaagatttatgaatataaggtaagagataaaaataactctgagatcaaaatgagcgaatacaaggataaagtcttactgattgtaaatacagccagtaaatgcggattcactcctcaatacgatggattaaatgaattacaaaaaaaatatgcagatcagggtttttcagttctagcattcccttgcaatcagtttggtaaacaggagccaggatcaaatgaagacatccaagaattttgctctcttaattttgatgtcagctttcctgtattaggaaaaattgaggtcaatggtgataatgaagagcctttatatgagcatctgaaatcagagcagcccgggataatggggtcaaagggaattaaatggaactttacaaagtttttggtgaatagagatggtgaagttctgcatcgattcgcgcctaaaacaacgccggcagaaattgaaaagcagattcagtcaattctttga

SEQ ID NO: 210476 - DNA, 532 bp, Unknown
  Bacterial polypeptide expressing nucleotide sequence isolated from the Sargasso Sea
atgcttacagttggcgacgagtttccccagttttctgtccaagcctgtaccggtacggaaaaggaagacatcaagttgctcacatcggctgactattcagggaagtggacggtgttctttttttacccaaaagattttacgtttgtttgtcctacggaattagctgagttcaacaaacaactcaaatcattttcagatcgtgatacgagtgttgtgggtggcagcaccgataacgaatggtgtcatatgatgtggcgacgatcccatgcagatctaaaagatcttgcatacccactgatagcagcccaaaagctgggcgctgaactcggtatactcgagcaaacagaaggatactgtcagcgggcaacatttattgttgatcccaacggcgtgatccaatgggttgatgtgaatcaagggcgcgttggccgaaatgtcgctgaagtcatacgcgtacttgatgcccttcaaagtgatgaactgtgcccgtgcaactggaagaagggcgatccatacgtaaaggtcggctgat

SEQ ID NO: 210477 - DNA, 574 bp, Unknown
  Bacterial polypeptide expressing nucleotide sequence isolated from the Sargasso Sea
tatgtcagtattagttggtagacaagcacctgatttcacatcggctgccgttcttgcttcaggcgagatcgtagatacattcaactttcaccagcacatcgctggaaaatatgctttggttttcttctatccccttgattttacgtttgtttgtccttccgagctgattgctttgagtcaggcgatgggtgagttcgagtctcgaggagtagaggtagtatcggtctcgatagactcgcattttacccacaatgcttggcgcaatacgccagtagatgcgggtggtattggcccagttcgctacaccatggcagctgatatgaaacacagcatttgccaggattacggggttgagcatccagatgccggtgtggcttttcgtggtgtttttctaatagaccaaaataaagtggttcgggctcagattgtgaatgacttgccattgggtcgcagtatccaagaaattctgcgtttggtcgatgcgcttcagttcaccgaagagcacggtgaagtgtgtccagccaactggaagaaaggtgaagtagccatgactgcgacaccggaaggtgtggcg

SEQ ID NO: 210478 - DNA, 467 bp, Unknown
  Bacterial polypeptide expressing nucleotide sequence isolated from the Sargasso Sea
tccattagactttacttttgtttgtccaacagaaattaccgcattcagtgatgaatttaataaattctctgacttaaacactgaagtccttggagtatctgttgatagtaaacattgtcacttagcttggatacaaacaccaagaaatgaaggaggtatcggtgatattaactatcctttggtatctgatttgaaaagagaaatttgccaagcttacaacgtactcaatgatgatggtgaagctgatagaggtttatttctaattaatccagaaggaattgtaatgcacacgacagtgaataaagctcctgtaggtagaaatgttgatgaaacactcagaatacttcagggttatcaatatgtagcagctaatcctgatgaggtctgtcctgcaaattggactccaggggagaaaacaatgctagaagatccaaaaggaagtaaagagtatttctctgctctttaag

SEQ ID NO: 210479 - DNA, 388 bp, Unknown
  Bacterial polypeptide expressing nucleotide sequence isolated from the Sargasso Sea
gtttacaatctatgggcgtttgaagtttactcagtttctactgacactcacttcactcacaaagcatggcacgatacttctgacaccatcaagaagatcaacttcccaatgctggctgaccctactggtgtgatcagccgtaacttcggtgtgatgatcgaagaagaaggtttagcactgcgtggtactttcgttatcaacccagaaggccaagtgaaagttgctgaaatccatgacctaggtatcggccgtagcgcgtctgaactggttcgtaagatccaagcagctcagtacgttgcaactcacgatggcgaagtttgcccagctaaatggcaaccaggtgacgaaaccttagctccatctttagacctagtaggcaaaatctaat

SEQ ID NO: 210480 - DNA, 520 bp, Unknown
  Bacterial polypeptide expressing nucleotide sequence isolated from the Sargasso Sea
attgttctggtatccaaaagatttcacttttgtttgcccaacagaactacacgccttccaggctgcactgccagaatttgaaaaaagaaacactatcgtaatcggagcttcttgcgacactaacgaagtacactttgcatggttgaatacaccaaaaagcaacgggggaatcgaaggtgtaacctatcctatcttagcggatactaaccgtaaccttgctaacattcttggaatcttagacatagagtctactagctacagcgaagaaacagattcagtaatcatcgaaggttcaaacgtaacttacagagctacttatttgattgatgagacaggaaaaatcttccacgaaagcgtaaacgatatgccgttgggaagaaacgttgctgaatacttaagactagtcgatgcttatactcacgtacaaactaaaggtgaagtatgtcctgctaactgggaagaaggaaaagaagcgatgtttgctacaagagaaggtgttgcttcttacctgaataactaa

SEQ ID NO: 210481 - DNA, 637 bp, Unknown
  Bacterial polypeptide expressing nucleotide sequence isolated from the Sargasso Sea
atggcattagtaggaaaaaaattcccaaacattacagttgacgcaatttctcatatgggagataatttaagaattaacgttttagaagaagctgtaaacaacaagaaaaaagtagttttattttggtacccaaaagactttacttttgtttgtccaacagaattacatgcttttcaaaatgctttaggtgaatttgaaaaaagaaatacattagtaattggtgcttcatgtgatacaaatgaagttcactttgcttggttaaacactgcaaaagataatggtggaattgaaggtgttacttatcctcttttagctgatacaactagaaatttagcagctaatttagatattcttgatgcagaatgggtttttgacgaagaattaaacgacgaaattttagaaggttcaaacgtaacttttagagcaacatatttaattgacgaagaaggtaaaattttccacgaaagtgtaaacgatatgccattaggtagaaatgtgaatgaatatttacgtttaatcgatgcttacactcacgtacaaactaaaggtgaagtttgtcctgctaactgggaagaaggaaaagaagctatgaacgctgatagattaagtactgctgcttatttaagccaaaactaaa

SEQ ID NO: 210482 - DNA, 634 bp, Unknown
  Bacterial polypeptide expressing nucleotide sequence isolated from the Sargasso Sea
catgacaacattagtaggtaaaaaagcgccatcgtttgaggcagctgctgttataaacggcggagaaatagtacaaaatttttcattagagcaataccttggtaaaaaccaagttattttattcttctatccaaaggactttacatttgtttgtccatcagaacttcatgcatttcaagatgctttagctgattttgagtcaagaggagtaaaagttgtagcttgttctactgatactgaagaatctcattggggatggcttcaggttcctaaaaataaaggaggaatcgagggtgttaaatatccaattgtcgcagatacatctaaaacaattgcagatgcatatggagttttaaccggagagtatgattatgatgtagaaggaaacttagttgcaactggatccatgatttcatacagaggattgtttttaattgataaagaaggccttgttagacacatgcttatcaatgatctacctttaggaagaaatgtagaggaggcaattagaattgttgatgcacttcaatttaacgaagagcatggagaggtttgtcctgcaaactggcaaaaaggaaaagacggaatgactgcttcttttgatggagtagcagattatctagcaaatcattaa

SEQ ID NO: 210483 - DNA, 601 bp, Unknown
  Bacterial polypeptide expressing nucleotide sequence isolated from the Sargasso Sea
atgctgccagtgggcgtgggcgaaaccgtgccggaattcaaaatggaaacgttcgagcccagcacgggccagttcggggaggttagcctggccgatctcaaggctgacggcaaatggacgattctggttttttacccggcggatttcaccttcgtgtgccccacggagctagccgatctcgccgcgcaggatgccaagctcaccgagctcggtgccaaggtgatcggggtttctacagacaccaagttcagccacctcgcctggtgcaatgaagagaagctaatggacgatgtgaaatacacgctcgccgcagataccaccggcgtggtctccagcctgttcggcgtatacgatgatgccaccggtctcgccttgcgcggcacgtttgttatcagccccgaaggcaagctcgtgagtgccaccgtaaacttctacaacgtgggccgcaacatggaggaactcgtgcgcgtgatggaagcgaacgtccactgcgccgccaaccccgaagaagcctgccctgccaaatggactccgggcgaaaagacgctgacccccaacgaaggcatggtcggcaacgtctacgaggccctgaacggctaac

SEQ ID NO: 210484 - DNA, 268 bp, Unknown
  Bacterial polypeptide expressing nucleotide sequence isolated from the Sargasso Sea
cccgactggcgccctgacccgtaacttcgacaacatgcgtgaagatgaaggtctggctgaccgcgcaaccttcgttgttgacccgcagggtatcatccaggcaatcgaagttactgctgaaggtatcggccgtgatgcatctgacctgctgcgtaaaattaaagctgcacagtatgtcgcttctcacccaggtgaagtttgcccggcgaaatggaaagaaggtgaagcaaccttagctccatctctggacctggttggtaagatttaa

SEQ ID NO: 210485 - DNA, 607 bp, Unknown
  Bacterial polypeptide expressing nucleotide sequence isolated from the Sargasso Sea
tatgacgatacttgttggtagagaagcgcctgattttacagttcctgctgtattaggctcgggtgaaattgttgataattttaattttaaagatgcggtgagtgggcagtatgggttagtttttttctaccctttagattttacgtttgtatgcccttctgagctgattgcactggatcatgtggttgaggaatttaagaagcgtgatgttgaagtcattgcagtttctattgattcacagtttacgcacaatgcttggcgtaatacttctgttgataaaggtggtattggaccggttaagtttactttggctgctgatgttgcgcataatatttgtcgtagttatggtgtagagcatccagaagcaggtgtcgcatttcgtggtacctttatcattgataagcagggcatcgtaaggtctcaagttgtcaatgatttgcctctagggcgtaatattcatgacttgctacgtacgattgatgcattgcaattctttgaggagcatggtgaagtatgccctgcaaactggaaaaaaggcgcggcgggtatgaaagcttcaccccaaggcgtatctgaatatttgtctgaatatgcggattctttataa

SEQ ID NO: 210486 - DNA, 601 bp, Unknown
  Bacterial polypeptide expressing nucleotide sequence isolated from the Sargasso Sea
catgcccgaaaacggttgccttcgtgtgggccagatggccccggatttcactgccactgcagtggtggatcaggaattcaaggagatcagcctgtcccagtacaggggcaaatatgtcgtcctcttcttctacccgttggacttcacctttgtctgtcctactgagatcaccgcattcagcgacagatacgcagatttcagctcgaaaaatacagaagtccttgctgtgtccgttgacagcaagttcagccaccttgcctggattcagacccctcgcaaccaaggcggaatcggtgacatcacataccccctcgttgctgatctcaagaaagagatctgcgccgcttacaacgttctcaacgaagacggagaagccgatcgcggcttgtttatcatcaatcctcagggaatggtgatgcacatgaccatcaacaaggcacccgttggtcgcaatgttgatgaaacgctgcgtgtgcttcaggcttatcagtatgtcgaagccaaccctgatgaagtctgtcccgcgaactggacacctggtgataaaacaatgaaagaagatcccaagggaagcaaggagtatttctccgctatcggctga

SEQ ID NO: 210487 - DNA, 607 bp, Unknown
  Bacterial polypeptide expressing nucleotide sequence isolated from the Sargasso Sea
atgggtgtattagtaggccgccaggcaccagactttaccgctgcagcagttttaggtaatggtgaaattgtagatagctacaatctacacgaaacaattaaaggtaaaaaagctgtaatcttcttttacccattagatttcacgtttgtatgtccttctgaacttattgcatttgataagcgttttgaagagtttaaaaagcgtggcgttgaagtaattggtgtttctatcgattctcagttttctcataatgcatggcgtaatacgcctgtagctgacggcggtattggtaaagtacaatacgcactagttgcagacgttaaacacgaaatttgtaaagcatacgacgttgaacatcctgaagcgggtgttgcatttcgtggttcgttcttaatcgacgaagaaggtaacgtacgtcatcaagtagttaacgatttaccactaggtcgtaacattgacgaaatgatccgtatggttgatgcactagcgttccacagtgagaacggtgaagtttgtcctgctggttggactgaaggtaaaaaaggtatggatgcaagccctgaaggtgttgctaagttcctttctgaaaacgaaggcgagctataat

SEQ ID NO: 210488 - DNA, 532 bp, Unknown
  Bacterial polypeptide expressing nucleotide sequence isolated from the Sargasso Sea
catgctgactgttggcgactcatttccaaaattttcctgccaggcgtgtgtcgggacagaaaaggatgacatcaaactactctcaagtgctgactatgagggaaagtggacagttttctttttctatccaaaggatttcacgttcgtatgcccaacggaattggctgaattcaataagcaacttaagaactttacggatcgtgatacaagtgttgtgggaggaagtacggataatgaatggtcgcacatgatgtggcgacgctcccatgctgatctgaaggatcttgcttatccactgattgctgcacagaagctcgcgccagagctcggcattgtcgagaaaacagaaggctactgccaacgggctacatttattgtcgatccgcatggaattattcagtgggtcgatgtcaatcagggccgggttggtcgaaatgtcgcagaagtgttgcgtgttctcgatgctctgcaaagcgatgaactctgtccatgcaattggaaaaaaggtgatccctacgtgaaggtgggctag

SEQ ID NO: 210489 - DNA, 505 bp, Unknown
  Bacterial polypeptide expressing nucleotide sequence isolated from the Sargasso Sea
atgagtaaaaacatctttagactactaggagaatataaaaaagagatcgcaatatttgccggtttatttattatagataggctcgtaaaagtttatttgttgaattttcttcaagaaaaccaattaaattcattaaggctcaataacttctttgaagtggttcttgtctggaataggggcgtcagttatggtctttttccgcaacagagttatgcagggcaattgatcataatatttttttcattaatcatctgtgtttggatagcaaaatttataacaaattcagagattagatatcgcagtataacattaatattaattctagctggtgccagttccaacataattgacaggttgatctatggagctgtggctgatttttttcactttgaaattgcaacttacagttggtatgtcttcaatattgcagatatatatatagtaagtgggctattaatattgatctatgcgtttatttatcctaacataaaaaatagcccttaaa

SEQ ID NO: 210490 - DNA, 534 bp, Unknown
  Bacterial polypeptide expressing nucleotide sequence isolated from the Sargasso Sea
tccttcaacctgggcatcccacatcaaggggcaaggcagccgtcctgttcttctatccgctcgatttcaccttcgtctgcccatccgagctgattgccttcgatcaccgtctggaagagttcaacaagcgtggcgtggaagtgatcggtgtctccatcgactccgagttctcccacaacgcctggcgcaacaccaagatcgaagacggcggcatcggcccggtcaagtacccgctggttgccgacatcaagcacgagatctgcaaagcctatgacgtcgagcacccggaagctggcgtggcattccgtggctccttcctgatcgacaagaacggtgtcgttcgtcaccaggttgtcaacgatctgccgctgggccgcaacatcgacgagatgctgcgcatggtcgacgccctgcagttccacgaagagcacggcgaagtgtgcccggctcagtgggagaaaggcaaaaaaggcatgaccgcctctccggacggcgttgccaagtacctgtccgagaacgccgcttccctgtaat

SEQ ID NO: 210491 - DNA, 399 bp, Unknown
  Bacterial polypeptide expressing nucleotide sequence isolated from the Sargasso Sea
catgaccgagaccggttgccttcgtgtgggccagcaggcccccgatttcactgccactgcagtggtggaccaggaatttaaggaaatctccctgtcccagtaccgcggcaagtacgtggtgctcttcttctatcccctggatttcaccttcgtctgccccacagaaatcacggccttcagcgaccgctacgccgatttctccagcaagaacaccgaagtcctcggcgtttccgttgacagccagttcagccatctggcctggattcagactccacgcaatcagggcggtctgggcgacatcaactatcccctggtcgctgacctcaagaaggaaatcgccaccgcttacaacgtgctggacgacgccgagggtgttgccttgcgtggactgttcatcat

SEQ ID NO: 210492 - DNA, 547 bp, Unknown
  Bacterial polypeptide expressing nucleotide sequence isolated from the Sargasso Sea
atgtcttcaattatcaacagcaccatcaagccatttaaagcgactgccttccatcacggtaaatttgttccagtgactgaacaggatctggccggcaaatggtcagtagtagtgttctacccagctgacttcactttcgtttgcccaactgaattaggcgacctggctgatttctatcctaagttccaggaaatcggcgttgaagtttactcagtatctactgacacgcatttcactcacaaagcgtggcacgatgcttctgaaactatcaagaaaatcaactacccaatgatcggtgacccaactggtactatcactcgtaacttcggtgtgatgatcgaggaagaaggtttagctttacgtggtactttcgtaatcaacccacaaggcgaaatcaaagttgctgaaattcacgacttaggtatcggccgtagcgctgcagaactgttccgtaaagttcaggctgcacaatacgtagcaaaccacgacggtgaagtatgtccagctaaatggactccaggtgaagcgactttagctccatctttag

SEQ ID NO: 210493 - DNA, 565 bp, Unknown
  Bacterial polypeptide expressing nucleotide sequence isolated from the Sargasso Sea
aatgtctatcatcaatagcaaaatcaaaccttttaacgctcaggctttccatcagggtaaatttgtttctgtgtctgatcaggatctgatcggtaagtggtctgttgtttgtttctacccggctgacttcacatttgtatgcccaactgaattaggcgatctggctgacttctatcctaagttccaggaaatcggtgttgaagtgtattcagtatcgactgacacacatttcacgcacaaagcatggcatgatgcttctgaaactatcaaaaaaatcaactacccaatggttgctgacccaacaggtgtgattacccgtaacttcgacgtgatgattgaagaagaaggtttagctttacgtggtactttcgtaatcaacccggaaggtattgtgaaagtcgctgaaatccatgatctgggtatcggtcgttcagctgcagaactgttccgtaaagttcaggctgctcagtatgttgcaaaccacgacggcgaagtatgtccagctaaatggacgccgggcgaaaaaactctggctccatctctggacctggttggtaagatctaa

SEQ ID NO: 210494 - DNA, 450 bp, Unknown
  Bacterial polypeptide expressing nucleotide sequence isolated from the Sargasso Sea
accctgcagatttcaccttcgtttgccccaccgagttgggtgatctcgccgatcattacgcagaactgcaatcccgtgacgtcgaggtcttctcagtatcgaccgacacgcacttcacccacaaagcctggcacgacgcctcggatacgatcgggaaagtgcaatacacaatgattggtgatccaaccggcgagatcacgcgcaacttcgacgtgatgcgcgagggtcagggcctcgctgatcgggggacctttatcgtcgatcccgatggcatcatacaggcgatggaaatcaccgctgagggcatcggccgcaacgccagcgacctgctgcgcaaggtgaaggccgcgcaatacgttcgagcccatcccggcgaagtctgcccagccgcttgggaagaaggtgaagagaccttagcaccgtcgctcaacctcgtcggcaaaatctgat

SEQ ID NO: 210495 - DNA, 529 bp, Unknown
  Bacterial polypeptide expressing nucleotide sequence isolated from the Sargasso Sea
aatgtctgcattagttgcgaaacctgcaccagattttacagcgcaagcggtaatgcctgatggcagttttaaagaaatcaaactttctgattatcaaggaaagtatgttattttatttttctatcctctcgattttactttcgtttgccctactgagattattgctttcagtgcgaaaatggatgaattcaaaaaaaggaatacagaagtacttggagtttccattgacagtcatttctcccatttagcttggagaaatacagatcgtaagcagggtgggttgggtgatattgcgtatcctctcgttgcagatgttaataaaaaaattacttacgattatggtgtcatgcacgaagcaggaatcgcctttcgtggattgtttctgattgataaggatggcgtgatccagcatcaattgatcaataatctaccacttggcagaaatattgatgaagccttacggatggtagatgcgcttcaattccacgagaaaaatggagaagtatgccctgccaattggagcgaagga

SEQ ID NO: 210496 - DNA, 795 bp, Unknown
  Bacterial polypeptide expressing nucleotide sequence isolated from the Sargasso Sea
cgtttaacgatagattggatgagttcaaggcgctgaacacgaacgtgatcgcggtgtcgacggatagcgagtattcgcacttggcgtggacgatgacggaacgcgaacgcggaggtctgggaccgatgcgcattccgatcgtcgcggataggacgaaggagatcagcgccaagtacggggtgttgctcgaagatcgagggatcgcgcttcgtggattgttcatcatcgacgacgagggcgtcgtgcagcaaatcaccatgaataatttgcccgtcgggcgaagcgtggacgagacgttgcgtttggtgagggctttccagttcacggccgagcacggcgaggtgtgcccagcgggttggaccccgggagcgccgaccatggtcggtgatccggagggatcgaaggaatatttcgagcaacacgccggaaaggcttcgaacgccgaaggcgccgccgcgtcgagcgacttcgccgccaagcttcgaccgatcacgtctcgcgccgatttcgaggcgctcgtcgccggacccaacccggtcgtcgtagacttcatggccaattggtgcggcaagtgtcgccaaatcgctcccgaagttgacaagttgatcgaccagtacccgaacgtcgtgttcgcgaaattcgacaccgcgctcgccgatctcgccccgttctccaaagagatgggaatcgaggcgatgccgacgttcaagttttacaaggaaggtcgcgaagtcaacgaagtgatcggatacaagccaaagctccttcgcacggcggtggaggagtttgcgtaat

SEQ ID NO: 210497 - DNA, 568 bp, Unknown
  Bacterial polypeptide expressing nucleotide sequence isolated from the Sargasso Sea
aatgtcttcaattatcaacagcaccatcaagccatttaaagcgacagccttccatcacggtaaatttgttccagttactgaacaggatctgttaggcaaatggtcagtagtagtgttctacccagctgacttcactttcgtttgcccaactgagttaggtgatttagctgacttctacgctaagttccaggaaatcggtgttgaagtgtactcagtatctactgacacgcatttcactcacaaagcgtggcatgatgcttctgaaactatcaagaaaatcaactacccaatgatcggtgacccaactggtactatcactcgtaacttcggtgtgatgatcgaggaagaaggtttagctttacgtggtactttcgtgatcaacccacaaggcgaaatcaaagttgctgaaattcacgacttaggtatcggccgtagcgctgcagaactgttccgtaaagttcaggctgcacaatacgttgcaaaccacgacggtgaagtatgtccagctaaatggactccgggtgaagcgactttagctccatctttagacctggttggtaaaatctaa

SEQ ID NO: 210498 - DNA, 571 bp, Unknown
  Bacterial polypeptide expressing nucleotide sequence isolated from the Sargasso Sea
atgactcaatcaattatcaacagcaccatcaaaccattcaaagccactgcttaccacaatggtgagttcgtgcctgtaacagaacaagatctgttaggtaaatggtcagttgtattcttctatccagcagacttcactttcgtttgcccaactgaattaggcgacatggcggatcactacgctaagttacaatctatgggcgttgaagtttactcagtttctactgacactcacttcactcacaaagcatggcacgatacttctgacactattaagaagatcaacttcccaatgctggcagaccctactggtgtgatcagccgtaacttcggtgtgatgatcgaagaagaaggtttagcactacgtggtactttcgttatcaacccagaaggccaagtgaaagttgctgaaatccatgacttaggtatcggccgtagcgctcaagaactggttcgtaagatccaagcggctcaatacgttgcgactcacgatggtgaagtttgcccagctaaatggcaaccaggtgacgaaaccttagcaccatctttagacctcgttggcaaaatctaat

SEQ ID NO: 210499 - DNA, 571 bp, Unknown
  Bacterial polypeptide expressing nucleotide sequence isolated from the Sargasso Sea
aatgactcagtcaattatcaacagcacaatcaaaccattcaaagccactgcttaccacaatggtgagttcgttcctgtaactgaacaagatctgttaggtaaatggtcagttgtattcttctatccagcagacttcactttcgtttgtccaactgaattaggcgacatggcggatcactacgctaagttacaatctatgggcgttgaagtttactcagtttctactgacactcacttcactcacaaagcatggcacgatacttctgacaccatcaagaagatcaacttcccaatgctggctgaccctactggtgtgatcagccgtaacttcggtgtgatgatcgaagaagaaggtttagcactgcgtggtactttcgttatcaacccagaaggccaagtgaaagttgctgaaatccatgacctaggtatcggccgtagcgcgtctgaactggttcgtaagatccaagcagctcagtacgttgcaactcacgatggcgaagtttgcccagctaaatggcaaccaggtgacgaaaccttagctccatctttagacctagtaggcaaaatctaa

SEQ ID NO: 210500 - DNA, 568 bp, Unknown
  Bacterial polypeptide expressing nucleotide sequence isolated from the Sargasso Sea
atgtctacctacatcaacactgaaatcaagccgttcaacgccaccgcctaccacaatggcaaattcgttcaggtgtctgacgctgacctgaaaggcaagtggtccgtggtgttcttctacccggctgacttcaccttcgtctgcccgaccgagctgggtgacctggccgacaactacgccgaattccagaagctgggcgtcgagatctactccgtctccaccgacacccacttcacccacaaggcctggcacgacacttctgacaccatccagaagatccagtacccgatgatcggcgacccgaccggcaccatcacccgcaacttcggcgtgatgatcgaagaagccggtctggctgaccgcggtaccttcgtcatcgacccgcaaggcatcatccagatcgttgaaatcaacgccggcggcatcggccgtgacgccctggaactgctgcgcaaggtcaaggctgcccagtacgttgccgctcacccgggtgaagtgtgcccggccaagtggaaagaaggcgacgccaccctggccccgtccctggatctagtaggcaaaatctaag

SEQ ID NO: 210501 - DNA, 565 bp, Unknown
  Bacterial polypeptide expressing nucleotide sequence isolated from the Sargasso Sea
gatgccgatcatcaacacccaaatcaagccgttcaaggcaaccgcttaccacaacggcgaattcgtgcccgtctcggaagagaacttcaagggcaagtggtccgtcgtcgtgttctacccggccgacttcacgttcgtctgcccgaccgagctgggcgacctcgccgaccgttacgcggaattccagaagctgggtgtcgaaatctacggcgtgtcgaccgacacgcacttcacgcacaaggcatggcacgacacgtcggacacgatcgccaagatcaagtacccgctggtcggcgacccgacgctcacgctgtcgcgcaacttcgacgtgctgatcgaggaagaagggatggccctgcgcggcacgttcgtgatcaacccggaaggcgagatcaagctgtgcgaaatccacgacaacggcatcggccgcgacgcaggcgaactgctgcgcaaggtgcaggcagcgcaatacatcgcggcgcacccgggtgaagtgtgcccggccaagtggacgccgggtgcggaaacgctgaccccgtcgctcgacctgatcggcaagatctga

SEQ ID NO: 210502 - DNA, 361 bp, Unknown
  Bacterial polypeptide expressing nucleotide sequence isolated from the Sargasso Sea
tatgcttcaacggaaaacaacattactatcggctttagcagtcgccgtttcgttagctttaactacccatatcgccagtgcagaaagcatgaataagggcaaccagttctggtggcctgaacaattaaatctggcgcctttgcgtcagcatggggtggaatccagccctatggatcaaggctttaactatgcagaagagtttaaaaagctggatttaaaagccgtcaaagcagatatcaccaaactgatgaccacaccacaagactggtggccgccggattatggtcactacggcccattttttattcgtatggcctggcatagtgccggtacttatagagtgtctgatggtcggggtggg

SEQ ID NO: 210503 - DNA, 782 bp, Unknown
  Bacterial polypeptide expressing nucleotide sequence isolated from the Sargasso Sea
gtgcgtggacacctttgctcgcatgggcatgaacaacgaagagaccgtggccctggttgccggtggacacacctttggcaaggcccacggtgcggccgtggcggaccacgttggagcggagccagaaggcggcagcatcgaacagcagggcctgggatggcacagcgattacgaaagcggcaagggcgtgcacaccatttccagtggcatcgaaggggcctggaaacccaatcccacccgatgggatggcggctacttcgaaatgatgttcacctatgagtgggaactcagcaaaagtcctgcgggcgcctggcaatggcatcccaaggacgtgcgtgaggagcatctgatccctgatgcccatgaccccacgaagtcgtcaccgccgatgatgaccacggcggatctgtccctgcgatttgatcccgcctacgagccgatttccaggcgtttccgtgacaaccaggacgccttcgccgatgccttcgctcgcgcctggttcaagctcacgcaccgagacctggggccccgttcgttgtatctggggcctgaggtgccgcaggaggtgttgatctggcaggacccgattccccccgttgatcaccccttgatcgctgccgctgagatcgacgacctgaagcacaagctgcagagcagtggcctttccgtggccgagttggtgagcacggcctgggcttcagcctccagcttccgtggatcagacaagcggggtggagccaatggagcccgtttgcgcctggcgccgcaacgcagctgggagg

SEQ ID NO: 210504 - DNA, 868 bp, Unknown
  Bacterial polypeptide expressing nucleotide sequence isolated from the Sargasso Sea
gaagaagaattaatttggcaagatccagtacctcaaggtcattcaaactacgatgttgaagtagtgaaagctaaaattttaagcagtggtttaactactcaagaaatggttgaaactgcctgggcaagtgcttcaaccttcagaggatcagatatgagaggcggagcaaatggtgcaagaattagacttgctcctcaaaaagattgggaggttaataaaccagagcaattaaaaaaagttcttggtattcttgagcctattgcaaaagatacgggtgcatcaatagctgatgtaattgtgcttgcaggtaatgtcggcgtagaaaaagcaactggaatggaagtaccttttactccaggtagaggtgatactactcaggagaaaactgatattgaatcgtttgaagttctagaaccagaggcagatgcttttcgtaattatttaaaaatgaattatgatgtgacggctgaagagctcatgttggataaagcacagctattaggccttacagctccagaaatgactgttcttgttggtggaatgagatctatgggaattagttcagatcaaagaggattgtttgttgatacaaaaggaaaactgacaaatagtttttttgataaacttttagatatgggtgttagttggaagcctactggaagcaattcatatgaagcaaccgataaaattacgggagagaaagtaagaactgcatctagagtagacctagtttttggatctaattctcaattaagagcaatagcggaactttatgcaagtgatgacagtgaagaaaaaatgaaaaaagacttcattaaagcttggaacaaagtgatgaatgcagatagatttgacttagaaaaataat

SEQ ID NO: 210505 - DNA, 934 bp, Unknown
  Bacterial polypeptide expressing nucleotide sequence isolated from the Sargasso Sea
tcagtaaaagttcttacaatgatgacaacagcagatatgcaaatgcgtgaagatcctgaatacagaaaagtatcagaaaaatttcacaaagacccagaatattttgctgatcaatttgctagagcttggtttaaacttctacatcgagatatgggtccaaaaactaggtatatgggaccagaagttccagaagaggaattgatttggcaagaccctgtacctcaaggtcattcaaactatgatgttgaaacagtaaaagctaaaattttaaatagtggtttaacaactcaagaaatggttgaaactgcttgggcaagtgcttctacatttagaggatcagatatgagaggtggagcaaatggagcaagaattagactttctcctcaaaaagattgggaagttaataagccagagcaattaaaaaaagttcttggtattcttgagcctattgcgaaagaaacaggagcttcagtggctgatgtaatcgtccttgctggtaatgtaggtgtggaacaagcaactggcatggaagtaccttttactccaggtagaggtgataccactcaagataaaactgatattgattcttttggtgttcttgaacctgaagcagatgcatttcgtaattatttaaaaatgaattacgatgttacagctgaggaactaatgctagataaggcacaactattaggactaactgctcctgaaatgactgtacttgttggtggtatgagatctatgggtattagttcagatcaaagaggattatttgttgatacaaaaggtaagttaacaaatgatttttttgataagcttttagatatgggtgttagttggaagccaactggaagtaattcatatgaagctacagataaaattacaggagaaaaagtaagaactgcatctagagtagatcttgtttttggatccaatt

SEQ ID NO: 210506 - DNA, 263 bp, Unknown
  Bacterial polypeptide expressing nucleotide sequence isolated from the Sargasso Sea
tgattcttttataaatcttctagatatgaatattaaatggaaagaagtttcttcaaaagaagatttatttgaaggaagggatcgcaaaacaaaaaaactaaaatggataggaacacgggcagatctaatttttggatctaattcacaattaagagcgcttgctgaagtatacgcaactgatgactcaaaagataaatttataagcgattttacatcagcttggacaaaagtaatgaatttagatcgatttgatcttaattaat

SEQ ID NO: 210507 - DNA, 347 bp, Unknown
  Bacterial polypeptide expressing nucleotide sequence isolated from the Sargasso Sea
tgttggaggaatgcgtgtactaaacacaaattttgataaatcaaaacatggagtattcacaaaaaaaccagaagcactcacaaatgatttttttgttaacttgcttgatatgaacacaacttggaaagaagtttctaaagaagaagatttatttaacggacgaaatcgtaaaacaaataaagttaagtggactggtacacgttttgatcttatatttggatcaaattctcaactaagagcattagcagaagtttatgcctgtgaagattctaaaccgaagtttgttgctgattttatatctgcatggacaaaggtaatgaatctagaccgttttgatttaaaataaa

SEQ ID NO: 210508 - DNA, 502 bp, Unknown
  Bacterial polypeptide expressing nucleotide sequence isolated from the Sargasso Sea
acaaactgaatttagaaattttaagtggttagaacctttacatgatggatttagaaactttgtaaaatcagattactcggtaatgccagaggaacttttgttagaaagagcatcactgatgggactaacagcacaagaaatgacttgtttagttggaggaatgagagttttgggaacaaaccatgagtcgtctaaaaacaaaggtgtattcactgataaagtaggtgctttaacaaatgatttctttctaaacttagttgatatgaaatttatatggaaaccaacaggcaagaactcttatgatatcattgatcgtaaaacaaaaaagataaagtatacagcatctagagctgatttagtttttggttctaactctatactgcgatcttatgctgagatatatgctcaagatgataataaagaaaagttcgtaaaggattttgtatcaatatggactaaaataatgaacgctgatagggtagatttaaaaaagttaaattaa

SEQ ID NO: 210509 - DNA, 658 bp, Unknown
  Bacterial polypeptide expressing nucleotide sequence isolated from the Sargasso Sea
ttgggtcaaattaaagaaaaattcaattcagagcagtctaacggtaaaagaatttctttagctgatattattgtgcttgggggttgcgcggctattgaaaaggctgcaaaaaatgcaggaaacgatataaaagtcccatttaaaccaggtagaactgatgcagaacaagaccaaactgatataagctctttctcagttttagagccaaatgcagatggatttcgaaattactcaaaaaataatttttctatatcaactgaagaaatgcttgttgataaagctcagcttttgaccttaacagcaccagaaatgactgttttaattggaggattgcgagttctaaatattaatactgataattcaaaccatggaatttttacaaagaaaaaagattcattaacaaatgatttttttgtaaacctcttagatttagatatatcttggagccctaaatcaaataatgataatatttttgagggtagaaacagattaactaatgaaattatttggaatggaacaagagttgatttaatttttgggtctaattctgaactgagatcattagctgaagtttacgcttgctctgattctaacgaactatttattaatgatttcgttgcagcctgggataaagtaatgaacttagatagattttaag

SEQ ID NO: 210510 - DNA, 927 bp, Unknown
  Bacterial polypeptide expressing nucleotide sequence isolated from the Sargasso Sea
ttttgccggtggccgcgaagacatttggcatccagaaaaagacgtatactggggcgccgaaaaagaatggttagcaccaagcgacgaacgctaccaaaatgttgataaacccgacacaatggaaaacccgttagcgtctgttcaaatgggcctaatttacgtaaacccagaaggggtaaacggtaaacccgatccgcttaaaactgcagcacaagtgcgcgaaacgtttgcccgcatggcaatgaacgacgaagaaacggcagcgcttaccgtaggtggccacacagtaggtaaaacacatggtaacggaaaagagtctaaccttggcccagagcctgaagcggctgatatttcagagcaaggcatggggtggaacaaccacaaaacacgaggcattggccgcgatacaatgacatcgggcattgaaggtgcgtggaccacacacccaacaaaatgggataacggctactgtgaccttcttttaaattacgaatgggaactgacaaaaagcccagcaggcgctcaccaatgggaacctgtaaatattaaagaagaagacaagccggtcgatgtagaagacccatcaattcgcttaaacccaattatgaccgatgccgacatggccatgaaaatggacccagcgtaccgcaaaataattgagcgttttcataacgactttgaatacttttcagacgtgtttgcacgcgcatggtttaaacttacacaccgcgacttagggccaaaagcgcgctacctaggtgccgatgtaccaagcgaagacttaatttggcaagacccaattccaagcgttgattacaccctaacagataccgaaatcgccgatttaaaagtaacactacttaattgcggcgtaagcgccagcgatttaattaacaccgcatgggacagtgcgcgtacgtaccgagg

SEQ ID NO: 210511 - DNA, 772 bp, Unknown
  Bacterial polypeptide expressing nucleotide sequence isolated from the Sargasso Sea
accagttgggctgcagcagccagcttccgtggtacagatttacgcggtggtgccaatggcgctcgtttggctttagcgccacaaaaagactgggcggtgaataacccggctgaagtggccaaggtactgaaaaaactgcagggcattcagcaggactttaataaagcccaaagcggtggcaaaaaagtctctctggctgatttgattgtgcttgctggcggtgctgcagtagagcaagccgctaaagcagggggcatcacggtagaagtgccatttacaccgggccgcactgatgccagtcaggcgcaaaccgatgtggcatcttttgctgtattggagccgatggctgatggcttccgcaactactacagcaaagatactctgttatctcctgctgaggctttggtagataaagccaatctgctgaccttaagcgtgccggaaatgacagtgctgataggtggtttacgtgcgctggacgccaatacaggcggtgcaaaacacggcgtatttaccagtaaacccggcactttaagcaacgacttctttgtcaatttgctggatatgtccacagagtggcgcaagtcggctaaaactgaaggcatgtacgaaggtgtggatcgcaaaaccggtacactgaaatggactgcaaccccagtggatctggtgtttggttcgcactcggagcttcgcgctatagcagaagtttatgcggcacaggatggcaaagtgaagttcactaaagactttgtcgacgcctggaccaaagtga

SEQ ID NO: 210512 - DNA, 790 bp, Unknown
  Bacterial polypeptide expressing nucleotide sequence isolated from the Sargasso Sea
ccagaatacagaaaaatttcagaaagattttataaagacccaaagttttttgaggactcatttgctcgtgcttggtttaaattaacgcatagaacaatgggtagtaaagaaaattatatcggtccttgggctcccaaagaggatcttctttggcaaggtaatgtttcttacccaaaaaagaaatacaatgtaaataaagtaaaaaaaatgattgcagctagcaaactaagtgcttgtgatctaattactactgcttgggatagtgctaggacttatagaataactgacaaaagaggtggagctaatggctcaagaattcgcttagcacctatgaagaattgggaagcaaatgagcctgaaaaactttcaaaaatattaaaagtcctagaaagtatagcaaagaaaactggagcaacagttgctgatacaatcattcttgcaggaaatgtagggctagaaaaagcaataaaaaaagctggttctaaagttaaagtttcatttaatcctggcagaggggatgcctcgcaagagcaaactgaggttaaaaactttaaatggttagaacctttgcatgacggatttagaaattacgtgaaatcagattattctgtaatgccagaagagcttttattagaacgagcttccctgatggggcttaccgctaaagaaatgacttgtttagttggtggtatgagagtgctaggaacaaaccataagtctgctaaggacaaaggtgtatttacagacaaagttggaactttaacaaatgacttttttgttaatctggttg

SEQ ID NO: 210513 - DNA, 573 bp, Unknown
  Bacterial polypeptide expressing nucleotide sequence isolated from the Sargasso Sea
aagctgccaaaaaagctggtcataaagttgacgttcctttttctgcaggtagaggtgatgcatctcaagatcaaactgatataaattcattcggtttattagaaccaaaagcagatggatttagaaattatttaaattctgacacaaatatttcagcagaagagcttttagtagataaagctcagcttatgagattaacagcaccagaaatgacagttttagtcggcggcatgagagtattgaacgctaactatgatggatcagataatggcgtattcacaaaaaaacctggttctttatctaatgattactttaaaaatctattagatatgaacacgacttggaaagaagtcgataaaagagagcagttatttgtcggcaaagatagaaataccaataaagttaagtggaaaggcacaagagtagatttgatatttggctctaattctcaattaagagctattgctgaagtatatgcttgtgaggacggagagaaaaaatttataagcgattttgttgcagcatggacaaaagtaatgaattcagacagatttgatttaaaacttaactagg

SEQ ID NO: 210514 - DNA, 550 bp, Unknown
  Bacterial polypeptide expressing nucleotide sequence isolated from the Sargasso Sea
tatgtaaatcctcaaggtcctgacgcaaatcctgatcttcttttagctgctcatgacattagagaaacgtttggaagaatggcaatgaacgattatgagactgttgctttagttgccggagggcatacatttggaaaatcacatggagcagcatcagagtcttataaaggtccagatccagaagcatcaagaattcaagatcaatcgactggatggaatagtgattataaatcaggaaaaggtgttgatactataagcagtggtattgaaggtgcatggacacagtcacctattaaatgggatatgggttactttgattgcttatttaatcatgaatgggaattaacaaaaagccttgcaggagcccatcagtggacaccaaaacaaaatggccaaaaaattaaaatggttcctgatgctcatgataaaaataaaatgcatccaccaatgatgcaaactacagatctttctttaagaatggatctttcgtatgggccaatatcgaaacatttttacaataaccttgctgaatttgcagatgcttttgcaa

SEQ ID NO: 210515 - DNA, 673 bp, Unknown
  Bacterial polypeptide expressing nucleotide sequence isolated from the Sargasso Sea
ttttctgcaggaagaggtcaaacagtaagagatttctggccaaatagtttgaatcttaaaattcttagtcaacactccaatttatctaaccctatggataaaaaatttaattacgcaaaagaatttaaaaaacttaattatagtgcgttaaaaaaagatttaaaaaaattaatgacagattcacaagagtggtggcctgcagactatggtcattatggacctttatttatacggttagcttggcacgcagctggaacttacaggactggtgatggtagaggtggtgccgggactggtaatcaaagatttgctccacttaattcttggccagacaacgtaaatttagataaagcaagattgcttttatggccaatcaaaaaaaaatatggaagaaaaatttcatgggcagatttatttatattagttggaaacgtagcattagactcaatgggttttaaaacttttggctttggtgcaggtagaactgatatctgggaaccagaagatgatatttattggggttcagaaaaggaaatgttaggtgtggagagatatagtggaaaaagagatttagagcagccgttaggagcttctcacatgggcttgatctatgtgaatccctcaaggtccggacgcaaatccagatccactattagcagcacaagatattaga

SEQ ID NO: 210516 - DNA, 574 bp, Unknown
  Bacterial polypeptide expressing nucleotide sequence isolated from the Sargasso Sea
aaagcaataaagaaagttggttccaaagttaaagttccatttagcgctggtagaggagactcatctcaagagcaaacagagttaaaaagttttaagtggttagaacctttacacgatggtttcagaaactatgtaaaagctgattactccgccacgccagaggaacttttgttagaacgagcttctttgatgggattaaccgcacaagaaatgacctgtctagtggggggcatgagagtactgggaacaaatcatgagtcagcaaaagataaaggagtactgacaaataaagttggtgctttaacaaatgatttttttattaacttggtggatatgaaatatacatggataccaaaaagtaaaaactcttacgatatcgtcgatcgcaaaactaataaagttaagtacaccgcctctagaactgatcttgtttttggctcaaattcaattttaagatcttacgccgaggtttatgctcaagatgataataaggaaaaatttatagaggattttgttaaaatctggacaaaaattatgaatgcagatagaccaaattcaaaaaaactaaactaaa

SEQ ID NO: 210517 - DNA, 755 bp, Unknown
  Bacterial polypeptide expressing nucleotide sequence isolated from the Sargasso Sea
agcaagaataagattggcacctcaaaaagattgggaagttaataacccatctcaaatatcaaaaattattaaaattttagaaaaaattaaaaagagctttgataataaaaagaaggaagtttcaatagctgatttaattgttttaagtggaggtgttgcaattgaaaaagctgcaaaaaaagctggtcagaaagtaaatgttccttttacaccgggcagaggagatgcatctcaaaatcaaacagatatatattcttttggattacttgagcctaaagctgacggatttagaaattacattgttaataaaccaaacggatcttcaaataaacccacagtatccgcagaagaaatgttggtcgatagagcacagcttatgaaacttactcctcctgaaatgactgttttagttggaggcatgagagtgcttaatacaaattttgataaatcaaattatggaatttttacaaaaaaaaaagaaacacttacaaatgattttttcattaatctactcgacatgaacataaaatggcaagaagttgataaaaatgaagaattatttgaaggaagagaccgtaaaacaaataaagttaagtggaaaggctcacgcgttgatttaatatttggatcaaattctcaactaagagctattgccgaagtttatgcttgtgaagactctaaatctaaatttatcaatgattttatacttgcatggacaaaagtaatgaacctagatcgttttgatttaaaataag

SEQ ID NO: 210518 - DNA, 823 bp, Unknown
  Bacterial polypeptide expressing nucleotide sequence isolated from the Sargasso Sea
atccccgaatccctggtgccggtgcagctgattggcaagctgaccttcaatcgcaaccccgacaatactttcgcggaaaccgagcaggtggcctttcacccaggccatctggtgcccggtatcgacttcagcaacgatccgctgctgcagggccggctgttttcctattcggatacccagttgtcgcgccttggtagcccgaactttcatgagctgccgatcaatcggcccatcgcggcagtggccaacaaccagcgcgacggccatatgcgtcaggcgatcgtacgcgggcgtgtcagttacgagcccaatacgctgggtggcggttgcccgatgcagcggccgtgggagcagggcggtttcgtcagccatgccgagcccatgcaaggtgaaaaagtccgtgcgcgcagcccccgctttgccgaccacttctcccagcccgggttgttctggcgcagccaggcagactgggagcaggcgcatatcgtcgatgccttctgtttcgaattgggcaaggtcacggtgcctgccattcgtgaacgcatgctggccaacctgacccaggtcgacgctgctttggctcagcgggtcgccgatggcctgggcatgcccgtaccaccgccgccggctggcgcagaaaatctgccgcacactgataaacccgctatggacgccgcgctaagcatggtcacgacccgcaaaggctccctcatcgggcgtaaggtagcggtactggtggccaacgatgttgatggcacgcccctggagagtatgcgcgtcgctctgacagcagctggcgccacgctgaaagtgatgcgccgca

SEQ ID NO: 210519 - DNA, 883 bp, Unknown
  Bacterial polypeptide expressing nucleotide sequence isolated from the Sargasso Sea
gcttggacatcaaatcctacacaatgggataatgggtactttgatttattacttaattatgaatggaaacttacaaaaagcccagctggcgcccatatttggcatgcagttgatcaaagagaagagcataaggctcctgatgctgaagatgcttcaataaaagttccaacaatgatgactactgcagatatggccatgaaagaagatccatcatatagaaagatttctgaaggttattatagaaaccctgatagtttatctgaaaactttgctaaagcttggtttaaacttttacatcgtgatatgggacctaaaacaagatacttaggtcctgaagccccaaaggaagatttaatttggcaagatccaattccaaaaggtaatagtaactatgacattgaaaaatgtaaaactttactaagtcaagctggtttatcaatttcagaaatggttgaaacggcttgggcaagtgcatcaacttttagatcctcagatatgcgtggtggtgcaaatggctcaagaattagattagatcctcagataaattgggaagtcaataaaccagaccagataaaaaaagtattaaaaaaatatgaaaacatctcatcagaaacaggagcatcaatatcagatataattgttctaggtggatgtgttggaatagagaaatcgtctggaaagccagttgtgtttttgccaggacgtggcgatgcttcacaagaaaatactgatatagaatcgttttcagttctagaacctttagcagatggttttagaaactttcaaaaggaagattatgaagtaagtcctgaagaaatgcttctagacaggtctcaattattagatctcactgcatctgaaatgacagtactacttgctggat

SEQ ID NO: 210520 - DNA, 882 bp, Unknown
  Bacterial polypeptide expressing nucleotide sequence isolated from the Sargasso Sea
ataaagatattataaatcttaaagcaaaaatattaaaatcaggactttctatatcacagatggtatcaacagcatgggcttcagcttctacatttcgtggttcagataaaagaggtggtgcaaatggatcaagaataagattatcaccacaaaaagattggaaagtgaataatccatctcaactatctaagacgcttaaagtttatgaaaaaattaaaaaaagttttgatacaaaaaataaagttgtttcaatagcagatttaatagttttggctggatcagtagcaattgagatagcagctaaaaaagctggtaaaaaaattaatgttccttttgttccaggaagaggagatgcatcacaagatcaaacagataaattttcatttggtttacttgagcctaaggcggatggatttagaaactatattgtagaaaaatcaaatggatctacaaaaaaaaataatgtttcagccgaagaattgttgattgatcgtgctcaattaatgaaacttacagcccctgaaatgacagttttgttgggaggaatgcgtgtacttaatacaaactacgataaatctaagaatggagtttttacaaataagccagaagtactcacaaatgactattttgttaatttattagatatgaaaaccacttggaaagaaatagatgataatgaggaactatttaaaggtgtagatcgaaaaactaataaagttaaatggactgcttcaagagttgaccttataattggatctaattcacaacttagagcaatagccgaagtatatgctactgaagactctcaaactaaatttgttagtgattttgtttctgcttggacaaaggtaatgaatttagaccgatacgatattaattaaa

SEQ ID NO: 210521 - DNA, 708 bp, Unknown
  Bacterial polypeptide expressing nucleotide sequence isolated from the Sargasso Sea
ggaagtgatattgatggagaagctgaatatgatcgctctggaagttcggtagcactttcttctgacggatctgttgtcgctattggggctccgggaaatggtcacaatggaaatttagatcatagcagcggtcatgtaagaatttatcaaaacattggtggcaactgggatctgattggaagtgatattgatggagaagctgcaggtgatcgctctggaagttcggtagcactttcttctgacggttctattgtcgccattggggcaagaggtaatgatggtaatggagaagtaagcggtcatgtaaggatttatcagaacattggtggctactgggatcagattggaagtgatattgatggagaagctggggatttttccggtcatttagtagcactttcttctgacggatctgttgttgctattggtggctactgggatcagataagaatttatcaaaacattggtggcaactgggatctgattggaagtgatattaatggagaagctgcaggggataatgcactttattcagtaagtctttcttctgacggatctgttgttgctattggtgctgagcgtaatgatggtaatggatctaatagcggccatgtaagaatttataaaaatattggaggcaactgggatcagattggaagtgatattgatggagaagctgcaaatgattatttcggtagttcagtagca

SEQ ID NO: 210522 - DNA, 337 bp, Unknown
  Bacterial polypeptide expressing nucleotide sequence isolated from the Sargasso Sea
tatgcgagtactaaacgcaaattttgacaaatcaaaacatggagtttttacaaaaaaaccagaaacacttacaaatgatttttttgttaatttacttgatatgagcacaacatggaaagaaacttctaaagatgaacaattatttactggaaaagatcgaaaaacaaataaaattaaatggacaggcactcgttttgatctaatatttggatcaaattctcaactcagagctttggccgaagtttatgcatgtgaagattctaaacctaagttcgttgctgattttatatctgcctggtcaaaagtgatgaatttagatcgttttgatctaaagtaa

SEQ ID NO: 210523 - DNA, 541 bp, Unknown
  Bacterial polypeptide expressing nucleotide sequence isolated from the Sargasso Sea
aatggatgcagaaagtaaatgcccagtaatgcatggagcaattacaaaaaatatgggggaaggtacatcaaatcgtgagtggtggcctaatcaacttaatctaaatatactacatcaacatgatcgtaagtccgatccaatggaagttggattcaactaccgtgaagaattcaaaaaaatagattatgctgcattaaaaaaagacctcaacgatttaatgactgattcacaagattggtggcctgctgattatggtcactatggtggtttctttattcgtatgacatggcatgctgctggaacttatagaactggtgatggccgtggtggtggtggaacaggagctcaacgttttgccccgttaaacagttggccagataatggaaacttagataaagcaagaaggcttctttgggcaataaagaaaaaatatggaaataaaattagttgggctgatttatttattttaacaggtaacgttgcaattgagtctatgggtggaaaaacttttggatttagtggtgggcgtcctgacatctgg

SEQ ID NO: 210524 - DNA, 879 bp, Unknown
  Bacterial polypeptide expressing nucleotide sequence isolated from the Sargasso Sea
gccaatgtgccgccggccatcgacttcagcaacgacccgctgctgcagggccgcctgttctcgtacctggacacgcagctgtcgcgcctgggcgggcccaactttgcgcagatccccatcaatacgcccaagtgcccgttccacaacatgcagcgcgacggccacatgcagatgcaggtgcccaagggccgcgtcaactacgagcccagcagcctgctgggcgacacgccgcgtgcgtcgctggcgcaaggctttcgccatgtggcccaggccgacgacggggtgaagggccgcgtacgccccgagagctttgccgaccactacagccaggcgcgcatgttctaccgcagccagaacccgctggagcaggcgcacatggcgtcggcgctggtgttcgagctgtccaaggtgggcacaccccatgtgcgcgaagcggtggtgggccatctgctgcatgtggatgctgacctggcccagcgggtggccgacggcctgggtctgcaaaccctgccgcccgcccccgccaccaccgagccggtgcaggacctgcccctgtcgcccgcgctgcgcatcatcgaccgcatgaagcccacgctgcagggccggtgcatcggcatcctggtggccgacggctccaacggcacctcggtggccaacctgcgcaaggcgctggagaaggtgggcgccaccgtgaagatcgtcgcgcccaaggtgggcggcgcggtactgaaagacggcacgctgctgcccaccgacggccagctggcgggcaccccgtcggcggtgtttgacgccgtggcctccatcctgtcgcccgacatgggcgcacagctggccaaggaggcggcggccgtggactggttccgcgacgcgtcggcc

SEQ ID NO: 210525 - DNA, 805 bp, Unknown
  Bacterial polypeptide expressing nucleotide sequence isolated from the Sargasso Sea
caagaccctgttcctcaaggcaacaatgattatgatgtggatgcgattaaagctaaactctcggactgtggcctgagcattcaagaaatggtcgaaactgcctgggctagtgcgtcgacatttagaggttctgatttaagaggaggagcaaatggatctcgcattcgacttgctccacaaaaagattgggaagccaataaaccagaacagctcgcaagagttcttggtgtatatgaatcaattgcttcagagtctaatgcctccttggcagatgttattgtacttggtggaaacgttggcattgagaaagcctctggcgctcaagttccattcacaccaggccgaggtgacgccagtgaggagcaaactgatgctgactcatttgatgctcttgagccaattgctgatggttttcgtaatttccaaaaagaaggctccagtcttccatctgaggaaatgttgcttgataaagcccaattgcttggtttaactgcacctgaaatgacagtgctcataggaggtatgagagctctgggtataagctcaaataatcatggagttttcacagaaacacctggaaaattaacaaatgatttctttgttaatcttctagatatgggtgttgagtggaagtcaacaggcaataattcttatgaggccattgaccgccagtcaggcgaaaaagtaagaacagcaactagggtggacttggtctttggatcaaattcacaacttagagcaattgctgaagtatatgcttctgatgactcaaaagagaagtttgtttcagacttcattgctgctt

SEQ ID NO: 210526 - DNA, 482 bp, Unknown
  Bacterial polypeptide expressing nucleotide sequence isolated from the Sargasso Sea
aagagcagatggatttagaaacttcgtgacaaaaaaaataaatgggtcatcacacaaattaaaaatatctgctgaagaaatgttaattgataaagctcaattaatgaaacttactgctccagagatgacagttttaatcggtggaatgagagttttaaatacaaattttgatggttcaaatcatggtgtatttacaaaaaaaaaagaagttctttcaaacgactttttcattaatttacttgatttgagtacaacttggaaagagattgacaaagaagaaaccatattcgaaggcagagatcgtaaaacaaataaaattaaatggacaggtacaagagcagatctaatattcggttcaaattcacagttaagagcattggctgaagtttatgcttgcgatgattccatgtcaaaatttattgccgactttgtttcagcttggtcaaaggttatgaatttagatcgttttgatttaaaataat

SEQ ID NO: 210527 - DNA, 912 bp, Unknown
  Bacterial polypeptide expressing nucleotide sequence isolated from the Sargasso Sea
gatcatgttcaagcagagccagagggagctcctctgaaagaaatgggatttggatggacaagtagttatggttcaggagttggaagtgacactattactagtggtattgaaggcgcatggactgcaaatccaacacaatgggataatggatactttgacttgctctttggatatgagtgggagctaaccaagagtcctgcaggtgctcatatttggcatgctgttgggcaaaaagaagaagatatggctccggatgcggaagatgcttcagtgaaagttccaacaatgatgacaactgctgatatggcgatgagagaggatccaagctacaaagaaatatcaaaacgttttcatgagaacccggacgagtttgcagatgcttttgcaagggcttggttcaagttattgcatagagatatgggccccaaaacaagatatatggggccagaagttcctgaagaggaattgatttggcaagatcctgtgcctgctggagattcaacttatgatgtaagtgccgtaaaagagaaaattctcaattgtggtctatcaatccaagaaatgattgaaacagcttggtcaagtgcatctacttatagaggttctgacatgcgaggtggagcaaatggcgcaagaattagattagagcctcaaaagaattgggaagcgaataatcctgatcaattaagtaaagtgctagagatttatgaagcaatagcagaagaaactggcgcctcagttgctgatgttattgttttagcaggtaatgttgctattgagaaagcttctggtattgaagttccttttactccagggcgaggcgatgcaacacaagaaaatactgatgtagaatcttttgaagttcttgaaccacaatctgacggctttaaaaactttcataaagctgggcta

SEQ ID NO: 210528 - DNA, 133 bp, Unknown
  Bacterial polypeptide expressing nucleotide sequence isolated from the Sargasso Sea
tcaaattctcaattaagagcacttgcagaggtttatgcttgtgaagattcgagtaaaaaatttgttgatgattttatagctgcatgggtaaaagtaatgaacgcagatagatttgatcttaagttaaattaat

SEQ ID NO: 210529 - DNA, 397 bp, Unknown
  Bacterial polypeptide expressing nucleotide sequence isolated from the Sargasso Sea
aatgcttctggatcgtgcccaactgatgggactgacagcgcctgaaatgaccgtcctgctgggtggcatgcgggtgctcggtaccaactacggcggcaccaagcacggcgtattcaccgatcgcgttggccagttgaccaatgatttcttcgtcaatctgactgatatgtcgaatcgttgggagccgactggcaagaactcgtacaacatcgtggatcgcaacagtggcaataccaagttcactgcgacccgtgttgatctcgtgttcggttccaactcgatcctgcgtgcctacgcagaagtgtatgcccaggacgacaacgaagagaagttcgtgaaagacttcgttgcagcctggagcaaggtcatgaacgccgaccggttcgacgtcgaataa

SEQ ID NO: 210530 - DNA, 160 bp, Unknown
  Bacterial polypeptide expressing nucleotide sequence isolated from the Sargasso Sea
aagacgagcatcaagaactgatcttgtttttggctctaattctcaattgagagctttggctgaagtttatgctcaatcagactcatctgataaatttactgcggactttataaaagcctggaataaagtaatgaatgcagatagatttgatttgaattaa

SEQ ID NO: 210531 - DNA, 556 bp, Unknown
  Bacterial polypeptide expressing nucleotide sequence isolated from the Sargasso Sea
tatgagtaatgaaatctataaagaaaaatcaaagtgccctttcacgggcattggcaccccagcaaaacattcaaccggaaaaggaacatcaaatagagattggtggccaaacaaccttaatcttaaaatattaagtcagcattcaagtttagtaaatcctatggatgaaaaatttagttatgcaaaagaattcaaaaaactggattacaaaaaacttaaaaaagatttacaaaaattaatgacagattctcaagattggtggcctgcagattatggtcattacggaccattgtttattagattggcatggcacgccgcaggtacttatagaactgctgacggaagaggaggagctggaactggcaatcaaagatttgcaccattaaatagctggccagataatgttaatttagataaagctagattattattatggcctattaaaaaaaaatacgggaacaaaatttcctgggctgatttgtttatacttgttggaaatgttgctctggattcaatgggttttaaaacttttggttttggtgcaggacgagaggac

SEQ ID NO: 210532 - DNA, 867 bp, Unknown
  Bacterial polypeptide expressing nucleotide sequence isolated from the Sargasso Sea
ggacatactctttggtaaatgccacggtgcaggagatgatggtcttgtaggtgttggtccagaagatgcaccaatggaacaacagcaatttgggtggaaaaatggttacggcaaaggaatgggaagagataccattactagtggactagaaggcccatggaccagtaatccaacacaatgggacaatggttactttgaaaatctcttcaagtatgagtacgaattagttaaaagtcctgccggcgcgtttcagtggcatccaaaaaacctcgaggaagaaaatcatgcacctgatgttgaggattccagtaaaaaggtaacaaccataatgctgacttcggacttagcacttagagaagatccggaatacagaaagatttctttaaattttagagataacccagaagaatttgcagatgcctttgcaagagcttggtttaaactcctacatagagatatgggtccaaaatctagatatttaggtccagaagttccagatgaagaattaatttggcaagatcctgttccttcaggtagtgttgattatgatgttaattctttaaaggctaaaatttctgcctcgggactaagcacacaagaaatggtggagactgcatgggctagtgcttcaacgtttagaggttctgacctcagaggtggggcaaatggttcaagaatcagattggcaccacaaaaagactgggatgttaataaacctgagcaactctcaaaagtactagacatccttcaacctttggctgatgaggcaggcgcatctctagcggatgcaattgttttagctggaaatgttggaatcgaacaagcatctggtgttgaggttccattctcacctggaagaggtgatgc

SEQ ID NO: 210533 - DNA, 826 bp, Unknown
  Bacterial polypeptide expressing nucleotide sequence isolated from the Sargasso Sea
aacatagataaagttaagaaaatgatcgcttctagcaaactaagcaccgctgatttaatcactactgcttgggatagcgcaaggacttatagagtaactgataaaagaggaggtgctaacggtgcaagaattcgcttagctcctatgaaagattgggaggctaatgagccagaaaaactctcaaaaacattaaaagttctagaaggtatagcaaagaaatccggtgcgtcagtcgctgatacaattattcttgcaggaaatgtaggcctagaaaaagcaataaagaaagctggctctaaagtgaaagttccatttaatccaggcagaggagactcttctcaaaagcaaactgagattaaaaattttaagtggctagaacctttacatgacggatttagaaattatgtaaaatcagattactctgtgatgccagaagaacttttattagagcgtgcttctttgatggggttaactgcgcaagaaatgacctgcttagtgggcggtatgagagtgctaggaaccaaccatgagagtgctaaaagtaaaggtatattaactgacaaagctggaactttaacaaacgacttcttcatcaacttggtagatatgaaatatacgtggaaaccaacaggtaagaactcttatgatattattgatcgtaaaacaaacaaagttaagtttactgcatctagagcagatttagtttttggctctaactcaatactacgatcttactctgaggtatatgcccaagatgacaataaagaaaaatttgttaaagattttgttgccgtatggacaaaaataatggatgcagatagaccaa

SEQ ID NO: 210534 - DNA, 439 bp, Unknown
  Bacterial polypeptide expressing nucleotide sequence isolated from the Sargasso Sea
atcaaaaaatggtaaatcaaatgtttctgcagaagaaaaattagttgataaagctcaattaatgcagctaacagcacctgaaatgacagttcttattggtggaatgagagttttagatacaaattatgataaatctaaaaatggagtttttacaaaaaatccaggtactctttcgacagattattttgttaatttgcttgatatgaatactacttggaaagaaaccgacaactctgagcaatattttattggtaaagatagaaaatctaataaaaataaatggaagggatcaagagtagacctaatttttggttcaaattcccaattgagagctcttgcagaagtttatgcttgcaaagattcttctcaaaaatttgtaaaagattttgtttctgcttggacaaaagttatgaatctagatcgttttgatcttaattaa

SEQ ID NO: 210535 - DNA, 387 bp, Unknown
  Bacterial polypeptide expressing nucleotide sequence isolated from the Sargasso Sea
tgatgggactaaccgctcaggaaatgacttgcttaattggaggtatgagagtgttagggacaaaccatgaatctgctaaaaacaaaggtgtatttactgataaagttggaactttaacaaatgacttctttattaatttggtcgatatgaaatacacatggaaaccaacaggcaagaactcttatgaaattattgatcgtaaaacaaacaagattaaatttacagcatcaagagcagatttagtttttggttctaactcaatacttagatcttattctgaagtatacgcacaagatgacaataaagaaaaatttataaaggattttgttgcagtatggacaaaggttatgaatgcggacagaccaaatttaaaaaaattaaattaat

SEQ ID NO: 210536 - DNA, 758 bp, Unknown
  Bacterial polypeptide expressing nucleotide sequence isolated from the Sargasso Sea
tgaaactgcttgggcaagtgcctcaactttcagaggatcagatatgagaggtggagctaatggtgcaagaattagactatcccctcaaaaagattgggaagttaataaacctgagcaattgaaaaaagtgcttggtatccttgagcctattgcaaacgaaacaggagcttcaattgctgatgtaatcgttcttgctggaaatgtaggtgtagaacaagctagtggaatgaaagttccttttactccaggtagaggtgatacaacacaagagaaaactgatattgactcttttgcagttctagaaccagaggcagatgcttttcgtaattatttaaaaatgaattatgatgtcacggctgaagaacttatgttggataaagcacaactattaggacttacagctccagagatgactgtgcttgttggtggaatgagatctatgggtattagttcagatcaaagaggtttgtttgttgatgcaaaaggaaaattaacaaatgatttttttgataaacttttagatatgaccgtaagctggaaaccaactggtagcaactcttatgaagcaactgataaaattacaggtgaaaaagtaagaactgcctctagagtagatcttgtttttggatctaattctcaattaagagcaatagcagaactttatgcaagtgatgacagtgaagagaaaatgaaaaaagactttattaaagcttggaataaagtgatgaatgctgacagatttgatttagaaaaataga

SEQ ID NO: 210537 - DNA, 466 bp, Unknown
  Bacterial polypeptide expressing nucleotide sequence isolated from the Sargasso Sea
aatgagcaaatgtccttttaccggtgcaggaacacctgcaaagttttctgcgggaagaggtcaaacagtaagagacttttggccaaatagtttaaatcttaaaattcttagtcagcattcaaatttatctaaccctatggataaaaaatttaattatgcaaaagaatttaaaaaactaaattacaaagcactaaaaaaagatttaaaaaaattaatgacagactcccaagagtggtggccagcagattatggtcattatggtccattatttattagattagcttggcatgcagcaggaacttacagaactggtgatggtagaggtggagcaggaacaggtaatcaaagatttgcgccacttaattcttggccagataacgttaacttagataaagctagattacttttatggcctattaaaaagaaatatggaagaaaaatttcatgggcagatttatttatactt

SEQ ID NO: 210538 - DNA, 350 bp, Unknown
  Bacterial polypeptide expressing nucleotide sequence isolated from the Sargasso Sea
gacttcgtacaatccgaacacgaagggagcatggcttgaccaaccggatttcagcgagccgccgctgtcgatcgagtgggcagccgaccactggaaccatcgagtcgacgatgactattactcacagcccggcgacctgtttcgtttgatgacggcggcgcagcagcagatgctgtttgataacacggctcgggcgatgtacggcgtatccaggcctgtccgcgacctgcacgtcgagcactgtacgaaggccgacccggcatatggtgctggtgtttcggcggcactcgcagcgctcgatgcgtacgtctccagcgcagtgcggtcggagcctgaagtcaccaagtaag

SEQ ID NO: 210539 - DNA, 790 bp, Unknown
  Bacterial polypeptide expressing nucleotide sequence isolated from the Sargasso Sea
ggtggacatactttcggaaaagcacatggtgctggtgatccagctctagttggagcagaaccagaaggtgctcctttagaacaaatgggtttaggttggaataacttgcacggttcaggtgttggtcgtgatactacaacaagtggtatagaaggtccatggacacctaacccaactcagtgggataatgggtactttgatatgcttcttggttacgaatggaagttagtaaaaagtccggcaggtgctcaaatctggcatgcgattgatcaaaaagaggaacacatggctcctcaagttgatgatccatcagtaaaagttcctacaatgatgacaacagcagatatggcaatgcgtgaagatcctgaatacagaaaagtatcagaaaaatttcacaaagacccagaatattttgctgatcaatttgctagagcttggtttaaacttctacatcgagatatgggtccaaaaactaggtatatgggaccagaagttccagaagaggaattgatttggcaagaccctgtgcctaacggtcattcaaactatcatgttgaaacggtaaaagctaaaattttaaaaagtggtttaaccactcaagaaatggttgaaactgcttgggcgagtgcttctacatttagaggatcagatatgagaggtggggctaatggagcaagaattagactttctcctcaaaaagattgggaggttaataaaccagagcaattaaaaaaagttcttggtattcttgagcctattgcgaaagaaacaggagcttcagtggctgatg

SEQ ID NO: 210540 - DNA, 802 bp, Unknown
  Bacterial polypeptide expressing nucleotide sequence isolated from the Sargasso Sea
ggggccacgttctcgttatctaggacctgaagtacctgatgaagagttaatttggcaagaccctgttcctcaaggcaataatgattatgatgtggatgcgatcaaagctaaactctcagactgtggtctgagcattcaagaaatggtcgaaactgcctgggctagtgcatcgacatttagaggttctgacttaagagggggagcaaatggatctcgaattcgtcttgctccacaaaaagattgggaagccaataagccggaacagcttgcaagagttcttggtgtatatgaatcaattgcttcagagtctaatgtctccttggcagatgttattgtacttggtggaaacgttggtattgagaaagcctctggcgctcaagttccattcacaccaggccgaggtgacgccagcgaggagcaaactgatgctgactcatttgatgctcttgagccaattgctgatggttttcgtaatttccaaaaagaaggctccagccttccatctgaggaaatgatgcttgataaagctcaactgcttggtttaactgcacctgaaatgacagtgctcataggaggtatgagagctctgggtataagttcaaataatcatggagtctttacagaaacacctggaaaattaacaaatgatttctttgttaatcttctagatatgggtgttgagtggaaatcaacaggtgagaactcttatgaggccattgaccgtcagtcaggcgataaagtaagaacagcgactagggtagacttggtctttggatctaattcacaacttagagcaattgct

SEQ ID NO: 210541 - DNA, 838 bp, Unknown
  Bacterial polypeptide expressing nucleotide sequence isolated from the Sargasso Sea
tccaatacctaaatctaaatacaaattaaaaaacaaagatataaatttactaaagagtaaaattttgaaatcaggactttcaatatctcaactagtttccacagcctgggcttctgcttccacttttagaggctcagatagaagaggcggagctaatggagccagaatcagactagaaccacagaaaaattgggaggttaacaatccttctgaattatctaaaatattaaaaatttatgaaaaaattaaaaagaattttgatagtaaaaataaaaaagcttcaattgctgatttgattgttttaggaggttgtgtaggaatagaaaaagcagcaaaaaatgcaggcaaaaaagtatcagttccatttaaacctggaagagaagatgcttctcaagatcagacagatgtattctcctttagcttgcttgagccaaaagcagacgcttttagaaattatatggtaaataagccaaatggatcgtcaagtaaaactagcgtttcagcagaagagatgctggtagatcgtgctcaactaatgaaattatctcctccagaaatgacagttctaattggaggcatgagagcacttaatacaaattttgataaatctaagcacggaatacttactaataaaacagacaaactaacaaatgattttttcgttaacttgcttgatatgggcacaacttggaaggaaatagacgagcatgaagagttttttgaaggaagagatcgtaaaacaaataaaattaaatggaaagcttctagagtagatctgatttttggatctaattctcaattaagagctattgctgaagtttatgcttgcgaagactct

SEQ ID NO: 210542 - DNA, 739 bp, Unknown
  Bacterial polypeptide expressing nucleotide sequence isolated from the Sargasso Sea
tgggccagtgcatcttcatatcgtggttcagatatgcgtggtggagcaaatggtgcgagaattagattggagccacaaaaaaattgggatgccaacaaacccgagcagttgagtcgagttctgagcactatagagggtattgctgatgaggttggtgcctcagtagcagatatgattgttttggctgggtgtgttggtattgagaaagcttccggatcgtccgttccttttacacctggcagaggagattcctcacaagaagaaacagatatagagtcatttgccgttttagagccaattgctgacgcatttcgaaattataaaaaagaatctgttgatgtaaatatagaggaaatgatgctggataaatcccaattaatgggtttaacagctccagaaatgactgttttgattggaggtcttagatcactcggtgtaagcacagacaatcagggggtatttacagacaaccaagataaattgtctaatgatttcttcaataatttactggatatgacagtgcaatggaaaccaaatggcactggcagtacttttgaaggtattaacagacaaacaggtgaaaaaatgaggtctgccactagtgtagatctggtcttcggttcaaactctcaattacgagcaatagctgaagtatacgccagcgatgatgggcaagataagtttgtatccgattttattgatgcatgggtcaaagttatggagcttgatctttactaga

SEQ ID NO: 210543 - DNA, 721 bp, Unknown
  Bacterial polypeptide expressing nucleotide sequence isolated from the Sargasso Sea
aatgagcagtgagattaataaagaaataagcaaatgcccttttcatggagaaggcattccacaaaagcacccaacgggaaaaggtcaaacaaataaggactggtggcctaatagtttaaacttaaaaattttaagtcaacattcttcattggtaaatccaatggataaaaaatttgactataaaaaagaattcaagaaacttaatttcaaagctttaaaaaaagatttgaataaattgatgactgactcacaagagtggtggcccgcagattatgggcactatggacctttatttgtgagattggcttggcatgcggctggaacttatagaactggtgatggcagaggaggcgctggtacaggtaatcaaagatttgcacctctcaatagctggccggacaatgttaatttagataaagcaagattgcttttatggcctataaagaaaaaatatggaaagaagatttcttgggctgatcttttcattttggttggaaatgtagctatagagtccatgggcttaaaaacttttggatttggtggaggacgagaagatatatgggagccagaagaagatatttattggggttcagaaaaagaatggttagcgaataacagatatgataaaaatagagaactagaaaatcctttaggagcagtacaaatgggattaatttatgttaacccacaaggcccagatgggaatccagacccctattaa

SEQ ID NO: 210544 - DNA, 415 bp, Unknown
  Bacterial polypeptide expressing nucleotide sequence isolated from the Sargasso Sea
acctcagcagaggagatgttaattgataaagcacaattaatgggtctaactagtccagaaatgacagtgctcattggaggaatgagggttctgaatacaaactttgatggctctaaatttggtgtttttactaataaacctggaacattaactaatgattattttgtaaatcttttagatatgaatgttacttggaatgaggttaatgacaatgagcagctgtttgagggtaaagatagaaaaactaataaaactaaatggaatggaactagagtagatcttattttcggctcaaattctcaattaagagcacttgcagaagtttatgcgtgcgaagactctgagcggaaatttataaacgattttattaaagcatggaataaagtaatgaatctagataggtttgataaataac

SEQ ID NO: 210545 - DNA, 735 bp, Unknown
  Bacterial polypeptide expressing nucleotide sequence isolated from the Sargasso Sea
gcagttggacaaactgaagatgatatggctcctgatgctgaagatgcatcaaaaaaagtacctacaatgatgactactgctgacatggctatgagaatggatccaagttacaacaaaatttcaaaaagattccatgagaatcctgatcaatttgctgatgcctttgcacgagcatggttcaagcttcttcatagagatatgggaccaaaaacaagatatgttgggcctgaagttcctgaagaagaattaatctggcaagatccagttcctgtaggcaacactaattacgatgttttaaaagttaaggaacttctctctgattcagggctaactatccaagagatgattgaggtagcctgggctagtgcttcaacttacaggggttctgatatgcgtggtggtgcaaatggtgctcgaattagattagcacctcaaaaagattgggaagcaaataatcctgctcaacttagcaaagctctcgaaatatatgagtcaatctctaaagaaacaggcgcatctgttgcagacgtaattgtccttgcaggcaacgtagctattgaaaaggcatcaggtgttgaagttccgtttactcctggaaggggtgatgcaactcaagagagcactgatattgagtcttttgaggtattagaacctaaatcagatgcttttagaaactatcatccgcaaggtgtaaatattgctcccgaagaaataatgcttgataaagcacaactt

SEQ ID NO: 210546 - DNA, 300 bp, Unknown
  Bacterial polypeptide expressing nucleotide sequence isolated from the Sargasso Sea
atggtgtctttacaaaaaaagcagaagttctttcaaatgatttttttacaaatttacttgatatgagaacaacctggaaagagattgataaagaggagactttatttgaaggtcgagatcgtaaaacaaacaaaattaagtggataggatcacgtgttgatttgatttttggatcaaattcccaactaagagctatagctgaagtatatgcttctgaagattctaaatctaaatttattaacgattttgttgctgcttggactaaagtaatgaacctagatcgttttgatttaaaataag

SEQ ID NO: 210547 - DNA, 567 bp, Unknown
  Bacterial polypeptide expressing nucleotide sequence isolated from the Sargasso Sea
aagttccattcaaagctggaagaggcgatgcaaaacaagatcaaacagacaaaaattcatttaatcttcttgaacccatagcagacggttttagaaattatattaagctgcatgctaaaggatatactaatggaaaaggtatccctactaattcagcagaagaaatgttgatagataaagcccaacttcttggattaactggtccagaaatgacagttttaattggaggtatgagagtattaaatactaactttgatggttcagattatggtgtatttacaaaaaaacctggatcattaactaatgatttctttgttaatttattagacatgaaaactacttggagagaagtggataaagaagaacagttttttgagggagtagatagaaaaacaaaaaaagtaaaatggagagcgacgcgtgcagatttaatatttggatctaattctcaattaagagcactatctgaagtttatgctacagacgattcaaacgaaaaattcttaaatgattttatatctgcttggacaaaagtaatgaatttagatcgttttgatttaaattaat

SEQ ID NO: 210548 - DNA, 208 bp, Unknown
  Bacterial polypeptide expressing nucleotide sequence isolated from the Sargasso Sea
gcaaacgttcttaggaaaagaccgaaaaacacttaaaactaaatggaaagcaacgagggttgatttgatttttggttcaaattctcaactaagagctctagctgaggtctatgcatgtgcagattcagctcataaatttgtaaatgattttatcaaagcgtgggtaaaggttatgaattcagatagatttgatttgaaattaaattaa

SEQ ID NO: 210549 - DNA, 643 bp, Unknown
  Bacterial polypeptide expressing nucleotide sequence isolated from the Sargasso Sea
agaacaattagcaaaagttttaggtgtgcttgaaggtatagcaagtgaaacaggagcatctgttgctgatgtcatagtgttggcaggcaatgttgctatagagaaggcatctggagtagaagttccatttttatctggcagaggagatgcaaccagtgaacatacagatgttgaatcatttgaagttcttgaacctcttgcagatggatttagaaattatcaaaaaacagacttttctgtaactccagaagaaatgcttgttgataaagctcaattacttggtctgactgcccctgaaatgacagtattagttggtggtttaagatcacttggagttagtgcagatggtcatggtgtttttacagataatataaatactttatctaatgatttctttaaaacacttttagatatgagtgttgaatggaaaccagtcagcaaaaactcttatgaagcgacagatagagtaagcggtgaaaaaataaggactgcatcaagagttgatcttgtatttgggtcgaattcacagctaagagcaattgcagaagtatatgctgaagatgattctaaagataaatttgtaaatgactttattgctgcctggaataaagtaatgaatgcagatagatttgatctaggttaa

SEQ ID NO: 210550 - DNA, 551 bp, Unknown
  Bacterial polypeptide expressing nucleotide sequence isolated from the Sargasso Sea
aatcgaaaaagcatcaggagttgaagttcctttttcacctggtagaggtgatgcacttgaggaacaaacagatcctgaatcatttagagtcttagaaccattagctgatggatttagaaactatcaaaaaactgaatattcagtaagtcctgaggaaatgttagttgataaagctcaacttctaggcctgactgctcctgagatgacagtcttagttggaggcatgagatcacttggtatcagccatagtggactgggcttattctctgacaatgccgataagcttgataatcatttctttaaaacacttcttgatatgagtgttgagtggaaaccatcaggcactaatgcttacgatgcatttgatcgcgtatcaggagaaaaaattaggtcagcttcaagagtggacttagtctttggatctaattcacaattaagatcaattgcagaagtatatgcaatggatgattcaaacgataagtttatcaaagactttatctcagcttggaataaagttatgaatgctgatagatttgatcttgatgcctaag

SEQ ID NO: 210551 - DNA, 709 bp, Unknown
  Bacterial polypeptide expressing nucleotide sequence isolated from the Sargasso Sea
gctgcagaaaatcggcgagatccagaacgcgttcaacgcctcggccagcgggggcaaaaaggtctccatggcggacctgatcgtgctcgccggctgtgccgccatcgagaaagcggcacaggacggcggcgtggccgtcaccgtgcccttcacgccagggcggatggatgcgctcgaagagtggaccgatgggccctcgttcgaagcgctgcggccggtcgccgatggcttccgcaactactaccacgagtcccacttcatggcgcccgaggaagcgctggtcgataaggcccacctgctacggctgagcgcgccggaaatgaccgtgctggtcggcggcatgcgtgtgctcggcaccaattcagacggcggtcaagagggcgtcttcaccaagcgtgtgggcacgctttcgaacgacttcttcgtcaacctgctgagcatgcagaacgagtgggtcgcgactgagcacaagaaccgctttcagggcctcgaccgcaagacccgccagcccacctggaccgccactcgcgtggacctcatcttcggcgcgcaatcggaactgcgtgcccaggccgaggtatatggcatggccgacggcaacgagaagttcgtgcaggacttcgtcaaagcctgggacaaggtgatgaacgtggaccggctcgatatcggcaagcccgccgataatttcagccagaagctctcagcctag

SEQ ID NO: 210552 - DNA, 609 bp, Unknown
  Bacterial polypeptide expressing nucleotide sequence isolated from the Sargasso Sea
atgaaactatttcttcagaaacaggagcatcaattgcagatattataattcttggcggaaatcttggaattgaaaaagcttctggcaagactttagattttactcctggtcgaggtgattcatctcaagatcaaacagacattgactcttttgcttatctagagccgctttctgatggttttagaaattaccatcgggatggtcttgatgttaaagcagaagaaatgatgcttgatagagctcaacttcttggattaacagctccagaaatgacagtattgcttggtggattaagatcattaggcataactcataatgggtatggcaatttttcagaaaatccaaatgaattaacaaacgattatttgacaaagttattagacatgtcagtgtcttggcagactaatggaactggtaattcttttgaatctattgatagaacaacaggtgataaagtttcatccgcttcaagagttgatttagtttttggttcaaattctcagttaagagctattgctgaactttatgctcaagaagactcaaaagataaatttgtttctgattttatttctgcttggaataaagttatgaactctgatttatattaat

SEQ ID NO: 210553 - DNA, 508 bp, Unknown
  Bacterial polypeptide expressing nucleotide sequence isolated from the Sargasso Sea
tagttatggttcaggggttggaagtgacactattactagtggtatcgaaggcgcatggactgcaaatccaacacaatgggataatggatactttgacttgctctttggatatgaatgggagctaaccaagagtcctgcaggtgctcatatttggcatgctgttgggcaaaaagaagaagatatggctccggatgcggaagatgcttcagtgaaagttccaacaatgatgacaactgctgatatggcgatgagagaggatccaagctacaaagaaatatcaaaacgttttcatgagaacccagacgagtttgcagatgcttttgcaagggcttggttcaagttattgcatagagatatgggacccaaaacaagatatatgggtccggaagttcctgaagaggaattgatttggcaagatcctgtgcctgctggaaattcaacttatgatgtaagtgccgtaaaagagaaaattctcaattgtggtctatcaatccaagaaattgattga

SEQ ID NO: 210554 - DNA, 760 bp, Unknown
  Bacterial polypeptide expressing nucleotide sequence isolated from the Sargasso Sea
atgagcaatgacaaaatcaaagtagcaattcttggagttggaaattgtgcaagttcatttgtacaaggcattgaacactatagcaattctgacaatgaagatggcttaatatcagatgtaattggcggatataaagtttctgacattgaagttgttgctgcctacgacataaactcattaaaagtcggaaaagatttaagtgaagcaatttttgctgaaccaaataatactatgaaattttgcgatgttccgaaaacaggagtaactgttcaaccaggtgtcaaaaatgatggagttggtaaatttgttaaagatattattaacacttctcctgattcagataattttgaagaatctcttagggaatcaggggcagaaatattgattaaccttctaccagttggatctgatgaggcagtgaaatactatgcacaagctgcaataaattctaatgtaggctttataaactgtataccagtttttattgctcgagatgaagaatggtatcaaaaatttaaagatgcttcggttccattaattggtgatgatattaaaagccaagttggagcaactattgtccatagagctcttgcacagttattctctgaccgtggcgtcaagctagaaaacacatatcaattaaacgttggtggaaatatggattttcttaatatgctagaagaagatagattagaaactaaaagaacaagtaaaacttcatctgtgacttctgttgctaacaaaaggtacaggcattcag

SEQ ID NO: 210555 - DNA, 608 bp, Unknown
  Bacterial polypeptide expressing nucleotide sequence isolated from the Sargasso Sea
tgttggaattgaaaaggctgcaaaaaaggctggtcataagattacagttccatttgtgccaggtagaggagatgcttcacaagatcaaactgataattattcttttggtttgcttgaacctaaagcagacggatttagaaactacatcacaaaaacctccaatggttcaggaagtaaacccactgtatcagctgaagaaatgttagtagataaagctcaactaatgaaacttacagcccctgaaatgacagttcttgtaggagggatgcgtgtgctaaatactaattttgataaatcaaaaaatggagtattcacaaaaaaaccagagactcttaccaatgatttttttgttaatctacttgatatgggaactacatggaaagaagtttccaaagatgaagatttatttgaaggacgagatcgcaagacaaataaattaaagtggattggtactcgtgctgaccttatatttggatcaaattcgcaacttagagcaatagctgaagtttatgcatgcgaagactccgagactaaatttattggcgattttatatcaacgtgggtaaaagtaatgaaccttgatcgttttgatataaaaaaaaattaac

SEQ ID NO: 210556 - DNA, 508 bp, Unknown
  Bacterial polypeptide expressing nucleotide sequence isolated from the Sargasso Sea
gtttcaggtgtaggcgcatcgcccgacaagatgttacaggcgcgtttattcgcctatgccgatgcgcagcgttaccgtattggggcgaactacaaccagttaccagtaaactgcccacatgcgactaaagccaatcatcaccaacgtgctggcgctatggcgggaacgcaatgcccgtaccacggtagccaaactggtggtgatgccgcggccaactatggtccaaacagcactgcgggggctttagtggaaccagcaaactttgccgagccaccactgcgtttagatggcgaagcggcgcgttacagccgatacaatcaggatgattacacgcaagcgggtaacctgtatcgtatcttcagcgaagcagagaaagcgcgcttagtggaaacgatttctggctcactgcgtcaggcgagtttggatgtacagcaacgtatgctggcacatttccacaaggccgatgcggattacggtcaacggatccaaactgcactcgggttataag

SEQ ID NO: 210557 - DNA, 241 bp, Unknown
  Bacterial polypeptide expressing nucleotide sequence isolated from the Sargasso Sea
cttttggatatgtcagtcaaatggggaggcaacaggcagcaattcctatcaagcaactgaccgtaaatctggctctaaagtaaggcgagcatctagaaccgacctcgttttcggttctaattcacaattgcgagcattggctgaagtatacgcacaatctgactcacatgataaatttgtagcagattttgtatcagcttggaacaaagtgatgaatgcggatagatttgatttaagttaa

SEQ ID NO: 210558 - DNA, 691 bp, Unknown
  Bacterial polypeptide expressing nucleotide sequence isolated from the Sargasso Sea
aatggcgctcgaattagacttgagccacaaaaaaattggggaagtaaataagccagaacaacttgaaaaagtgttatctgcttatgaaaatatctcttcagaaacaggggtatcagttgctgacattataattcttggaggaaatttaggaattgagaaagcttctggtaaaagtgtcgattttactcctggtagaggcgattcatcacaagatcaaacagatatagattctttttcttatctagaaccactttccgacggatttaggaattatcatcgagatggtcttgatgtcagagcagaagagatgatgcttgatagagctcaattacttggattaacagctccagaaatgacagtattacttggtggattaagatcattaggcataacacataatggatatggcaattttacagaagatccaaatgaattaactaatgactatttagtaaagttgttggatatgtcagtatcttggcaacctaatggaactggtaattcttttgagtcagttgatcgagaatctggagaaaaagtatcttctgcctcaagagttgatctagtttttggatcaaattctcaattaagggcaattactgaactttatgctcaagaggattcaaaagaaaaatttgtgtctgactttatttcggcttggaataaagttatgaattctgatttgtactaa

SEQ ID NO: 210559 - DNA, 535 bp, Unknown
  Bacterial polypeptide expressing nucleotide sequence isolated from the Sargasso Sea
aaaacaagatcaaacagacaaaaattcatttaatcttattgaacctatagcagacggttttagaaactatattaagatgcatgctaaagggtataccaatggaaaaggtatccctactaattcagctgaagaaatgttgatagataaagcccaacttcttggattaactggtccagaaatgacagttttaattggaggaatgagagtattaaatactaactatgatggctcagattatggtgtatttactaagaaacccggatcattaactaatgatttctttgttaatctattagatatgaaaactacttggagagaagtagataaagaagaacagttttttgagggaatagatagaaaaacaaaaagagtaaaatggagagcgacacgtgcggatttaatatttggatctaattctcaattaagagcattatctgaagtttatgctacagacgattcaaacgaaaaatttttaaatgattttatatctgcttggacaaaagtaatgaatttagatcgttttgatttaaattaa

SEQ ID NO: 210560 - DNA, 280 bp, Unknown
  Bacterial polypeptide expressing nucleotide sequence isolated from the Sargasso Sea
ccctggaacgttgacaaatgacttctttgtaaatctgctggacatgaatacagagtggaagtctaaagctaattccaccgaagtatttgaaggcaggaatagacagagtggccaattacaatggatcgcaactcgtgctgatttaatttttggatcaaactctgaattacgcgcacttgcagaggtatatgccagcgatgatgcaaaagagaaatttatcaatgactttgttctcgcatggagcaaagtaatgaacctggaccgttttgacctgatgtag

SEQ ID NO: 210561 - DNA, 440 bp, Unknown
  Bacterial polypeptide expressing nucleotide sequence isolated from the Sargasso Sea
aatgaaagtcacactattcaaaacggcggttgcgcacaccgcactggcggcggccctagtggccctgcccgtgattgacacggtggcccgcagcacgcctaaaagcactcaggcctggtggcctgccagcctggatctgacgcccttgcgtcagaacgagcgcagcacgaacccgctgggcgccgattttgactatgcggccgagtttgcgcggttggatcttgaggcattaaaggcggatatcaacaagacgctaaccacctcgcaaccttggtggcctgctgattacggcaactatggcccgttctttgtccgtatggcctggcacagcgccggcacctaccgcacctcggacggtcgtggtggcgccgatggcggtcagcagcgattcgagccactgaacagctggcccgacaacggtaacctcgacaaggcccgcc

SEQ ID NO: 210562 - DNA, 877 bp, Unknown
  Bacterial polypeptide expressing nucleotide sequence isolated from the Sargasso Sea
ccaatctataaaaagatttcaaaacgttttcatgaaaaccctgacgaattcgctgatgcttttgctagagcttggtttaaattgttgcatagagatatgggtccccgatctcgctatctaggtccagaagttcctgaagaggaattaatttggcaagatccagtccctgaaggtaatgctgattatgatgttggaagtgtcaaatctaaaataaatgagagtggcctatcaattcaacaaatggtggaaactgcttgggccagcgcatccacttttagaggttcagatcttagaggtggagcaaatggagcaagaattcgtcttgcacctcaaaaagactgggaagctaataaacctaaagagctgtctaaagtgctcaatgtgctagaaggaatagctagcgagacaggagcttcaatagctgatgtaatagttcttgctggtaatgttggcatagaaaaggcttctggaacagaagtcccttttactccaggtagaggagatgcttctgcagaacaaactgatgaagaatcttttggtgtacttgaacctatttcagatgcttttagaaattaccatcaatcgggcataaatatgccttctgaagaattgatgttagataaagcccaattgcttggtttaactgcaccggaaatgacagttcttgttggaggaatgaggacattaggagtaagtgcagatggccatggtgtatttacagatgatataaacaatttatcaaacgacttctttggtaccttgcttgatatgtctgttgaatggaaaccaaatggcactggtaattcttacgaagcgatcgatagagtctgtggagagaaagtaagaactgcttcaagatctgaccttgcttttggtt

SEQ ID NO: 210563 - DNA, 631 bp, Unknown
  Bacterial polypeptide expressing nucleotide sequence isolated from the Sargasso Sea
gaaaagcgtatcaatggcagacttgattgtcttagcaggcggtgttggtattgagatggctgctaaaaaggcagggcataaagttaatgttccattttcagcaggcagaggagatgctagacaagatcagactgatattcattcttttggtcttcttgagccccaggcagatggttttagaaactatttgaatggaggagcttcaattgtctcagcagaggaaaaattagttgataaagcacaattaatgggtctcactgcaccagaaatgacagcacttataggtggtatgagagttttaaatactaactatgatgattcaaattatggtatatttacaaataaacctggttctcttactaacgattatttcgtaaatctattagacatgaacactacatggaaagaggaagataaatcagaacaaacatttgtaggaagagatagaaaaactcaaaaacctaaatggagagcaacaagagttgatttaatttttggctcaaattctcaactaagagctcttgcagaggtctatgcttgtgaagactcgagtgaaaaatttgttaaggattttatagctgcatgggcaaaagttatgaattctgatcgatttgatttgaaattaaattaa

SEQ ID NO: 210564 - DNA, 735 bp, Unknown
  Bacterial polypeptide expressing nucleotide sequence isolated from the Sargasso Sea
aatgagcaatgacaaaatcaaagtagccattcttggcgttggaaattgtgcaagttcatttgtacaaggtattgaacactatagcaataccgacaatgaagatggcttaatatcagatgtaattggcggatataaagtttctgacattgaagtagttgcagcctacgacataaactcattaaaagtcggaaaagatttaagtgaagcaatctttgctgaaccaaataatactatgaagttttgcgatgttccaaaaacaggagtcactgttcaaccaggtgtcataaatgatggagttggtaaatttgtcaaagatattatcaacacttctcctgattcagacaattttgaagattctcttagggaatcaggagcagaaatattgattaaccttctaccagttggatctgacgaagcagtgaaatattatgcacaagctgcaataaattccaatgtcggttttattaactgtatacctgtttttattgctcgagatgaagaatggtatcaaaaatttaaagatgcttcggttccattaattggtgatgatattaaaagccaagttggagcaactattgtccatagagctcttgcacagttattctctgaccgtggcgtcaagcttgaaaacacctatcaattaaacgttggtggaaatatggattttcttaatatgctagaagaagatagactagaaactaaaagaacaagtaaaacttcatctgtgacttctgt

SEQ ID NO: 210565 - DNA, 646 bp, Unknown
  Bacterial polypeptide expressing nucleotide sequence isolated from the Sargasso Sea
aacagcttggtctagtgcttcaacttttagaggttctgatatgagaggtggagcaaatggagcaagagtaagacttgcaccgcagaaagattgggatgctaacaaaccagaacaattagcaaaagttttaggtgtgcttgaaggtatagcaagtgaaacaggagcatctgttgctgatgtcatagtgttggcaggcaatgttgctatagagaaggcatctggagtagaagttccatttttatctggcagaggagatgcaaccagtgaacatacagatgttgaatcatttgaagttcttgaacctcttgcagatggatttagaaattatcaaaaaacagacttttctgtaactccagaagaaatgcttgttgataaagctcaattacttggtctgactgcccctgaaatgacagtattagttggtggtttaagatcacttggagttagtgcagatggtcatggtgtttttacagataatataaatactttatctaatgatttctttaaaacacttttagatatgagtgttgaatggaaaccagtcagcaaaaactcttatgaagcgacagatagagtaagcggtgaaaaaataaggactgcatcaagagttgatcttgtatttgggtcgaattcacagctaagagca

SEQ ID NO: 210566 - DNA, 607 bp, Unknown
  Bacterial polypeptide expressing nucleotide sequence isolated from the Sargasso Sea
atgagcaaatgtccttttaccggcgcaggaacacctgcaaagttttctgcaggaagaggtcaaactgtaagagacttttggccaaatagtttaaatcttaaaattcttagtcagcattcaaatttatctaaccctatggataaaaaatttaattatgcaaaagaatttaaaaaactaaattacaaagcattaaaaaaagatttaaaaaaattaatgacagactcccaagagtggtggccagcagattatggtcattatggtccattatttattagattagcttggcatgccgcaggaacttacagaactggtgatggtagaggtggagcaggaacgggcaatcaaagatttgcgccacttaattcttggccagataacgtaaacttagataaagctagattacttttatggcctattaaaaagaaatatggaagaaaaatttcatgggcagatttatttatacttgttggaaacgtagctttagactcaatgggttttaaaacttttggttttggagctggaagaactgacatttgggagccagaagatgatatttattggggctcagagaaagaaatgttaggtgggaaagatatagtgaaagaga

SEQ ID NO: 210567 - DNA, 781 bp, Unknown
  Bacterial polypeptide expressing nucleotide sequence isolated from the Sargasso Sea
tcaacttttagagggtctgataaaagaggtggagctaatggcgcaagactgagacttgaacctcaaaaaagctggaagatcaataaagtttcaaaaactgacaaagtgataaaagttttagagaaaatcaaaaataattttgatggtaaaaagaaatcagtctcggttgccgatttaatagttttaggtgggtgtgcggcaatagaaaaagctgctaagaaagcaggtcataatgttaaagttcctttctcacctggtagaggagatgcttctcaagagcaaacagatataaattcatttggactgttagaacctaaagcagatggtttcaaaaattatttaaatagtgatataaatatttcagcagaagaaatgctggtagataaatcacaactactgaggttaacaactactgaaatgacagttttagtcggaggaatgagagtgcttaatactaattatgatggatcaaatcttggtgtatttacaaaaaaaccaggctccctatctaatgattattttaaaaatttattggatatgaatacaacatggaaagaaattgataaaagagagcaggaatttgtcgggaaagatagaaaaacaaataaagttaaatggagaggcactagagtagatttaatatttggctcaaattcacagttaagagccatagccgaggtttatgcatgcgaagatggagaaaagaaattcgttggtgactttgtggcagcttgggcaaaagttatgaattctgacaggtttgatttaaaattaaactaat

SEQ ID NO: 210568 - DNA, 627 bp, Unknown
  Bacterial polypeptide expressing nucleotide sequence isolated from the Sargasso Sea
cctcaaaaagattggggaagtaaacaaccctaatgaattgagcaaagtcatcaaagcttatgaaaaaattaaaaagagttttgatggtaaaaagaaattggtttcattagcagatttaatagttttaggtgggtgtgctgcaattgaaaaagcagctcaaaaagctggacataaggttagcgtgccatttacacctgggcgtggagatgcaacacaagatcaaacagacactttctcttttgatttattaaaaccaaaggcagatggttttataaattataaatattcaaatgggtcaaaaatttcagcagaggaaatgttaatagataaggcttgccttatggatcttactggcccagagatgacagttttagtcggaggtatgagagcgttaaatgcaaatttcgatggctctaaaaagggaattttcacaaaaaaatctgagacattaacgaatgatttctttataaaccttcttgatatgaaaacaacttggaaagaaacagatgaaagtgaagaattatttgaaggttcagatagagaaacaaaagaagtaaaatggcttggtagcagagttgacttaatttttggttctaactcacaattaagatcatgggccgaggttta

SEQ ID NO: 210569 - DNA, 745 bp, Unknown
  Bacterial polypeptide expressing nucleotide sequence isolated from the Sargasso Sea
aatgagcactgaaaattttaaaaataagtcttttaaaaccaacgaattaagcaaatgtccttttacaggagctggaacacctgcaaaattttctgcaggaagaggtcaatctgtaagagatttttggccaaatagtctaaatcttaaaatacttagtcaacattctaatttatcaaatccgatgaataaaaaatttaattattccaaagaatttaaaaaacttaattataaagctcttaaaaaagatttaaaaaaattaatgacagattcacaagaatggtggccagcagattatggtcattatggacctttgttcatcagattagcttggcacgcagctggcacatacagaactggtgatggtagaggtggagctggaacaggaaaccagagatttgcaccacttaattcttggccagataacgttaatttggataaggcaagattacttctttggccaattaaaaaaaaatatggaaataagatttcttgggcagatttatttatcctagtaggtaatgttgcattagactcaatgggatttaaaacatttggttttggtgccggaagaactgatatttgggaaccagaggatgatatttattggggatcagaaaaagaaatgctaggagtggaaagatatactgaaaaaagagatttagaacaaccacttggtgcttcacacatgggtttaatatatgttaatccacaaggtcctgatgctaatccagatccaaaacttgca

SEQ ID NO: 210570 - DNA, 703 bp, Unknown
  Bacterial polypeptide expressing nucleotide sequence isolated from the Sargasso Sea
aaaaaaaatggacaagagattaaaatggtgcctgatgcacatgaaaaaggtgtattacacccacctatgatgcagacaactgatatttctatgaaagttgatccgagttatggtcctatcacaaaacattttcatgaaaatccaaaagagtttcatgatgcatttgcaagagcatggtttaaattaactcacagggatatgggtccaaaggcctgttatcttgggagtgatgttccaaaagaagaattaatttggcaagatccagttgataaacaaaaatataaattaaaggataaagatattaaggatctcagatctaaaatcttaaattcaaaaatatctgttacagatttagttgcaactgcttgggcgtcagcatctacttttaggggttcagataagagaggtggtgcaaacggggcaagaataatgttggaaccacaaaaaaactggaaagttaataatccacaaaaattatcaaaagtaatttcaatactgaagaaaattaaaataaagtttgatgataaaaagaaaactgtttctatggcagatttaatagtcttagctggttgtgtaggagtagaaatagctgctaaaaagtcaggttataaggttaaagttccattttctccaggaagaggagatgcaagacaagatcaaactgacgtaaactcatttggtttattagaacccccaagctgat

SEQ ID NO: 210571 - DNA, 802 bp, Unknown
  Bacterial polypeptide expressing nucleotide sequence isolated from the Sargasso Sea
aatcctgataaatttgctgatgcctttgctaaggcttggtttaaattgacgcacagggatatgggtcctgtagatcgttatttaggtccagaagttcctcaagaagaattgatctggcaagatcccattcctaagacatcgcacgagcttattgatgactcagatgaatcaattttgaaaatgaaaattttagatactggattacctgtttctcaattgatttcagtggcctgggcttcagcgtcctcatttagaaattctgacaaacgtggcggggccaatggagctagagtaagcctatctcctcaaaagtattgggatgtaaatgaaccaattcaactaggaaaagtacttgatgctttgactgctattaaaaatgattttaataagtcaaataacaaaaaacaagtttcactagccgatcttattgttttagctggaagcgcagcagtagaaaaagctgctaaagatgctggatacgaggtgaatgtcccctttacagctggaagaacagatgcgactcaggaaaaaactgatgtcgaatctttctccgttttggaaccactagcagatggttttagaaactatctaaaaaaacaatatgctgtaggagcagaaaaacttttgattgacaaggcacaactaatgaccttaactgctccagaaatgactgctttggtcggtggtatgagggtgttaaatgctaattttaatggtacagagcatggagtcctaaccaatcgtcctgggatactatcaaatgatttctttgttaatcttttagatatgaatactacctggg

SEQ ID NO: 210572 - DNA, 870 bp, Unknown
  Bacterial polypeptide expressing nucleotide sequence isolated from the Sargasso Sea
agttggagcagaaccagaaggctcctcaattgaagaacaaggttttgggtggaaaaatgaacatggttcaggtttaggaagagatacaataactagtggtattgaaggttcttggacttcaaatccaacacaatgggataatggatattttgatttattattcaagtatgaagatacttggaaattagtaaagagcccagcaggtgcaaatcaatggacacctgaaaacccagatgcagaagatttagcaccagatgctgaagatccttctattagagttccaacaatgatgactacagcagatatggcaatgattagagatccagaatacagaaaaatttctaaaaaattccacgaaaacccagatatttttgcagatgcttttgcaagagcatggttcaaattacttcatagagacatgggccctaaatctagatatctaggaccagacgttcctaatgaagatttaatatggcaagaccctgtaccaaaaggaaacacatcttatgatgtgaatgcaataaaagatgcaattaaatccagtggtctttcagttagtgaaatggtcgaaactgcttgggcaagtgcatccacattccgtggttctgataatagaggtggtgcaaatggagctagaattagactttcaccacaaaaagattggcaagcaaataaacctgaacaattatctaaagttttgagcgtattatcagaaattgctggagccaatggagtaagtgttgctgatacaattattcttgcaggaaatgtaggaattgaaatggcttcaggaatggatgtaccttttatgccaggaagaggagatgcaactgaagagcaaactgatattgattcttttgcggttctttg

SEQ ID NO: 210573 - DNA, 819 bp, Unknown
  Bacterial polypeptide expressing nucleotide sequence isolated from the Sargasso Sea
aaagcccacggagcaagtacagaagatcatgttaatacagagcctgaaggtgctcccttagaagagatgggctttggatggacaagcagctatggctcaggtgttggaagcgacacgataacaagtggaatcgagggtgcttggacagcaaacccaactcaatgggataacggatattttgatttattgtttgggtatgagtgggagctgactaaaagtccagcaggtgcccacatttggcatgcgattgatcaaaaggaagaggatatggctccagatgctgaagatgcttcaataaaagtgccaacaatgatgacaactgctgatatggcaatgagagaagatccaagctatagagaggtgtcaaagcgttttcatgaaaatccagaagaatttgcagacgcatttgcaagagcttggttcaaactgctacatagagatatgggaccaaaaacaagatatatgggacctgagattccagaagaagagttaatttggcaagatccagttcctgctggaaattcagattatgatgtaagtgctgtaaaagaaatgattcttgcttcaggattatcaattcaggaaatgattgaaacagcttggtcaagtgcatctacttttagaggttcagatatgcgaggtggtgctaatggcgcaagaattaggcttgagcctcaaagaaattgggaagcaaataatcctgatcaattgaataaggtgttagatgtctatacttctatcgctgaagagactggagtttcagttgccgatattattgtactcgcaggaaatgttgctatagaaaaagcatcaggttta

SEQ ID NO: 210574 - DNA, 374 bp, Unknown
  Bacterial polypeptide expressing nucleotide sequence isolated from the Sargasso Sea
tgctcaggaaatgacctgcttaattggaggtatgagagtgttagggacaaaccatgagtctgctaaaaacaaaggtgtatttactgataaagttggaactttaacaaatgacttctttattaatttggtcgatatgaaatacacatggaaaccaacaggcaagaactcttatgaaattattgatcgtaaaacaaacaagattaaatttacagcatcaagagcagatttagtttttggttctaactcaatacttagatcttattctgaagtatacgcacaagatgacaataaagaaaaatttataaaggattttgttgcagtatggacaaaggttatgaatgcggacagaccaaatttaaaaaaattaaattaat

SEQ ID NO: 210575 - DNA, 231 bp, Unknown
  Bacterial polypeptide expressing nucleotide sequence isolated from the Sargasso Sea
gacattagagagacatttggaagaatggctatgaatgattatgaaactgtagcattaattgctggaggacatacttttggtaagtgtcatggagctggtgatgacgggctagttggtgttggtccagaagacgctccaatggaacaacaacaatttggttggaagaatggttacggcaaaggaatgggaagagataccattacaagtggtctagaaggaccatggactaaa

SEQ ID NO: 210576 - DNA, 561 bp, Unknown
  Bacterial polypeptide expressing nucleotide sequence isolated from the Sargasso Sea
aagatgcaggtaagaaaatcaaattacctttttctccaggcagaggtgatgcttcacaagatcagactgatatacactcttttagtttattagaaccacaagcagatggatttagaaattatgcaaactcccaaagtgcaacaaaagctgaagagttattagtggataaagctcaattgatgcaattaagtggaccagaaatgacagtcttaattgggggtatgagagttctcggaacaaatttcgatggatcaaaaaatggagtctttacaaaaagacctggtaaattgactaatgatttctttgtaaatctattggatatggatattaaatggaaagaaatttcaaataaagaagatatattcagtggtgttaatcgtaaatcaggaaaagttctgtggacaggaacaagagcagatctaatctttggttcgaattcacaattaagagctttagccgaggtctatgcgacagatgattcatctgacaaatttgtaaatgactttacagctgcttggtctaaggttatgaatgctgatcgatttgatttacagaaataat

SEQ ID NO: 210577 - DNA, 417 bp, Unknown
  Bacterial polypeptide expressing nucleotide sequence isolated from the Sargasso Sea
cagaagagcttttgctagagagggcttccttgatgggactaactgctcaggaaatgacttgcttaattggaggtatgagagttttaggaacaaaccatgagtctgctaaaaataaaggtgtatttactgataaagttggaactttaacaaatgacttctttattaatttagtcgatatgaaatacacatggaaaccaacaggtaagaactcttatgaaattattgatcgaaaaacaaacaagattaaattcacagcatctagagcagatttagtttttggttctaactcaatacttagatcttattctgaagtatatgcacaggatgacaataaagaaaaatttataaaagattttgttactgtgtggacaaaggttatgaatgcggacagaccaaatttaaaaaaattaaattaat

SEQ ID NO: 210578 - DNA, 504 bp, Unknown
  Bacterial polypeptide expressing nucleotide sequence isolated from the Sargasso Sea
tatgagtacagaaaattttaaaagtaagacttttaaagctaatgaattaagtaaatgtccatttacgggagcaggaactcctgcaaagttctctgctggaagaggacaaacaaacaaagacttttggccaaatagtcttaatctcaaaatcctaagccaacactctaatttatccaatccaatggatgagaaatttaaatattcaaaagaatttaaaaaacttaactttaaagcacttaaaaaagatttaaaaaaattaatgactgactcacaaagttggtggccagctgattatggtcattatggtccattatttattagacttgcttggcacgcagcaggtacttatagaacaggtgatggtagagggggagctggaacaggaaatcaacgttttgcacctttaaattcttggcctgataatgttaatttggataaagcaagacttcttttatggccgaataaaaaaaaatatggaaaaaagatctcctgggcagatctatt

SEQ ID NO: 210579 - DNA, 444 bp, Unknown
  Bacterial polypeptide expressing nucleotide sequence isolated from the Sargasso Sea
cacgctcagatggcttcaggaattatcatgaggcagggattgaagttaaacctgaggagatgctattagataaatctcagctactaggcttaactgccccagagatgacagttcttattggcgggatgagatctttaggcattaatcacagtgattacggtatcaaacctgaaaatcctgatgctttagataatgatttctttaaaactcttctagatatgagagtttcttggaaaccaaatggtacgggaaattcttatgaaggatctgacagggtaactggagagtctgtaagaacagctacaaggccagacctggtatttggttcaaattctcagttaagagctcttgtcgaggtttatgcagctaatgattctaaagaaaaatttctaaaagattttgtaaatgcatgggataaagtaatgacaaacgatttgttctaaa

SEQ ID NO: 210580 - DNA, 590 bp, Unknown
  Bacterial polypeptide expressing nucleotide sequence isolated from the Sargasso Sea
aaaaaaaagtgtaaaaaaaaataaagttcctttcaaagcaggaagaggcgatgcaaaacaagatcaaacagacaaaaattcatttaatcttattgaacctatagcagacggttttagaaactatattaagatgcatgctaaagggtataccaatggaaaaggtatccctactaattcagctgaagaaatgttgatagataaagcccaacttcttggattaactggtccagaaatgacagttttaattggaggaatgagagtattaaatactaactatgatggctcagattatggtgtatttactaagaaacccggatcattaactaatgatttctttgttaatctattagatatgaaaactacttggagagaagtagataaagaagaacagttttttgagggaatagatagaaaaacaaaaagagtaaaatggagagctacacgtgcggatttaatatttggatctaattctcaattaagagcattatctgaagtttatgctacagacgattcaaacgaaaaatttttaaatgattttatatctgcttggacaaaagtaatgaatttagatcgttttgatttaaattaat

SEQ ID NO: 210581 - DNA, 634 bp, Unknown
  Bacterial polypeptide expressing nucleotide sequence isolated from the Sargasso Sea
tcagagcgctttcataaaaatcctgatcaatttcaagatgcttttgctcgtgcatggtttaaacttttgcatagagatcttggccctcgtacaagatacatgggaccagaagttccaaaagaagaatttatttggcaagatccagttccaaaaggtaactctaattatgatataaatgccattaaagaaaaaatatcaaacagcggcctatctatacaagaaatggttgaaacttcttgggctagcgcttcaacctttcgagtcacagatatgcgtggaggatctaatggtgcacgtattagattagaacctcaaaaaaattgggaagcaaataagccagatcaacttacaaaagtattgagtgtattagaaggtatagccaaggaatcaggagtctcagttgctgatgtaattgttcttgcaggtaatgtaggaatagaaaaagcatctggtgtgagtgtaccatttattcctggtcggggtgatgcaacacaagaagatactgatgtagaatcgtttgcagttctcgagccacaagcagatggttttagaaattatctaaagaagaactttagcattgcaccagaagaactaatgttggataaagcacacttgcttggtcttaccgcacctg

SEQ ID NO: 210582 - DNA, 237 bp, Unknown
  Bacterial polypeptide expressing nucleotide sequence isolated from the Sargasso Sea
cgttattagatatgagtgttacatggcaaccagttggcgatggcacgtatcaagcgtttaagcgttcagacaacacgcccatcagaacagcgacgggagcagatttagtatttggatctaattcccagctccgagctttagcagaagtatatgccgctgacggagctcatgagaagttcgtaagcgattttatttcagcatggaacaaagttatgaacgcagatcgctttgaatgat

SEQ ID NO: 210583 - DNA, 724 bp, Unknown
  Bacterial polypeptide expressing nucleotide sequence isolated from the Sargasso Sea
catcgaacaaatgggattaggctggatcagcagctttggatcaggcaaaggccgcgatgccatcaccagcggtatcgaaggggcatggacagccaaccccacgcaatgggataatggctattttaatctgttgtttggatatgaatggaaactggtcaaaagcccagccggcgcgcatatttggcacgcaattgatccaaagccggaagatctagcaccggacgcagaagactcatcaatccgtgttccaaccatgatgacaaccgccgatatggcaatgcgtgaagaccctgaatatcgcaagatttccaagcggttccatgaaaatccagaagagtttgctgatgcttttgcgcgggcttggttcaaattactgcaccgtgatatggggccgcgcacacgttatattggccctgaagccccaacagaagaaatgatctggcaagatcctgtaccagccggcaatagccaatttgacgtcgactcggtaaaggctaaaattgccaaatctggtttaaccattcaagagatggtcgaaaccgcatgggccagtgcctcaacttatcgcggtacagatatgcgcggcggtgccaacggggcacgtatccgtcttgccccgcaaaaagactggtcggcaaataaaccagaccagttgcaaaaggtgttgtcggttttagaaccgattgccgccgaatcaggtgcatccgttgctgatgtgattgtg

SEQ ID NO: 210584 - DNA, 421 bp, Unknown
  Bacterial polypeptide expressing nucleotide sequence isolated from the Sargasso Sea
atgtttaacaaatactttttacttattttctctttattttttatttctaattgcgaacaaacctatgttgataaaaatggtgatagttcctttcgaggaaagtttaaaacaaaccgtgaatggtggccaaatcaacttgatcttagcgttctaaggaagcactcatcactttcaaatccaatggattcaaactttaattacgaagaagcttttaatagtttagattatcaagctctaaaaaaagaccttaaagacttgatgacagattcaaaagattggtggcctgcagattatggtcactatggtggattatttatcagaatggcttggcacagtgctggtacgtatagaaccggcgatggtagaggtggtaccagagaaggacagcatagatttgctcctcagaatagttggccctgat

SEQ ID NO: 210585 - DNA, 127 bp, Unknown
  Bacterial polypeptide expressing nucleotide sequence isolated from the Sargasso Sea
ttgctcctcagaatagttggccctgataatgccaatttggataaagctagaagactcatctggcctataaaacaaaaatatggtaataaaatttcttgggcagatttaatgatattgacaggaaatg

SEQ ID NO: 210586 - DNA, 745 bp, Unknown
  Bacterial polypeptide expressing nucleotide sequence isolated from the Sargasso Sea
ttggactgtcgcactgggtcaggaggacgactgcgagctcgaaccttggactgccgcactgtcccagaaggaccactgcgagctcgaactttggactgccgcactgggtcagcaggctggctgcgagctcgaaccttggactgccgcactgggccaagaggaccactgcgagctcgaaccttggactgtcacactgggtcaggaggacgactgcgagctcgaaccttggactgccgcactgtcccagaaggaccactgcgagctcgaactttggactgccgcactgggtcagcaggacggctgcgagctcgacccttggactgccgtgctgggccaagaggaccgctgcgagttcgtaacttggactgccgcactgtcccagaaggaccactgcgagctcgaactttggactgccgcactgggtcagcaggacggctgcgagctcgacccttggactgccgtgctgggccaagaggaccgctgcgagttcgtaacttggactgccgcactgtcccaaaaggaccactgcgagctcgaaccttggactgccgcactggatcaggaggacggctgcgagctcgaaccttggactgccgcactgggccaagaggaccactgcgagctcgaaccttggactgtcgcactgggtcaggaggacgactgcgagctcgaaccttggactgccgcactgtcccagaaggaccactgcgagctcgaactttggactgccgcactgggtcagcag

SEQ ID NO: 210587 - DNA, 577 bp, Unknown
  Bacterial polypeptide expressing nucleotide sequence isolated from the Sargasso Sea
gatggccgttaagaaagccggtaagaaaattgaagttccattttctccaggaagaggtgatgctactcaagaacaaactgatgttcattcctttggtttattagaaccacaagctgatggatttagaaactacaataaggatgaaaaaactaaagtctctgctgaggaaaaattaattgataaatctcagctaatgggtcttacagcaccagagatgactgttttgataggtggaatgagagttcttgatacaaactttgataactctaaaaatggtgttttcacaaaaaaacctggaacattaaccaatgactatttcgtaaatcttctagatatgaatactacttggaaagaaactgatagttcagagcagttatttgaaggcaaagataggaaaactaataaagttaaatggcatggcacaagagtagacttgatatttggttcaaattctcaattgagagcattagcggaagtttatgcgagcaacgattcatctgaaaaatttattaatgattttgtttcagcatggacaaaagtcatgaattctgacagatttgatcttaaactaaactag

SEQ ID NO: 210588 - DNA, 562 bp, Unknown
  Bacterial polypeptide expressing nucleotide sequence isolated from the Sargasso Sea
tatgagcagtgagataaataaagaaattagcaagtgcccttttcacggtgatggaattcctcaaaaaaatccaaccggaaaaggtcaaaccaataaagattggtggcctaatagcttaaatttaaaaattttaagtcaacattcttctttggtcaacccaatggataaaaaatttgattataaaaaagaatttaagaagcttaacttcaaagccttaaaaaaggatttacataaattaatgacagattctcaagaatggtggcctgcggattatggtcattacggaccattatttgttcgtcttgcatggcatgcagctggaacttatagaactggcgatggaagaggtggagcaggaactggaaatcaaagatttgcacctttaaatagttggccagataatgttaatttagataaagcaagattacttctgtggcctataaaaaagaagtatggaaaaaaaatttcttgggctgacctttttattttggttgggaatgtagcaatagaatcaatggggttaaaaacttttggatttggtggaggaagagaagatatttgg

SEQ ID NO: 210589 - DNA, 662 bp, Unknown
  Bacterial polypeptide expressing nucleotide sequence isolated from the Sargasso Sea
ggttttaagagtacttgagaatatagctaataaaacaggagcgactatagcggatacaattattcttgcaggaaacgttgggcttgaaaaagcgataaagaaaggtggttctaaagtcaaagttccatttagtcctggtagaggagattcatctcaagagcaaacagaattaaaaagtttcaagtggttagaacctcggcatgacggtttcagaaactatgtaaaagctgattattccgcgatgccggaagaacttttattagaacgtgcttcgttgatgggattgaccgcaaaagaaatgacatgtctagtgggaggcatgagagtacttggaacaaatcatgagtcggcaaaagacaaaggagtcttcacaagtaaagtcggtgctttgacaaatgatttctttattaatttgctggacatgaaatataattggaaaccgactggtaaaaactcttatgatattgtcgatcgtaaaacaaacaaagttaaatacaccgcgtctagagctgacctagtttttggttcaaattcaattttaagatcttacgcagaggtttatgctcaagatgataacaaggaaaaattcatagaagattttgttaaaatttggacaaaaattatgaatgctgatagacaaaattataaaaaattaaattgaa

SEQ ID NO: 210590 - DNA, 2005 bp, Unknown
  Bacterial polypeptide expressing nucleotide sequence isolated from the Sargasso Sea
ctggctgtgcaaagcgggcgcgccgccgacggtgctggcgctgttgggagtgcaaccatgattcagattcgcgccgtcgtcatctacagccacgatgggcggcaccgcgtggtgcccttcgccccgggccgcgtcaacatcatctcgggcgacccgcgcaccggcaaatcgtccttggtgggcatcatcgagtacgcgatgggcgccaaagagatcgacgtgcccgagggcaaggtgcggcgcaacgtcgcctggttcggcctgctgctggagaccggccgcgggcaggccttcgtggcgcgccagttgccaaagggtgatggcaaatccaatgaggcgatctatgtcgaagccaacgacaaggtcacgatccctgaggccgaggccttgcgcgcgacaaccaaccgcgagggcctgcgcgcgatgctggcgtcttgggtaggaatgggcgactacctgcacgagccgcctccgggccagacgcgcgagcccttggccgcctccatcagccacgccctcaccttctgcttccaggcgcagcccgagatcgcgcagcgcaagtacctgttccacggttccaacgaccggttcgtggcccaggcgatcaaggacaccctgccctacttcctcggcgccgtgaccgacgactacgtcgctcaacagcaggaactcaagcgcgtgcgtaccgagcttaggcagatcgagcgcaggctggcggaggccgctgcaatccgcggcgaaggcctcagccgcgccgacaccttgctggccgaggcgaaagcggtcggcctgagcacgctcgacgacgatgctgcctggcaggaaaaaatcgaggcgctacgcgcgatccagaacaccccgatcccaaccgccgcagctgaagctggcgaggacgtcgaatttcggcgcctttccgacgtgcgcagcgggcttgtgcgcgagcagcgttcgctgctatccacgctggaacgcgcccgcagcttcgaaggcagctccaggggctatgccggcgaggcccgtgagcacactgcacgactgcaggcggtaactgtcttcgagcacgacgcgcccggtcacgcctgcccgctatgcatgcaggatcttcccgaggcatcgcaagtcccctcgatcagcgatctgcgcgcagcccaggactacatcggtgagcgcagcggcgcgatggacgctgcaacgccgcgcatcgcgaccgcgatccagcaggtagagactcaactggccgacgtgcgccgccggctcgacgataaccgcgcgctgctcaccgctgtcaagcgcggcagccagcgcctgcaactggcaagcgacaccgaggcgcggcgcgcgatggtgctggggcgcatcagcctgtacatggagaacatccctcagatgccggacatcagtgagcagcaggcacgactcacggaactgcgcgtacaggaaggcgaactcaacgaagcggtcagtaccgacaccattcaggccaaactcgattcctgcttgtccaacgtaaaccgctatctgtccgactatgcgagacggatcgacctcgagtattcagagtcgcccctgcgcctggacccacgcaacctcactgtcgtagccgacacgcccgatcggcctgtgcccatgcgcgagatcggcagcggcgagaatcatgtgggctaccacatcgtggcgcacctggctctgcacacttggtttgcaagccgcggccgtcctgtgccggccttccttctgcttgaccagctgtctcaggcgcatttctcgcccgacacggcgccgggcgacggcgtgacgcaggagaagatcgacactgatcgccgagccgtcaagcggctcttcggactgatctttgatgttgtcgagcgcctggaaggcaaattccaggtgctcatcaccgaccatccggacttcagcgacgacgcccggttccaagccgcgctgcgggagcgctggcgtgatggatcgaagctcgtccccgagaactggccgcgcgcagcctgag

SEQ ID NO: 210591 - DNA, 502 bp, Unknown
  Bacterial polypeptide expressing nucleotide sequence isolated from the Sargasso Sea
aggatcaacagatatacactcttttagtttgttagagccacaagctgatggttttagaaactatgcaaattctgaaagttcaacacaagctgaagaattgcttatagataaagcacagttattgcaactaactggaccggaaatgacggtcttagttggaggtatgcgagtattaggaactaattacgacggttctaaacatggtgtgtttacaaaacgtccaggtaaattaactaatgatttcttcattaacttattagacatgaatataaaatggaaagaaacttcagacaaagaagatttctttaatggtgttgatagaaaatcaggaaaagttctgtggacaggaacaagagcagacttaatttttggttcaaactctcagttaagagctttagcagaagtatatgcgacagatgattcatctgacaaatttgtaaatgactttacagttgcttggactaaggttatgaatgctgatcgttttgatttacagaaatag

SEQ ID NO: 210592 - DNA, 459 bp, Unknown
  Bacterial polypeptide expressing nucleotide sequence isolated from the Sargasso Sea
gttttagaaactacatgaaaaaaggtaaatctcatgtttcagctgaggaaaaattaattgataaagcacaattaatgggtttaacggcaccagagatgacagttcttgtaggaggaatgagagttttagatacaaattatgataattctaaaaatggagttttcacaaaaaaatctggaactctatcaacagattattttgtaaatcttctcgatatgagtactacttggaaagaaactgacaaatctgaacaatattttgtcggtaaagatagaaagtctaaaaaaactaagtggaaaggttcaagagttgaccttatttttggttcaaattctcaattaagagcattagccgaagtctatgcttgcaaagactcatctgacaaatttgttaaagactttgtatctgcatgggtcaaagtgatgaatgcagatagatttgatttaagattaaactagt

SEQ ID NO: 210593 - DNA, 688 bp, Unknown
  Bacterial polypeptide expressing nucleotide sequence isolated from the Sargasso Sea
tatgagtagtgaattaattaaagaacaatcaaaatgtccattcacaggagctggaacgcctcctaaacatgcgaccggaaaaggaactaccaaccgagattggtggccaaatgctttaaatctcaaaatattaagtcaacattcttcattggtagatccaatggataataaatttaactatgctaaagaatttaaaaaacttaactttaagaacttaaaaaaagatttacataaattaatgacaaactcacaaagctggtggcctgcagattatggacattatggtccattatttataagactagcatggcacgcagcaggaacttacagaactggagatggtcgtggtggtgctggaactggaaatcaaagatttgcaccattaaatagttggccggacaacgtgaacttggataaagcaagattattgctctggcctataaaaaagaaatacggaaaaagaatatcttgggctgatttatttattttagttggaaatatttctctcgagtcaatgggattcaaaacttttggttttggagctggaagagaagatatttgggaaccagaggaagatatttattggggttcagagaaagaatggcttggtgtaaatcgttatagtggtaagagagatttggagcaaccattaggtgcttcgcacatgggccttatctatgttaatcct

SEQ ID NO: 210594 - DNA, 646 bp, Unknown
  Bacterial polypeptide expressing nucleotide sequence isolated from the Sargasso Sea
taaaccagaacaattaaataaagttcttggagtcttagagagtatcgcttcggagactggggcaagtgttgctgatgttattgttctcgcaggtaatgttggtatagaaaaagcttctggcataactgttccatttactcctggacgaggggatgcaacacaagaacatactgatgtggagtcttttgctgtcatagaacctgaagcagatggatttagaaactatctcaagaaaaatttcactgtaacaccggaagaatttctattagacagagcgcatcttcttggattgactgcacctgaaatgactgtgcttgttggaggaatgagagcacttggtataagttcagatgatcgaggtgttttctctaatgccgaaaaactcgataatagtttctttacaactcttcttgatatgtcggtaaaatgggaagctacaggaagtaattcttatcaagcttctgatcgtaaatcaggtgaaaaagttagaagagcatcaagagcagatcttgtttttggttcaaactctcagttaagagctttagcagaactttatgcgcaggcagataatcatgataagtttgtaaatgactttatcagcgcatggaacaaagtcatgaatgctgatcggtttgatataagttaa

SEQ ID NO: 210595 - DNA, 430 bp, Unknown
  Bacterial polypeptide expressing nucleotide sequence isolated from the Sargasso Sea
tatgaatggcgaagctaaatgtccagtttctcatggatctagcgatcagcataccaatcgcgctcaaaccaacaaagaatggtggccagatcaagtcaatctaagcatacttcatcagcacgatgcaaaaacgaatccaatgtcaaatggatttaactataacgatgaatttaataagttagactataatgctctcaaaaaagaccttaatgatcttatgactgattctcaggaatggtggccagctgattacggacattatggccctttctttatccgaatgacctggcatgctgctggaacctatcgcacagctgatggacgcggtgggggcggtacaggctctcaaagatttgctccgacgaatagctggccagataatacaaacctcgataaagctagaagactactttggccaataaaacaaaaa

SEQ ID NO: 210596 - DNA, 256 bp, Unknown
  Bacterial polypeptide expressing nucleotide sequence isolated from the Sargasso Sea
aatgacttcttcaataattttacttgatatgacaacagtgcaatggaaaccaaatggcaccggcaatacttttgaaggcattaacagacaaacaggtgaaaaaatgaggtctgccactagtgtagatctggtcttcggttcaaactctcaattacgagcaatagctgaagtatatgccagcgatgatgggcaagataagtttgtatccgattttatcgatgcatgggtcaaagttatggagcttgatcttcactaa

SEQ ID NO: 210597 - DNA, 859 bp, Unknown
  Bacterial polypeptide expressing nucleotide sequence isolated from the Sargasso Sea
ttgatttggcaagatccagttccgtctggtaattctaaatatgatgaagattctgtaaagaaaatgattactgattcaggactatcaatacaagaaatgatcgagacagcttgggcaagtgcatcaacctatagaggctctgatatgagaggtggtgcaaatgggtcaaggattagattagctcctcaaaaagattgggaagcaaacaatccttctcaattaaaaaaggttcttgatatatatgaaaatatttcaaatgaatcaggggcttcaatagcagatattatagtcttagctggtaatgttggaattgaaatagcttctggagttgaagttccttttacaccaggaaggggtgatgcttctcaagagcaaactgatatagagtcatttgaagtcttagaaccaaagtcagatgcattcagaaactttcatgctaaaggtgtaaataccgctcctgaagaaattatgcttgataaagcacaattacttggcctcacagctcctgaaatgacagtacttgttggtggcatgagatctttagggataagctcaaatggatatggtgtatttacagaggattccaataagttaagtaatgattattttaaaattttgcttgatatgtccgttaagtggaaacctaacggaacaggaaactcttatgaagcctttgatagatcaagcggtgaaaagctgagaacagcatcaagatccgatctagtttttggatctaattctcaacttagagcaattgtagaagtatatgctgaggatgattcatcagaaaaatttgttaatgacttcatattcgcatggaataaagtcatgaatgctgataggtttgacgttcagtaga

SEQ ID NO: 210598 - DNA, 248 bp, Unknown
  Bacterial polypeptide expressing nucleotide sequence isolated from the Sargasso Sea
cttgcttgatatgggaacaacttggaaagaggttgatagtaacgaacaactatttataggcagagatcgtaaatcaaacaaggttagatggacagcttcaagagttgatttgatttttggttctaattctcaacttagagccattgcggaagtttatgcacaggaagattctaaaagccaatttgtaaatgactttgttgctgcttggacaaaggtaatgaatttagatcgttttgatcttaattaat

SEQ ID NO: 210599 - DNA, 189 bp, Unknown
  Bacterial polypeptide expressing nucleotide sequence isolated from the Sargasso Sea
cactgaccgtaaatcttggctctaaagtaagacgagcatctagaactgatctcgtttttggttctaactcacaattacgagcattggctgaagtatacgcacaatctgactcacatgataaatttgtagcagattttgtattagcttggaccaaagtgatgaatgcagatagatttgatttaaactaaa

SEQ ID NO: 210600 - DNA, 269 bp, Unknown
  Bacterial polypeptide expressing nucleotide sequence isolated from the Sargasso Sea
cgattacttcgtaaatctattagatatgaacactacatggaaagaggaagataaatcagaacaaacttttgttggaaaagacagaaaaactcaaaaaactaaatggaaagcaacaagagttgatttgatttttggttcaaattctcaactaagagctcttgcagaagtttatgcttgtgaggactcaagtgaaaaatttgttaaagattttatagctgcatgggtaaaagttatgaattctgatcgatttgatttgaaattaaattaaa

SEQ ID NO: 210601 - DNA, 391 bp, Unknown
  Bacterial polypeptide expressing nucleotide sequence isolated from the Sargasso Sea
atgtttgacgatcaaaaatgccccataatacacggctcaattgtgagcaataattccaagaacagcggtatcaccaataaagattggtggccaaaccaacttaatcttgggatattacatcagcacgacaagagatcaaacccgatggatgaaggttttgattatagagaagaatttcagaaactagattattacgcattaaagaaagaccttgaggcattaatgactgactcacaggattggtggcctgctgattatggacattatggaccttttttcattaggatgacttggcatgctgcagggacataccgtgttggtgatggccgcggcggcggaggaacaggggcacaaagatttgcaccgctaaatagttggcctgataatggaa

SEQ ID NO: 210602 - DNA, 156 bp, Unknown
  Bacterial polypeptide expressing nucleotide sequence isolated from the Sargasso Sea
aatggacaggaacaagagtagacttaatttttggatcaaattctcagcttagagcacttgctgaagtatatgcaaccgacgactctcatgataaatttgtaaaagatttcgttgcagcttggacgaaaattatgaattcagaccgttttaactaag

SEQ ID NO: 210603 - DNA, 586 bp, Unknown
  Bacterial polypeptide expressing nucleotide sequence isolated from the Sargasso Sea
aaataaggtctcagttgctgatgtaatagttttagctggaaacatcggcatagaaatggctaccggtaaatctttaacattttcacctggaagaggagatgcttctcaagatcaaaccgatattgaatcgtttgcagttcttgagcctttttctgatggttttagaaattatcataataaggatttttcaataaacgctgaaaatatgttattagataaagcacatttactaggtctaaatgctccagagatgaccgtgctcgtaggcggaatgagatcattaggaatagactttaatgaaaatggaaattttacagatgataaaaattctttaaccaatgattttttcaataacctccttgatatgaacgtcaaatgggaaccaactggaagaaacagttacaatgggaacgacagatcatcgggagaagttattagatcagcaacgcgtgctgacctggtatttggttcaaattcgcaattacgagcattggctgagatatattcccaagatgattctagtgaaaaattcgtcaatgattttatagatgcatggacgaaggttatgaacaatgatcgcttttaa

SEQ ID NO: 210604 - DNA, 138 bp, Unknown
  Bacterial polypeptide expressing nucleotide sequence isolated from the Sargasso Sea
ttgggtcaaattctcaattaagagcattagcagaagtttatgcatgtgaggactcaggtgataaatttattaatgattttatcgcagcgtgggttaaagtaatgaattcggacagatttgacttgaaattaaattaat

SEQ ID NO: 210605 - DNA, 508 bp, Unknown
  Bacterial polypeptide expressing nucleotide sequence isolated from the Sargasso Sea
tagaggtgatgctacttctgatatgacagatgctcattcttttgctccttttgaacctttgtctgacccttttagaaattttataaaagataaatatgcttcaaaagctgaagaaatgatggttgatagagctcatctgttaggtttatcagctcctgaaatgactgtattattaggtggaatgagagttctaggtactaactataataatggtaaagagggtgtttttactgataatgttgggtctcttactaatgatttttttgtaaacctaactgacatgaataataaatgggaaattattgctgaaaacgattataaagtaatagacagaaaatctggaaatgttaagtggtcagcaacatctgtagatttagtttttggatctaattctatattaagatcttacgcagaagtatatgctcaagatgataataaagaaaaatttgttagtgatttcgttaatatttgggttaaaataatgaataatgatagatttgatatttaa

SEQ ID NO: 210606 - DNA, 324 bp, Unknown
  Bacterial polypeptide expressing nucleotide sequence isolated from the Sargasso Sea
catgcctgcacgctgcccagtcattggaccagttgctccttccaaagctcggcatactgcggcaggttcgctatcgaatgccgactggtggccagaccaactaaatctacgaatactgaaagcacatgctggagcacctccaccaatcggacacgagttcgattatgcagaagcatttaaaagtcttgattttcaagcaatgaagactgatctgcaagccgccatgacgacttcgcaagaatggtggccagctgactatggtcactatggaccactgtttatacgtatggcatggcatagtgcgggaacctaccgaacagctga

SEQ ID NO: 210607 - DNA, 507 bp, Unknown
  Bacterial polypeptide expressing nucleotide sequence isolated from the Sargasso Sea
aagcggctttttctccagccaatgtagtaccaggcgtcagcttttcaccagatcgtatgctgcaggcgcggttattttcttatggtgatgcacagcgttatcgattaggcgtcaactttaaccatataccggttaatgccccacgctgtccttttcatagttaccacagagacggccagatgcgtactgacggtaatttaggtggcactatcagttatcagcccaattcaaaaggagtatgggacaacaggcctgaatatgccgaacccgctttggcgatgacaggagcagcagatcgttatgatcactatgtggatgacgatcattacgaacagcctggtgatttattccggctgatgacaccggcacaacaacaagtcttgtttgccaataccgccgctaatctggcaggcgtatccagagatattcagaacaggcatattgccaactgcactaaagcggatccggcttatggcgctggtgtggctaaagctttaggccgttaac

SEQ ID NO: 210608 - DNA, 638 bp, Unknown
  Bacterial polypeptide expressing nucleotide sequence isolated from the Sargasso Sea
taagaaaaaatcagtttcattagcagatttattagtgcttggtggaaacgtaggaatagagatggccgctaaaaaagctggaacgaaaattgaagttccattttctccaggaagaggtgatgctactcaagagcaaaccgatgttcactcatttggtttattagaaccacaagctgatggatttagaaactataataaggatgaaaaatcaaaagtttcagctgaggaaaaacttattgataaatctcaattgatgggtctgactgcaccagagatgactgttttgataggtggaatgagagttcttgatacaaactttgataactcgaaaaatggtgttttcacaaaaaaacctggaactttgactaatgactatttcgtaaatcttttagatatgaatacaacttggaaagaaacagatagttcagagcagttatttgaaggtaaagacagaaaaacaaataaagttaaatggcatggtacaagagtagacttgatattcggctcaaattctcaattaagagcattagcagaagtttatgcatgcaacgattcatcagataaatttatcaatgattttgtttcagcatggacaaaagtcatgaactctgacagatttgaccttaaattaaattaac

SEQ ID NO: 210609 - DNA, 199 bp, Unknown
  Bacterial polypeptide expressing nucleotide sequence isolated from the Sargasso Sea
ttttttgaaggaaaagatcgcaaaactaataaagttaaatggagaggtactcgtgttgatcttatatttggatcaaattcacaacttagagctctagccgaagtttatgcaagtgaagactcaatgtcgaaatttgttaatgattttatctctgcttggacaaaagttatgaacttagatcgttttgatttaaggtaat

SEQ ID NO: 210610 - DNA, 658 bp, Unknown
  Bacterial polypeptide expressing nucleotide sequence isolated from the Sargasso Sea
tcttaaaatagaaacttatctaattaaagttatacacccaggtatagatgtttatgatgattttataacagaggatgataaaaaaaatgtggccgatattgttggtaataactcacctgttataactactcttgctagagttgaagagagaaaaggtcatatgtttgttttaaaagcattacctgaagttaaaaaaaaatttccaaacgttttatatttgatagcaggtaaaggtccatacctagaaaaaatacaaaatataaccaaagaaatgaatttagagaataatgtaaagtttcttggatggataactgagccagaaaaatcattaattctaaaaagatctgatttgtttgttatgacaccaacaactgtgggggagtcagttgaaggttttggcatggcttatattgatgcttcatttcatggtgttgcatctattggaagtgatagcggtggagtaagcgacgcaattttgaacaataagacaggaataatatgtgagtcaggtaatcaaaaaatgattacagaaaaaatattgctcttacttgaaaataaaaagctaagagaaagtatgggagtaaatggaaagtcaagagctaatcaaaattatgcatgggataaaaaaattattgaataccttgatgcaattaaataa

SEQ ID NO: 210611 - DNA, 413 bp, Unknown
  Bacterial polypeptide expressing nucleotide sequence isolated from the Sargasso Sea
aaattacacagtaactccagaagagtttatgcttgatagagctcatttacttggtcttactgctccagaaatgacagtcttagtgggaggtatgagagcgatgggaatcagctcagatgatcgtggtgttttttctaataatggaaaattagacaatagtttcttcacaactctgcttgatatgacagttaagtgggaagctactggaagtaattcttaccaagcaactgatcgtcaatcaggtgaaaaagtaagaagagcctcaagaactgatttagtttttggatccaactcacaacttagagctttagcagaggtctatgctcaatcagataatcatgaaaaattcttaactgactttatcagtgcatggaataaagtgatgaatgctgatcgttttgatattaactaaa

SEQ ID NO: 210612 - DNA, 2176 bp, Unknown
  Bacterial polypeptide expressing nucleotide sequence isolated from the Sargasso Sea
atgagtgttgattttaaaaaaaatggaaatggtaaatgtcctgttatgcatggcggtataacaaaagcaggtgagtcaaatacatctcgactttggccaaatagtattaatttagatattttacatcaacacgatacaaagactaatcccctacctggatttaattacaaaaaagaagttaaaaaattaaattttaaagccctgaaaaaagatttacttaaattgatgacagatagccaagaatggtggcctgcagatttaggaagttatacagggctaatggttagattgacttggcaccaagttggaacttatagagaatttgacggcagaccaaatgttggttcacataggttttctccacaagactcatggccagataacacaaacctggataaagctagacgtcttctttggccgattaaaaaaaaatatggaaatagattaagttggtcagatttaatggttttagctggcacgatggcttatgaaaaagctggttttaaaacttttggattttcatttggtagagaagatatatgggcgcctgaaaaagatgtttactggggaaaagaaactgttccactagctgtaaatagatatggagatcctcaagatcgttcttctttagaggcacctttagcagcgtcacattttcaattagtatacgttaatccagaaggtgtagaaggaaaaccagatcctgtaaggactgctatggacgttcgagagacgtttggtcgaatgggaatgaacgacgtggaaacagccgcgctaacagtaggcggtcactcaattggaagagcacatggtaatggtgatcctgcaaatttaggaccagagccagcgggagcagatattcatgaacaaggttttggatgggttcaaaaaaatggtggcacgggtgtaaatcaaattacatcaggcctagagggtgcatggacaactaatccagataaatgggatcatcaatatttagatcttttacttaattatgagtgggaaagtaaaaaaagtccagctggagcttggcagtgggaaccgattaatttggaggaagaaaagaagcctgtagatttaggcgatcctacaaaaaaagctagacttatgttcacggatgcagatatggctatggccatggatccagaatacagaaaaatttctgagagattttacaaagatcctaaatttttcgaggactcatttgctcgtgcttggtttaaactaactcataggacaatgggaagcaaagacaactatataggtccttgggcacctaaagaagatctcctttggcagggtaatgttcaaccttctaaaaagaaatatagtgtagaaaaagttaaaaaaatgattgcagcaagtaaactaagtaatagtgatttaataactacggcttgggatagtgctagaacatatagaagaacagataaaagaggtggagcaaacggagcgagaattagattagagcctatgaaaaattgggaagcaaacgaaccaaaaagactttcaaaagtgctaaaagttttagaaaatattgcaaaaaaaaatggcgcatctattgctgatacgattgttcttgcaggaaatgttggtttagaaaaagcaatcaaaaaaggtggttcaaaagtcaaagttccgtttaatccaggcagaggtgactcaactcaagaacaaacagaaaatagaaatttcaaatggttagaaccattacatgatggatttagaaattttgtaaaatcagattactctgtaatgccagaagaacttttactagagcgtgcgtctttaatgggtttaactgcgcaagaaatgacctgcttagtaggaggcatgagagttctaggaacaaaccatgagtcagcaaaaaacaaaggggtgtttacagaaaaagttggttctttaacaaatgatttctttttaaatttagttgatatgaaatatatatggaaacctacaggtaagaattcctatgatgttatcgatcgtaaaactaataaagcaaagtacacagcatccagagcagatttagtttttggttctaattcaatattacgagcatatgctgaggtatacgcacaagacgacaataaggaaaaatttgttaaagatttcgtatcagcttggacaaagattatgaacgctgatagaccaaatataaaaaaattaaattaat

SEQ ID NO: 210613 - DNA, 764 bp, Unknown
  Bacterial polypeptide expressing nucleotide sequence isolated from the Sargasso Sea
aatgagtgcggaatttggaaaatttaaatcaacagaattaggaaaatgcccgtttacgggagctggaacaccagcaaaacatactgcaggaaaaggtcaaactgtcaaagatttttggcctaatagcttgaatttagatattttaagtcaacactcaaacttatccaatccaatggataaaaaatttaattattctaaagaatttaaaaaactaaattacaaagcactaaaaaaagatttaaaaaaactaatgactgactcacaagattggtggccagctgactacggacattatggtcctttctttataagattagcttggcatgcagctggcacatatagaacaggtgatggaagaggtggtgctggaacaggaaatcaaagatttgcccctctaaatgcttggccagataatgttaatttagataaagcaagattgcttttatggccaatcaaaaaaaaatatggaaaaaaaatatcttggggagatctatttatattagtaggaaacgtagcattagagtcaatgggatttaaaacatttggttttggtgctggtagagttgatatatgggaacctgaagatgatatttattggggttcagaaaaagaaatgcttggtgtaaatagatacagtggaaaaagagatcttgaacaacctttgggagcgtctcatatgggtttaatttacgtaaatccacaaggcccagatgccaatcctgatcctttgctggctgctcatgatattagagaaacatttggta

SEQ ID NO: 210614 - DNA, 641 bp, Unknown
  Bacterial polypeptide expressing nucleotide sequence isolated from the Sargasso Sea
aatggaaaaaaatataaaggttgcaatcttaggtataggtaactgtgctagctcattcgttcagggaatcgaacactatagcaactctgacaacgaagatggtcttatttccgatgttatcggaggattcaaagtttccgatattgaagtagttgcagcatatgacattaacactacaaaagttggtaaagatctcagcgaggccatttttgccgagccaaacaatacaattaagttttcagatgtatcaacaactggtgtgatagttcagccaggagttgcaaatgatggtgttggaaaatttgttaaagatattatttctacttcccctgattcagaagattttgaagaatcattaaaaaattcaggtgctgaaatacttattaatttactaccagtgggatctgacgaagcagttaagttctatgcccaatcagctattaatattggaataggatttattaactgtatccctgtttttatagcaagagataaagaatggtatcaaaagtttagggatgctggagtacctctgataggtgatgatattaaaagccaggttggagcaacaattgtacatagagttttagcacaattattttctgatagaggggttaatcttgaaaacacttatcaactaa

SEQ ID NO: 210615 - DNA, 574 bp, Unknown
  Bacterial polypeptide expressing nucleotide sequence isolated from the Sargasso Sea
aaaattaaagtttcatttaaggcaggaagaggagatgcaaatcaagaacaaactgatatcaactcatttaatcttcttgaaccgttagctgacggctttagaaattatgtaaaattaaatgccaatggatattctaatggtaaaagtgtgccgacaatttcatcagaggagctgttaattgataaagcacagcttcttggattaacaggtccagaaatgacggtattaattggaggtatgcgtgtattagatacgaattatgatggttcagattttggtgtatttacaaaaaaacctggagctctaacaaacgatttttttataaatttgttagacatgagaacaacttggaaagaaatagataaagaagaacagttctttcaaggactagatcgtaaaacaaaaaaagttaaatggaaagctactagagcagatttaatttttggttcaaattctcagttaagggcattatccgaagtatatgctacggatgatgcaagtgaaaaatttataaatgattttgtatcagcttggacaaaagtaatgaatttagaccgattcgatttaaattaat

SEQ ID NO: 210616 - DNA, 454 bp, Unknown
  Bacterial polypeptide expressing nucleotide sequence isolated from the Sargasso Sea
tttagaaactatgtaaaatcagattattctgtaatgccagaagagcttttactagagcgtgcttccttgatgggattaactgctcaggaaatgacctgtttaattggaggtatgagagtgttaggaacaaatcatgagtctgctaaaaacaaaggtgtatttactgataaagttggagctttaactaatgatttctttattaatttagttgatatgaaatatacctggaaaccaacaggcaagaactcttacgatattattgatcgtaaaacaaataaaattaagtataccgcatctagagcagatttagtttttgggtctaactcgatactgcggtcatattcagaggtatatgctcaagatgacaacaaagaaaaattcattaaagattttgttgccgtatggactaagataatgaatgctgacagaccgtatttaaagaaattaaattaac

SEQ ID NO: 210617 - DNA, 886 bp, Unknown
  Bacterial polypeptide expressing nucleotide sequence isolated from the Sargasso Sea
acaaaaatataaattaaaagctggggatattaagtatcttgaaaacaaaattctaaaaactggattatctgtttctcagttagtatcaacagcttgggcttcatgttctacttttagaggatctgacaaaagaggtggagcaaatggtgcaagaataagactacaaccacagaaagactgggatataaacaaaatagccaaagttgacaaagtaattaaagctttagaaaaaattaagaaaaactttgatagtaaaacaaaaaatgtctcattagcggatctaattgttttagcaggaaatactgcaattgaaaaagctgcaaagaaagctggacataaaattaaagttccctttttacaaggaagaggtgatgctaaacaggaacatacggatgttttttcttttaacttattagaaccaaaagctgatggatttgtaaattaccaaagaggtaagtctagtacatcacctgaggaaatgttgattgataaagctcaattaatgaaattgactgcacctgaaatgtctgttctttttggaggtatgagagttttaagtacaaattttgatgggtcgcattatggtgtattcaccagaaagcctggagcactaacaaatgattacttcaaaaatcttttagatatggatattacttggagcgaaaaagatgatgcagagcaatatttccaaggaaaaaatcgaaaaacaaataaaattatttgggagggttcaagagtagacttaatattcggctcaaattctcaattaagagctatttctgaagtatatgcgtctgaggaatctgataaaaaatttgttagggattttgtcaatgtctggtcaaaagttatgaaccttgataggtttgataaaaaaataaactaa

SEQ ID NO: 210618 - DNA, 562 bp, Unknown
  Bacterial polypeptide expressing nucleotide sequence isolated from the Sargasso Sea
ggcaggtaatgttgctatagagaaggcatctggagtagaagttccatttttatctggcagaggagatgcaacgagtgaacatacagatgttgaatcatttgaagtccttgaacctcttgcagatgggtttaggaattatcaaaaaatagacttttctgtaactccagaagaaatgcttgttgataaagctcaattacttggtctgactgcccctgaaatgacagtattagttggtggtttaagatcacttggggttagtgcagatggtcatggtgtttttacagataatataaatactttatctaatgatttctttaaaacacttttagatatgagtgttgaatggaaaccagtcagcaaaaactcttatgaagcgacagatagagtaagcggtgaaaaaataaggactgcatcaagagttgatcttgtatttgggtcgaattcacagctaagagcaattgcagaagtatatgctgaagatgattctaaagataaatttgtaaatgactttattgctgcctggaataaagtaatgaatgcagatagatttgatctaggttaa

SEQ ID NO: 210619 - DNA, 565 bp, Unknown
  Bacterial polypeptide expressing nucleotide sequence isolated from the Sargasso Sea
atgagtactgaaaattttaataataaatcttttaaagctaatgagttgagcaaatgtccttttacaggagcaggcacacctgcaaagttttctgcagggagaggtcaaacagttagagatttctggccaaatagtttgaatctaaaaattcttagtcagcattctgatttatcaaatcctatggataaaaaatttaattaccctaaagaatttaaaaaacttaattacaaggcattaaaaaaagatttaaaaaaattaatgacagactcacaagaatggtggcctgcagactatggtcattatggtcccttatttatccgattagcttggcacgcagcaggaacttacaggactggtgatggtagaggtggcgccggtacaggtaatcagagatttgcaccactcaattcttggccagataacgtgaatttagataaagcaagattacttttatggccaatcaaaaaaaagtatggaagaaaaatttcatgggcagatttattaatattagttggaaatgtagcgttagactctatgggttttaaaacttttggttttggtgcag

SEQ ID NO: 210620 - DNA, 702 bp, Unknown
  Bacterial polypeptide expressing nucleotide sequence isolated from the Sargasso Sea
attatccaaagttcttaaaacttttggaaaaaataaagaaaaattttgatacaaaaaagaaaaacgtgtcatttgctgatttaattattttaggtgggtgtgctgcaattgagaaagctgcaaaaaaaggcggtcacaatgtaaaagttccattttcaccgggtcgtggagatgcatcacaagatcaaacagatgttcactcatttggtttacttgaaccaaaagctgatggattcagaaactatattgtaagaagcactaatggatcatcacgaaaacccacagtatcagcggaggaaacgcttatagacaaagcacaactactaaaactttcagcacctgaaatgacagttcttataggtggtttgcgtgtattaaatacaaattttgataattcgaaacatggagttttcacaaaaaaaccagaaacactcacaaatgatttttttgttaatctacttgatatgaacactacatggaaagaaacttctaaagaagaagattcatttacaggtaaaaatcgtaaaacaaacaaagttcagtggacaggttcccgttttgatcttatctttggatcaaactcacaactacgagcattagcggaagtttacgcgtgcgaagattcaaaacctaaatttattactgattttatatctgcgtggacaaaagtaatgaatttagatcgttttgatttgaaataaa

SEQ ID NO: 210621 - DNA, 998 bp, Unknown
  Bacterial polypeptide expressing nucleotide sequence isolated from the Sargasso Sea
aatgcatcctccaatgatgcaaacaactgatttatctttgagaatggataaaagttatggaccaatttcaaaacatttttatcaaaatccagatgaatttgctgatgcatttgcaagagcttggtttaagcttactcatagagacatgggaccaagagcatgttatttgggtagcgaagtaccaaaagaacaattaatttggcaagatcctatagataaaccaaaatataaacttaaatcaaaagatataagagatttaaaatcaaagctttcaaaatcaaaaatctctgtttctgatttagtttctacggcttgggcttctgcttctacatacagaggttctgacaaaagaggtggagcaaacggagcaagaattatgcttgagcctcaaagaagttggaaagtcaataaccctaaaaaactttcaaaggttattaaagctttacaaaaaattaagaaaaaatttgatacaaataaaaaatcagtctcaatggcggatcttatagtattaggtggaaatgtaggaatagagatggcagcaaaaaaagctggtcataaaattcaggttccatttactcctggaagaggagatgcaagacaagaccaaacagatgtaaattcatttggattacttgagccgcaagcggatggttttagaaactacatgaaaaaaggtaaatctaatgtttcagctgaggaaaaattaattgataaggcacaattaatgggattaacggcaccagagatgacagttcttgtaggaggaatgagagttttagatacaaactatgatagttctaaaaatggagttttcacaaaaaaacctggaactctatcaacagattattttgtaaatcttcttgatatgagtaccacttggaaagaaactgataaatctgaacaatattttgttggtaaagatagaaagtctaaaaaaactaagtggaaaggttcaagagttgaccttatttttggttcaaattctcaattaagagcat

SEQ ID NO: 210622 - DNA, 766 bp, Unknown
  Bacterial polypeptide expressing nucleotide sequence isolated from the Sargasso Sea
atgagtaatgagttaattaaagaacagtcaaaatgtccttttactggcgcaggaacaccaccaaaacatccaacaggtaaaggacaaacaaataaagattggtggcctaataacctaaatttgaaaattttaagtcaacattcatcattggtaaatccaatgggagaaaaatttaattacaaaaaagaatttaaaaaacttaactttaaagcattaaaaaaagatcttcataaattgatgactgatacacaagattggtggccggcagattatggtcattatggtccattttttattcgtcttgcttggcatgctgctggaacttatcgaacaggagacggaagaggtggcgctggaactggaaatcaaagatttgctccattaaatagttggccagataatgtaaatttagataaagcaaggcttttactttggcctattaaaaagaaatatggaaaaaaaatatcttgggcagatttatttatacttgttggaaatatatctctagagtcaatgggcttcaaaacttttggttttggtgccggaagagaagacatatgggagccagaagaggatatttattggggatctgaaaaggaatggcttggagtaaatcgatatagtggaaaaagagaactagaaaaccccttaggagcatcacacatgggtttaatttatgttaatcctcaaggacctgatgctaatccagatccttatttagctgctcatgatattagagaaacttttggacgtatggcaatgaatg

SEQ ID NO: 210623 - DNA, 745 bp, Unknown
  Bacterial polypeptide expressing nucleotide sequence isolated from the Sargasso Sea
accgcttgggcaagtgcctcaacatttagaggctcagacctcagaggcggagcaaatggtgctcgcataagacttgaacctcaaaaaaattgggaggttaataaaccagagcaacttgaaaaagttttatcagtttacgaaactatttcttcagaaacaggagcatcaattgcagatattataattcttggcggaaatcttggaattgaaaaagcttctggcaagactttagattttactcctggtcgaggtgattcatctcaagatcaaacagacattgactcttttgcttatctagaaccgctttctgatggttttagaaattaccatcgggatggtcttgatgttaaagcagaagaaatgatgcttgatagagctcaacttcttggattaacagctccagaaatgacagtactgcttggtggattaagatcattaggcataactcataatgggtatggcaatttttcagaaaattcaaatgaattaacaaacgattatttgacaaaattattagacatgtcagtgtcttggcagactaatggaactggtaattcttttgaatctattgatagaacaacaggtgataaagtttcatccgcttcaagagttgatttagtttttggttcaaattctcagttaagagctattgctgaactttatgctcaagaagactcaaaagataaatttgtttctgattttatttctgcttggaataaagttatgaactctgatttatattaat

SEQ ID NO: 210624 - DNA, 859 bp, Unknown
  Bacterial polypeptide expressing nucleotide sequence isolated from the Sargasso Sea
agaatgggttttggctggacaagcacatacggctctggagttggtagcgatactatcacaagcggtattgagggtgcatggactgcgaatccaacacaatgggacaatgggtactttgatttactatttggttatgattgggagctaacaaaaagccctgctggtgcacatatttggcacgcagttggtcaaaaagaggaggatatggcacctgatgcagaagactcatcaaaaaaagtacctactatgatgacaactgcagatatggccttaagagaagatccgagttataacaaaatctcaaaaagatttcatgaaaatcctgaagagtttgctgatgcttttgcacgagcatggtttaaacttcttcacagagatatgggtccgaaaactaggtatatgggtccagaagtgcctgaagaagaattaatttggcaagatcctgtcccagcaggaaattctgattatgatattcaaaatgtaaaaaaattaattactgaatcaggtttatcaattcaggaaatggttgaaactgcatgggcaagtgcatctacatttagaggctcagacatgcgaggtggtgcaaatggtgcacgaattcgcttagcacctcaaaaagactgggaagctaataacccaagtcgattgagtaaaatccttgaaatatacaaatcaatttctaatacaaccggtgcatcaattgcagatgtaattgttttagctggtaacgtaggtatagaaatggcaactggtgaggaagttttatttactccaggaagaggagatgcttctcaagaacaaacagatattgaatcatttgaggtgcttgaaccaaaatcagatgcctttagaaattttc

SEQ ID NO: 210625 - DNA, 916 bp, Unknown
  Bacterial polypeptide expressing nucleotide sequence isolated from the Sargasso Sea
tatgggaaataaaattagctgggctgatttatttatattaacaggtaatgttgcaattgaatctatgggaggaaaaacttttggattcagcggtggaagaccagatatttgggcaccggaagaggatatctactggggtgttgaagaagaatggcttcaaaataaaagatatactggtgaaagagttttagataacccacttgcagcagtgcagatgggattgatttatgtaaaccctgaaggaccagatggaaaagctgatccacttgctagtgcaaaagatattagagaaactttcgcaagaatggcaatgaacgatactgaaactgtggcacttactgcaggtggacatacttttggtaaggcacatggtgcaggtgatccggctctagttggtgcagaaccagaaggtgctcctttagaacaaatgggtttaggatggaacaacttgcatggctcaggcgttggtcgtgatactactacaagcggtatagaaggtccgtggacacctaatccaactcagtgggataatggatactttgatatgctccttggttatgaatggaagcttgtaaaaagtccagcaggtgcacaaatctggcatgccattgatcaaaaagaagaacacatggctccacaagttgatgatccttcaataaaagttccaacaatgatgacaacagcagatatggcaatgcgtgaagatcctgaatatagaaaagtatcagaaaaatttcacaaagacccagaatactttgctgatcagtttgctagagcttggtttaaacttcttcatagagatatgggtccaaagacaagatatttgggtccagaagttccagaagaagaattaatttggcaagatcctgtgcctaaaggtcattcaaactatgacgtagaagcagtaaaagctaag

SEQ ID NO: 210626 - DNA, 472 bp, Unknown
  Bacterial polypeptide expressing nucleotide sequence isolated from the Sargasso Sea
atggaaaatgaaggtaagtgtcctgttatgcatggcgctatgacaagtaatagttcaagtggtacatctaataaagattggtggcctgagcaactaaatttaaatattctgcatcagcatgatagaaaatctgatccaatggatgagggttttgactatagaaaagaatttgaagatatcgactatgatgctctgaaaaaagatctaaatgatctcatgactgattcacaggaatggtggcctgcagactatggtcactatggtccatttttcataagaatgacttggcatgctgctggtacatatagaagtacagacggtcggggtggaggtggaactggtgcacaaagattcgctcccttaaatagttggcctgataacggaaacttagataaagctagacgactactttggccaatcaaacaaaaatatggcaagaaaataagttgggctgatctattaatattagccg

SEQ ID NO: 210627 - DNA, 940 bp, Unknown
  Bacterial polypeptide expressing nucleotide sequence isolated from the Sargasso Sea
gataccatcacatctggcattgagggtgcttggacgactaatccgactaaatgggataatggttattttgatttactccttggttacgattggaaattaactaagagtcctgctggggcaaatatttggcatgcagtaggtcaaaaaaaagaacatatggcacctgatgcagaagactcttcaaaaaaagttcctacaatgatgacaactgctgatatggcaatgcgcgaagacccagagtatcgaaaaatatctgagcattttcataaaaatcctgatcaatttcaagatgcatttgcacgtgcttggttcaaattacttcaccgtgatatgggaccaaagacacgctatatgggacctgaagcgccagaagaagatctaatttggcaggaccctatcccagctggaaacgctaattatgatgtagatgctgttaaaagtaaaattgagaatagcgaactatctattcaggaaatggtggaaactgcttgggcaagtgcttcaacttaccgacataccgatatgcgtggaggcgcaaatggtgcgcgcataagattagagccacaacgaagttgggaagtaaataaaccagaacaattaaataaagttcttggagtcttagagggtatcgcttcggagactggggcaagtgttgctgatgttattgttctcgcaggtaatgttggtatagaaaaagcttctggcataactgttccatttactcctggacgaggggatgcaacacaagaacatactgatgtggagtcttttgctgtcatagaacctgaagcagatggatttagaaactatctcaagaaaaatttcactgtaacgccggaagaatttctattagacagagcgcatcttcttggactaactgcacctgaaatgactgtgcttgttggaggaatgagggcacttggtataagttcagatgatc

SEQ ID NO: 210628 - DNA, 916 bp, Unknown
  Bacterial polypeptide expressing nucleotide sequence isolated from the Sargasso Sea
atgataattcaaaaaaaagttacaacaatgatgactactgctgacatggctatgagggaagatccgtcatataaggtaatttcgaaaaggtttcatgaaaacccagatcaatttcaagatgcatttgccagagcatggtttaaattattacatcgtgatatgggaccaaagactcgttatcttggacctgaagttcctgaagaagaattgatttggcaagatccagtcccatcaggtaacaaaaactatgatataggtgcagttaaatctctattatcagaaagtggcttgtcaataaagcagatggtcgagacagcatgggcaagcgcttctacttttagaggaacagatatgcgtggaggtgccaacggtgctcgtattcgtctggagcctcaaaaaagttgggaggtaaataaaccaaacgaattgtccaaaattctagaggtttattcatcaatttctgaaaaaactggagcatcaatttctgatgtaattgtattggctggaaatgttggaattgaaacagcatcaggtaaaagcttagagttcacatcaggtagaggagatgcaactcaggaaaaaacagatgttgactcatttgcagttctagagcctgttgttgacggctttaggaattatcagaaagaagattatggtattagtcctgaagaaatgttgcttgataaagctcagataatgggtttaacagcaccagaaatgactgttcttattggtggattaagatcgcttggtatcagtgcagatggtcatggtgttttctcaaaagacacgagtaaattatctaatgattattttgtaaatcttcttgatatgggcattgattggaagccaataaatagtaacacatatcaaggtgtaagcagatccacttcagaaaaaattaatacggcaactc

SEQ ID NO: 210629 - DNA, 886 bp, Unknown
  Bacterial polypeptide expressing nucleotide sequence isolated from the Sargasso Sea
gagccagaaggttcaaaaattcaagaccaatcaacaggttggaatagtaattataaatctggactaggagcggataccataagtagcggaatagaaggtgcatggacatcaaatccaattaaatgggatatgggttacttcgataacttattcggatatgattgggagttgtccaaaagtcctgcaggagcatatcaatggaagccaaaaaaaaatggtcatgcaattgcaatgacacctgatgcgcatatcaaaggaaaagaaaacatgccaatgatgcaaacaactgatttgtcacttaagattgatccaaaatttggattaatttcaagacattttcataacaatccagacgagtttgcagatgcattcgctagagcctggtttaaattaacccatagagacatgggaccaagagtaaattatttaggaaacgaagtgccaaaagaagacttaatttggcaagatccaattccaagaaataaatataaacttaaaaacaaagatatagaaacacttaaaaaatcaattgttaaatcaggtttaacaatctctgaattggtaatgattgcttgggcctctgcctctacttttagaggatcagataaaagaggtggggcaaatggctctagaataagattagctccccaaaaagattgggagtcaaataatccaaaattactttctaaagttttaggtaagtataataaaattcaaaaacaatttaattcaaaatcaaaatttgtatcaattgcagatttaattgtgttgggtggtaacgttggaattgaaaaagccgcacaaagagctggtaaaaaaataaaggtaccatttaaatcaggaagaggtgatgcaactcaagatcaaactgatatacactcttttg

SEQ ID NO: 210630 - DNA, 920 bp, Unknown
  Bacterial polypeptide expressing nucleotide sequence isolated from the Sargasso Sea
ggggtggaagagaagaatatttgggaacccgaagaagatatttattgggggatcagaaaaagaatggctcggtgttaaccgttatagtggaaaaagagaactggagaatcctttgggcgcttcacatatgggtttgatttatgtaaatccacaaggaccagatgcaaatccagatcctcttttagccgctcatgatattcgtgaaacatttggtcgtatggccatgaatgactatgaaactgtagcacttgttgctggagggcatacttttggaaagtctcatggtgcagcatcagaatcatataaaggtcctgaaccagaaggatcaaaaattcaagatcaatccacaggatggaatagtacatataaaagtggaaaaggagttgataccataagctcaggtttagaaggagcatggacacaaaatcctaaaaaatgggatatgggttactttgataatttatttggatatgattggacattaagtaaaagcccggccggcgcacatcaatggacacctaagaaaaatggtcatgcaataaaaatggttaaggatgcacatgataaaacaaaaaaacacgctcccatgatgttaaccaccgatctttctatgagagtggatcctaaatatggaccgatatcaaagcattttcataacaatccaaaagaatttgcagatgcatttgcaagagcatggttcaagcttacacatagagatatgggaccacgttcttgttatttaggtccggaggttccaaaagagcaattaatttggcaagatccaattcctaaatctaagtataaacttaaaaaaaaagatattaaattattaaaaataaaaatattgaaatcaggtatttcaatttcacaattagtctcaactgcttgggcatctgcttcaacatttagaggttctgata

SEQ ID NO: 210631 - DNA, 475 bp, Unknown
  Bacterial polypeptide expressing nucleotide sequence isolated from the Sargasso Sea
agaacctcaagcagatggttttagaaattatctaaatggtggtcaatcaattgtatcagctgaagaaaagctaattgataaagcacaattaatgggtcttactgctccagaaatgacagtgttaatgggtggaatgcgtgttttagataccaattttgataactcaaagcatggagttttcactaaaaaacttggtgcacttactaatgattattttaccaatttattagatatgaatacaacatggaaagaaacagataaatctgagcaaacatttgttggagtagacagaaagacaaaaaaaacaaaatggaaaggcacaagagttgatcttatctttggatcaaattcacaactaagagctttagcagaagtttacgcatgtgaggattctcaagataaatttgttagtgattttatagcggcatgggtaaaagtaatgaatgctgatagatttgatttaagactaaattaa

SEQ ID NO: 210632 - DNA, 864 bp, Unknown
  Bacterial polypeptide expressing nucleotide sequence isolated from the Sargasso Sea
aaaagcgcatggggcaggtgatgctgcattagttggtccagaaccagaaagtgctcccatggaagaaatgggatttggatggataagtaaacatgcatctggcaaaggtagtgatacaattacaagcggtattgaaggagcttggacagctaatcctacagtatgggataacggttattttgatttgcttttaggatatgattggaaattgacaaaaagccctgctggcgcaaacatttggcatgcagttgatcaaaaagaagaacatatggctcctgatgcagaagattcatcaaaaaaagttccaacaatgatgactacggctgatatggctatgcgtgaagatccagaatatagaaaaatatctgaacgttttcataaaaaccctgatcagttccaagatgcttttgctcgtgcttggttcaaattacttcaccgtgatatgggaccaaaaactcgttacatgggacctgagtctccagaagaaattcttatttggcaagatccagttcctgcagggaattcaaaatatgatgttgatgcagttaaaactaaaattgaggaaagcggcttatcaatacaagagatggttgagacagcttgggctagtgcctcaacatatcgtcataccgatatgcgtggtggtgcgaatggagcacgtatacgattagaacctcaaaaaaattgggaagttaataaaccaaatcaactctctaaagttcttacaaaattagaagctattgcttctgaaactggagcaagtgttgcagatgttattgttcttgcaggtaatgtaggaatagaaaaagcatctggaaaaaaagtgccttttacaccaggtagaggtgatgcaactcaagagca

SEQ ID NO: 210633 - DNA, 583 bp, Unknown
  Bacterial polypeptide expressing nucleotide sequence isolated from the Sargasso Sea
aatgagcgatgaaacaaaatgcccagtaattcatgggtcaaatactaaaacagctggaagtcattcaaacgtaaattggtggcctcagcaattaaatctaaatatcttgcatcagcatgataagaaaactaatccgatggaagaagactttaattacaaagaagagttcgaaaaaatagattacaaagcattaaagcaagacctgtatgatttaatgactgattcacaagagtggtggcctgcagattacggtcattatggtccattttttgtgagacttacttggcacgcagcaggcacatatagaataggagatggtagagggggtgctggtacgggtgcacaaagattttctccactaaattcctggcctgataatggaaaccttgataaagcaagaagacttttatggccaatcaaacaaaagtacggtaaacagcttagttgggcagatctcttagtgttagcaggaaatgcagcgatagagtcaatgggcggaaaaacatttggatttggagggggtcgtgaagatatatggcatcctgaagaagatatttattggggtccagaagaagaaatgcta

SEQ ID NO: 210634 - DNA, 622 bp, Unknown
  Bacterial polypeptide expressing nucleotide sequence isolated from the Sargasso Sea
tttatacttgttggaaatatatctctagagtcaatgggtttcaaaacttttggttttggggccggaagagaagacatatgggagccagaagaggatatttattggggatctgaaaaggaatggcttggagtaaataggtatagtggaaaaagagatctagaaaatcccttaggagcatcacacatgggtttaatatatgttaatcctcaaggacctgatgctaatccagatccttatttagctgctcatgatattagagaaacttttggacgtatggcaatgaatgattatgagacggtagcacttgttgcaggtggacatacatttggaaaatcacatggtgctgcaccagagtcacataaaggtcctgaaccagaaggttcaaagattcaagatcaagcaactgggtggaaaagtaactacaaaagcggtttaggtgtagatactattagcagcggtattgagggtgcgtggacatcaaatccgattaaatgggatatgggatattttgataatttgtttggttatgattgggaattaactaaaagccctgcaggtgctcatcaatggaaacctaaaagaaatgggcatgatataaaaatgaccccagatgctcataata

SEQ ID NO: 210635 - DNA, 928 bp, Unknown
  Bacterial polypeptide expressing nucleotide sequence isolated from the Sargasso Sea
atgaatgactatgagacagtgcatttaactgctggtggacatacttttggtaaagcccatggcgcagctagcgaagatcataaaggacctgaacctgaagctgccgcgatggaggaaatgggttttggttggtccagtgattataaatcaggagttggaagggatacaatcaccagtggaattgaaggcgcttggactgcaaacccaacacaatgggacaatggttatttcgatttattattcaaatatgaatatgaattaaaacaaagtccagctggcgcacatcagtggcatccagttaatccatcggaagaggatatggcgccagatcctgaagatcctactaaaaaagtaaatacaattatgactacagcggatatggcaatgaaaatggatccagaatacaataaaatatccaaacatttccatgaaaaccccgaagaatttgcggatgcatttgccagagcatggttcaaattattgcatcgcgatatgggtcccaaaaaacgctatcttggccctgaggttcctagtgaagacttaatttggcaagatcctgtccctgaaggcagtacagattataatgttgaaagcgtgaaaaaacagatcaaagagagcgatctttcaatccaggaaatggttgaaactgcatgggcgagtgcttcaacctatcgccatacagatatgcgcggtggagcaaatggtgctcgtattcgattagctccgcaaaaagactgggtcgtaaataaaccagaacagcttcaaaaggttctaaatatccttgagccaatcgctgaacaaaataaggtctcagttgctgatgtaatagttttagctggaaacatcggcatagaaatggctaccggtaaatctttaacattttcacctggaagaggagatgcttctcaagatcaaaccgaatattgaa

SEQ ID NO: 210636 - DNA, 928 bp, Unknown
  Bacterial polypeptide expressing nucleotide sequence isolated from the Sargasso Sea
aaatctaaatgtccatttacaggtgttggaactcctccaaagcatcctacgggaaaaggcacatccaatagagattggtggcctaatagcttaaacttaaaaatattgagtcaacattcaagtttggtaaatcctatggataaaagatttaactacgctaaagaatttaagaaattaaattataaaaaactcaaaaaagatttaataaaactaatgacagactcgcaagaatggtggcctgcagattatggtcattatggtccgctatttataagattggcttggcacgcagcaggaacatatagaacagctgatggaagaggtggagcagggacaggcaaccaaaggtttgcgccattaaacagttggccagataatgtcaatttagataaagcaagactattgctttggccaattaagaaaaaatatggagacaaaatttcatgggctgacttgtttattttggttggtaatgtcgctttagactcaatgggctttaaaacctttggatttggagctggcagagaagacatttgggagccagaggatgatatttattggggatcagagaaagagtggcttggagtaaatagatacagtggaaaaagagatttagaacaaccactaggggcttcacatatgggtttaatttacgtcaatcctcaaggtccagatgcaaatcctgatccattattagcagcacatgatattagagaaacatttggaagaatggctatgaatgattacgaaactgcagcacttgttgctggaggacatacatttggaaaatctcacggagctgcaccagagtctcataaaggtccggagcccgaaggttccaaaattcatgaacagtcaactggatggaacagtaattacaaaagtggtaaaggaattgacacaataagcagtggaatagagggagcat

SEQ ID NO: 210637 - DNA, 934 bp, Unknown
  Bacterial polypeptide expressing nucleotide sequence isolated from the Sargasso Sea
aaatgggatatgggttatttggattgtttatacggccatgaatgggaactaacaaaaagcccagcaggtgcacatcaatggacgccaaagaaaaatggacaggagataaaaatggtaccagatgctcatgataaaagtgtatttcatccaccaatgatgcaaactacagatatatcaatgaaggttgatccaagttatggtccaattacaaaacatttccatgaaaacccaagagaatttcatgatgcatttgcaagagcatggtttaaacttactcatagagatatgggtccaagagcctgttatttaggtgctgacgttcctaaagaagaattaatttggcaggatccggtagataaaccaaaatataaattaaaatcaaaagatatcaaagacttaaaatcaaaaatatcaaaatcaaaaatatcaatttctgaattagtctctacagcttgggcctcagcatcaacttttagaggctctgataaaagaggtggagctaatggagcaagaataatgttagaaccccagaagagctggaaagttaataatccaacaaggctctcaaaaataatttctaaattagagaaaattaaaaataaatttgataataaaaagaaaacagtctcaatggcagatttaattgttttggctgggggtgttggagttgaaatggctgctaaaaaagctggtcataaaataaatgttccttttactcctggaagaggggacgctcgacaagaacaaactgatgttaattcatttggattactagagccccaagcagacggttttagaaactatttaaatggtgataaatcaattgtatctgctgaagaaaaattaattgataaagctcaattgatgggtcttaccgctccagaaatgactgtattagtcggaggaatgcgtgttttagacactaattttgata

SEQ ID NO: 210638 - DNA, 735 bp, Unknown
  Bacterial polypeptide expressing nucleotide sequence isolated from the Sargasso Sea
aacaggatggaacagcaattacaaaagtggcttgggagcagacacaataagtagcggtatagaaggtgcttggacgagcaatccaattaaatgggatatggggtattttgataacctgtttggatatgaatgggaactaactaaaagtcctgcaggcgctcatcaatggaaaccaaaacaaaatggacatgcaattgacatgacaccagacgcacacatcaaatcaaaaaagaattttccaatgatgcaaacaacagatttatcacttaaattagacccatcttacggccctatatctaaacattttcataacaatcataaagaatttgcagacgcatttgctagagcttggtttaaacttactcatcgagatatgggtccaagagcatgttatttaggacctgaaattccaaaagaagaattaatttggcaagatccaacaagcaaattaaaatataaattaaacaaaaaagacataaatttattaagtgcaaaaatagctaaatcgggattatcagtttcgcaattagtttctacagcttgggcatctgcatctacattcagaggttccgataaacgaggaggagcaaatggtgctagattaagattgttaccacaaaaaaattgggaagcaaacaatccaaaagaattatctaaagtattaaaggtatttgaaaaaattaaggataaatttgattcaaataaaaaaagtgtctcaatcgcagatttaataat

SEQ ID NO: 210639 - DNA, 460 bp, Unknown
  Bacterial polypeptide expressing nucleotide sequence isolated from the Sargasso Sea
aatgactaagccggctggcgccaaaggccagggcagcgcacaaatgggtgtagcccgcaataaccagttctggtggccggatcaactggatttatcaccgctgcgcgatcatgatgcgcgctctaatccttacggtgccaactttaattacgctgaagcctttagcaaactgaatttggcggcggttaaaaaagacattgatacgctgttaacccaatcgcaagactggtggccagctgactttggtaactatggtccgttctttatccgtatgacctggcacagcgccggcacttaccgcacgctggatggccgcggcggtgcagacggtggtcagcaacgctttgacccactgaacagctggccggataacggcaacctggataaagcccgccgtttattgtggccaattaagcaaaaatacggtgaagccttatcatgggcagatttaatggtgctg

SEQ ID NO: 210640 - DNA, 943 bp, Unknown
  Bacterial polypeptide expressing nucleotide sequence isolated from the Sargasso Sea
gatccaggcaaatatgtgggcgcagagcctgaggggtcaccgatagagcaaatggggtttggctggaagaatctttatcaatcaggtgttggggatgatactatcacaagtggtattgagggtgcctggacgagtaatccaacccagtgggataatggatattttgatttgcttctaggatatgactggactttggtgaaaagccctgcaggtgcgttccaatggcatccactggaagttaaagataaggatcttgcacccgcagcacatgacagttccaagcgggtcacgacaatgatgaccactgcagatatggcaatgagagaagacccttcttatcgcaaaatttctgagcatttttatgctaatccggaacaattttcagatgcatttgctcgtgcatggtttaaattgttgcatcgtgatatgggtcctaaatctcgttatttgggaccagaggtcccgaacgaagaattgatttggcaagaccctgtgccgttaggcagaactgattatgacattgaagctgtgaaacggaaaatcgcttcttcaaatttgacaattcagcagcttgttgaaaccgcatgggcaagcgcttctacatttagagaaactgataagagaggtggagcaaacggtgctcgtattcagttagcgccgcaaaaagattgggaggtgaataaaccaactcagttggatgcagtgcttaatgttcttcgtccaatagcagaggcgtcagaggcttcacttgccgacgtaatcgtaatcgctggcaacgtaggcttggaaaaggcaattggtaaatcaattcccttcaaaccaggtagaggtgatgcaacggaagaacaaacagatgcttcctcattcgaggttttagagcctatagcagatgctttcagaaactatcagaataaaaattatgcttataatccagcagaggtta

SEQ ID NO: 210641 - DNA, 847 bp, Unknown
  Bacterial polypeptide expressing nucleotide sequence isolated from the Sargasso Sea
tggaaaatcacatggcgctgcaccagaatcacataaaggtcctgagccagaaggttcaaaaattcaagaacaagccaccggatggaatagtaattataagtcgggtaaaggcgttgatacgattagtagtggcatagaaggtgcttggacaaataatccaataaaatgggatatgggttacttcgataatttatttggatatgaatgggaactaacaaaaagtccagctggagcacaccaatggaagccaaaaagaaatggccatgatattaaattaactcctgatgcgcacataaaatcaaagaaaaatttgccaatgatgcaaacaactgatttgtctttaaaaatggacccaatctatgggccaatttcaagaaatttttatgaaaatcctgacgaatttgctgatgcttttgcaagagcttggtttaaacttacacatcgtgacatgggtcctcgtgcttgctatctaggatcagatgttccaaaagaagaattaatttggcaagatccaattccaaaaacaaaatataggcttaaaaataaagatattaagattctaaaatatcaattattaaaatcaggcctgtctatttcccaattagtaacaacggcatgggcatctgcttcaacttttagaggctcagataaaagaggtggcgcaaatggagctagaattagactatcgccacaaaaaaattgggaggttaataaccccattgaattatctaaagttcttaaaacattaggtaaaattaagaaaaattttgataataaaaaaagatttgtttcagttgctgacttaattgttttaggaggttcagttgcaattaaaaagcagcgaaaa

SEQ ID NO: 210642 - DNA, 796 bp, Unknown
  Bacterial polypeptide expressing nucleotide sequence isolated from the Sargasso Sea
cccggtcagctacctattgaacttctgcacagcctttctccatcagcaaacccgctaggtgaggattttgattatcccgctgcgttcgcatctcttgatttagacgcggtaaaaaaagatattttggcactgctgaccacctcacaagatttctggccagcggattacggcaactatggccctcagatgattagaatggcgtggcactctgcgggttcataccgcgtattcgacgggcgtggagggtcggcgcaggggctacagcgctttgctcctctttactcttgggaagacaacggcaacatcgataagtcgatacgcctattacagcctatcaagctgaagtacggtgacaacatttcgtgggcagatttgattatgctaacgggcaatcttgcgctagagcagatgggtttcaaaaccttcggctttggtggcggacgcattgactgctgggaggctgatgacgccacctattggggcccagaaactgaaatggccactcaagacaagcgttggacaggtgagcctggtaccgaagactatgacctagagaatccgcttgctgcgtctcgtcagtcgcttatttatgttcatccagaaggcccctttggcaatatggatcctatttcgtcagcacaagaaattcgcattacctttggaagaatgggcatgaacgacgaagaaaccgttgcgcttattgcaggcggtcacgcgtttggtaaaagtcacggcggctcggataaatcgcatttaggcccagagccaagcggagcacctattgaaaaccaaggcc

SEQ ID NO: 210643 - DNA, 930 bp, Unknown
  Bacterial polypeptide expressing nucleotide sequence isolated from the Sargasso Sea
gttttgggcgaacaaccctcagtcattacaccaatcgacaatcttgatgtctgatcgcggtattccactttcatatcgccatgtgaatggttatagctctcatacgttgagtttctggaataacgcaggccaacgctattgggtgaaatggcactttaaaactaaccaaggtattaaaacgctaactagcgaagaagcggcaaagatgcctgcttatggcgctcagcaagacttggtcgaaagcattgataacggagaatttccatcgtggaccgtgaatgtgcagattatgactgaagaggaagcgcgtaattaccacattaacccgtttgatctaacgaaggtgtggcctcacagcgactttccattaattgaagtagggcagttggagttaaaccgtaatgttgataactactttgcagaaactgagcaagcagcgttcgcgccgagcaatttggtaccgggtattggtgcgtcgccagacaggatgcttcaagcgcgactaattggatatcaagatgcgcacagataccgcattggtgcaaactacaaccaaataccggtaaacgcgcctcgttgcccagtgcacaattatcaacgagatggagcctttgcgggaattaacccagcacttgcaggaagtggagccaacttctatccaaacaatcgcgcgcgagttggtgagccggctgaagcaccagaggttcaagagccgcctatgccgcttgagcaagacgcatggttagatatttacgataaccgtgacgaagataactactcacaggccggtgaccttttccgcattatgagtgaagatcaaaaacagcagctggttaacaacattgctgacggcttaagccaggcaacgaaggacgttcaagaagccatgtttgtgccatacgatttagccgacagcgattatggtactcg

SEQ ID NO: 210644 - DNA, 514 bp, Unknown
  Bacterial polypeptide expressing nucleotide sequence isolated from the Sargasso Sea
atgaaagaatttcaaactaaaaataattcagaattatctaaaaatggagaatgtccttttatgcatggaagttctactaaacctgaaacttcacctctaaaatggtggcctaaaagacttaatctagatatactgcatcaacatgatcaaaagtccaatccatattcaaatgattttgattatcgtgaggttgtgaaaactctagatttcaaaggtcttgaaaatgacatgcttgagcttatgactactccccaagattggtggcctgcagattggggtcattatggtgggttaatgattagaatggcttggcatgcagctgggacatacagagtcgctgatggacgtgggggtgctggaacgggaaatctaagatttgctcccttaaattcatggccagataatggaaatttagataaagctaggagattattatggccaattaaaaagaaatatggaaataaaattagttgggccgatctattcattttagcaggcaatattgcatacgaaa

SEQ ID NO: 210645 - DNA, 595 bp, Unknown
  Bacterial polypeptide expressing nucleotide sequence isolated from the Sargasso Sea
tatgagtgataatgacaacaaatgtccagttatacatggttctttaactagcaatagcaattctggaacttctaatagggactggtggccagatcagctagatctgaatatcctgcatcagcatgataaaaaatctgatccaatggatgaagactttgactatgcagaagaatttaaaaaacttgactatgattcactaaaaaaagatctaaatgatcttatgactgattcacaagattggtggcctgctgattacggtcattacggtcctttctttataagaatgacttggcatgctgctggtacttatagaattggagatggtcgaggtggaggaggaactggagcacaacgctttgctccgctaaatagttggcctgataacggaaatttggataaagcaagaaggcttctttggccaataaaacaaaaatatgggaaacaaattagttgggctgatcttttaattctagctggtaacgtcgcaattgaatcaatgggtggaaaaacctttgggtttggaggaggacgtcccgatatttgggctccagaagaagatattcattggggtgcagaaacagagtggcttactaat

SEQ ID NO: 210646 - DNA, 613 bp, Unknown
  Bacterial polypeptide expressing nucleotide sequence isolated from the Sargasso Sea
catgagcacagaattcagaaataaagatttcaaaaataaagaattaagcaaatgcccagtaacaggagcaggaacaactgctaagttttctgcaggtagaggtcagacaaatagagacttctggccaaacagtttgaatttaaagattttaagtcagcattctaatttgactaatccaatggataaaaaatttaattatgccaaagaatttaaaaaattaaattacaaagcactaaagaaagatttaacaaaattaatgacagactcgcaagaatggtggccagcagactatggtcattacggacctttttttattagacttgcttggcatgcagctggtacttatagaactggtgatggcagaggtggagctggaacaggtaatcaaaggtttgcaccattgaatgcttggccggacaatgtcaatttagataaagcaagattattactttggccaattaagcaaaagtacggaaaacaaatttcatgggctgatttattcattttggttggaaacgtcgccttagagtcaatgggttttaaaacttttggttttggagcaggaagagtagatatttgggaaccagaggatgatatttactggggatcttga

SEQ ID NO: 210647 - DNA, 864 bp, Unknown
  Bacterial polypeptide expressing nucleotide sequence isolated from the Sargasso Sea
ttattttagttggtaacgttgcactagactccatgggtttcaaaacttttggttttgggggtggtcgtgaagatatttgggaaccagaggaagatatttattggggatcagaaaaagaatggttaggcgtaaatagatacagcggaaaaagagatttagaacagccattaggagcctctcacatgggattaatttatgttaaccctcaaggtcctgatgcaaatcctgatccattattagcagcacatgatattagagaaacatttggtagaatggcaatgaatgattatgaaactgcagcattagttgcaggtggacacacattcggaaaatctcacggggcagctccagagtctcataaaggtccagaaccagaaggttcaaaaattcatgaacaagcaactggttggaatagtaattataaaagcggaaaaggagttgatactatcagctctggaatagaaggcgcttggacacaaaatcctattaagtgggatatgggatacttagattgtttatatggtcatgaatgggaactaaccaagagtcctgcaggtgcacatcaatggacaccgaaaaaaaatggtcaagaaattaaaatggttccagatgcacatgagagaggaaaaaaacatcctccaatgatgcaaactactgatatttcattaaaagttgatccaagttacgggccaataacaagacattttcataaaaatccaaaagaattccacgatgcttttgctagagcatggtttaagcttacgcacagagacatgggcccaagagcgtgttatttaggtccagatgtgccaaaagagcaattaattggcaagatccagtaccaaaacaaaaatacaaaataaa

SEQ ID NO: 210648 - DNA, 718 bp, Unknown
  Bacterial polypeptide expressing nucleotide sequence isolated from the Sargasso Sea
ctggaaaatcccttaggagcatcacacatgggtttaatttatgttaatcctcaaggacctgatgctaatccagatccttatttagctgctcatgatattagagaaacttttggacgtatggcaatgaacgattatgagacggtagcactcgttgcaggtggacacacatttggaaaatctcatggtgctgcaccagagtcacataaaggtcctgaaccagaaggttcaaagattcaagatcaatcaactggctggaatagtaactacaaaagtggtttaggtatagatactattagtagcggtatagagggtgcatggacttcaaacccgattaaatgggatatgggatattttgataatttatttggttatgattgggaattaactaaaagccctgcaggagctcatcaatggaaacctaaaaggaatgggcatgatatagaaatgaccccagatgctcatgataaatctaaaaaaaatcttccaatgatgcaaactactgacctttcattaaaattagatccaaaatatgggccaatttctaaacattttcatcaaaatccaaatgaatttgctgatgcctttgcaagagcttggttcaaacttactcatcgtgatatgggtccaaaagcaaattatcttggctctgatgttccaaaagaaaatttgatctggcaagatccaataccaaaaaataaatataaacttaaaaataaag

SEQ ID NO: 210649 - DNA, 591 bp, Unknown
  Bacterial polypeptide expressing nucleotide sequence isolated from the Sargasso Sea
taaaggcgaaagggaattagataatcctcttgctgcagttcaaatgggtctaatatatgtgaatccacagggtccagacggcaatcctgatcctttagccagtgcccatgatataagagaaacgtttggaagaatggcaatgaacgatgaagaaacagtggcattagttgcaggaggtcatactttcggtaaagctcatggtgcaggtgcagaaactcatgttcaatctgagcctgaaagtgcgcctttagaagaaatgggttttggctggacaagcacatacggttcaggagttggtagcgatactatcacaagcggtattgagggtgcatggactgcgaatccaacacaatgggataatggatactttgatttactatttggttatgattgggagttaacaaaaagtcctgctggtgcacatatttggcacgcagttggtcaaaaagaggaggatatggcacctgatgcagaagactcatcaataaaagtacctactatgatgacaactgcagatatggcgttaagagaagatccaagttataacaaaatctcaaaaagatttcatgaaaatcctgatgagtttgctga

SEQ ID NO: 210650 - DNA, 820 bp, Unknown
  Bacterial polypeptide expressing nucleotide sequence isolated from the Sargasso Sea
aaagatattgtatttctaaaaaatacaatattaggctctgggttatcaataagtgaattagtctctactgcctgggcttcagctagtacctttagaggttcagataatagaggtggtgctaatggatcaagaattagacttcaacctcaaaatgcctgggacgttaataaaccagatcaattaaataaagtattaaataccttagaaaaaattcgaacggattttaatttacaatctaaaacaaagaaagtatctatggcagatttgatagttcttggggggtgcgcagcaattgaagacgctgcaagaaaaactggtaatattataaatgtcccctttagtcctggacgaatggatgctactcaagatcaaaccgatattgagagtgttggggttcttgagccaatagccgatggttttagaaattatttaaaggagaagtatattttttctactgaagaattattggtggataaagctcaattattaaaattaacagcaccagaaatgacagttcttattggaggcatgcgagtcttaaacacaaattatgataattctaaacatggtgtattcaccaatcgttctggattattaactaatgattattttattaacctcttagatatgagtacggaatggagtccaaaagaaggtacccaagaattttttgaaggaagagataggaagactggaggattaaaatggactgcaaccagagctgatttaatttttggatcaaactctgaattaagagctatatcagaggtatatgctagcgatgatgcttccaaaaaatttgttagtgattttgttagag

SEQ ID NO: 210651 - DNA, 821 bp, Unknown
  Bacterial polypeptide expressing nucleotide sequence isolated from the Sargasso Sea
ttaatctggcaagatccaataccaaaaaataaatataaacttaaaaataaagatattgagttactaaagaaaaaaatatctaaatcaggtttatcagtttctcagctagttacgacagcttgggcgtctgcatcaacttttagaggatcagataaaagaggaggtgctaatggagcgagaatagctcttgaacctcaaaaagactggaaagttaataacccttcaaaattgtctgccgtaatcagaatttttagtaaaattaaaaaaagttttgattcaaaaaataaatcggtttcattagcagacttaatagttttgggaggatcagttggtattgaaaatgctgctaaaaagagtggtaaaaaaattaaagttccattcaaagcaggaagaggtgatgcaagacaagatcaaacagaccaaaattcatttaatcttcttgaacccatagcagacggttttcgaaactatattaagctgcatgatgaagggtataccaatggaaaaggtatccctactaattcagctgaagaaatgttgatagataaagcccaacttcttggattaactggtccagaaatgacagttttaattggaggaatgagagtattaaatactaactacgatggctcagattatggtgtatttacaaagaaacccggatcattaactaatgatttctttgtcaatctattagatatgaaaactacttggagagaagtagataaagaagaacagttttttgagggaatagatagaaaaacaaaaagagtaaaatggagagcgacgcgcgcggatttatatttggatctaattctcaa

SEQ ID NO: 210652 - DNA, 805 bp, Unknown
  Bacterial polypeptide expressing nucleotide sequence isolated from the Sargasso Sea
atagagtcggtgaaggcgcagataaaagatagtggtttaaccatacaagagatggtggagactgcttgggcgagcgcctcgacctatcgtggcactgacatgagaggcggagccaatggagcgaggattcgtttggagccgcaaagaaactgggaagtgaacaagccagaacaactcaacaaagtgctcgctgtttacgagagcatttccgcttcatctggtgcgtcagttgctgacgtaattgtgttgggcggcggggtagggatcgagcaagcttcgggatcagtcgtaccgttcaaacctggtcgaggagactcaagccaagaacagactgacgttgaatcgtttgcggtactagagcctgtgtctgatggcttcaggaactatcaccaacaaagtgctggaataccatccgaggagatgatgttggataaggcccatttgttgagtctcaccgcccctgagatgaccgttcttcttggcgggatgagatctttgggtatcagtcacgacgatcgaggacttttcggaatagagcaagggaaattaaccaacgagtggttcacgaagctgctcgatatgtccgtcaaatggtctccagatggcactggcaacagttttgatggggtcgaccgagtttctggtgaaacagtcaggtcagcaacaagggttgacctcgcctttggatctaattcgcaattgcgtgccttagcggaggtttacgcaagcgacgatggtaaagataagttcgttaaggacttcatctcggcctggactaaggtgatggagaatgacctggtttaga

SEQ ID NO: 210653 - DNA, 807 bp, Unknown
  Bacterial polypeptide expressing nucleotide sequence isolated from the Sargasso Sea
tttctgatttggtatctaccgcatgggcatctgcctcaacttatagaggatctgataaaagaggtggagcaaatggtgcgagaatattattagagcctcaaaaaagttggaaggttaataatccaaaaaaattaacaaaaattactaaagctctaaaaaaaattaaaaaatcatttgatacaaaaaataaatctgtatctatggctgacctgattgtattaggagggaatgtcggaatagaaattgctgcaaaaaaatcaggtcataaagttaaagttccattctcaccaggaagaggagatgcaagacaagaccaaactgatattcattcatttggattgttagaaccacaagcagacggtttcagaaattatcttagaactggaaaaacaaacgtttctgcagaagaaaaactaattgataaagctcagttgatgggcctaacagctccagaaatgacagttctagttggtggtatgagagttttaaatacgaattatgataattctaaaaatggtgtttttaccaataaacctggcactctgacaaatgatttctttgtaaatcttcttgatatgggaacaacatggaaagaaactgataaatctgaacaaagttttgttggaaaagatagaaagactatgaaaacaagatggaaaggatcaagaatagatcttatttttggctcaaattcacagttaagagcaatatccgaggtatatgccagcaaagactcacctggtaagtttattaaagactttgtatcggcatgggtcaaagttatgaatgcagataggttgatttaag

SEQ ID NO: 210654 - DNA, 742 bp, Unknown
  Bacterial polypeptide expressing nucleotide sequence isolated from the Sargasso Sea
aattaaaaataaagaaattaagatacttaaggcaaagatattaaaatcaggactatctatttctcagttagtatctacagcttgggcatcagcttctactttccgcggctcagataaaagaggtggagctaatggagcaagaataagattagcgcctcaaaaagattgggaagttaataatccatcacaattatctaaagtaattaaaatcttagaaaaaataaaaaaaagctttgacaacaaaaaaaaagttgtttcattggctgacttaatagttttgggaggatgtgttgcaatagaaaaagctgcaaaaaaagctggctacaatgtaaatgttccatttttaccaggcagaggggacgcatcacaggaacagacagatgaatattcttttggattacttgaaccaaaagctgatggatttagaaattacattataaatagatcaaatggatcttcatcaaaacctactgtatcagcagaagaaatgctagttgatcgagcacaattgatgaagcttacagctcctgaaatggtagtgcttttaggtggtatgagggtactaaatacaaattttgataaatcaaataatggagtttttacaaaaaaaccagaaacgttaacaaatgattttttcgtaaatctattagatatgaaaactacttggaaagaagtagataaaagtgaagaattgtttcaaggtaaaaatcgtactacaaataaaattaaatggacagcttca

SEQ ID NO: 210655 - DNA, 511 bp, Unknown
  Bacterial polypeptide expressing nucleotide sequence isolated from the Sargasso Sea
ttatttactccaggtagaggagatgcgacccaagaacaaactgatgtagactcttttggtgttttagagcctttttctgatggtttcagaaactatcacaataaagactttactgtaaactcggaaaatatgttacttgataaagcacaacttcttggattaacagctacagaaatgacagttttagtaggtggtatgcgatcacttggtatcagtgccgatggtcatggagtttttacagatgagcctggtaaattaagtaatgacttttttgtgaatttattagatatgaatgttaagtgggaagcaactggcagaaatacttatgaaggaactgatcgttcatcaggtgagaagttaagaactgctacaagagttgaccttgtatttggatctaattctcaattaagagctttagcagaagtatatgcatgtgatgattcaaaggacaagtttcttaatgattttgtagctgcatggaataaagtaatgaatgttgatcgtttttgat

SEQ ID NO: 210656 - DNA, 958 bp, Unknown
  Bacterial polypeptide expressing nucleotide sequence isolated from the Sargasso Sea
aaaggctttgacactataagcagtggtatcgaaggagcttggactcaatttccaacgaaatgggatatgggttattttgattgtttatttagccatgaatgggaacttagtaaaagtcctgcaggcgctcatcagtggactccaaaaaaaaacggtcaaagaataaaaatggttcctgatgcacatgataaaaataaaactcatcccccaatgatgcagacaacagatttatcattaagaatggacaaaaattatggacctatatcaaaatatttttataataacccaaatgagtttgctgatgcttttgcaagagcttggtttaagttaacacacagagatatgggaccaagagcttgttacttaggaagtgaggttcctaaagaagaacttatttggcaagacccaatagacaaaccaaaatataaacttaaatcagtagatataaaaaatttaaaatctaaagttctaaaatctaaaataactgtttcggatctagtttctacagcttgggcttctgcctcaacatatagaggttccgataaaagaggtggtgcaaatggtgcaagaatattattagagccacaaaagagctggaaagttaataatccaaaacaacttagaaaagttattaaatctcttcaaaaaattaagaaatcatttgatacaaaaaataaatcagtatcaatggcagaccttattgtattaggtggaaatgttggaatagaaattgctgcaaaaagagcaggtcataaagttaatgttccatttttacctggtagaggagatgcaagacaaaaccaaactgatattcactcatttggattattagaaccacaagccgatggtttcagaaattatcaaaaaaatgtaaaatcaaatgtttctgcagaggagaaattagtcgataaagctcaattaatgcaactaacagcacctgaaatgacagttcttattg

SEQ ID NO: 210657 - DNA, 594 bp, Unknown
  Bacterial polypeptide expressing nucleotide sequence isolated from the Sargasso Sea
aatggatgcagaaagtaaatgccctgtaatgcacggagcaattacaaaaaatatgggagaaggtacatcaaaccgcgaatggtggcctaatcaacttaacttaaacatacttcatcaacatgatcgtaaatcagatccaatggaaactggatttaactatcgtgaagagttcaaaaaattagattatgctgcattaaaaaaagacctccataatttgatgactgattctcaagattggtggccagctgattatggtcattatggtggtttctttattcgtatgacatggcatgctgctggaacttatagaactggtgatggccgtggtggtggtggaacaggagctcaacgttttgccccattaaacagttggccggataatggtaacttagataaggcaagaagacttctttggccaataaagaaaaaatatggaaataaaattagttgggctgatttatttattttaacaggtaacgttgcaattgaatctatgggaggtaaaacttttggatttagtggtgggcgtcctgacatttgggcaccagaagaagatatttactggggtgtagaagaagaatggctacaaaataa

SEQ ID NO: 210658 - DNA, 869 bp, Unknown
  Bacterial polypeptide expressing nucleotide sequence isolated from the Sargasso Sea
atcacataaaggaccggagccagagggctctagaattcaagaccaatctacaggatggaatagtgattacaaaagtggtcttggagctgacacaataagtagtggtattgagggtgcatggacatcaaacccaattaaatgggatatgggttatttcgataacctttttggttatgaatgggaattaacaaaaagtccagcgggtgcacatcaatggaagccagtaaaaaatggacatgctcctgaaatgactccagacgcccatataaaaggaaagaaaaatttaccaatgatgcaaacaacagacttatcaatgagatttgaccctgaatttggcagaatttccagacattttcataataatccggatgagtttgctgatgcttttgcgcgtgcatggtttaagcttacacacagagatatgggccctaaaataaactacttaggtaatgaagttccaaaagaagatttaatttggcaagacccaatttcaaagaacaaatataaacttaaaaacacagatattgaatatttaaaaagtaaaatttctaagtctggactttcgatatctcaattagtttctacagcttgggcttcagcttcaacctttagagcatcagataaaagaggtggtgcaaatggtgctagagttactcttgcacctcaaaaagactggaaagtaaataatccatctcaactttcaaaagttattaaactatatgaaaaaatacagaaggcttttaactctaaaaagaaacatgtttctttagctgatttaataattttaggaggtaacgtaggtgtagaaaaagcagcagccgcagctggaaaaaaaattaaattaactttttctcctggaagaggtgatg

SEQ ID NO: 210659 - DNA, 738 bp, Unknown
  Bacterial polypeptide expressing nucleotide sequence isolated from the Sargasso Sea
agcagaagatcatgttcaatcagagccagaaggagctccattagaggaaatgggatttggttggacaagcacatacgcatctggagtaggtagcgacacaatcactagtggcattgaaggagcgtggactgcaaatcctactcagtgggacaatggatattttgatttattgtttggttatgaatgggaattaactaaaagtcctgcaggagctcatatttggcatgctgttggtcaaactgaagaagatatggctccggatgctgaagatgcttcaaagaaagtcccaacaatgatgacaactgctgatatggctttaagagaagatccaagttataagaaaatttcaaaaagatttcatgaaaatcctgatgaatttgcagatgcttttgcaagagcatggttcaaacttcttcacagagatatgggtccaaagtcgcgatacatgggtccagaagttcctggtgaggaattaatatggcaggatccagttcctttaggtaattctgattacgatattgataaagtaaaagaaattattagtaagtcaggtttgtcaatacaggaaatggtcgagactgcttgggcaagtgcatctacatatagaggctctgacatgcgaggaggagctaatggttcaagaattagattagctccgcaaaaagattgggaagccaataatccaagccaacttagtaaagttttggatatatatgaatcaatttcaaatgaaacagg

SEQ ID NO: 210660 - DNA, 770 bp, Unknown
  Bacterial polypeptide expressing nucleotide sequence isolated from the Sargasso Sea
agatttatttattttagttggaaacgtagcattagactcaatgggttttaaaacttttggttttggtgcaggtagagatgatatctgggaacctgaggatgacatttattggggctcagaaaaggagatgctaggtgttgagagatacagtggaaaaagagatttagagcagccattaggtgcttctcacatgggcttgatttatgtaaatccacaaggtccagacgcaaatccagatccactactagcagcacatgacatcagagagacatttggaagaatggctatgaacgattatgaaacagcagctttagtcgctggaggacatacgttcggaaaatctcacggagcagcatcagagtcttacaaaggtccagatccagaagcttcaaaacttcaagatcagtctactgggtggaatagtggatataaatctggaaaaggtgtcgacacaataagcagcggtatcgaaggtgcttggactcaaaatcctactaagtgggatatgggttatttagattgtttatacggtcatgattgggaattaacaaaaagtccagctggagctcatcaatggactccaaagaaaaatggtcaaaaaataaaaatggttccggacgcgcaccaaaaaggtgtgctacatccaccaatgatgcaaacaacagatatatcaatgaaagttgacccaagctatggaccaattacaaagcattttcatcaaaaccctaaagagtttcatgatgcatttgctagggcgtggtttaagttaa

SEQ ID NO: 210661 - DNA, 649 bp, Unknown
  Bacterial polypeptide expressing nucleotide sequence isolated from the Sargasso Sea
tacaaaaaaaagaatagtttcacttgcagatcttatagttttaggtggaagtgttggtatagaaaaagctgcaaaaaaagctggttacaaaattaatgttccatttatagcgggtcgcggtgatgcttcacaagctcagacagatgaattctcttttggacttcttgaaccaaaagcagatggatttagaaattatactgtaaaaaaaacaaatggatctagtaaaaattcaatttccgatgaagaaatgttaattgataaagctcaattaatgaaacttactgcacctgaaatgaccgttttagttggtggtatgaggatgcttaatacaaatttcgatggttctaactacggagtatttacaaaaaaaagggaaactttaacaaatgatttctttgtcaaccttttagatatgaatactacatggaaagagaccgataaagatgaaacaacttttgagggcaaagatcgtagaacaaataaagttatgtggaaagctacacgtgctgatcttatttttggctcaaactcacaattaagagcattatcagaagtgtatgcttgcgaggactcgatgccaaaatttattaacgattttgtttcagcttggacgaaagtcatgaatcttgatcgatttgatgttcaataa

SEQ ID NO: 210662 - DNA, 793 bp, Unknown
  Bacterial polypeptide expressing nucleotide sequence isolated from the Sargasso Sea
gaagtgggataacggatactttgatttattatttggttatgaatgggaattaacaaaaagccctgctggagcacatatatggcatgcaattggtcaaacagaagaagatatggcacctgatgctgaagatgcttcaaaaaaagtacctactatgatgacaactgccgatatggctttaagggttgatcctgcttataacaaaatatctaaaaggtttcatgaaaaccctgatgagtttgcagatgcctttgctagagcatggtttaagcttcttcatagagatatgggaccaaaatcaagatacatgggtcctgaagtacctcaagaagagttaatctggcaagaccctgttcctgaaggcaatagcaaatatgatattgatgaagttaaaaaaatgatttctgaatcaggtttatcaattcaagaaatggtagagactgcatgggctagtgcatctacatatagaggatctgatatgcgaggtggagctaatggagcaagaattagattagaacctcaaaaaaattgggaagctaataatccaaatcagttaaataaaattttggatatctatgaatcaatttcaagcaaaacaggagcatccatggctgatgtaattgtattagcaggaaatgtagctattgaaaaagcttctggtgttatggttcctttcactcctggcagaggggatgcaactcaagatcaaactgatgtcgaatcttttgaagttttagaacctaagtctgacgcatttaggaattatcatgctaaaggagttaatattgctcccaga

SEQ ID NO: 210663 - DNA, 709 bp, Unknown
  Bacterial polypeptide expressing nucleotide sequence isolated from the Sargasso Sea
atgagcagagaaacaaatagcgatataagtaaatgtccttttcatggtgaaggaatacctcaaaaacatccttctggaaaaggccaaacaaatagagattggtggccaaatagtctgaatcttaaaattttaagtcaacattcatctatggtcaatcctatggataaaaaatttaactataaaaaagaattcaaaaaacttaatttcaaagctcttaaaaaagatcttcacaagttaatgacgcagtctcaaaattggtggccagcagactacggtcactacggaccactatttattcgtcttgcttggcatgctgcgggaacttatagaactggagatggtagaggtggcgcaggaactggaaaccagagatttgcaccaataaatagttggccagacaacgtaaacttagataaggcaagacttcttctttggccaattaaaaagaaatatggaaaaagaatttcatgggcagatttatttatacttgttggtaatgtcgctctagaatctatgggattcaaaacatttggttttggtggtggaagagaagatatttgggaaccagaagaagatatttattggggttctgaaaaagagtggttggctaacgacagatataattctaaaagggaactagaaaatccacttggagcagttcaaatgggtttaatctatgtaaatccacagggaccagatggaaatcctg

SEQ ID NO: 210664 - DNA, 919 bp, Unknown
  Bacterial polypeptide expressing nucleotide sequence isolated from the Sargasso Sea
ggtattgaaggcgcatggacacaaaatccaattaaatggacatggggatatttagactgtctttatgggcacgagtgggaactaaccaaaagcccagcaggagcgcatcaatggacaccaaagaaaaatggacaagagataaaaatggtaccagatgcacatgataaaaacactcttcatcccccaatgatgcaaactacagatatttcattaaaagttgatcctagttatggtcccataacaagacattttcataaaaatccaagagaatttcacgatgcatttgcaagagcatggtttaaactaactcatagagatatgggtcctagagcttgttatctaggaggggacgttccaaaagaggaattaatttggcaagatcctatagataaaccgaaatataaattaaaatctaaggatattaaagacttaaaatcaaaagttttaaaatcaaaaatatctatttctgatttagtttccactgcttgggcttctgcctcaacttttagaggttctgacaaaagaggtggtgctaatggggcaagagtaatgttagaaccccaaaaaaactggaaagttaataatccaattaggctatcaaaagttatttctaatctaaagaaaattaaaaaaaattttgacagtaaaaagaagagtgtttcaatggccgatctaattgttttagctggaaatgttggagttgagatggctgcaaaaaaggctgggcacaaagccattgttcctttcacacccggcagaggagatgcaagacaagatcaaactgatgttaactcatttggtttactggaacctcaagcagatggttttagaaattatttggatggcggtgagtcaaatgtttcagcagaagaaaaattaatcgataaggcacagttaatgggtcttacaagtccagaaa

SEQ ID NO: 210665 - DNA, 817 bp, Unknown
  Bacterial polypeptide expressing nucleotide sequence isolated from the Sargasso Sea
tttgcaagagcatggttcaagcttactcatcgtgatatgggtccaaaagcaaattatcttggttctgatgttccaaaagaaaatttaatctggcaagatccaataccaaaaaataaatataaacttaaaattaaagatattgagttactaaagaaaaaaatatctaaatctggtttatctgtttctcagctagttacgactgcatgggcgtctgcatcaacttttagagggtcagataaaagaggaggcgctaatggagccagaatagcactcgaacctcaaaaagactggaaagttaataatccttcaaaattgtctgccgtaatcagaatttttaataaaattaaaaaaggttttgattcaaaaaacaaatcagtttcattagcagacctaatagttttaggaggatcagttggtattgaaaatgctgctaaaaagagtggcaaaaaaattaaagttccattcaaagcaggaagaggcgacgcaaaacaagatcaaacagacaaaaattcatttaatcttcttgaacccatagcagacggttttagaaattatattaagctgcatgctaaaggatataccaatggaaaaggcatccctactaattcagctgaagaaatgttgatagataaagcccaacttcttggattaactggtccagaaatgacagttttaattggaggaatgagagtattaaatactaactatgatggttcagattacggtgtatttacaaaaaaacctggatcattaactaatgatttctttgttaatttattagatatgaaaactacttggagagaagtagataaaggag

SEQ ID NO: 210666 - DNA, 859 bp, Unknown
  Bacterial polypeptide expressing nucleotide sequence isolated from the Sargasso Sea
aagaattcaggatcagtcaactggatggaatagtggatataaatctggaaagggtattgatacaatcagtagcggtatagaaggtgcttggacacaaaacccaattaaatgggatatgggttatttagattgtctctatgatcatgattgggagctcacaaaaagtcctgccggtgctcatcagtggacacctaagaaaaatggacaaaagataaaaatggtacctgacgcacataataaaaacgttcttcatcctccaatgatgcaaacaacagatatttcaatgaaagtcgacccaagttatggacctatcacaaagcattttcataagaatccaaaagaatttcatgatgcatttgctagagcttggtttaaattaactcatagagatatgggtccaagagtttgttatcttggcagcgatgttccgaaagagcaattaatttggcaggatccaattgataaaccaaaatataaattaaaatctaaagatattaaatttctaaaatcaaaaatatcaaaatcaaaaatatcaatttctgaattggtatctactgcttgggcctcagcttctacttttagaggttcagataaaagaggtggagctaatggtgcaagaatattgctagagcctcaaaaaagttggaaagtaaataatccaattaagcttacaaaaattatatcaattttaaagaaaatcaaaaaaaaatttgatagtaaaatgaaaactgtttcaatggctgatttgattgttttagctggaggtgtaggagttgaaatggccgccaaaaaagctggttacaaagtaaaagttcctttttcgccaggaagaggagatgcaagacaggaccagacggat

SEQ ID NO: 210667 - DNA, 778 bp, Unknown
  Bacterial polypeptide expressing nucleotide sequence isolated from the Sargasso Sea
catgagcagtgaaattaataatgaaataaataaatgcccattccacggcgaaggcataccacaaaaacataattctggaaaaggacaaaccaatagagattggtggccaaatagtcttaatttgaaaatattaagccaacattcctcaatggttaatccaatggataaaaaatttgactacaaaaaagaatttaaaaaacttaattttaagggccttaaaaaagatcttaataaactaatgacacaatcacaaagttggtggccagcagactacggtcactacggtcctttatttattcgtcttgcttggcacgctgctggaacatatagaactggcgatggcagaggtggagctggaacaggaaatcaaagatttgcgcctattaacagctggcctgataatgtaaatttagacaaagcaagattacttctttggccaatcaagaagaaatatggaaaaagaatttcatgggcagatttatttatattagttggaaatgttgcactcgaatcaatgggctttaaaacttatggttttggaggaggaagagaagacatttgggaaccagaagaggatatttattggggttctgaaaaagaatggcttgctaataatagatataactcgaaaagagagctagaaaatccacttggtgctgtccaaatgggtttaatatatgtgaatcctcaaggaccagatggaaatcctgatcctttgcttgcagctagagatattagagaaacatttggtagaatggctatgaatgattatgaaata

SEQ ID NO: 210668 - DNA, 895 bp, Unknown
  Bacterial polypeptide expressing nucleotide sequence isolated from the Sargasso Sea
acaaactaatcctatcaagtgggataatggatattttgatcttcttttaacctatgaatgggaacttactaaaagtcctgctggagcaaacatatggcatgcagtaaatcaaaaagatgaacacaaagctcctgatgcagaagacgcttcaaaacgagttccaacaatgatgacaactgctgacatggcgatgcgtgaagatccatcataccgaaaaatttcagaaagatttcataaaaatcctgatgaatttcaagacgcatttgctcgtgcttggtttaaacttttacaccgtgatatgggaccaaaaactcgttacatgggccctgaagtgccagaagaagaattaatttggcaagatccaattcctaaaggaaatgcagattataatattgattccgctaaggcaaaaattcttgaaagcggactatctattcaagaaatgatagaaacagcttgggctagtgcatctacttttcgtggaacagatatgagaggcggtgcaaatggtggccgtatacgtcttgagcctcaaaaaaattgggaggttaataaaccagatcaactttcaaaagtattaagtatatttgaaggtatagcatcagacatcggagccagtgttgcagacataatagttttagctggaaatgtaggaatagaaaaagcatctggagtgtccgtcccttttactcctggtcgcggagatgctacacaagaaaataccgatatcgaatcttttaatgttcttgaacctgaggcggacggttttagaaattatttaaagaaaaattatacagtaacaccagaagagttaatgttagacaaagctcacctattaggtcttactgcacctgagatgacagtattagttggaggaatgcgctcacttggtatt

SEQ ID NO: 210669 - DNA, 463 bp, Unknown
  Bacterial polypeptide expressing nucleotide sequence isolated from the Sargasso Sea
atgaataagccagttaaatgtccggtaatgcacggttccgtaacgaggaatggagaaagtggtacatcaaatagagattggtggccaaatcagctgaatattaatatactacaccagcatggtgaaaagtcgaatcctctgggtaaaaattttaactacagagaagaatttgaaaaattggattactttgccttgaaaaaggacctgctgaatttaatgaccgactctcaggagtggtggccagcggactacggacattatggtcctttctttattagaatgacgtggcatgcagcgggcacttacagaagtggagacggtagaggcggggggggaacgggagcacagcgtttcgcacctctaaatagttggccagacaatggaaatcttgacaaagcgcgaaggttgctctggccaataaaacggaagtatggtcaaaaaatctcgtgggccgatctcttaa

SEQ ID NO: 210670 - DNA, 775 bp, Unknown
  Bacterial polypeptide expressing nucleotide sequence isolated from the Sargasso Sea
ttatcaattcaagaaatggttgagactgcttgggctagtgcttcaacgtatcgtcacacagatatgcgtggtggtgcgaatggagcaagaataagattagagcctcaaaaaaattgggaggttaacaagcctgatcaattatctaaagttcttgataaactagaaagtattgcttcagaaactggtgcaagtgttgcagatgttattgttcttgcaggtaatgttgggatagaaaaagcgtctggagaacaagttccttttacaccaggaagaggtgatgcaactcaagaacatacagatgttgaatcatttgcagtgctcgaaccagaagcagatggttttagaaactatctaaagaaaaattatacggtaacacctgaggagtttatgcttgatagatcgcacttacttggacttactgctcctgaaatgaccgttttagttggtggaatgcgtgctatgggtatcagctcagatgatcgtggagttttttctgataagggaacattaaacaatagtttctttacaacccttctagatatgacagttaaatgggaagctacaggaagtaattcttatcaagcgacagatcgccaatcaggtgaaaaagtaagaagagcttcaagagctgatcttgtttttggatccaactcacaacttagagctttagcagaagtctatgctcaatcagataatcatgaaaaattcttagctgactttatcagcgcatggaacaaagtaatgaatgctgatcgttttgatttagaaaaataaa

SEQ ID NO: 210671 - DNA, 846 bp, Unknown
  Bacterial polypeptide expressing nucleotide sequence isolated from the Sargasso Sea
attagttgggcagacttaatcattcttactggtaatgttgctatcgaatctatgggtggaaaagtatttggctttggtggtggtagagatgatatctgggcgccagaaaaagatattttttggggcaaggaaaccgaatggctaacgaacgaaagatataccggcgagcgtgaattggatcagcctctagctgctgtacaaatgggcttgatttatgtaaatccacaaggcccagatggaaatccagacccgttaaaaagtgcagtagatattagagaaacctttaaaagaatggcgatgaacgattatgaaaccgttgcattaactgcgggtgggcatacttttggtaaagcccatggtgcagctagcgaagactataaaggacctgaacctgaagctgccgcgattgaagagatgggttttggttggactagcgatcatggatcgggagttggaagagatacaattaccagcggaattgaaggtgcttggacagcaaacccaatacaatgggataatggttattttgatttattgtttaaatatgaatacgaattaaagcaaagtccagcaggtgcacaccagtggcaccctgtaaacccttctgaagatgatatggcacctgaccctgaagatcctactaaaaaagtaaatacaattatgactacagcggatatggcgatgaaaatggatccagaatacaataagatatccaagcatttccatgaaaatcctgaagaatttgcggatgcatttgcaagggcttggttcaaattattacatcgcgatatgggtcctaaaaaacgctatctcggccctgaggttcctagcgaagaattaattggc

SEQ ID NO: 210672 - DNA, 792 bp, Unknown
  Bacterial polypeptide expressing nucleotide sequence isolated from the Sargasso Sea
gattaccgaatcaggttatcattccaagaaatggtgagacggcatgggcaagcgcatcaacttttagaggttctgatatgcggggtggtgcaaatggtgcaaggattagattagctccacaaaaagattgggaagcaaataatcctactcaattaaataaaattcttgatgtataccaaaccatttcaaatgattcaggggcttcaatagcagatatcattattttagctggtaatgttgcaatagaaatggcttcagggattgaagtgcctttcacaccaggaaggggtgatgcctctcaggaacaaactgatattgaatcatttgaagttttagaacctaagtcagatgcatttagaaattttcatgctcaaggtgtaaatactgctcctgaagaaattatgttagacaaagcacagcttttaggacttacagcgcctgagatgacagttctgatgggtgggatgagatctttaggaataagttcaaatggacatggaatatttacagaagattctaataaactgagtaataattattttaaaaccttacttgatatgtctgttcaatggaaaccaaatggaacaggcaattcctatgaagcatttgatagaaattctggtgagaaagttagaacggcttcaaggtctgatttagtatttggttcaaattctcaattaagagcaattgtagaggtttatgctgaagatgattcaagtgagaagtttaatagagatttcgttaatgcatggaataaagtgatgaacgcagatagatttgatgttcagtaat

SEQ ID NO: 210673 - DNA, 772 bp, Unknown
  Bacterial polypeptide expressing nucleotide sequence isolated from the Sargasso Sea
caaacaacagatatatcaaatgaaagttgatccaagttatggacctataacaaagcattttcatcaaaaccctaaggagtttcatgatgcattcgctagagcttggtttaaattaactcatagagatatgggccctagagtttgttatcttggcagcgatgttccaaaagaaaaattaatttggcaagatcctattgataaaccaaaatacaaacttaaatcaaaagatataaaagatttaaaacataaaatttctaagtcaaaaatatcaatttcagatctagtctccacagcatgggcatcagcgtcaacatttagaggatcagataaaagaggtggtgcaaatggtgcaagaataatgctagaacctcaaaaaaactggaaagttaacaatccaaagaaactatcaacagtaattaaggctttagataaagttaaaagcaaatttgatagcaaaaataaaagtgtatctatggctgatttaattgtcttagcgggtggtgttggcatcgaaatggctgcaaaaaaagctggctataaagttaatgttccgttttcaggtggcagaggagatgccagacaagatcagaccgatgttaattcttttggccttcttgagcctcaagctgacggttttagaaattatcttaatggggaggcttcaaatgtttccgctgaggaaaaattagttgataaggctcaattaattggtctaactgcacctgaaatgactgtgcttataggtggaatgcgtgttttaaaaacaaacttc

SEQ ID NO: 210674 - DNA, 763 bp, Unknown
  Bacterial polypeptide expressing nucleotide sequence isolated from the Sargasso Sea
tatgagtaaagagtcatttaaagagcagtcaaaatgtccatttacagggaaaggaacaccctctaaacactcaactggaaaaggaacatcaaatagagattggtggcccaatagtttaaatttaaaaattttaagccaacattcttcattagttgatcctatggataagaaatttaattattcaaaggaatttaaaaaacttaatcttaaggcattaaaaaaagatttaaataaattaatgactaaatctcaagactggtggcctgctgattatggtcactatggtccattgtttataaggttagcgtggcatgctgctggaacatatagaacaggagatggacgtggtggcgcagggacaggaaatcaacgttttgcacctttaaacagttggccagacaatgttaatttagataaagcaagattgttactttggccgataaaaaagaagtatggaaagaaaatttcttgggcagatttatttattttagttggaaatgtagccttagagtctatgggatttaaaacttttggttttggaggtggaagagaagatatttgggaaccagaagaagatatttactggggatcagaaaaagaatggcttggagttaatcgttatagcggtaaaagggaacttgaaaatcctttgggggcagcgcacatgggtttaatttatgtaaatcctccaggccctgacgcttatccagatcctcttttggctgcaacgatattagagaaacttttggtcgtatgggcatga

SEQ ID NO: 210675 - DNA, 133 bp, Unknown
  Bacterial polypeptide expressing nucleotide sequence isolated from the Sargasso Sea
aggaggaactggcgcccaacgttttgctccattaaatagttggcctgataatggtaacttagataaagctagaagactattatggcctatcaaacaaaaatatggcaaaaaaatagttgggctgatttattaa

SEQ ID NO: 210676 - DNA, 745 bp, Unknown
  Bacterial polypeptide expressing nucleotide sequence isolated from the Sargasso Sea
ggcgttgatacgataagtagtggtattgaaggtgcctggactcaaaatcctataaaatgggatatgggttatttagattgtttatacggtcatgattgggagctaacaaaaagcccagcaggagctcatcaatggactccaaagaaaaacggtcaaaaaattaaaatggttcctgatgcgcaccaaaaaggtgtgcttcatccaccaatgatgcaaacaacagatatatcattgaaagttgatccgagttatggaccaattacaaagcattttcatcaaaaccctaaagagtttcacgatgcatttgctcgagcatggtttaaactaactcatagagatatgggtccaagagtttgttacttgggtagtgacgttccaaaagaacaattaatttggcaagatccaattgataaaccaaagtacaaacttaaattaaaagatattaaagatttaaaaaacaaaatttctaaatcaaaaatatcaatttcagatttagtttctactgcatgggcatcagcttcaacttttagaggatcagataaaagaggtggtgctaatggcgcaagaataatgctagaaccacaaaaaggctgggacgtgaataatcctgagaaattatcaattgttattaaaggcttgaaaaaaattaaggatcaatttgataacaaaaataaaagcgtatcaatggcagacttaattgtgttagcaggtggtgttggtattgagatggctgcgaaaaaggcag

SEQ ID NO: 210677 - DNA, 832 bp, Unknown
  Bacterial polypeptide expressing nucleotide sequence isolated from the Sargasso Sea
aaaggaattgatacgataagcagtggaatagaaggagcctggactcaaaacccaattaaatgggacatgggctatttagattgtctttatgggcatgaatgggagctaaccaaaagcccagctggcgcgcaccaatggacaccaaaaagaaatggacaacacattaaaatggttcctgatgcgcacgacaaaaataaaaaacatccacctatgatgcaaactactgatatttctttaaaagtagatccaagttatggaccaataactaaacattttcataaaaatcctaaagaatttcatgatgcttttgcaagagcttggtttaaattgactcatagagacatggggccgaaagtatgttatttaggaccagaagttccaaaagaagatcttatttggcaagatccagttccaaaacaaaaatataaattaaaagccaaggatattaactatcttgaaagcaaaattataaaatcagggttgtctgtttcacagttagtgtcaacagcttgggcttcatgttctacttttagaggatctgataaaagaggtggagcaaatggtgcaagaataagactacaaccacagaaagactgggatataaacaaaatagccaaagttgacaaagtaataaaagttttagaaaaaattaagaaaaacttcgatagtaaaacaaaaaatgtctcattagcggatctaattgttttagcgggaaatactgcaattgaaaaagccgcaaagaaagctggacataaaattaaagttccctttttacaaggaaaaggtgatgctaaacaggaacatacggatgttttttcatttaacttattag

SEQ ID NO: 210678 - DNA, 828 bp, Unknown
  Bacterial polypeptide expressing nucleotide sequence isolated from the Sargasso Sea
aacgttgcaattgaatctatgggaggtaaaacctttggatttagtggaggacgccctgacatatgggcaccagaagaagatatttactggggtgtagaagaagaatggcttcaaaataaaaggtatacgggtgatagagttttagataatccacttgcagcagtgcagatgggattaatttacgtaaatcctgaaggacctgatggaaaagctgatccactagctagtgcaaaagatattagagaaacttttgcaagaatggcaatgaacgacactgaaactgtagcgctaactgctggtggtcatacttttggtaaagcacatggtgctggtgatccagctctagttggagcagaaccagaaggtgctcctttagaacaaatgggcttagggtggaacaacctgcatgcctcaggtgttggtcgcgatgctacaacaagtggtattgaaggtccgtggacacctaatccaactcagtgggataatggatactttgatatgcttctaggctacgaatggaaattagtaaaaagcccagcaggtgctcaaatctggcatgcgattgatcaaaaagaggagcacatggcacctcaagttgatgatccatcagtaaaagttcctacaatgatgacaacagcagatatggcaatgcgtgaagatcctgaatacagaaaagtatcagagaaatttcacaaagacccagaatattttgctgatcaatttgctagagcttggtttaaacttctacatagagatatgggaccaaaaacaagatatatgggaccagaagttccagaagaagaattgatttggcaagaccctgtgcct

SEQ ID NO: 210679 - DNA, 883 bp, Unknown
  Bacterial polypeptide expressing nucleotide sequence isolated from the Sargasso Sea
aatcctactcagtgggacaatggatattttgatctattgtttggttatgaattggaacttactaaaagtcccgcaggtgctcacatttggcatgccgttggtcaaactgaggaagatatggctcctgatgctgaagatgcttccaaaaaagttccaacaatgatgacaactgctgatatggctttaagagaagatccaagctataagaaaatttcaaaaagatttcacgagaatcctgatgaatttgcagatgcttttgcaagagcatggttcaaacttcttcacagagacatgggtccaaagtcgagatatatgggtccagaaattcctagtgaggaattaatatggcaggatccagttcctttaggcaattctgattacgatattgaaaaagtaaaagaaatgattagtaagtcaggtttgtcaattcaggaaatggtggagactgcttgggcaagcgcatctacatatagaggctctgacatgcgaggaggagctaatggttcaagaataagattagctccgcaaaaagattgggaagctaataatccgagccaacttagtaaagtcttggatatatacgaatcaatttcaaatgaaacaggtgcctcagttgctgatattatagtattggctggtaatcttgctatagaaaaggcttcaggtgtagaagttccatttactcctggaagaggcgatgcatctcaagaaaaaactgatatagaatcatttgaggttctagaacctaagtcggatgcctttaggaattatcatgcaaaaggtgtaaatacatctcctgaggaaattatgcttgataaagctcaattacttggccttacggcaccagaaatgacagtgcttgttggtggtttgagatctctgg

SEQ ID NO: 210680 - DNA, 746 bp, Unknown
  Bacterial polypeptide expressing nucleotide sequence isolated from the Sargasso Sea
aaaatttaattatgctaaagaattcaaaaaacttaactttaagaatttaaaaaaagatttacacaaattaatgacaaactcgcaaagctggtggcctgcagattatggacattatggtccattgtttataagattagcatggcatgctgccggaacatatagaaccggagatggtcgtggtggtgctggaactggaaatcaaaggtttgcaccattaaatagctggccggacaatgtaaacttggataaagcgagattattactttggccgataaaaaagaaatacggaaaaagaatttcttgggctgatttatttattttagttggaaatatttcccttgaatcaatgggatttaaaacttttggttttggagctgggagagaagacatttgggaaccagaagaggatatttattggggttcagagaaagagtggctaggcgtgaatcgttatagcggtaagagagatttagaacaaccattaggcgcttcacacatgggtcttatatacgttaatcctcaaggtccagatgcaaatcctgatcctttgttagctgctcacgatattagagaaacatttggcagaatggctatgaatgattatgagacagttgcgttagttgctggtgggcatacttttggtaaatctcatggggcagcaccagagtcccacaaaggtccagaacccgaagggtcaaaaattcaagaacaagcaaccggttggaatagtaattataaaagtggaa

SEQ ID NO: 210681 - DNA, 748 bp, Unknown
  Bacterial polypeptide expressing nucleotide sequence isolated from the Sargasso Sea
agagaattagaaaatccactaggagcagttcaaatgggtttaatttatgtaaatcctcaagggcctgacggaaatccagaccctttattggcagctagagatataagagaaacatttggaagaatggcaatgaatgattatgaaattgttgcccttgttgctggtggacacacttttggaaaatctcatggtgctgcaccagagtctcacaaaggtccagagccagaaggatctaaaattcaagagcaatctactggttggaatagcaattacaaaagtggcctgggagctgatacgataagtagtggaattgaaggcgcttggacttcaaatccaattaaatgggatatgggatatttcgacaatctttttggttatgagtgggagctggataaaagtcctgcaggtgcacatcaatggaagcccgtaaaaaatgggcatgccccaaatatgacacctgacgctcatattaaaggtaaaaaaaacttgccgatgatgcaaactacagatttatctatgagatacgacccagaatttggacggatttcaaaacatttccacaataatccagatgaattttgtgatgcatttgccagagcatggtttaagctaactcatagagatatgggaccaaagataaactatttaggaagtgaggttccaaaagaagatttaatttggcaagatccaattcctaaaaataaatttaaattaaaaaataaagacatagaatctcttaaagcaaaaa

SEQ ID NO: 210682 - DNA, 977 bp, Unknown
  Bacterial polypeptide expressing nucleotide sequence isolated from the Sargasso Sea
tcatggggctgcatctgaatctcataaaggaccagaacccgaaggatcaaaaatacaagaacaagcaacaggttggaatagtaattataaaactggaaaaggtgtagatactataagtagtggtttagaaggagcctggactcaaaatccaaaaaaatgggatatgggttattttgataatttatttggatatgaatgggaattaacaaagagtccagcaggagctcatcaatggaaaccaaaaaaaaatggtcatgctatagaaatggttcctgatgcacatgataaaaacaaaaaacatttacctatgatgttgactaccgatctttcgatgagaatggatccaaaatatggtccaatttcaaaacattttcacaataatccaaaagaatttgcagatgcttttgcaagagcatggtttaaacttacacatagagatatgggtcctcgtgcttgttatttaggacctgaggttccaaaagaaaagttaatttggcaagatccaatttcaaaacctaaatataaacttaaaaataaagatattaaaactttaaaggttaatatattgaaatcaggtcattcaatttcacaattagtatcaactgcatgggcatcagcttcaacctttaggggttcggataaaagaggtggagctaatggagctagaataagattagaaccacaaaaaaattgggaagtaaacaatccatctcagctttcaaaagtaataaaatcattagaaaaaattaagaaaaaatttgatactaaaacaaaatcagtttcacttgctgatttaattgttttagctgggaatactgcaatcgaaaaagctgcaaaaaaagctggtcataatataaaagtaccatttagacctggacgtggagatgcatcacaagatcaaacagacacaaattcatttagtctgctagaacaaaaagctgatggatttagaaaatatatgggcactatgactaatg

SEQ ID NO: 210683 - DNA, 720 bp, Unknown
  Bacterial polypeptide expressing nucleotide sequence isolated from the Sargasso Sea
tgaaccagaaggttcaaagattcaagatcaagcatctggatggaatagtaactacaaaagtggtttaggtgtggatactattagcagtggtatagagggctcatggacttcaaacccgattaaatgggatatgggatattttgataatttatttggttatgattgggaattaactaaaagccctgcaggagctcatcaatggaaacccaaaagaaatgggcatgatatagaaatgaccccagatgctcatgatagatctaaaaaaaatcttccaatgatgcaaactactgacctttcattaaaattagatcctaaatatgggccaatttcaaaacattttcatcaaaatccaaatgaatttgctgatgcctttgcaagagcttggttcaaacttactcatcgtgatatgggtccaaaagcaaattatcttggttctgatgttccaaaagaaaatttaatctggcaagatccaataccaaaaaataaatataaacttaaaaataaagatattgagctactaaagaaaaaaatatctaaatctggtttatctgtttctcagctagttacaactgcatgggcatccgcatcaacttttagagggtcagataaaagaggaggcgctaatggagcgcgaatagctcttgaacctcaaaaagactggaaagttaataatccttcaaaattgtcagccgtaatcagaatttttaataaaattaaaaa

SEQ ID NO: 210684 - DNA, 386 bp, Unknown
  Bacterial polypeptide expressing nucleotide sequence isolated from the Sargasso Sea
tcagttgctcactttgactgcacctgaaatgacggtattgattggaggtcttagggttcttggaacaaatgtcaactttcctgaaatgggaagatttactgacaagccagagacgctcactaatgacttttttgttaacttgttggatatgggccttgaatggaaagtttcctccatttgtgatcacttttatgaaggatctgatcgtgagacgggtaaagttaagtggagagccagctctgtggatttagtctttggatcaaattctcaattgagagcgatatcagaaatttatgccagctccgatggtgaaactcggttcgttaacgactttgttgctgcttggaataaggtcatgaacttggatcgattcgatttaaactgat

SEQ ID NO: 210685 - DNA, 460 bp, Unknown
  Bacterial polypeptide expressing nucleotide sequence isolated from the Sargasso Sea
aatgagttctgaagtgaataaaaacggttctggaaaatgtcctgttatgcatggcagcatgacagcacaaacaacaccaacacattggtggccaaaaaatcttaacttagatattttacaccaacatgatagcaaaactaatccaatggataaaaagtttaattacaaaaaagaagtaaaaaaattaaattttaaaggaattaaaaaagatttattaaaattgatgacagatagtcaagattggtggccagcagatcttggacattatggtggtttatttattagaatggcttggcattcagcgggaacttacagaattgcagatggtcgtggaggaagtggaacaggtaatcatagatttgctcctcttaattcatggcctgataatactaacttagataaagcacgaagattactttggccaattaaaaaaaaatatggaaataaaataagttgggct

SEQ ID NO: 210686 - DNA, 913 bp, Unknown
  Bacterial polypeptide expressing nucleotide sequence isolated from the Sargasso Sea
aagagtcctgctggtgcaaatatttggcatgcagtaggtcaaacagaagaacatatggcacctgacgcagaagactcttcaaaaaaagttccaacaatgatgacaactgctgatatggcaatgcgcgaagatcctgagtatcgaaaaatatctgagcattttcataaaaatcctgatcaatttcaagatgcatttgcacgtgcttggttcaaattacttcaccgtgatatgggaccaaagacacgctatatgggacctgaagcgccagaagaagatctgatttggcaggaccctatcccagctggaaacgctaattatgatgtagatgctgttaaaagtaaaattgagaatagcgaactatctattcaggaaatggtggaaactgcttgggcaagcgcttcaacttaccgacataccgatatgcgtggtggtgcaaatggtgcgcgcataagactggagccacagcgaaattgggaagtaaataaaccagaacaattaaataaagttcttggaatcttagagggtatagcttcggagactggggcaagtgttgctgatgttattgttctcgcaggtaatgttggtatagaaaaagcttctggcataactgttccatttactcctggacgaggggatgcaacacaagaacatactgatgtggagtcttttgctgtcatagaacctgaggcagatggatttagaaactatctcaagaaaaatttcacggtaacaccggaagaatttttattagacagagcgcatcttcttggattgactgcacctgaaatgactgtgcttgttggaggaatgagagcacttggtataagttcagatgatcgaggtgttttctctaatgccgaaaaactcgataatagtttctttacaactcttcttgatatgtcagtaaaatgga

SEQ ID NO: 210687 - DNA, 667 bp, Unknown
  Bacterial polypeptide expressing nucleotide sequence isolated from the Sargasso Sea
ggatttaaaacttttggttttggaggtggaagagaagatatttgggaacctgaggaagatatctactggggttccgaaaaagagtggcttgctaataatagatataattcaaaaagagaattagaaaatccacttggagcagttcaaatgggtttaatatatgtaaatccacaaggaccagatgggaatccggacccgttactagctgctagagacattagagaaacatttgggagaatggcaatgaacgattatgaaatagttgcactcgttgctggaggacatacatttggtaaatcacatggcgcagcgcccgagtctcacaaaggccctgaaccagaggggtctaaaatacaggaccaatcgactggatggaacagtaattataaaagtggacttggatcagatacaataagtagtggaattgaaggcgcatggacttcaaatccaataaaatgggatatgggatattttgataacctttttggatatgaatgggaattaacaaaaagtcctgcaggagcacaccaatggaagccggtaaaaaatggtcatgctccaaacatgacacctgatgctcatataaaagggaagaaaaatttaccaatgatgcaaactacagatttatcaatgagatttgatccagagtttggaaggatttctaaac

SEQ ID NO: 210688 - DNA, 733 bp, Unknown
  Bacterial polypeptide expressing nucleotide sequence isolated from the Sargasso Sea
atgcttgagcctccaaagaaattggaaagttaataacccaaaaaaactatcaaaggttattaaagctctacaaaaaattaagaaaagatttgatacaaacaaaaaatcagtctcaatggcggatcttatagtattaggtggaaatgtaggagttgagatggcagctaaaaaggctggtcataaaattcaagtcccatttaacccaggaagaggagatgctagacaagaccagacagatgtaaattcatttggattgctcgagccacaagctgatggttttagaaattacatgaaaaaaggcaaatctaatgtttctgctgaagaaaaattaatcgataaggcgcaattaatgggattaacggcaccagagatgacagttcttgtaggaggaatgagagttttagatacaaactatgatagttctaaaaatggagttttcacaaaaaaacctggaactctatcaacagattattttttaaatcttctcgatatgagtaccacttggaaggaaactgacaaatctgaacaatattttgttggtaaagatagaaagtctaaaaagactaagtggaaaggatcaagagttgatcttatttttggctctaattctcaattaagagcattagccgaagtctatgcttgcaaagattcatcagacaaatttgtcaaagactttgtgtccgcatgggtcaaagtgatgaatgcagatagatttgatttaagattaaattag

SEQ ID NO: 210689 - DNA, 946 bp, Unknown
  Bacterial polypeptide expressing nucleotide sequence isolated from the Sargasso Sea
attttagaaacaccattaggcgcagttcagatgggtttaatttatgttaatccccagggtcctgatggtaaacctgacccactagctagtgctcacgacataagagagactttctctaggatggcaatgaatgatgaagaaactgttgctcttacagcgggaggtcatacatttggcaaagctcatggtgctgcacctgaaagtaacgttggacctgaaccagaaggagctccgatcgaacaaatgggatttggttggaaaaacgttcatggtattggtaaaggtagagacgccattacaagtggtattgaaggaccctggacatccaatcccacaaaatgggataatggctattttgatttacttttcaaatatgattgggagttagttaaaagtccagcaggagcttttcaatggcatcctataaatcctgaaaaagaagatttggccccagattcgagtgatcctagtaaaatggttactacaataatgacaaccgcagatatggctatgaaagaagacccagactacaataaggtctctaaacgctttcacgaaaatcctgaattatttgccgacacattcgcgaaggcatggtttaagttattacacagagatatgggtccaaaatcaaggtatattggtccagaggttcccaaagaagatttgatttggcaagatccaattcctgagggtaacaaaaactttgatattaataaagctaaagacttaattaaatcatctggtttgtcgattcaagaacttgttgaaactgcttgggctagtgcctcaacatatcgtcatactgacatgagaggcggagctaacggtgcaaggataagattatcacccccaaaagattgggatgttaataagcccgatcaattgtcaaaagtgattaaaatttacgaaggcattgcaagtaatgttgaggcctcggttgcag

SEQ ID NO: 210690 - DNA, 637 bp, Unknown
  Bacterial polypeptide expressing nucleotide sequence isolated from the Sargasso Sea
aatgagtgcggaatttcataagagtaaaacatttaaatcaacagaattaagtaagtgcccgtttacaggcgcaggtacaccagcaaaatttagtgctggaaaaggacaaacaaatagagatttttggccaaatagtttgaatttgaaaattttaagtcagcactcgaatttatcaaatccaatggagaaaaaatttaattattctaaagaatttaaaaaactgaattacaaagcactcaaaaaagatttaaacaaattaatgacggactcacaggactggtggccagcagattacggtcattatggtcctttatttattagattagcatggcacgcagcaggtacatatagaacaggtgatggtagaggaggtgctggaactggtaatcaaaggtttgcaccgttaaatgcttggcctgataatgttaatttagataaagctagattacttttgtggccaataaaacagaaatatggaaaaagaatttcttgggcagatttatttatattagtcggaaatgtagcattagagtccatgggttttaaaacttttggatttggagctggaagaactgacatctgggaaccagaagatgatattttactggggttcagaaaaagaaatgttgggtgttaa

SEQ ID NO: 210691 - DNA, 607 bp, Unknown
  Bacterial polypeptide expressing nucleotide sequence isolated from the Sargasso Sea
tatggctgatttaattgtattaggaggctgcgctgcgattgagaaggctgcaaaagatggaggtcgcagagttaaggttccttttacacccggacgtatggatgcaacccaaaatcaaactgatattaagtctatgggcgtacttgagccagtagcagatggatttagaaactatttaaaaacaaagtatatatttacaactgaagaattattagttgataaagcacaacttctaacacttacagctcctgaaatgacagtacttttaggcggaatgcgagttttgaatacaaactatgataactctaatcacggagttttcactgaaaaaccgggcacgctaacgaatgatttttttgtcaatcttttagatatgaacactgagtggaaggccatgcctaactcaaaagaaaaatttgaaggaagagacagaaaaacgggtgatctaaggtggacagctactagagctgatttgatctttggctcaaactctgagttacgtgcactttctgaggtttacgctagtgatgatgcgaaaaataagtttgtcgatgattttgtcagcgcctgggataaggtaatgaacctagatcgcttcgatatttaa

SEQ ID NO: 210692 - DNA, 539 bp, Unknown
  Bacterial polypeptide expressing nucleotide sequence isolated from the Sargasso Sea
catgagcgagaaatcaaaatgtccatttactggagcaggaactccatctaaatttccgactggaaaaggtacttccaatagggattggtggccaaatagtttaaatctaaaaattttaagtcagcattcgtcactggttgatcctatggacaaaaaatttaattatgcgaaagaatttaaaaaactcaactataaagctttaaaaaaagacctgcacaaattaatgacaaactcacaagattggtggcctgctgattatggacactatggaccattatttataagattgacatggcatgctgccggaacatataggactggcgatggcagaggcggtggaggaacaggcaatcagcgttttgctccattaaacagctggccagataatgttaatctagacaaagcaaggttattgctttggcctatcaagaaaaaatatggaaaaaatatttcttgggctgatttatttattctagttggaaatgtagctctagaatcgatgggcttcaaaacttttggttttggaggtggaagagaag

SEQ ID NO: 210693 - DNA, 817 bp, Unknown
  Bacterial polypeptide expressing nucleotide sequence isolated from the Sargasso Sea
tatgaatgattatgaaactgcagcgttagttgcaggtggacatacatttggtaaatcacatggtgcagcatctgaatcatacaaaggacctgaaccggaagggtctaaaatacatgagcaatccacaggttggaatagtaactataaaactggaaaaggtgtcgatactataagcagcggaatcgagggtgcatggacccaaaatccaacaaaatgggatatgggttatttggattgtttgtacgatcatgaatgggaattaacaaaaagcccagcaggagcacatcaatggacacctaaaaaaaacggacaaaaaatcaaaatggtaccagacgctcatattaaaggaaaaatgcatcctccaatgatgcagacaacagatatatctttaaaagttgatccaagctatggtccaataactaaacactttcataaaaatcctaaagaatttcacgatgcatttgcaagagcatggtttaaacttactcacagggacatgggaccaaaagtgtgttatttaggaccagatgtacctaaagaagaattaatctggcaggatccaatacctagaaataaatacaaattaaaaaataaagatattaatgagcttaaaaaaagaatacttaaatctgacctttctatttctcaactggtttcaactgcatgggcttcagcttctacttttagaggatcagataaaagaggtggtgcgaatggttcaagaataagattatcacctcaaagagattgggaaattaataaaaaagcaaatataaataaagtaataaaagttctagataaaattaaaaaggatttt

SEQ ID NO: 210694 - DNA, 706 bp, Unknown
  Bacterial polypeptide expressing nucleotide sequence isolated from the Sargasso Sea
catgaaaacccaaaagagtttcatgatgcatttgcaagagcttggtttaaacttacccacagagacatgggtcccagagcttgttatttaggaggagatgttccaaaagaagaattaatttggcaagatccaatagataaaccaaaatataaattaaagagtaaagatatcaaagatttaaaatctaaaattttaaaatcaaaattatcaacttctgatatggtttctgtcgcatgggcttctgcttcaacttttagaggctctgataagagagggggagcaaatggtgctagaattttactggaaccacaaaaaaattggaaagttaataatccgataaatctttcaaaagttacttctgttcttaaaaaaattaagggcaaatttgatagtaaaaagaaaagtatttcaatggcagaccttattgttttagctggaggggttggaatagaaatggctgctaaaaaggctggttataaaattaacgttcctttttcagctggaagaggtgatgctagacaagatcaaacagatatttattcgtttggattgctggaaccacaagcggatggttttagaaattatttgaatggaggagcatcaaatatatctgccgaggagaaactagttgataaggcacaattaatgggtctcacggctcctgaaatgaaaattttaataggtggcatgcgtgtattagacacta

SEQ ID NO: 210695 - DNA, 381 bp, Unknown
  Bacterial polypeptide expressing nucleotide sequence isolated from the Sargasso Sea
ttgacgaatttgaaagatccacaagctatgtgggacttctggtcattaaaccctgaagccatgcaccaagtgacgattctgatgtctgaccgtggtattccggcaaactaccgccaaatgcatggttatggttcgcatactttctcgttctggaatgctaaaggtgagcgtttctgggtgaagttccacttcaaatcgcagcaaggcgtggtgaacttaaccaacgagcaagccgataagttaaagggtatcgaccctgactcatcccagcgcgatatggtggtggctgtgactgacggtaacttcccacgttggacggtgaacgtacagattatgcctgagagcgacgccaacacttaccatatcaacccattcgattta

SEQ ID NO: 210696 - DNA, 619 bp, Unknown
  Bacterial polypeptide expressing nucleotide sequence isolated from the Sargasso Sea
aatggcagacttaattgtcttagcaggtggtgttggtgtagagatggctgctaaaaaagcaggacataaagttaatgttccattttcagcaggtagaggagatgcaagacaagatcaaactgatattcattcctttggtcttcttgagcctcaggcagatggttttagaaactatctaaacggcggagcttcaaatgtctcagcagaagaaaaattggttgataaagcacaactaatgggtctgactgcaccagaaatgacagcacttataggtggtatgagagttttaaatactaactatgatggttcaaattatggcgtttttacaaataaacctggttctcttactaacgattatttcgttaatctattagacatgaatactacatggaaagaggaagataaatcagaacaaacttttgttggaaaagatagaaaaactcaaaaaactaaatggaaagcgacaagggttgatttgatttttggttcaaattctcaactaagagctcttgcagaagtttatgcctgtgaggactcaagtgaaaaatttgttaaagattttatagctgcatgggtaaaagttatgaattctgatcgatttgatttgaaattaaattaa

SEQ ID NO: 210697 - DNA, 457 bp, Unknown
  Bacterial polypeptide expressing nucleotide sequence isolated from the Sargasso Sea
atgcctgcttatggcgctcagcaagacttggtcgaaagcattgataacggagaatttccatcgtggaccgtgaatgtgcagattatgactgaagaggaagcgcgtaattaccacattaacccgtttgatctaacgaaggtgtggcctcacagcgactttccattaattgaagtagggcagttggagttaaaccgtaatgttgataactactttgcagaaactgagcaagcagcgttcgcgccgagcaatttggtaccgggtattggtgcgtcgccagacaggatgcttcaagcgcgactaattggatatcaagatgcgcacagataccgcattggtgcaaactacaaccaaataccggtaaacgcgcctcgttgcccagtgcacaattatcaacgagatggagcctttgcgggaattaacccagcacttgcaggaagtggagccaacttctatccaa

SEQ ID NO: 210698 - DNA, 685 bp, Unknown
  Bacterial polypeptide expressing nucleotide sequence isolated from the Sargasso Sea
catgagtagtgaaataaataatgaaataagcaaatgcccttttcacggagaaggaataccacaaaagcataattcaggaaaaggacaatccaacagagactggtggccaaacagtcttaatctaaaaatattaagtcaacattcatcattggttaatcctatggatgaaaaatttgactataaaaaagaattcaaaaaattaaatttaaaagctcttaaaaaagaccttcataaacttatgacacaatctcaaaattggtggccagctgattacggtcactatgggccgttatttatacgtcttgcctggcatgcagcaggaacttatagaactggagatggaagaggtggtgctggtactggaaaccaaagattcgcacctatcaacagctggccagataatgttaacttagataaggcaagattacttctttggccaataaaaaagaagtatggaaaaagaatttcttgggcagacttgtttatattggttggaaatgtagctcttgagtcaatgggttttaaaacttttggttttggaggtggaagagaagatatatgggaaccagaagaagatatttattggggatctgaaaaagaatggctcgcaaataatagatataattcaaagagagaattagaaaatcctttgggtgcagtccagatgggtttaatttatgttaat

SEQ ID NO: 210699 - DNA, 597 bp, Unknown
  Bacterial polypeptide expressing nucleotide sequence isolated from the Sargasso Sea
aaacaggggcatcaattgctgatgttattgttcttgcaggaaatgttggaattgaaaaagcatctggagcctctgttccatttgtgcctgggcgcggagatgcatcacaggaaagcacagatgtagaatcattttctgttcttgaaccagaagcagacggttttagaaattatttgaaaaaaaatttttcaattacaccggaagaactaatgttagacagagctcacttactaggcctttctgccccagagatgacagtattagttggtggaatgcgtgctcttggaataagttcagatgagagaggtattttcactgataaacctgaaaaacttacaaatgatttttttattaaacttttagatatggaagtaaaatgggaagtaacaggaagcaatacttatcaagccattaatcgtgaaacaggtgaaaaagttagaagggcttctagagtagatttagtatttggttctaattctcaactaagagctttggcagaagtttatgcgcaatctgactcacatgataaatttatcaatgatttcatatctgcttggaataaagttatgaatgctgaccgttttgataagttgtaaa

SEQ ID NO: 210700 - DNA, 445 bp, Unknown
  Bacterial polypeptide expressing nucleotide sequence isolated from the Sargasso Sea
ttgaattatttaataattattttaattatctgtagttgttctaataaatctgaaatttctaatgacgactcaaataaagctaaatgtcctattcactttggaaaagaccaaacatctggccaaattactactaatcaaggtaataccaaccgagattggtggccaaatcaacttgatttaacaattctaagacagaattctgaaaaatctaatccaatggataaagattttaattataaaaaagcatttgaaagtctagactactttgctcttaaaaaagatattgaaaaaacaatgactgaatctaaagaatggtggcctgctgattatggaaattatggtgggttatttattagaatggcatggcatagtgcaggaacctatcgaacaggagatggaagaggtggaactagagctggacaacaaagatttgctccacaaaata

SEQ ID NO: 210701 - DNA, 929 bp, Unknown
  Bacterial polypeptide expressing nucleotide sequence isolated from the Sargasso Sea
tagtaattacaaatcaggaaaaggtgtacatgcaataagtagtggtattgaaggagcatggacacaagcaccaacacaatgggatatgggttactttgattgtttgtttaaccatgaatgggaattgactaaaggacctgctggagcatttcaatggactccgaaaaagaatggtcagagaataaaaatggtacctgatgctcatgataaaaacaaaatgcatcctcctatgatgcaaacaactgatttatctttgagaatggataaaagttatggaccaatttcaaaacatttttatcaaaatccagatgaatttgctgatgcatttgcaagagcttggtttaagcttactcatagagacatgggaccaagagcatgttatttgggcagcgaagttccaaaagaacaattaatttggcaagatcctatagacaaaccaaaatataaacttaaatcaaatgatattagagatttaaaaacaaagctttcaaaatcaaaaatttcagtatctgatttagtgtctactgcttgggcttctgcttcaacatatagaggatctgataaaagaggtggagcaaatggtgcaagaattatgcttgagcctcaaagaagttggaaagtcaataaccctaaaaaactatcaaaggttattaaagctttacaaaaaattaagaaacaatttgatacaaataaaaaatcagtgtcaatggctgatcttatagtattaggtggaaatgtaggaatagagatggcagcaaaaaaagctggtcataaaattcaggttccattttcgccaggaagaggagatgcaagacaagaccaaacagatgtaaactcatttggactgcttgagccacaagctgatggttttagaaactacatgaaaaaaggtaaatcccatgtttcagctgaggaaaaaataattgata

SEQ ID NO: 210702 - DNA, 349 bp, Unknown
  Bacterial polypeptide expressing nucleotide sequence isolated from the Sargasso Sea
gagatgacggtgcttgttgccggcatgcgctcgcttggcatcagctcggatggccatggcgtcttcaccgataatccagaccagctgtcgaatgattttttcacgaccctgctgggcatggacgttgattggaaaccaactggcagcaacggctatgctggagtcgaccgtgatagtggcaagaccgttcgcacaggcacccgtgttgatctggtctttggctcaaactcgcagcttcgtgcccttgcagaggtttatgccagcgatgactcaactgacaaatttcgcattgattttgttgctgcctgggcaaaggtgatgaataatgatcgctttgataccgcctagg

SEQ ID NO: 210703 - DNA, 498 bp, Unknown
  Bacterial polypeptide expressing nucleotide sequence isolated from the Sargasso Sea
aaatatggaaaaatttctaaacattttcatgaaaatccagaagaatttgcggatgcatttgctagagcatggtttaaacttactcatcgtgacatgggtcctcgcacatgctatttaggaccagaagttccaaaagaaaaactgatttggcaagatccaattccaaaaacaacatacagacttaaaaataaagatttaaaagctctaaaatcaaaaataatgaaatcggggctttctatttcacaattagtatctactgcctgggcatcagcatcaacttttagaggatctgataaaagaggcggagcaaatggagcaagaataatgttagaaccacaaaagaactgggaagttaacaatccatctcaactatccacggttctaaaaactttagaaaaaatcaaaaaaactttcgctagtaaaaaaaagaatgtttctatggcggatttaatagtattgggtggttgtgttgcgattgaaaaagcagcaaaaaaatct

SEQ ID NO: 210704 - DNA, 760 bp, Unknown
  Bacterial polypeptide expressing nucleotide sequence isolated from the Sargasso Sea
aatggaggtagaattagattatcaccacaaaaagattggggaagttaataatccatctcaattatcaaaaacaattaaaactctagaaaaaattaaaaaaggttttgatacaaaaaaaaagaacgtttcaatagcagatctaattgttatgggtggatgtgctgcaattgaaaaggcagcaaaaaaagctggtcacaaaataaatgttccttttaaaggaggaagaggagatgccactcaagatcaaacagatacgttttcttttggtttgctcgaacctaaagctgatgggttcagaaattatattacgaggttaaaaaatggatcatcaaataaaaccactgtatcagctgaagagatgttagttgataaagctcaattaatgaaactttcagcgcctgaaatgactgttttagttggaggtatgcgtgtattgaatactaactttgataaatctgaaattggagtttttacaaaaaaaactgaaacattaacaaatgattttttcattaatttgcttgatatgaatacgacctggaaagaaattgataaaagtgaagaattatttttaggaagggaccgtaaaacaaataaagttaaatggactgcaagcagagttgatttaatttttggatcaaattctcaactaagagctatagcggaagtatatgcttgcgaagattctaaaaataaatttatttcagatttcgtatctacatggacaaaagtaatgaatttagaccgttttgacctaaattaa

SEQ ID NO: 210705 - DNA, 721 bp, Unknown
  Bacterial polypeptide expressing nucleotide sequence isolated from the Sargasso Sea
cttctactttttagaagttcagataaaagaggtggagccaatggtgcaagaataagacttgctccacaaaaagattggaaagtaaacaacccttcacaactttctaaaataataaaagtttatgagaaaatccaaaaatcatttaactctaaaaacaaaaatgtgtctttatcagacttaattgttctaggaggtaatgtcggaattgaaaaggcagcaaaagatgcaggaaaaaaaattaaattacctttttcttctggaagaggagatgcctctcaagatcaaacagatatacattcatttagtctgttagaaccacaagctgatggttttagaaactatgcaaactctgaaagcacgacgcaggcagaagaattattaattgataaagctcaattaatgcaattgactggaccagaaatgacagttttagttggaggcatgagagttctaggaacaaattttgatggttctagagatggagtatttacaaaaagacttggaaaattaaccaatgacttttttgtgaatctattggatatgaatgttaaatggaaagaaacttctgccaaagaagataaatttatgggagtagatagaaaatcaggtaaagttctatggacaggaacaagagcagacttaatttttggttcaaattctcagttgagagcgttagcagaggtatatgcgacagatgattcatctgacaaatttgtaaatg

SEQ ID NO: 210706 - DNA, 541 bp, Unknown
  Bacterial polypeptide expressing nucleotide sequence isolated from the Sargasso Sea
tatggaacatttacaaaaaaatggttcttcaaccaatgctatggaaaacggcaagtgcccgtttgttcatggagcttcaacatctcccgacacatcacccttaaaatggtggcccaaaagattgaatcttgacattcttcatcaacatgatcagaagacaaatccatattctaaagactttgattatagagaagaggttaaatcactagactttgaggctctggaaaaagacatgcatgaattaatgaccacaccacaatcatggtggccagctgattggggccattatggaggtttaatgattaggatggcttggcatgctgctggaacatatagagttgcagacggaaggggtggtgctggaacaggaaacttaaggtttgcgcctttaaattcctggcctgataacggaaatcttgacaaagcaaggaggttgatgtggcctataaagaagaaatatggtaataaaataagctgggcggatttgtttattcttgcgggaaatatagcttatgaaagtatgggtttaaaaacatttggt

SEQ ID NO: 210707 - DNA, 511 bp, Unknown
  Bacterial polypeptide expressing nucleotide sequence isolated from the Sargasso Sea
aggtgatgccactcaggaaatgacagatgtggagtctttcgctcaactggagccgatccatgatggttttcgaaattggaaaaaagagaactacactgagagtggtgaggaactccttcttgatcgagctcaattaatggggctgactgctgtcgaaatgactgttcttttaggtgggatgagagctatgggagttaatcacaatgacaatcaaaatggcgtgtttactgataaagtaggtgctttaactaatgatttctttgtaaatttggtcgatatggcccataaatggaagccatccaatggtcactatgaaatcatcgatcgagctaatggagatgtgaaatggaatgctacttctgtggatttagtatttggatctaactcaattttacgctcctacgcggaagtctacgctcaagacgataacaaagagaagttcattgaggattttgttgcggcatggacaaaagtaatgaactcagatcgttttgacttactagcaaactaa

SEQ ID NO: 210708 - DNA, 829 bp, Unknown
  Bacterial polypeptide expressing nucleotide sequence isolated from the Sargasso Sea
atttactggggatctgaaaaggaatggttaggtgttaatcgttacagtggaaaaagagacctagagaatcctcttggagcttcacatatgggcttaatatatgttaatccacaaggtccagatgcaaatccagatccttatctagctgctcatgatattagagaaacatttggtaggatggctatgaatgattatgagacagtagccctggttgcaggcggacatacatttggtaaatctcacggagcagctccagaatctaacaaaggtccagaaccagaaggatcaaaaattcaagaacaatcaactggttggaatagcaattataaaagtggctttggtgcagatacaataagcagcggtatagaaggagcttggacaagcaatcctataaagtgggatatgggatactttgataatctatttggttatgactgggaacttacaaaaagtcctgcaggtgcttatcagtggaaacctaaaaaaaatggacatgatatttcaatgacaccagatgctcatattaagtctaaaaataatttgccaatgatgcaaacaacagatttatcattaaaaatggatccaaaatatggacctatctcaagacattttcataaaaatccaaaagaatttgctgatgcttttgctagagcttggtttaagcttacccatagagatatgggtcctatagcttgttatttagggccagaagttcctaaagaaaaattaatatggcaagatcctattacaaaaaataagtataagttaaaaaataaagatattaaaaatttaaaaataaaaattttaaaatcaggtctttcaatttctc

SEQ ID NO: 210709 - DNA, 809 bp, Unknown
  Bacterial polypeptide expressing nucleotide sequence isolated from the Sargasso Sea
catgagtggcgaattaattaaagaacaatcgaaatgtccttttacaggtgcaggaacaccaccaaagcatccaacaggcaaaggacaaacaaataaagattggtggcccaatagcctaaatttgaaaattttaagtcaacattcttcattggtaaatccaatgggagaaaaattcaattacaaaaaagaatttaaaaaacttaattttaaagcattaaaaaaagatcttcataaattgatgactgatacacaagattggtggccagcagattacggtcattatggtccattttttattcgtcttgcttggcatgctgccggaacttatcgaacaggagacggaagaggtggcgctggaactggaaatcaaagatttgctccattaaatagttggccagataatgtaaatttagataaagcaaggcttttactatggcctattaaaaagaaatatggaaaaaaaatatcttgggcagatttatttatacttgttggaaatatatctctagagtcaatgggtttcaaaacttttggttttggtgctggaagagaagacatatgggagccagaagaggatatttattggggatcagaaaaggaatggcttggagtaaatcggtatagtggaaaaagagaactagaaaaccccttaggagcatcacacatgggtttaatttatgttaatcctccaggacctgatgctaatccagatccttatttagctgctcatgatattagagaaaactttggacgtatggcaatgaatgataatgagacggtagcgctagttgcaggtggacacacatttg

SEQ ID NO: 210710 - DNA, 667 bp, Unknown
  Bacterial polypeptide expressing nucleotide sequence isolated from the Sargasso Sea
ctaaaagaacaatcaaaatgtccatttactagtttgggtaccccctcgaagcacccaactggtaaagggacttcaaatagagattggtggccaaatagcttaaatctaaaaattttaagccaacactcttcattggtaaatccaatggataaaaaatttgattattcaaatgaatttaaaaaattaaattttaaagctctaaaaaaagatcttaaaaatttaatgactgactctcaagattggtggcctgcagattatggccattatggtggcctttttattcgattagcgtggcatgctgcaggaacttatagaactggagatggacgtggtggagctggaactggaaatcaaagatttgcccctcttaacagttggcctgacaatgttaacttagataaggctagactattgctttggccaataaagaaaaaatatggcaaaaaaatttcgtgggcagatctatttatactagtaggaaacgttgctttagagtcaatgggatttaaaacttttggctttggaggtggaagagaagatatttgggaaccagaagaagatatttattggggatcagaaaaagaatggttaggtgttaatcgttacagtggaaaaagagaacttgaaaatccactaggggcttcacatatgggattaatttatgtaa

SEQ ID NO: 210711 - DNA, 754 bp, Unknown
  Bacterial polypeptide expressing nucleotide sequence isolated from the Sargasso Sea
aacatgggatttgaaacctatggttttgccggcgggcgaactgacgactgggaaccagacatggtttactggggtccagaagtagaaatgcttgccagcgaccgtgaagatgctagcggcaaattagaacgcccattaggtgcaacgcacatgggtttaatttacgtaaatcctgaaggccctaaaggggttcctgatccaattgggtcagctaagaacattcgcgttgcgttttctcgcatggcgatgaacgatgaagaaacactggcacttatcgccggtggtcacacctttggtaaaatgcatggtgcgcacaaacctaaagactgtgtaggtgcagagcctgctgcagccggtattgaagagcaaggtttaggctggaaaaacaaatgtggtaaaggccactctgaagataccgtatctagtggtttagaaggcgcatggacacaagcacctacccgctggtcatcactgtacttaagcaacctacttaactttgagtggaaacaaactcgcagccctgcaggcgctattcagtggatcccaacagatgaatcgttacacaacgctgtacctgacgctcatattaaaggtaagtttaacgcaccagtaatgactacggccgacttagcattaaaatttgacccagagtatcgcaaaattgctgagcgttttttaaatgaccctaaagagtatcaaatggcctttgctaaagcatggtacaaattgactcacagagatatgggaccaccac

SEQ ID NO: 210712 - DNA, 817 bp, Unknown
  Bacterial polypeptide expressing nucleotide sequence isolated from the Sargasso Sea
ttttgataacttgtttggatatgattgggaacttaccgcaagtccagctggcgctcatcaatggaagcctaaaaaaaatggacgtgagatcgaaatgaccccggatgctcacgaaaaatccaggaaaaatttacctatgatgcaaacaacagacttatctttaaaaatggatgcaaaatatggtcccatttcaagacacttccataataatccaaaggagttcgctgatgcttttgcgagggcttggtttaaacttactcatagagacatgggtccaagagcatgttatttaggtcctgacgttccaaaagagcaattaatttggcaagacccaatcccaaaagcaaaatataagcttaaaaataaagacataaaacaattaaaatcaaagattatgaaatccggtttttctatatcagaactggtgtctactgcctgggcttctgcatcaacttttagaggatcagacaaaagaggtggagcaaatggcgcaagaataagactagagccacaaaaaagttgggaagtaaataatccaaaaaaattatcaaaaattctaggtaggttagaaaaaattaaaagaggttttgacacaaaaaagaaaatagtatcaattgccgatcttatagttttagctggaggtgttggcattgaaatggctgcaaaaaaagcaggttataaaataaatgttccttttaccccggggcgtggagacgctttgcaagatcaaactgatgagttttcatttggattacttgagcccaaagcagatggttttagaaattatataactagaaaaaccaatgggcatggtaaa

SEQ ID NO: 210713 - DNA, 724 bp, Unknown
  Bacterial polypeptide expressing nucleotide sequence isolated from the Sargasso Sea
tatgagttcagatttagtaaaagaacaatcaaaatgtccatttacaggagcaggaacgccttcaaaatttccaactggaagaggaacttccaatagagattggtggccaaatgcaataaatcttaaaattctaagcttacattcttctctagttaaccccatggatgaaaagtttagctataaaaaagaatttaaaaaactaaaatataaatctctaaaaaaagatttacataaattaatgataaactcgcagtcttggtggcctgcagattacggacattacggcccattatttattagattagcttggcatgcagctggaacatatagaactggagatggtagaggtggcgcaggaacaggtaatcaaagatttgctccattaaatagctggccagataatgtgaatttagataaggcaaggctattgctttggccaataaaaaaaaaatacggaaaaaaaatatcttgggctgatctctttatacttgtaggaaatgttgctttagaatcaatgggtttcaaaacttttgggttcggagcaggaagagaagatatatgggaaccggaagatgatatttattggggatcagagaaggagtggcttggtgtaaatcgttatagcggaaaaagagaacttgagaatcctttaggagcttcacatatgggtttaatatatgtaaatccacaaggcccagatgcaaacccagatcctatattagcg

SEQ ID NO: 210714 - DNA, 763 bp, Unknown
  Bacterial polypeptide expressing nucleotide sequence isolated from the Sargasso Sea
tatggaaaatttaggtaataaaggatcttcaaatggacaatcaaccggtaaatgtccttttatgcatggaggttcaacttcaccagatacttcaccattaaaatggtggccaaaaagattgaacttagacattcttcatcaacatgatgaaaagacaaatccttatagccaggattttaattacagagaagcagtcaaatcattggattttaaagctctagaaaaagatatgcatgaacttatgaccacaccacagtcatggtggcctgcagattggggacattatggaggattaatgataagaatggcttggcacgctgctggtacatacagagttgctgatggtcgaggcggggcaggtacaggaaatctaagattcgctcctttaaattcatggcctgataatggaaatctagataaagcaaggaggttaatgtggccaataaaaaagaaatatggtaataaaataagctgggcagatttatttattctagctggaaatattgcttatgagagtatgggtctaaaaacatttggattttcatatggaagaccagatatatggcaacctgagattgatatttattggggtcctgaagatgaaattatggcgcctagtgagaatagatatgcagatctagaagatacatctacattagaaacgccattgggagctacccacatgggactaatatatgttaatccagagggagtaaatggcaaacccgaccccatgaagacagcattacatgtaagggaaact

SEQ ID NO: 210715 - DNA, 841 bp, Unknown
  Bacterial polypeptide expressing nucleotide sequence isolated from the Sargasso Sea
gggatgaaggggcatgggaccacaaatccaacaaaatgggacaatggatattttgatcttttgctagggtatgactgggaactaactaagagcccagcaggtgctaatatctggcatgcagtaaatcaaacagatgatcacatggctcctgatgcggaagactcgtcaattaaagttcctacaatgatgactactgcagatattgcaatgattgaagacccggaatataaaaaaatatctgtccgctttcatgaaaatccatcagaatttgctgatgcttttgcaagagcatggttcaaattattgcatagggatatggggccaaaatctcgatatatggggccagaagtacccgaagaagagttaatatggcaagaccctgtaccagaaggtaataggaattatgacctagatattttaaaggaaaaaattttagcaagcggactcaataaccaagaaatgattgagactgcttgggcaagcgcttcaacgtatagaggtactgatatgagaggtggcggaaatggtgcaaggataagattagaacctcaaaaaaattgggaagtaaacaagccagaatcattatcaaaaattttaagtgtttatgaaacaatttcatctgaaacaggcgcatcaattgctgacataataatatatgctggcaatttagctattgaaaaatcttctggcattgaagtacctttcttgaaaggaagaggtgatgcatcacaagaaaatacagacataaattctttcgatgtgctagaaccgttatcggacggatttagaaattttcataaagatggaattgaagttccggcagaagaaatgctcttggata

SEQ ID NO: 210716 - DNA, 809 bp, Unknown
  Bacterial polypeptide expressing nucleotide sequence isolated from the Sargasso Sea
cctgcctggtgcaaatatatggcacgcggtagatcaaaaagaagaacacaaagcacctgatgctgaagactcatcaaaaagagttccaacgatgatgacaactgcagacatggcaatgcgtgaagatccagaatatagaaaaatttcagaaagatttcataaaaatccagatgaatttcaagacgcttttgctcgtgcatggtttaaacttttacatcgtgatatgggtccaaaaactcgatacatgggcccagaagttccagaagaagacttgatttggcaggaccctgttccaataggaaactcagattataatgttgatgaggtaaaaacaaaaattgctgaaagtaatttgtctattcaagaaatggtagaaactgcatgggctagcgcatctacatatcgtggaactgatatgcgtggaggtgcaaatggagctcgtattcgacttgaaccacaaaaaaattggcaagttaacaaacctaaacaactctctaaggtattaaatattttagaaaatatagcaaaagaaacaggggcatcgattgctgatgttattgttcttgcagggaatgttggaattgaaaaagcatctggagcctctgttccatttgtgcctgggcgtggagatgcatcacaggaaaacacagatgtagaatcattttctgttcttgaaccagaagcagatgggtttagaaactacttaaagaaaaatttcaccataatgccagaagagttattgttagatagagcacaccttcttggactttctgctcccgaaatgactgtcctagttggtggtatgcgcg

SEQ ID NO: 210717 - DNA, 638 bp, Unknown
  Bacterial polypeptide expressing nucleotide sequence isolated from the Sargasso Sea
tacagcttgggcatcagcgtcaactttccgaggctcagatagaagaggtggagccaatggagcaagaattagacttgtgccccaaaaagattgggaagttaataatccatctgaattgtctaaggttcttaaaattttagaaaagataaaaaaaggctttgatactaaaagtaaaacagtttcaatagccgacctaattgttttgggcggttgtgctggaattgaaaaagctgcaaaaaatgcaggtcaaaaagtgtcagttccatttacacctggtcgtggagatgcttctcaagatcaaacagacacatattctttcgatttacttgaaccaaaagcagatggatttagaaactatattgtaaacaaacctaacggatcaccaaataagcctactgtaacagcagaagagatgttggtagatagagcccagttaatgaagcttactgcacctgaaatgacagttctagtaggtggtatgcgtgttctaggtacaaattttgataattcaaaacacggtgtttttacaaaaaaaccaggggcacttacaaatgatttcttcattaacttgcttgatatgaatacaaagtggaaagaaacttcaaaagaagaagtattgtttgaaggcatagatcgta

SEQ ID NO: 210718 - DNA, 892 bp, Unknown
  Bacterial polypeptide expressing nucleotide sequence isolated from the Sargasso Sea
agacccatcttatggacaatttctagacatttccataataacccaaaagagtttgctgacgcttttgccagagcatggtttaagcttacgcatcgtgatatgggacctcgtgcatgctacttaggacctgaagttccaaaagaaaaattaatttggcaagatccaatatcaaaacctaattataaaattaaaaataaagatataaaatttttaaagacaaaaattttaaaatcaggactttctatttctcagcttgtttcaacagcttgggcctcagcttcaacttttcgtggatcggacaaaagaggtggagccaatggtgcaagaataagactagagccacaaaaaagttggtcagtaaataatccatctcaactaaataaggttattaaaattttagaaaaaattaaaaataattttgataataaaaagaaaaatgtttcaattgctgacttaattgttctaggaggatctgttggaattgaaaaagcagctaagaaggcaggctataaaataaacgttccattttcaccaggcagaggtgatgcgacgcaagatcaaacagatacccattcttttagtttacttgaaccaaaagctgatggatttagaaactatattacaaatatgacaaatggatctacaaagaaacccgatgtttctgctgaagagatgttagttgataaagctcaacttatgaaactatcagtacctgaaatgacagttttaataggtggaatgagagttttaaacactaactttgataaatctactactggtgtttttacaaaaaaaccagaaacacttacaaatgacttttttatcaatctacttgatatgggaataacttggaaagagaccgatagtaacgaacaattatttaaaggtagaa

SEQ ID NO: 210719 - DNA, 865 bp, Unknown
  Bacterial polypeptide expressing nucleotide sequence isolated from the Sargasso Sea
gttccagatgaagaattgatttggcaggatcctattcctgaaggtaatactgattacgatgttagtaatgttaaaaaactaatatcagaatcaggtctttccattcaagaaatggtagagacagcttgggctagcgcttcaacttatagaaactctgacatgaggggcggtgctaatggtgcaagaattcgtctagctcctcaaaaagattgggaggcaaataaacctgagcagctctcgaaggttctatcgatatatgaaaaaatttcatctgaaactggcgcatcaattgctgatgtaattgttttagcaggaaatgttggtattgagaaagcttcaggatgtgaggttcaatttactccaggtagaggtgatgcctctcaggatcaaactgatgttgaatcatttgatgttttagaacctatagcagatggttttagaaattattatagctctgatgcgagcattccagcggaggagatgatgcttgataagtctcagttattaggactaacagctcctgagatgacagtcttgttgggtggaatgaggtctttaggaataagcaataatgactatggaatttttacagataatcctgagcaattgtcaaatgattatttctctacattgcttgatatgtctgtagcttggaaaccaaatggaacaggaaatacatacgagggagctgacagagtttctggtgaaacggtacgaacagctacaagagttgatttagcctttggatctaattcacaactgagagcattagcagaagtatatgcaagcgatgatgcgaaagaaaaatttacaaatgattttatttcagcttggaataaagttatgaacaatgatctgatctaaa

SEQ ID NO: 210720 - DNA, 953 bp, Unknown
  Bacterial polypeptide expressing nucleotide sequence isolated from the Sargasso Sea
tttgctgacgcatttgcaagagcttggtttaagttgactcatcgtgatatgggtcctcgttcatgctatttgggccctgaagttccaaaagaagaattaatttggcaagacccaatatcaaaaccaaaatacaagcttaaaaaaaacgatgtagattctcttaagaaaaatttatcaaaatctggattatcagtatccgaacttgtatctactgcatgggcttcggcatcttctttcaggggctctgataaaagaggcggtgcaaatggggcaagaattgctctggaacctcaaaaaaactgggaggtaaataatcctttaagactatctaaagttcttaataaattaaaaaacataaaaaagaattttgatacaaaaaaaagaatagtttcacttgcagaccttatagttctaggtggaagtgttggtatagaaaaagctgcaaaaaaagctggttacaaaattaatgttccatttatatcgggtcgtggtgatgcttcacaagctcaaactgacgaattctcttttggacttcttgaaccaaaagcagatggttttagaaattatactgtaaaaaaaacaaatggatctagtaaaaattcaatttccgacgaagaaatgttaattgataaagctcaattaatgaaacttactgcacctgaaatgaccgttttaattggtggtatgaggatgcttaatacaaatttcgatggttctaactacggagtatttacaaaaaaaacggaaactttaacaaatgacttctttgtcaatttattagatatgaatactacatggaaagagattgataaagatgaaactacctttgagggtaaagatcgtagaacaaataaagttatgtggaaagctacacgtgctgatcttatttttggctcaaactcacaattaagagcattatcagaagtgtatgcttgcgaggattcgatgcaaaa

SEQ ID NO: 210721 - DNA, 862 bp, Unknown
  Bacterial polypeptide expressing nucleotide sequence isolated from the Sargasso Sea
agaaacggttgctcttacagcaggtggacacacctttggtaaatctcatggcgctgcagatccagatacgtatgttggtcctgagcctgaaggtgctccaatggaagaaatgggcttaggttggaaaaactcttatgagagtggaaaaggtggtcatacgataacaagtgggattgagggagcatggactgcaaacccaactcaatgggacaatggttattttgatattcttttcggttatgagtgggaattagttaaaagtcctgctggagcatatcaatggcatcctattaatcctaaagacgaagatatggctcctgacgctcatgatagctcaaaaaaggttactacaatgatgaccactgctgacatggctatgagagaagatcctgaatatagaaaggtttctaaaagatttcatgaaaacccagatcaatttgctgatgcttttgcaagagcctggtttaaattacttcatagagatatgggtcctaaatcgcgttacttaggtcctgaagttccagaagaagatttaatttggcaagaccctattcctgaaggtaataaatcttttgatattgatgctgcaaaagagaaaattgctaattccggattatctgtctcagaaatggttgaaacagcatgggcaagtgcatctacttttagagggactgatatgaggggtggagctaacggcgctagaattagattagcacctcaaaaagattgggttgctaataaacctgatcaactttcaaaagtgttatctaaatatcagcaaattgctaatgatactaatgcatcaattgctgacattatagttttaggtgggaaatgtaggaatagaaaaagctactggtaa

SEQ ID NO: 210722 - DNA, 721 bp, Unknown
  Bacterial polypeptide expressing nucleotide sequence isolated from the Sargasso Sea
tatgagtaacgagttaattaaagaacaatcaaaatgtccttttacaggtgcaggaacaccaccaaagcatccaacaggcaaaggacaaacaaataaagattggtggcccaatagcctaaatttgaaaattttaagtcaacattcatcattggtaaatccaatgggtgaaaaatttaattacaaaaaagaatttaaaaaacttaattttaaagcattaaaaaaagatcttcataaattgatgaccgatacacaagattggtggccagcagattatggtcattatggtccattttttattcgtcttgcttggcatgctgctggaacttatcgaacaggagacggaagaggtggtgctggaactggaaatcaaagatttgctccattaaatagttggccagataatgtaaatttagataaagcaaggcttttactttggcccatcaaaaagaaatatggaaaaaaaatatcttgggcagatttatttatacttgttggaaatatatctctagagtcaatgggtttcaaaacttttggttttggtgctggaagagaagacatatgggagccagaagaggatatttattggggatctgaaaaagaatggcttggagtaaatcggtatagtggaaaaagagaactagaaaaccctttaggagcatcacacatgggtttaatttatgttaatcctcaaggacccctgatgctaatccagatcccttat

SEQ ID NO: 210723 - DNA, 517 bp, Unknown
  Bacterial polypeptide expressing nucleotide sequence isolated from the Sargasso Sea
tatgagcacagaaaattttaaaagcaaatcttttaaagcaaatgaattaagtaaatgcccttttacgggcgcgggaacacctgcaaagttttctgcaggtcgaggtcaaacaaacagagatttttggccaaatagtttaaatcttaaaattcttagtcaacactctaatttgtcaaatccaatggacaaaaaatttaattatgcaaaagaatttaaaaaacttaattttaaagccctaaaaaaagatctaaaaaaattaatgactaattctcaagaatggtggccagcagattatggccattatggtccgttatttattaggcttgcttggcatgcagcaggtacttatagaaccggcgatggtagaggaggagctggaacaggtaatcaacgttttgcaccattaaattcttggcctgataacgttaatttagataaagcaagactactgttgtggcctataaaacaaaagtatggaaaaaaaatatcttgggcagatcttttcattttagtagga

SEQ ID NO: 210724 - DNA, 882 bp, Unknown
  Bacterial polypeptide expressing nucleotide sequence isolated from the Sargasso Sea
ccagccggtgcctcaggccagggtagcgctcaggtaggtgctgtaagaactaatcaattctggtggccagaccaacttaacctgtcggccttgcgcgaccacgacgtgcgctctaacccttatggcgccgatttcagctatgcagaagcctttagcaaactggatctggacaaggtaaagctggacatcaatgccctgctgacacagtcacaagactggtggccagctgactttggcaactacggcccgttctttatccgtatgacctggcacagtgccggcacttaccgcactttggatggccgtggcggcgccggtggtggccagcagcgttttgaacctctaaacagttggcctgacaacggcaacctggacaaagcacgccgtttattatggccggtaaaacaaaaatacggcgaagcgttgtcatggtcagatttaatggtactggcgggcaatgttgcgctggaaaatatgggctttaaaacttacggttttgccggtggccgcgccgacgactgggaaccggatatggtgtactgggggccggaagttgaaatgctggccagcgaccgtgaagataaagacggtaagctacaacgcccgttaggcgccacacacatggggcttatttatgttaaccccgaaggccctaaaggcgtacccgacccaatcggctctgccaaaaatatccgtgttgcctttgagcgcatggcgatgaacgatgaagaaaccctggcgctgattgccggtggccacacctttggtaaaatgcacggcgcgcgcaaaccggcagactgcatggggccagagccagcagcagcgggtgttgaagagcaaggccttggctggaaaaacaaatgcggcaaaggccatcagaag

SEQ ID NO: 210725 - DNA, 817 bp, Unknown
  Bacterial polypeptide expressing nucleotide sequence isolated from the Sargasso Sea
gattgtttatttaatcacgaatgggagttaacaaaaagtcccgcaggagctcatcagtggacaccaaaacaaaatggacaaaaaattaaaatggttcctgatgctcatgacaaaaacaaaatgcacccaccaatgatgcagacaacagatatttcattaagaatggatccagcgtatggaccaatatcgaaacatttttataataacccaaaagagtttgcggatgcttttgcaagagcatggtttaaattaactcatagagatatgggtccaagagcatgttacttgggtaatgaggtaccaaaagaagagttaatatggcaggatccagttaaaaaaccaaaatataaattaaagaaaaatgatattaaaactcttaaatctaaaatatataaatctaaattgtctgtgtcagagttagtaagcacagcatgggcatcagcttcaactttcagaggatcagataaaagaggtggagctaatggagctagagttatattagagccacaaattagttgggaagtaaatgatccaaagcagattaacaaagttatcaaaactttggaaaaaattaaaaataaattcgataacaagaaaaaatctgtttcgttagctgacttaataattcttggtggaaactcaggtattgaaatagcggctaaaaaagcaggtattaaagtagatgtacctttctctccaggaagaggagatgctacacaagaacaaactgatatccattcatttggtcttttagagccacaagctgatggatttagaaattacaataaagatgagacatactacagtttcagctgag

SEQ ID NO: 210726 - DNA, 207 bp, Unknown
  Bacterial polypeptide expressing nucleotide sequence isolated from the Sargasso Sea
agaaatttattggaagtgatagaaaaacaaaaaaagctaaatggaaaggtactcgcgttgatttaatttttggctcaaattcacaattaagagctttagccgaggtttatgcatgtgaagactcaaaagataaatttattaaagattttgttgcagcatgggttaaggtcatgaatgcggacagatttgatttaaaactaaattaat

SEQ ID NO: 210727 - DNA, 571 bp, Unknown
  Bacterial polypeptide expressing nucleotide sequence isolated from the Sargasso Sea
agcagatgttattgtgctagcaggtaatgttggcattgagaaagcatctggtatgaatgtttcgtttacacctggtcgtggagatgctactaaagatcaaactgatgctgattcatttgcagttttagaacctttttctgatggctttaggaattaccacaataataatcttgaggttacacctgagcagatgttacttgacaaagctcaacttcttggtttaactgcaccagaaatgacagtacttgttggcggtatgaggtcattaggtattagttcagatgggcacggtgtttttactgatacagaaggcaagttaaccaatgacttttttgtcaatttgcttgatatgaatgtagaatggaagccatctggtaggaattcttatgaagcaacagatcgttctacaggagaaaaagtaagaaccgcaacacgagttgatcttgtttttgggtctaattctcagttaagagcgttagcagaagtctatgcttcaaatgattcgcagaaaaaatttgcgaatgactttgtggatgcatggacaaaagtgatgaatcttgatcgtttttga

SEQ ID NO: 210728 - DNA, 766 bp, Unknown
  Bacterial polypeptide expressing nucleotide sequence isolated from the Sargasso Sea
agtattcaagaacttgtcgaaaccgcttgggcaagtgcctcaacatttagaggctcagacctcagaggaggagcaaatggtgctcgtataagacttgaacctcaaaaaaattgggaggttaataaaccagagcaacttgaaaaagttttatcagtttacgaaactatttcttcagaaacaggagtatcaattgcagatattataattcttggcggaaatcttggaattgaaaaagcttctggcaagactttagattttattcctggtcgaggtgattcatctcaagatcaaacagacatagactcttttgcttatctagaaccgctttctgatggttttagaaattatcatcgggatggtcttgatgttaaagcagaagaaatgatgcttgatagagctcaacttcttggattaacagctccagaaatgacagtattgcttggtggattaagatcattaggcataactcataatgggtatggcaatttttcagaaaatccaaatgaactaacaaacgattatctgacaaagttattagacatgtcagtgtcttggcagactaatggaactggtaattcttttgaatctattgatagagcaacaggtgataaagtttcatccgcttcaagagttgatttagtttttggttcaaattctcagttaagagctattgctgaactttatgctcaagaagactcaaaagataaatttgtttctgattttatttctgcatggaataaagttatgaactctgatttatattaat

SEQ ID NO: 210729 - DNA, 829 bp, Unknown
  Bacterial polypeptide expressing nucleotide sequence isolated from the Sargasso Sea
gatgaggaaaacagttgcacttgttgcgggtgggcacactttcggtaaggcgcatggcgcaggtgatcctgatctagttggagttgaacctgagggtgccccgattgaagaaatgggttttggatggagtaatgctcatgggtcaggacatggggttgatgcaaccacaagcggtatagaggggccgtggacagcaaatcctacagtttgggataacggttatttcgatctacttttcaaatatgagtggcaattaacaaaaagtcctgcaggtgcaaatatttggcatcccgttgatctagatgaggctgatatggctcctgaagtcgatgggtcaggtaagaaagtttcacctatgatgacaactgcagatatggcgatgattactgatcccgattatcgtaaaatttcaaaaagatttcatgaaaacccaagtgaattctccgatgctttcgcgcgagcttggtttaagcttttacatcgtgatatgggtccaaaatcacgatatttaggtccagaaattcctgacgaagaacttatttggcaggatcctattccagaaggcaatgcaaactttgatataaaagcgcttaaatcagatattgcgaaaagtagtctttcagtaacagaaatgattgaaactgcatgggcatctgcgtcaacatttcgaggctcagacctccgtgggggtgccaatggcgcccgaattcgccttgcgcctcagaaggattgggaagccaataaaccgaagcaactgaaagcagtgctagatgttttagaaactctcgcagccaagcatgaagcttctctagctgatacaattgtttta

SEQ ID NO: 210730 - DNA, 778 bp, Unknown
  Bacterial polypeptide expressing nucleotide sequence isolated from the Sargasso Sea
gggtcttacagaatttctgacggtagaggaggagcaggaactggaaatttaaggttcgccccactgaattcatggcctgataatacaaacttagataaggcaagaaggttgctatggccaattaaaaagaaatatggtaactcaataagctgggctgacctatttatacttgcaggaaacatagcctacgagagtatgggtctgaagatgtttggcttctcatatggcagggaagatatctggcatcctgagaaagatatatattggggatctgagaaagaatttttagccccaagtgaggagagatatgaaaatttgcaagatacttcaactatggagaatcctcttgccgcaactcatatgggtttgatatatgtgaatcctgaaggtgtaaatgggaatccagaccctcaggttacagctttacatattagagaaacatttgcgagaatggctatgaatgatgaggagacggttgccttgaccgctggtgggcataccgttggaaaggcccatggaaatggagattcgagtgctcttggtgctgagccagaaggtgcagctgttcacgaacaaggattcggttggaagaatccaaatggatacgcaaatgctaatgaaacagtaacaagtggaattgaaggagcctggacaacaaatcctacaaaatgggatgacggatattttgagatgttattcaaccacgactgggaacttaagaaaagtccagctggagcttggcagtgggagcctgttgatattgatgaaaaaggataaa

SEQ ID NO: 210731 - DNA, 871 bp, Unknown
  Bacterial polypeptide expressing nucleotide sequence isolated from the Sargasso Sea
ttgggctgatttgtttattcttgttggaaatgttgcacttgactcaatgggatttaaaactttcggttttggagcaggaagagaagatatttgggaaccagaggaagaaatttattggggatcagaaaaggaatggtttggagttaatagatatagcggcaagagagatcttgaacaacctttaggagcttcacatatgggattaatctatgttaatccacagggaccagacgcaaatccagatcctttactagcggctcacgatataagagaaacttttggaagaatggcaatgaacgattatgagaccgcagcacttgttgctggaggccatacttttggaaagtctcatggtgcagcatcagaatctcacaaaggacctgaaccagagggatcaaaaattcacgaacaatcaaccggttggaatagtaattataaaagtggaaaaggaattgatacaataagcagtggaattgagggtgcttggacacaaaacccaattaaatgggatatgggatatttagattgtttatacgatcatgaatgggagctaactaaaagtcctgcaggtgcacatcaatggactccgaaaaaaaacggacagacaataaaaatggttccagacgctcatgataagaataaaaagcatccaccaatgatgcaaacaacagatatatctctaaaagttgacccaagttatggtccaattacaagacactttcacaaaaacccaaaagagtttcatgatgcttttgcaagagcttggtttaaactaactcacagagatatgggtccaaaagtttgttatctgggaccagatgtaccaaaagaagagctaatatggcaagatccaattccaaaacaaaaattt

SEQ ID NO: 210732 - DNA, 889 bp, Unknown
  Bacterial polypeptide expressing nucleotide sequence isolated from the Sargasso Sea
gatgcaaactacagatttgtctatgagatttgatcctgagtttggaagaatttcaaaacatttccataataatccagatgaatttgctgatgcgtttgctagagcttggtttaaattaacgcacagagatatgggaccgaaggtaaactatttaggagccgaggttcctaaagaagatttaatttggcaggacccggtgccaaaaaacaaatataaattaaaaaataaggatatagaagctcttaaagcaaaaattgcaaaatctggtctttcagtttctcatttagtgacgaccgcgtgggcctctgcatctacatttagaggttcagataaaagaggtggagctaatggtgcacgtgtaagactttctcctcaaaaggattggaaagtaaacaacccacttcaactttctaaagcaattaaagtttatgagaaaattcaaaaaggatttaattcaaaaaagaaaaatgtttctctagcagacttaattattcttggaggaaatgttggaattgaaaaagcagccaaagatgctggaaataaaattaaattaccattcaccccaggtagaggagatgcttcacaggatcaaactgatatacattcttttggtttattagaaccacaagctgatggatttagaaactatacaaattccgaaagttcatcacaagcagaagagttgcttgtagataaagcgcaattaatgcaattaactggaccagaaatgacagtcttgattggtggtatgcgagtattaggaactaactatgatggttctaaacatggtgtatttacaaaacgcccaggtaaattaacaaatgatttctttgtttatttattagacatgaatataaaatggaaagaaacttctgataaagaagatttc

SEQ ID NO: 210733 - DNA, 685 bp, Unknown
  Bacterial polypeptide expressing nucleotide sequence isolated from the Sargasso Sea
agaaatggctagggggttaatcgttacagcggaaaaacgaaaacttgaaaatccattaggagcttctcatatgggattaatttatgtaaatcctcaaggtccagatgcaaatccagatccagttttagcagctcatgatattcgcgaaacgtttggacgtatggcaatgaatgattatgagacggtagcacttgtggctggaggacacacttttggaaaatctcatggagctgcttcagagtcttataaaggtccagaacctgaagggtcaaaaatacaagatcaggcaactggttggaatagtaattataaatcaggaaaaggtgtagatactataagtagcggtctagaaggagcttggactcaaaatccaaaaaaatgggacatgggttattttgataatttatttggatatgattgggaattaacaaaaagtccagcaggagctcatcaatggaaaccaaaaaaaaatggtcatgctattgaaatggttcctgatgcacatgataaaaataaaaaacatttacctatgatgttaaccactgatctttctatgagaatggatccaaaatatggaccaatttcaaaacattttcataataatccaaaagaattttctgacgcttttgcaagagcatggtttaaacttacacatagagatatgggtcctcgtgcttgttattta

SEQ ID NO: 210734 - DNA, 800 bp, Unknown
  Bacterial polypeptide expressing nucleotide sequence isolated from the Sargasso Sea
tactttccgtggatcagacaagagaggtggagctaatggtgcaagaatcagattagagccccagaaagattgggaagttaataaccctactcaattatctaaagtaataaaaactttacaaaaaattaaaaagaaatttgataataaaaagaaaaacgtttcattagcagatctaatagttttaggagggtgtgcagcaatagaaaaagctgctaaaaaatctggaaacaatataaatgtaccatttaccccaggaagaggagatgcttcacaagaacaaacagatacctattcgtttaacctgcttgaaccaaaagcagatggatttagaaattatattataaaaaaatctaatggatccagctcttcgacaaaacaaactgtatccgcagaagaaatgttagttgataaggcacaattaatgaaacttactgctccagagatggtagttttattaggtggtatgagagtactaaatacaaattttgataagtcgaataatggagtttttacaaaaaaaccagaaacacttacaaatgatttttttgtcaacttacttgatatgaaaataacttggaaagaagtagataaaaatgaagaattatttgtaggaaaagatcgtaaaacaaataaagttaaatggactggtacgagagttgatttaatatttggatctaattcacagttaagagctattgcagaagtttatgcaacagaagattcaagaactaaatttattaatgattttgttgttgcctggtctaaagttatgaatttagatcgttttgatttaaattaaa

SEQ ID NO: 210735 - DNA, 751 bp, Unknown
  Bacterial polypeptide expressing nucleotide sequence isolated from the Sargasso Sea
tatgaatgggaactaactaaaagtccagccggtgcacatatgtggagagcaaaaaatcaaagacaggaagatatggcacctgatgcggaagacccatcaatattagtacctacaatgatgaccactgcagatatggcaatgcgtgaagatcctaagtatttagagatatctgagcggtttcacaaaaaccctaaagagtttgccgacaagtttgcaagagcttggttcaagttgttgcatagagatctgggtccgaaaagtagatatattggtcctgagatcccaagtgaggatttgatttggcaagaccctgttccggtaggtccaacatcgtatgacgtacaaaaagtcaaagaactaataaaagaactaaatcttagtattactcaattagttgaaactgcgtgggccagtgcctctacgtatcgagacacagataaaagaggaggtgctaatggttcgaggataagattattgcctcaaaagaattgggaagttaacaaaccacagcagttagaaaacattcttgcttcctatgggaaaatctcctctcagacgggtgcgtctatagcggatgttattgttttgggggggaatcttggagttgagcaggcatctggtaagtcgttggatttttctcctggtagaggggatgcaacacaggaacaaaccgatattgagtcattcgaagtccttgagccaatagcagacggctttcgtaactatatgaaagatggatactcaacttcac

SEQ ID NO: 210736 - DNA, 795 bp, Unknown
  Bacterial polypeptide expressing nucleotide sequence isolated from the Sargasso Sea
cgacttttagaggttttgacaaaagaggtggtgctaacggagcaagaataagattatcacctcaaaaagattgggaagttaataatccatctaaacttttaaaggtaataaaatctttagaaaaaattaaaaaaagttttgataaaaaaaataaaaaagtttcatatgctgatttaattgttttatgtggaaatgtaggtattgaaaaagctgccaaaaaaaatggttataatataaatgtgccatttaagccaggaagagaggatgcatctcaagaccaaacagacacattttcatttagtttacttgaaccaaaagcagacggttttaggaattatatttcaaaaaaaactaatggatattcaaaaatacattcagtatcagctgaagaaatgttgatagataagtcacaattactgaaactaagtgcacctgaaatgacagttttagttggaggtatgcgtgtattaggtactaattttgataattctaataatggtgtttttacaaaaaaaccaggaaaacttacaaacgatttttttgtgaatttacttgatatgggtacaacttggaaagaagtagataaacacgaacaattatttgaaggaaaagatcgcaaaacaaataaagttaaatggacagctacaagagctgatctaatttttggttcaaattctcaacttcgagctatagccgaggtttatgcaacggaagatagtgaatcaaagtttatagatgattttgtttctgcatggacaaaagtaatgaatttagatcgttttgatcttaattaaa

SEQ ID NO: 210737 - DNA, 923 bp, Unknown
  Bacterial polypeptide expressing nucleotide sequence isolated from the Sargasso Sea
tttctgcaggaagaggtcaacagtgagagatttctggccaaatagtttaaatttaaaaattcttagtcagcattcaaatttatctaatcctatggataaaaaatttaactatgcaaaagaatttaaaaaacttaattacaaagcgctaaaaaaagatttaaaaaaattaatgacagactcacaagaatggtggcccgcagattatggtcattatggcccattatttatcagattagcttggcatgctgcaggaacatatagaactggcgacggaagaggtggtgccggtacaggtaatcaaaggtttgctccactaaactcttggccagataacgtgaatttggataaagcaaggttacttttatggccaatcaaaaaaaaatacggaagaaaaatttcatgggcagatctatttatattagttggaaacattgcattagactccatgggttttaaaacttttggttttggtgcaggtagaacagatatctgggaacctgaagatgatatttattggggttcagaaaaagaaatgttaggtgttgagagatacagtggaaaaagagatttagagcagccgttaggtgcttcacacatgggcttgatatatgtgaatccacaaggtccagatgcaaatccagacccattgttagcagcacacgatattagagagacatttggaagaatggctatgaacgattatgagacagcagctttagttgcaggaggacatacatttggaaaatctcacggagctgcatcagagtctttcaaaggtccagatccagaagcatcaaaacttcaagaccaatctactggatggaatagtggatataaatctggaaaaggcgttgatacaataagcagtggtattgaaggtgcttggactcaaaatcctactaagtgggatatgggttatttag

SEQ ID NO: 210738 - DNA, 361 bp, Unknown
  Bacterial polypeptide expressing nucleotide sequence isolated from the Sargasso Sea
attactaggactgaccgcatcagagatgacagtccttattggcgggatgagagcacttggtatcagcgcagatgggcatggtgttttcactgatacaccaggtaaactaacaaatgattggtttgtaactctgctagacatggatgttgaatgggaagcaacaggcagaaacacatatgtagctaaacatcgtactactggtgatgaagtaaggacagcaacaaggtctgatcttgtttttggttcaaactctcagctaagagctttggccgaggtctatgctgcagacgggtcgcatgataaatttgtaaaggattttatcagtgcgtggaccaaggtaatgaaccttgatcgttttgat

SEQ ID NO: 210739 - DNA, 844 bp, Unknown
  Bacterial polypeptide expressing nucleotide sequence isolated from the Sargasso Sea
ccgttacatcggtccagaagcgcctacagaagaactgatctggcaagacccggttcccgtaggcaataccaactacgatgttgacgcggtgaaggctcagattgaggcaagtgggctgagcattcaggaaatggttgaaacagcatgggccagcgcatcaactttccgcggttctgatatgcgtggtggggccaatggtgcccgcatccgtttgtcaccgcaaaaagactgggcagcaaacaaaccggatcagttggcacgggttttatcagctctggagggaattgctgcaaaaagtggtgcttcgattgccgatgtgatcattctagcaggtaatgtgggtatcgagcaggcctctggtgtggacgttccatttacaccgggccgtggtgatgcatcacaagctcaaacagatgtggagtcatttgcggttctcgaacctgttgctgatggattccgtaactaccagaaaactgatttttctgtgagcccagaagaaatgctccttgataaagctcagcttttgggcttgtcggcaccggaaatgaccgttttgcttggtggcatgcgctccttgggcattagtgagagtgggcatggtgtctttaccaaaacaccgggcaaacttaccaatgacttttttattacgttgctggacatggatgtcacatggaaaccaactggaagtaattcctatgaggcttatgaccgagccactgggaaggcagtgagaagcgctagccgggttgatcttgtgtttggatcaaactcgcagcttcgtgccatagcggaagtgtatgcgactgacagcgcgcaaagtaaatttgtcaatgattttgtggct

SEQ ID NO: 210740 - DNA, 739 bp, Unknown
  Bacterial polypeptide expressing nucleotide sequence isolated from the Sargasso Sea
aatggatggtacaagtaaatgtcctgtaatgcatgggtcatcaacaactaatagtgggataagcacatcaaatcgtgattggtggccaaaccagttaaatgtaaacattcttcaccaaaatgataagcgatccaatccaatggcattaaactttaattataaggaagagtttaaaaaattagattattttgctctaaaaaaagatttaacagatttgatgacagatacacaagaatggtggcctgcagattatggccattatggtcctttctttataagaatgacatggcatgcagcgggaacatacaggactgcagatggaagaggtggaggaggaactggtgatcagagatttgctccacttaatagttggcctgataatggtaacttggataaggcaagaaggttgctatggccgattaaacaaaaatacggaaatcaaataagttgggctgatctatttattttaacaggaaacgttgccatagaatctatgggcggaaaaacatttggttttagtggcggaagagatgacatttggtcagcaccagaagatatttattggggaagagagactgaatggcttggaaacaaaagatatactggagaaagagatcttgaagtccctctaggagctgttcaaatgggtttaatatatgttaatcctcaagggccagacggtaatcctgatccaatagcaagtggaaaagatatcagggaaactttcgctagaatggca

SEQ ID NO: 210741 - DNA, 810 bp, Unknown
  Bacterial polypeptide expressing nucleotide sequence isolated from the Sargasso Sea
taccagggtgaacgtgagttagataatccattagctgcagtccagatgggtcttatttatgttaatcctcaaggtccagatgcaaatcctgatcctcttgcatctgctcatgatattcgcaccacatttggtcgaatggcaatgaatgactatgaaacagtggcacttgtcgcaggtggacatacatttggaaagtgccatggtgctggcgatgcagaacttgtggaaactgaacctgaaggtgcaccaattgaacagatgggtttcggttggactaataaacatggtactggtttaggtgctgataccattacaagtggacttgaaggagcttggactagcaacccaaccaaatgggataacggatactttgaattattgtttaaatatgagtgggaattaggtaaaagtcctgcaggagcacatcaatggtatgcaattgatcaaaaagaagaagatatggcaccggatgctcatgatccatctaagaaggtacctactattatggctactactgatattgctttgagagaagatcctgagtataaaaaaatatcaaagagatttttagaaaatcccgaagagtttgccgatgcttttgcaaaagcttggttcaagttacttcatagagacatgggtccaaaatcaagatacatgggtccagaagttcctgaagaggacttgatttggcaagatccagtgcctgctggttcaagtgattacgatgttgcggcagtaaaaagcaaactcaatgattctggattaacaattcaagaaatggttgaaactgcctgggctagtgcttctaca

SEQ ID NO: 210742 - DNA, 505 bp, Unknown
  Bacterial polypeptide expressing nucleotide sequence isolated from the Sargasso Sea
atggaaaatgaaggtaagtgccctgttatgcatggcgctatgacaagcaatagttcaagtggtacatccaataaagattggtggcctgagcaactaaatttaaatattctgcatcagcatgatagaaaatctgatccaatggatgagggttttgactatagaaaagaatttgaagatatcgactatgatgctctgaaaaaagatctaaatgatctcatgactgattcacaggaatggtggcctgcagactatggtcactatggtccatttttcataagaatgacatggcatgctgctggaacatatagaagtacagacggccgaggtggaggtggaactggtgcacagagatttgcccccttgaatagttggcctgataatggaaaccttgataaagctagacgactactttggccaatcaagcaaaaatatggcaagaaaatcagttgggctaatctattaatattagccggcaatgtggcaattgagtccatgggggaaagac

SEQ ID NO: 210743 - DNA, 727 bp, Unknown
  Bacterial polypeptide expressing nucleotide sequence isolated from the Sargasso Sea
tatgagtgataatgacaacaaatgtccagttatacatggttctttaactagtaatagcaattctggaacttctaatagggactggtggccagatcagctagatctgaatatcctacatcagcatgataaaaaatctgatccaatggatgaagactttgactatgcagaagaatttaaaaaacttgactatgattcactaaaaaaagatctaaatgatcttatgactgattcacaagattggtggcctgctgattacggtcattacggtcctttctttataagaatgacttggcatgctgctggtacttatagaattggagatggtcgaggtggaggaggaactggcgcacaacgctttgctccactaaatagttggcctgataacggaaatttggataaagcaagaagacttctttggccaataaaacaaaaatatgggaaacaaattagttgggctgatcttttaattctagctggtaacgtcgcaattgaatcaatgggtggaaaaacctttgggtttggaggaggacgtcccgatatttgggctccagaagaagatattcattggggtgcagaaacagagtggcttactaatgaacgttatagtggagaaagagacttagccaaccctttaggtgccgtccagatgggtttaatttatgtaaacccgcaaggtcctgatggtaatccagatcctaaagcaagtgccattgatattaaggaaaca

SEQ ID NO: 210744 - DNA, 847 bp, Unknown
  Bacterial polypeptide expressing nucleotide sequence isolated from the Sargasso Sea
atgaatgattatgagacagtagcgctcgttgcaggtggacatacatttggaaaatctcatggtgctgcagcagaatcacataaaggtcctgaaccagaaggttcaaagatacaagatcaggcaactgggtggaatagtaactacaaaagtggtttaggagtagatactattagcagcggcattgagggtgcatggacttcaaaccctattaaatgggacatgggatattttgataatttatttggctatgattgggaattaactaaaagccctgcaggagctcatcaatggaaacctaaaaggaatgggcatgatatagaaatgactccagatgctcatgatagatctaaaaaaaatcttccaatgatgcaaactactgacctttcattaaaattagatcctaaatatgggccaatctctaaacactttcatgaaaatccaaatgaatttgctgatgcctttgcaagagcttggtttaaacttactcatcgcgatatgggtccaaaagtaaattatcttggttctgatgttccaaaagaggaattaatctggcaagacccaataacaaaaaataaatataaacttaaaaataaagatattgagttattaaagaaaaaaatatctaaatctgggttatctgtttcacagttagttacgactgcatgggcttctgcttcaacttttagaggatcagataaaagaggaggtgctaatggagcgagaatagctcttgaacctcaaaaagattggaaagttaacaatccttcaaaattgtctgctgtaatcagagttttaaataaaattaaaaaaggatttgattcaaaaaataaatcagtttcattagcag

SEQ ID NO: 210745 - DNA, 828 bp, Unknown
  Bacterial polypeptide expressing nucleotide sequence isolated from the Sargasso Sea
ttaatatggcaagatccaataaataaaccaaaatacaagttaaaatcaaaagatataaaagatttaaaattaaaaatttcaaaatcaaaaatatctacatctgatttagtttctacagcttgggcgtcagcatctacttttagaggttctgataaaagaggtggcgctaatggagcaagaataatgcttgagccacaaaaaaattggaaagtgaacaatccaaaaaaattatctaaggttattaatgatttaaaaaagataaaagataaatttgataataaaaagaaaagtgtatctatggctgatttaattgttttagcaggaggagttggtatagaaattgctgccaaaaaagctggttataaaattaatgtaccattttcacctggcaggggtgatgcaagacaagatcaaactgacgctcattcatttggtctgttagaaccacaatctgatggttttaggaattatttaaatggtggagcaacaaatgtatcatcagaggaaaaattaattgataaagctcaactaatgggtcttacagctcctgaaatgacagtgctaattggaggtatgcgagtgttaaacacaaattatgataaatcgaaagaaggagtatttaccaataagcctggtgttcttacaaatgattattttataaatctgttagatatgaacacaacatggagagaaacagataaatcggagcaaaagtttcatggcatagatagaaaaactaagaaaactaaatggaaggccacaagagttgatttgattttcggttcaaattctcaacttagggcccttgcagaagtttatgcatgtgat

SEQ ID NO: 210746 - DNA, 440 bp, Unknown
  Bacterial polypeptide expressing nucleotide sequence isolated from the Sargasso Sea
aatggatgccgagagtaaatgcccagtaatgcacggtgcgaatacaaaaaataccggagaaggaactactaatagagattggtggcctaatcaactagacataagtattcttcatcaacatgatgaaaaatctaacccaatggaaaaagattttaattatcgtgagcacttcaaaaaaattgattatgatgggttaaaaaaagatcttaatgagttaatgactaactcacaagattggtggcctgcagactatggtcactacggacctttttttattagaatgacttggcatgcagcaggaacttaccgaaccgctgatggtcgcggtggtggtggaactggcgcacaaagatttgctcctttaaatagttggccagataatgggaatttagataaagcaagaagactcttatggccaattaagcagaaaatatggaaac

SEQ ID NO: 210747 - DNA, 832 bp, Unknown
  Bacterial polypeptide expressing nucleotide sequence isolated from the Sargasso Sea
agatattgggagccagaggaagatatttattggggatcagagaaagagtggcttggtgttaatagatacagtggaaaaagagatttagaacagcctttgggcgcttcacacatgggccttatttatgtaaaccctcaaggtccagatgcaaaccctgaccctctattggcagctcatgatattagagaaacatttggcagaatggcaatgaatgattatgaaacagctgcattagttgcaggtggacatacgtttggtaaatcacacggtgctgcaccagaatctcacaaaggtcctgaaccagaaggttcaaaaatttatgaacaatctactggttggaatagcaattataagagtggaattggcgttgacactataagtagtggaattgaaggtgcttggactcaaaacccaaccaagtgggacatgggatatttagattgtttgtatgatcatgaatgggaattaaccaaaagtccggctggggcacatcaatggacaccgaaacaaaacggtcaaaaaattaagatggttccagatgcacatgaaaaaggtaaaaaacatcctccaatgatgcaaactacagacatttcattaaaagttgatccaagttatggaccaataacaagacatttccacaaaaacccaaaagaatttcatgatgcttttgcaagagcatggtttaaactaactcatagagatatgggaccaagagtatgttacttaggtccggatgtaccaaaagagaaattaatctggcaagacccaattcctaagcagaaatataaaattaaaaaagaagaagtgaaaaacttaaatcgaaaattttaaa

SEQ ID NO: 210748 - DNA, 837 bp, Unknown
  Bacterial polypeptide expressing nucleotide sequence isolated from the Sargasso Sea
ttaatttggcaagatccgatatcaaaacctaattataaaattaaaaataaagatataaaatttttgaagacaaagattttaaaatcaggactttctgtttctcagcttgttacaacagcttgggcctcagcttctacttttcgtggatcggataaaagaggtggagctaatggtgcaagaataagactagagccacaaaaaagttggtcagtaaataatccgtctcaactatccaaagttattaaaattttagaaaaaattaaaaagagttttgataataaaaagaaaaatgtttcaatggccgacttaattgttttaggaggatctgttggaattgaaaaagcagctaataatgcaggccatagaataaacgttccatttacacctggtagaggtgatgctacgcaagatcaaacagattcccattcttttagtttattagaaccaaaagccgatggatttagaaactatattacaaaaatgacaaatggatctacaaaaaaacctactgtttctgctgaagaaatgctagttgataaagctcaacttatgaaactatcagtacctgaaatgacagttttattaggtggaatgagagttttaaacactaattttgataaatctaatattggtgtttttacaaaaaaaccagaaacacttacaaatgacttttttatcaatctacttgatatgggaataacctggaaagagaccgataatactgaacaattatttaaaggtagaaaccgtaaaactaaaaaagttgaatggacagcttctagagttgatttaatttttggttcaaattctcaacttagagcaatcgcagaagtttat

SEQ ID NO: 210749 - DNA, 834 bp, Unknown
  Bacterial polypeptide expressing nucleotide sequence isolated from the Sargasso Sea
actgtgtgatagaattttagataatccacttgcagcagtgcaaatgggattgatttatgtaaaccctgaaggaccagatggaaaagctgatccacttgctagtgcaaaagatataagagaaacttttgcaagaatggcaatgaacgacactgaaactgtagcactaactgcaggtggacatacttttggtaaagcacatggtgctggtgatccagctctagttggagcagaaccagaaggtgctcctttagaacaaatgggtttaggttggaacaacttgcacggttcaggtgttggtcgtgataccacaacaagtggtatagaaggtccatggacgcctaatccaactcagtgggataatggatactttgatatgcttctaggttacgaatggaagttagtaaaaagtccagcaggtgctcaaatctggcatgcgatagatcaaaaagaggaacacatggcacctcaagttgatgatccatcagtaaaagttcctactatgatgacaacagcggatatggcgatgcgtgaagatcctgaatacagaaaagtatcggaaaaatttcacaaagacccggaatattttgctgatcaatttgctagagcttggtttaaacttctacatagagatatgggtccaaaaactagatatatgggaccagaagttccagaagaagaattgatttggcaagaccctgtgcctcaaggtgattcaaactatgatgttgaaacattaaaagctaaaattttaagttgtggtttaacaactcaagaaatggttgaaactgcttgggcaagtgcctctacatttagaggatcagatatgagaggtgg

SEQ ID NO: 210750 - DNA, 808 bp, Unknown
  Bacterial polypeptide expressing nucleotide sequence isolated from the Sargasso Sea
gttaaccgttatagtggcaagcgtgatcttgaaaatcctttaggtgcatctcacatgggtctgatctatgtaaatccgcaaggaccagatgctaatccagatcttcttttagcagctcatgatattcgtgaaacttttggtcgtatggctatgaacgactacgaaacagtagcacttatagctggaggacatacttttggaaaatctcatggagctgcacctgaatcacataaaggtccagaacctgaaggttcaaaaattcaggatcaggcaactggctggaatagtaattacgaaagcggcatgggagtccacaccattagtagtggacttgagggagcttggacagttgacccaattagatgggataatggttacttcgatttattatttggtcacgagtgggaattaacaaaaagtcctgcaggggcacatcaatggaaaccaaaaaagaacggtgctgatataaatattattcctgatgcacacgatccgtctaaaaaacatcctccaatgatgttaactaccgatctttctctaagaatggatcctaaatatggaccgatttctaaaaaatttcatgaaaatctagatgaatttgcagatgcgtttgcaagagcttggtttaaacttacccatcgtgatatggggcctcgcgcttgttatttaggtccagaagttccaaaagaagaattaatttggcaagatcctgtaccaaaagctaagtacaagcttaaaaaaggagatgttaatagtcttaaaacaaaaatatcaaaatcaggactatctgtttctcagctagtttcca

SEQ ID NO: 210751 - DNA, 703 bp, Unknown
  Bacterial polypeptide expressing nucleotide sequence isolated from the Sargasso Sea
catgagcactcaatctgaacagtctaaatgcccttttactggcgcaggaacacctcctaagcatcctacgggtcgcggaacttcgaatagagattggtggccgaataatttaaatttaaaaattttaagtcaacattctgaaatggttgacccaatggatggtaagtttagttactcaaaagaatttaaaaaacttaattataaagccctaaaaaaagatttgaataaattaatgaccgactcacaagattggtggccagccgattatggtcattacggtccactatttatcagattagcatggcatgcagctggaacttatagaactggcgacggtagaggaggcgcaggcactggaaatcaacgttttgctccgctcaacagttggccagataacgtaaacttagataaagctcgattgcttctttggccaattaaaaaaaaatatggaagaaaaatatcttgggctgacctttttgtgttagtcggtaacgttgcattagaatcaatgggatttaaaacttttggttttggtggtggtcgtgcagatatttgggaaccagaggaagatatatattggggatcagagaaggaatggcttggggttaatagatatagtggaaagagagatttagaaaatcctttaggagcttctcatatgggcttaatatatgtaaatcctcaaggtccccggacgctaatc

SEQ ID NO: 210752 - DNA, 691 bp, Unknown
  Bacterial polypeptide expressing nucleotide sequence isolated from the Sargasso Sea
aactttaaataaaattaaaaaaggatttgattcaaaaaataaatcagtttcattagcagacttaatagttttaggaggatcagttggtattgaaaatgctgccaaaaagagtggtaaaaaaattaaagtttcattcaaatcaggaagaggtgatgcaaaacaagatcaaacagacaaaaattcatttaatcttcttgaacccatagcagacggttttagaaactatattaagctacatgctaaaggatataccaatggaaaaggtatccctactaattcagccgaagaaatgttgatagataaagcccagcttcttggattaactggtccagaaatgacagttttaattggaggtatgcgagtattaaatactaactttgatggttcagattatggtgtatttacaaaaaaacctggatcattaaccaatgatttctttgttaatttattagacatgaaaactacttggagagaagtagataaagaagaacagttttttgagggaatagatagaaaaacaaaaagagtaaaatggagagcgacacgtgcagatttaatatttggatctaattctcaattaagagcattatctgaagtttatgctacagacgattcaaatgaaaaattcttaaatgattttatatctgcttggacaaaagtaatgaatttagatcgttttgatttaaattga

SEQ ID NO: 210753 - DNA, 385 bp, Unknown
  Bacterial polypeptide expressing nucleotide sequence isolated from the Sargasso Sea
gatttactcatactcgctggtaatgtggcgatagagtctatgggcggaacaacttttggttttagcggtggaaggccagatatttgggcacctgaagaagatattaattggggtattgaagcagagtggctcggaaacgatagatataccggtgaacgccgtctggataacccacttggagcagttcaaatgggacttatttatgttaatccagagggaccagacggcaaccccgatccactggcaagcgcaagggatattagggaaacttttggtagaatggcaatgaatgatcgggaaaccgttgcccttgttgcggggggtcataccttcggaaaagcacatggcgcaggtgacaccgcaaatgttggaaatgaaccatgaa

SEQ ID NO: 210754 - DNA, 782 bp, Unknown
  Bacterial polypeptide expressing nucleotide sequence isolated from the Sargasso Sea
gatatttgggaaccagaagaagatatttattgggggatccgaaaaagaatggctaggagttaatcgttatagtggaaaaagagaattagaaaacccattaggagcttctcatatgggattaatttatgtaaatccacaaggcccagatgcaaacccagatcctattttggccgctcatgatattcgtgaaacctttggacgtatggcaatgaatgattacgaaacagtagcacttgttgctggaggacatacttttggaaaatctcatggagccgcatccgagtcattcaaagggaaagagccagaaggttcaaagattcaagaacaagcgactgggtggaatagtagctacaaaagtggaaaaggagttgatacaattagtagtggattagaaggggcatggacacaaaatccaaaaaaatgggatatgggatattttgataatttatttggatatgattgggaattaacaaaaagccccgcaggagcttatcaatggagaccaaaaaaaaatggtcatgctataaacatggttccagacgcacatgataaaactaaaaaacatctacctatgatgttaacaactgatctttctatgagaatggatccaaaatatggaccaatatcaaagcattttcatgataatcccaaagaatttgcagatgcatttgcaagatcttggtttaagcttacgcatagggatatgggacctcgtgtttgttatttaggaccagaggttccaaaagaaaaattaatttggcaagatccaattacaaaaccta

SEQ ID NO: 210755 - DNA, 660 bp, Unknown
  Bacterial polypeptide expressing nucleotide sequence isolated from the Sargasso Sea
catgagtagcgaaatcaacaacgacatcaataagtgcccatttcacggtgagggaatacctcaaaagcataattctggaaaaggacaaaccaacaaagactggtggccaaacagccttaatcttaaaatattaagccaacattcatcaatggttaacccgatggataaaaaatttagctataaaaaagaattcaaaaaattaaattttaaagctctaaaaaaagaccttcataaattaatgacacaatctcaaaattggtggccagctgattatggtcactatggaccgctattcattcgtcttgcttggcacgcagctggaacctatagaactggtgatggaagaggaggcgctggaacaggtaatcaaagatttgcacccattaacagttggcctgataatgttaatttagataaagctagactacttctttggccaattaaaaaaaaatatgggaataaaatttcatgggctgatttatttatattagttggaaacgtagcgcttgaatcgatgggtttcaaaacttttggttttggtggtggaagagaagatatttgggaaccagaggaagatatttactggggctctgaaaaagaatggcttgcaaacaatagatacaattctaaaagagaattagaaaatccactaggagcagt

SEQ ID NO: 210756 - DNA, 807 bp, Unknown
  Bacterial polypeptide expressing nucleotide sequence isolated from the Sargasso Sea
aaagcacatggtgctggagacccttctcttgtcgggcctgaaccagagggcgcaaaaattgaagagatgggctttggatggattagtaaacatggttctggtaaaggtagtgattctataacgagtggaattgaaggtgcctggacgaccaatcctatcaagtgggataacggatattttgatcttcttttaaactatgaatgggaacttactaaaagtcctgctggagcaaacatatggcatgcagtaaaccaaaaagatgaacacaaagctcctgatgcagaagactcttcgaaacgagttccaacaatgatgacaactgctgacatggcgatgcgtgaagatccatcataccgaaaaatttcagaaagatttcataaaaatcctgatgaatttcaagacgcatttgctcgtgcttggtttaaacttttacaccgtgatatgggaccaaaaattcgttacatgggccctgaagtgccagaagaagaattaatttggcaagatccaattcctaaaggaaatgcagattataatattgattccgctaaggcaaaaattcttgaaagcggactatctattcaagaaatggtagaaacagcttgggctagtgcatctacttttcgtggaacagatatgagaggcggtgcaaatggtgctcgtatacgtcttgagcctcaaaaaaattgggaagcaaataaaccagaccaactttcaaaagtattaaacatatttgaaggtatagcttcagacacgggagctagtgttgcagacataatagttttagctggaaatgttggaatagaaaaa

SEQ ID NO: 210757 - DNA, 782 bp, Unknown
  Bacterial polypeptide expressing nucleotide sequence isolated from the Sargasso Sea
tattgggtgaaatggcactttaaaactaaccaaggtattaaaacgctaactaacgaagaagcggcaaagatgcctgcctatggcgctcagcaagatctggtcgaaagcattgataacggcgattttccatcgtggaccgtgaatgtgcagattatgactgaagaggaagcgcgtaattaccacattaatccgtttgacctaacgaaggtatggccgcacagcgactttccactcattgaagtagggcagttggaattaaaccgtaatgtggataactactttgctgaaacggaacaagcagcgtttgcgccgagcaatttggttcccggcattggtgcatcgccagacagaatgcttcaagcgcgactaattggctatcaagatgcacataggtatcgcattggtgcgaactacaatcaaattccggtaaacgcgccgcgttgcccagtgcacaattaccaacgagatggagcctttgccggaattaatccagcacttgcaggaagtggagcgaacttttaccccaacaatcgcgcgcgagttggtgagccagctgaagcgccagagtttcaagagccgcctatgccgctagagcaagacgcatggttagatatttacgataaccgtgacgaagataactactcacaggccggtgacctttaccgcatcatgagtgaagaccaaaagcagcagttggtaaacaacattgctgaaggcctaagccaagctacgaaggacgttcaagaagccatgtttgtacaatacgatttagccgacagcga

SEQ ID NO: 210758 - DNA, 721 bp, Unknown
  Bacterial polypeptide expressing nucleotide sequence isolated from the Sargasso Sea
agagaacttgaaaatcctttaggagcatctcatatgggattaatttatgtaaatcctcaaggaccagatgcaaatccagatcctctattagctgcgcatgatatacgtgaaacttttggacgtatggccatgaatgattatgaaactgttgctcttgttgcgggtggacatacatttggtaaatctcatggtgcagcttctgagtctcataaaggaccggagccagaaggttcaaaattacaagaccaagcaacaggatggaatagtaactataaaagcggtttaggtgttgatactattagtagtggactagaaggtgcttggactcaaaatcctaagaagtgggatatgggctattttgataacttatttggatatgattgggaattaactaaaagccctgctggtgctcatcagtggacacctaaaaaaaatggtcatgccataaaaatggttcctgatgcacatgataaaactaaaaaacatgcaccgatgatgttaactacagatctttctatgagaatggatcctaaatatggagcaatatcaaggcattttcataaaaatccaaaagaatttgcagatgcatttgcaagagcatggttcaaacttactcatcgtgatatgggacctaaatcttgctatttgggaccggaagttccaaaagaagcattaatttggcaagacccaattccaaaatctaaatataaacttaaaaaaa

SEQ ID NO: 210759 - DNA, 659 bp, Unknown
  Bacterial polypeptide expressing nucleotide sequence isolated from the Sargasso Sea
tatgaaaaattttggaaatggaaaatgcccagtaatgcacggtggtagcacaactcaagaaacgtcagtcacgaagtggtggccaaaaactttaaatcttgacatattacatcaacatgataaaaaaacagatcctcttggtgaaagttatagttataaaaaacaattaaaaagtttagatttttcttccctagagaaagatatgcatgagcttatgactacacctgtagaatggtggcccgctgattggggtcattatggtggattgatgattagaatggcatggcatgctgctggttcatatagaatttctgatggaagagggggagcaggaacaggaaatttaagatttgctccattaaattcgtggcctgataatacaaatttagataaagcaagaagattactttggcctattaaaaaaaaatatggcaattcaataagctgggctgatttatttattcttgctggtaatattgcgtatgagagtatgggtcttaagatgtttggtttttcatatggaagagaggatatctggcatcctgagaaagatatttattggggatctgaaaaagaatttttagctcccagcgaacaaagatatgaaaacattaaagatacttctaccatggagaatcctttagcagcaactcatatgg

SEQ ID NO: 210760 - DNA, 581 bp, Unknown
  Bacterial polypeptide expressing nucleotide sequence isolated from the Sargasso Sea
aatgagcacagaatcacaagaaaaatgtccagtcatgcatggtgcactaactagcaatcaatcttcaggaacttcaaccaaagattggtggcctgagcaacttaatcttaatattttgcatcaacatgatcgaaaatctaacccaatgggcgaagattttaattatagagaagagtttgcaaagattgattatgaagctcttaaaaaagatttaaatgatctcatgactgattcccaagaatggtggccagctgattatggtaattacggacccttttttattagattaacttggcatgctgccggaacatatagaagtaccgatggaagaggtggaggaggaaccggtgctcaaaggtttgctccattaaacagttggccagataacggaaatttagataaggcaagaagattgttatggcctataaagcagaaatatggcaatcaaataagttgggccgaccttttaattttgtctggtaatgttgcaattgaatctatgggtggaaaaacttttggatttagtggaggtagagacgacatctggggacctgaagaagatattctgtggggagcagaaa

SEQ ID NO: 210761 - DNA, 607 bp, Unknown
  Bacterial polypeptide expressing nucleotide sequence isolated from the Sargasso Sea
tggatgtgctgcaattgaaaaagccgctaagaaagctgggcacaatgtaaaagttccattttcgccaggccgtggagatgcatcacaagatcaaacggatatacattcctttggtttactcgaaccaaaagcagatggatttagaaactatattataaaaagaactaatggatcatcaaaaaaagttgcagtctctgcagaggaaacacttgtagacaaggctcagctactgaagcttacagcacctgaaatgacagtacttgttggtggaatgcgtgtgctaaacacaaattttgataaatcaaaacatggagtatttacaaaaaaaccagaggtacttacaaatgatttttttgttaatttactagatatgaacacaacatggaaagaggtttctaaagaagaagaattatttaaaggacgaaaccgtaaaacaaacaaggttagttggactggtactcgttttgatttaatatttggatcaaattcacagctaagggcattagctgaagtttatgcatgcgaagattctaaatctaagtttataactgattttgtatctgcgtggacaaaggttatgaatttagacagatttgatttaaaataa

SEQ ID NO: 210762 - DNA, 853 bp, Unknown
  Bacterial polypeptide expressing nucleotide sequence isolated from the Sargasso Sea
aacagcgatattaatgttcttaaaacaaaaatattaaaatcaggtctttccatatctgatttagtttttacagcttgggcgtcagcatcaacttttagaggttctgacaaaagaggtggagccaatggagcaagaataagattagctccacaaaaagattggaaagttaataatccaactcaattatctaaagttattaaaactcttgaaaaaattaagaaaagttttgatggaaaaaagaaaagcgtatcaatggcagacttaatagttttgggcggatgtgctgctattgaaaaagctgctaataaagctggtcataatgtaaaagttccattttccccaggccgtggcgatgcatcacaagatcaaacagacattcactcgtttggtttacttgaaccaaaagctgatggatttagaaattacattacaaaaaaaactaatggatcatctacaaaacccactgtatcagcagaagaaactcttgttgacaaagcccaacttttaaaacttactgcacctgaaatgacagtacttataggaggtatgcgggtactaaatacaaattttgatagatcaaaacatggagtattcacaacaaaacccgagacacttacaaatgatttttttgttaatttacttgatatgagcacaacatggaaagaaacttccaaagaagaagatttgtttattgggaaaaaccgtaaaacaaataaagttaagtggtctggcacacgttttgatcttatatttggatcaaactcacaactaagagcaatcgctgaagtttatgcttgtgaagattctaaatctaagtttattactgattttatatcagcatggtcaaaaaaag

SEQ ID NO: 210763 - DNA, 680 bp, Unknown
  Bacterial polypeptide expressing nucleotide sequence isolated from the Sargasso Sea
aatggctatgaacgactacgaaacagttgctttagttgcaggaggtcatacatttggaaagtcccatggtgcagcaccagagtctcataagggacctgaaccggaaggatctaaaattcaagaacaggcaacaggctggaatagcaattataaaagtggtttgggagtagatactataagtagtggaattgaaggagcatggacaagcaatccaattaaatgggacatgggctattttgataatttatttggatacgattgggaacttacgaaaagcccagcaggggcacatcaatggaagccaagaaaaaatggtcatgctataagtatgaccccggacgctcatctaaaatcccagaaaaacatgcctatgatgcaaactacagatctatctttaaaattagatccatcttatggacctatttcaaaacattttcataataatccgaaagagttcgctgatgcattcgcaagagcttggtttaaacttactcatcgtgatatgggtcctcgttcatgttatttgggtcctgaagttccaaaagaagaattaatttggcaagacccaataccaaaaccaaaatataaacttaaaaaaaaggatataaatactcttaagaataatttatcaaaatctggattatctgtatccgatcttgtatctacagcatgggcttctg

SEQ ID NO: 210764 - DNA, 830 bp, Unknown
  Bacterial polypeptide expressing nucleotide sequence isolated from the Sargasso Sea
gaccaatcaactgggttggaatagtagttataggtcaggtaaaggctttgatactataagcagtggcatcgaaggagcttggactcaatccccaacaaaatgggatatgggttattttgattgtttgtttagccatgaatgggaacttactaaaagtcctgcaggcgctcatcaatggactccaaagaaaaacggtcaaagaataaaaatggttcctgatgcacatgataaaaataaaactcatcctccaatgatgcagacaacagatttatcattaagaatggacaaaagttatggacctatatcaaaatatttttataataatccaaatgagtttgccgatgcctttgcaagagcttggtttaagttaacacatagagatatgggtccaaaaacttgttacttaggaagtgaggttcctaaagaagaacttatttggcaagacccaatagatagaccaaaatataaacttaaatcagtagatataaaaaatttaaaatctaaaattctaaaatctaaaataactgtttcagatctagtttctacagcttgggcttctgcctcaacctatagaggttctgataaaagaggcggtgcaaatggtgcgagaatattattagagccacaaaagagctggaaagttaataatccaaaacaacttacaaaagttattaaatctcttcaaaaaattaagaaatcatttgatacaaaaaataaatcagtatcaatggcagaccttattgtattaggtggaaatgttggaatagaaatcgctgcaaaaaaagcaggtcataaagttaatgttccatttttacctggtagaggagatg

SEQ ID NO: 210765 - DNA, 877 bp, Unknown
  Bacterial polypeptide expressing nucleotide sequence isolated from the Sargasso Sea
atgctttttggctatgagtgggagctggtgaaaagtcctgcaggtgcccatcaatggcacccagttagcccaaaagatgaggaccttgcacctgacgttgaagatagctctataaaggttactacaatcatgactactgctgatatggcaatgcgtgaagatcctagctatagaaaaatatcaaaacattttcatgaaaatcctgacgaatttgctgatgcttttgcaagagcttggttcaaattactgcatagagatatgggtccaaagaaaagatatctcggaccagaggttccaggtgaagagttgatttggcaagatccagttccagaaggaagcaccgattatgacgttgaggatgtaaagtccaaaatcgaaagctcaaatcttactattcaggaaatgattgagacagcgtgggcgagcgcttcaacatttagagggtcggacttacgtggaggtgctaatggggcacgaattagattggctcctcaaaaagactgggaagcaaacaaaccagaacagttggaaaaagttctaaatgttttagagcctattgcaaatagtacaggtgcatcaattgctgatgtcattgtacttgctggtaatgttggaattgaaaaagcttgcggtaaaagcattcctttcactccaggcagaggagatgcatcgcaagaacaaacagatgagcattcttttgcggttcttgagccttattcagatggatttagaaattatcacaaaagcaattttcaaattagttctgagcatatgttagttgataaagctcagttattaggcttgacgtcaactgaaatgacgttgctagttggaggattgaggtctctaggtattgatcacaagactcaagtaattt

SEQ ID NO: 210766 - DNA, 1318 bp, Unknown
  Bacterial polypeptide expressing nucleotide sequence isolated from the Sargasso Sea
cccagagtctcataaaggactagaaccagagggttcaaaaattcaagaacaggcaactggatggaatagtaattataaaagtggaaaaggtgtggatacaataagtagcggaatagaaggagcatggactacaaatcctataaaatgggatatgggttatttcgataacttgttcggatacaattgggaacttacggcaagtccagctggagcacaccaatggaagcctaaaaagaatggacgtgacgttgaaatgacaccagatgcacatgaaaaatctagaaaaaatttaccgatgatgcaaacaacagatttatcattaaaaatggatcctaaatacggacctatttcaagacactttcataataacccaaaagaattcgcagatgcttttgcaagagcttggtttaaacttactcatagagatatggggccaagagcttgctatttaggtcctgacgttccaaaagaaaaattaatttggcaagacccaattccaaaagcaaaatataaacttaaaaacaaagacataaaacaattaaaatcaaagatcttaaaatctggtctttctatatccgaattagtatctactgcatgggcctcagcatcaacttttagaggatcggataaaagaggcggagcaaatggcgcaagaataagactggagccacaaaaaagttgggaagttaataatccgaaaaaattatcaaaagttcttagtaagttggaaaaaattaaaaaaggttttgatacaaaaaagaaaatagtgtcaattgccgacttaatagttttagctggaggcacagctattgaaaaggctgcaaaaaaagggggacataaaattaatgttccttttagccctgggcgtggagatgcttcacaagatcaaactgataagttctcatttggattgcttgaacctaaagcagatggttttagaaattatgtaactagaaaaactaatggacacggtaaaatttcaatttcggctgaagagatgcttatagataaagctcaattaatgaaacttactgctcctgaaatgaccgttcttgttggaggaatgagagttcttaatacaaattttgatgggtcaaaaaatggagtatttacaaaaaaaactgaaactttaacaaatgatttttttataaatcttttagacatgaatacgacttggaaagagactgataaaaacgagaccttatttgagggacgagatcgtaaatcaaacaaagttaaatggaaagggactcgcgcagatcttatttttggttcgaactcacaattaagggctctagccgaagtttacggatgtgaa

SEQ ID NO: 210767 - DNA, 889 bp, Unknown
  Bacterial polypeptide expressing nucleotide sequence isolated from the Sargasso Sea
aatgagtactgaaaattttaaaaataaatcttttaaagcaaatgagttaagcaaatgtccttttacaggagcaggcacacctgcaaagttttctgcaggaagaggccaaacagtaagagacttctggccgaatagtttgaatttaaagattcttagtcagcattctaatttatcaaaccctatggataaaaaatttaattatgcaaaagaatttaaaaaacttaattacaaatcattaaaaaaagatttaaaaaaattaatgacagactcacaagaatggtggcctgcagattatggtcattatggtcctttatttatccgattagcttggcacgctgcaggaacttacagaactggtgatggtagaggtggtgccggtactggtaatcaaagatttgctccgctcaattcttggccagataacgtgaatttagataaagcaaggttacttttatggccaatcaaaaaaaagtatggaagaaaaatttcatgggcagatttatttatattagttggaaacgtagcattagactcaatgggttttaaaacttttggttttggtgcaggtagaactgacatctgggaaccagaggatgatatttattggggttcagaaaaagaaatgctaggtgttgagagatacagtggaaaaagagatttagagcagccgttaggcgcttctcacatgggcttgatttatgtaaatccgcaaggtccggatgcaaatccagatccactactagcagcacatgacatcagagagacatttggaagaatggctatgaacgattatgaaacagcagctttagttgctggaggacatacatttggaaaatctcacggagcagcatcagagtcttataaaggtccagatccagaagcttcaaaa

SEQ ID NO: 210768 - DNA, 839 bp, Unknown
  Bacterial polypeptide expressing nucleotide sequence isolated from the Sargasso Sea
tatgggtccaagagcatgctatttaggtccagatgtaccaaaagagcaattaatttggcaagatccagtaccaaaacaaaaatacaaaatcaaaaaaagtgaaatcaaaaaacttaaagctcaaattttaaaatcagggcttaaaacttcagaattaatatcgacagcatgggcatctgcatcgacttttagaggctctgataaaagaggtggagcaaacggagcaagattacgacttgaacctcaaaaaaattgggaaataaataaagtttcaaaaactgataaggtgattaaagctttagaaaaaataaagaagcaatttgatggtaaaaagaaatcagtttcaattgctgacttgattgttttaggtggttgtgttgccattgaaaaagctgccaaaaaagctggtcataaagttgacgtacctttttctgcaggtagaggtgatgcatcccaagatcaaactgatataaattcatttggtttattagaaccaaaagcagatggatttagaaattatttaaattcagacacaaatatttcagcagaggaacttttagtagataaagcacagcttatgagattgacagcgccagaaatgacagttttagtcggcggcatgagggtgttagatgctaattatgatggatcagataatggtgtattcacaaaaaagcctggttcattatcaaatgattactttaaaaatttattagacatgaacacaacttggaaagaagttgataaagaagagcagttgtttgttggaaaggatagaaatacaaataaagttaagtggaaaggcactagagtagatctaatatttggttcaaatctca

SEQ ID NO: 210769 - DNA, 730 bp, Unknown
  Bacterial polypeptide expressing nucleotide sequence isolated from the Sargasso Sea
gctagaaccacaaaaaagctgggctgtgaataatcctaaaaagttatcagttgtaataaaaactttaaataaaattaaagatcaatttgataataaaaagaaaagtgtatcaatggcagacttaatagtcttagcaggtggtgtaggtattgagatggctgctaaaaaggcagggcataaagttaatgttccattttcagcaggcagaggagatgcaagacaagatcaaactgatattcattcttttggtcttcttgagcctcagtcagatggttttagaaattatctgaatggcggagcttcaaatgtctcagcagaagaaaaattggttgataaagcacaactaatgggtctgactgcaccagaaatgacagcacttataggtggtatgagagttttaaatactaactatgatggttcaaattatggtgtatttacaaataaacctggttctcttactaacgattatttcgtaaatctactagacatgaatactacatggaaagaggaagataaatcagaacaaacttttgttggaaaagatagaaaaactcaaaaaactaaatggaaagcaacaagagttgatttgatctttggttcaaattctcaactaagagcacttgccgaagtttatgcctgtgaggactcaagtgaaaaatttgttaaagattttatagctgcatgggtaaaagttatgaattctgatcgatttgatttaaaattaaattaa

SEQ ID NO: 210770 - DNA, 598 bp, Unknown
  Bacterial polypeptide expressing nucleotide sequence isolated from the Sargasso Sea
atggaaaatttaaaacacaatgggtctataaatggacaatcgacaggtaaatgtccttttatgcatggaggctcaacttcaccagatacttcaccattaaaatggtggccaaaaagactaaacctagatattcttcatcagcatgacgaaaaaacaaatccttataacaaggaatttaattacagggatgaagtgaaatcattagattttaaagcccttgaaaaagacatgcatgatcttatgactactccacagtcatggtggccagcagattggggccactatggaggattgatgataaggatggcctggcatgccgccggcacctacagagttgctgatggccgaggtggagcaggtacaggaaatctaaggtttgctccgttaaattcttggcctgacaacggaaacttagataaagcaaggaggttaatgtggcctataaaaaagaaatatggtaataaaataagctgggcagacttatttattctagcaggaaacattgcttatgaaagtatggggttgaaaacatttggattttcctatggaagaccagacatatggcagcctgagattgatatttattggggaccggaag

SEQ ID NO: 210771 - DNA, 694 bp, Unknown
  Bacterial polypeptide expressing nucleotide sequence isolated from the Sargasso Sea
catgagcacagagttcagaaataaagatttcaaaaataaagaattaagcaaatgcccagtaacaggagcaggaacatcagctaagttttctgcaggtagaggacaatcaaacagagacttttggccaaatagtttgaatttaaagatattaagtcagcattcaaatctgactaatccaatggataaaaagtttaattatgccaaagaatttaaaaaattaaattacaaagctttaaagagagatttaacaaaattaatgacagactcgcaagaatggtggccagcagactatggtcattacggacctttttttattagactggcctggcatgcggctggtacatataggactggcgatggtagaggtggagctggaacaggtaatcaaaggtttgcaccattgaatgcttggccagacaacgtcaatttagataaagcaagattattactttggccaattaaacaaaagtacggaaaacaaatttcatgggctgatttatttattttagttggaaacgttgccttagagtcaatgggttttaaaacttttggttttggagcaggaagagttgatatttgggaaccagaggatgatatttattggggatctgaaaaggaaatgttaggtgttgaaagatacagtggcaaaagagatttagagcaaccgcttggagcttcacatatggggataatt

SEQ ID NO: 210772 - DNA, 742 bp, Unknown
  Bacterial polypeptide expressing nucleotide sequence isolated from the Sargasso Sea
aatggatgcagagagtaaatgccctgtaatgcatggtgcaattacaaagaatatgggagagggaacatcaaaccgtgagtggtggcctaatcaattaaatttaaatatacttcatcaacatgatcgtaaatctgatccgatggaacccaattttaattatagagaagaattcaaaaaactagattacactgcattaaaaaaagacctcaataatctaatgacagattctcaagattggtggcctgcagactatggtcactatggaggtttctttattcgtatgacttggcacgctgcaggaacatatagaactggtgatggacgaggtggcggtggaacgggcgctcaacgttttgctccattaaatagttggccagataatggtaacttagacaaagcaagaaggcttctttggcctattaagaaaaaatatggaaacaaaattagctgggctgatttatttatattaaccggtaatgttgctattgagtctatgggtggaaaaacttttggattcagtggtggaagacctgatatttgggctccagaggaggatatatattggggtgtagaagaagaatggcttcaaaataaaagatacactggcgatagagttttagacaatcctcttgcagctgtacaaatgggattaatatacgttaaccctgaaggaccagatggaaaagcagatccacttgcaagtgcaagagatattagagaaactttggaagaatggcaatga

SEQ ID NO: 210773 - DNA, 1087 bp, Unknown
  Bacterial polypeptide expressing nucleotide sequence isolated from the Sargasso Sea
caaaaagaggaggacatggctcctgatgctggagatccctctgttcgagttccaactatgatgactactgcagacatgtccatgagagaagatcctgcctacaataaaatttctaagcgctttcatgaaaacccagacgaatttgcggatgcattcgcaagagcgtggtttaaattattacatcgtgatatgggccctaagtctcgttatcttggcccagaagttcctgatgaagaattaatatggcaagatcctataccagaaggaaacgccaactatgatattgaaagcgtcaaatcaaaaattaatgaaagtggcttaactattcaacaaatggttgaaacggcctgggcaagcgcttctactttcagaggttcagatctacggggcggtgcaaatggagcaagaattagacttgcgcctcaaaaagattgggaagccaataaaccgaaagagctttcagaaattctaaaagtttttgagggtattgcgaacgatactggagcttcaatagcagatgtaattgttcttgctggtaatgtaggcattgagaaggcttcaggatctgaagttccttttacaccgggaagaggagatgcaacggctgagcaaaccgatgaagagtcttttgctgtactagagcccgtatcagatgctttcagaaattatcatcaatccggtataaacatgccttcagaagaattgatgttagataaagctcagctacttggattgactgctccagaaatgacagctcttgtaggtggaatgagatctcttggcataagtgcagatgggcatggagtatttactgatgatgtaaataatttatctaatgacttctttgacgcgttattggatatgtctgttgaatggaaaccaaatggaactggaaattcttatgaagccacagatagagtatctggggaaaaagtaagaactgcatctagatcagacttagtttttggttctaattcgcaactgcgagctatagctgaagtttatgcaagttcagatggtatgaataaatttacttcagactttattggcgcttggaataaagttatgaatgctgatttagtttaac

SEQ ID NO: 210774 - DNA, 661 bp, Unknown
  Bacterial polypeptide expressing nucleotide sequence isolated from the Sargasso Sea
ctgggacgcaaataccctgagcagctatcacgtgttttgggtgtcttagaaaatatcgcctctgatacgggagcttctgttgcggatgtaattgtacttgctggtaatgttggtattgaacaggcatcgggtgcaactgtgccatttacgcctggtcgtggtgatgcaactcaagataatacagatgaacattcatttgaggttttagagccattttcagatggttttaggaattatcataaaagtgattttgagattggtgccgagcatatgctgttagataaggctcaactcttaggattaactgctccggaaatgacagtcctcgttggtggtatgagagccttaggaattagtgctgatggtcatggtcttttcactgatactcctggcaagttaacaaatgactggttctctaaagtgcttgacatgacagttgaatggacggctactggcagaaactcttatgagggaaaagatcgttccacaggtgaaaaggtaaggacagcaactcgagctgatcttgtttttggttctaattcacagttgcgagcacttgcagaagtatacggttctgatggtgcacaagataaatttgtgagcgattttatagcggcctggaacaaagtaatgaatcttgatcgatttgatctttcttgat

SEQ ID NO: 210775 - DNA, 1030 bp, Unknown
  Bacterial polypeptide expressing nucleotide sequence isolated from the Sargasso Sea
atgagtgcggaatttcataaaagtaaaacatttaaatcagcagaattaagtaagtgcccttttacgggtgcaggtacaccagcaaaatttagcgctggtagaggacaaacaaatagagatttttggccaaatagtttgaatttgaaaattttaagtcagcactcgaatttatcaaatccaatggagaaaaaatttaattattctaaagaatttaaaaaactgaattacaaagcactcaaaaaagatttaaacaaattaatgacagactcacaagattggtggccagcagattacggtcattatggtcctttatttattagattagcatggcacgcagcaggtacatacagaacaggcgatggtagagggggagctggaacaggtaatcaaaggtttgcaccgttaaatgcttggcctgataatgttaatctagataaagctagattacttttgtggccaataaaacagaaatatggaaaaagaatttcttgggcagatttatttatactagttggaaatatagcattagagtcaatgggctttaaaacgttcggttttggagcaggaagaactgatatctgggaaccagaagatgatatttactggggttctgaaaaagaaatgttaggtgttaagagatatagtggaaagagagatcttgaacaaccattgggggcttctcacatgggattaatttatgtaaatccacaaggtccagattttaatccagacccattgaaagcagctcatgatattagagaaacatttggacgaatggcaatgaatgattatgaaacagttgcactagttgctggtggtcatacttttggaaaatctcatggtgctgcacctgagtcacataaaggacctgatccagaagcatcaagaattcaagatcaagcaactggttggaatagtaattacaaatcaggaaaaggtgtacacgcaataagtagtggtattgaaggggcatggacacaaacaccaacacaatgggacatgggttactttgatttgttatttaaccatg

SEQ ID NO: 210776 - DNA, 1396 bp, Unknown
  Bacterial polypeptide expressing nucleotide sequence isolated from the Sargasso Sea
gccacaccgtggggtaaatgccatggtaatggtaaggcgcaggatcttggccccgagcctgagggcgaagaacttgaggcccaaggtttgggttggctcaataaaaaaggcccaggcacgggtgctaatgccgtgaccagtggcctcgaaggcgcttggacaactcaccccacccagtgggataacggttattttcacctactgttaaattacgattgggaattgaaaaaaagtccagcgggcgcctcacagtgggaaccgattaatatcaaagaggaagataaagtcgtttctgtaggggatccgaatcgcaagtttaatcccatcatgacggatgcggatatggcgatgaagatggatcctgagtatcgcaaaatctccgagaagttttatcaagaccccgcctatttctccgaggtatttgcccgcgcttggtttaagttaactcaccgcgatctcgggcctaagagtcgctacttggggccagaagtgccgaatgaggatttgctttggcaagacccgatcccaagcgtggattatcgcttagatgccagtgagattgtcgagctgaaggcgaaattattagcctcggggctcagtgtatctgaactggttgctactgcgtgggacagtgcccgcaccttccgtggctcggatttccgtggtggcgccaatggcgcgcggatccgcttagcaccgcaaaaggattggcaggccaacgaacccgagcggctgcaaaaagtgcttaaagtattaacggagctgcaggctagcctaagcaaaaaagtcagcatcgccgacttaatcgtattaggcggcgccgcagcgattgaaaaggccgcgcacgctgcgggagtcaaaatcacagtgccctttatccccggccgtggcgatgcgacgcaggcgatgacagatgtggaatcctttgccgtactcgagcccttgcacgatgcgtatcgcaactggcagaaaaaggattatgtggttcagcccgaggagatgatgctcgatcgcactcaattgatgggattaaccgcccatgagatgactgtattgattggggggatgcgggtgttaggcactaactatggcggcacgcgtcacggtgtgtttaccgacaaagttggtgtgttaagcaatgatttctttgtgaatctcaccgacatggcctacaactggaagcctgcgggcagcaatctttatgagatagtcgagcgtaaaactggcgcggtgaagtggaccgcgacccgcgtcgatctggtgtttggctctaactcgattttgcgctcttatgccgaggtgtatgcgcaggatgatgccaaagaaaagtttgtgcatgactttgtggcagcttggactaaggtgatgaatgccgataggttcgaccttgcctaat

SEQ ID NO: 210777 - DNA, 766 bp, Unknown
  Bacterial polypeptide expressing nucleotide sequence isolated from the Sargasso Sea
cagaggttcagataaaagaggtggagcgaatggaggtcgtatttgtttagaaccacaaaaaaattggaaagttaataatccaaaacatttatcaaaagttattaatgctttagaaaaaattcaaaaagcatttaactctaaatctaagtcagtttctattgctgacttaatagttttaggtggaagtgttggaatagaaaaagcagcaaaggcagctggtgaaaaaataacagtcccatttactccaggcagaggcgatgctacacaagaacaaacggatatagattcatttggtttactagaaccacaagctgatggttttagaaactatgttaaaggagattattctttatcagctgaagaaatgttagtagatcgtgcgaacctaatgaaacttactgcgccagagatgaccgttttaattggtgggatgagagtgttaaatacaaattttgataattccaatcatggagtatttacgaaaaaaccaggcaagcttacaaacgatttttttattaatcttttagacatgaatacaacctggaaagaaacttctaacaaagaagatttatttgaaggtaaagatcgtaagaccggtaaagtcaaatggaaaggtactcgagctgacctcatatttggttctaattcacaactaagagcttttgcagaagtttatgcttgtgaagattcgaaagaaaaattcctggctgattttgttgctgcatggacaaaagtaatgaatcttgatcgttttgatttaaagtaa

SEQ ID NO: 210778 - DNA, 691 bp, Unknown
  Bacterial polypeptide expressing nucleotide sequence isolated from the Sargasso Sea
atgagcgaaaaatcgaagtgtccgttcacaggcgcaggaacgcctcctaagtttcctactggcaagggaacttccaatagagattggtggcccaatagtttaaatcttaaaattttaagccaacattcttcgttggttgatcctatgggaaaaaaatttaattatgagaaagaatttaaaaaacttaattacaaagctttaaaaaaagatttacataaattaatgacagattcacaagactggtggcccgctgactatggtcattatggaccgttatttataagattgacctggcatgctgcaggtacatatagaactggagatggtagaggaggaggaggaacaggcaatcaacgttttgctccactaaacagttggccagataatgttaatttggataaagccagattattgctttggcccatcaagaaaaaatatggaaaacaaatttcttgggcagatttatttatattagttggaaacgtggctttagaatcaatgggattcaaaacttttggtttcggaggtggtagagaggatatttgggagccagaagaagatatttattggggatcagaaaaagaatggcttggtgtaaaccgttacagtggtaagcgtgatcttgaaaaccctttgggcgcatctcatatgggcttgatctatgtaaacccacaaggacctgacgctaatc

SEQ ID NO: 210779 - DNA, 819 bp, Unknown
  Bacterial polypeptide expressing nucleotide sequence isolated from the Sargasso Sea
acgatgtgaattcattgaaagctaaaattgcggcatctgacttaagcattcaagaaatgattgagacagcttgggcaagtgcttctacttttagagggtcagatctaaggggtggagcaaatggttccagaattagattagcacctcaaaaagattgggatgttaataagcctgagcagctgacaaaagttatagctactttgcagcctttagcggatgaggcaggtgcttcacttgcggatacaatcgtattggcaggaaatgtcggcattgaaaaagcggcaggtgttgaagttccgttcatgccaggaagaggtgatgcttcagaggaacaaactgactcagaatcatttaaagtcctagagccgcttgcggatggttttagaaattatcaaaaaacagaattttctgtcagtccggaagaaatgcttgtggacaaggcacaattattagggctttcggctccagaaatgactgtcttagtaggtggaatgagatcgatgggaatcagtcagagtggactgggattattttctgataattctaacaaacttgataatagcttctttaaaacattactagatatgagtgttgagtggaagccatcaggcaaaaactcatatgagggtttcgacagagtatcaggggaaaaagttagatctgcctcaagagtggatttagtttttggttcaaattctcagcttcgatcattagcagaagtttacgctatggacgatgccaatgataaatttgtacaagactttatttcagcttggaataaagttatgaatgctgataggttcgatcttgatacctagg

SEQ ID NO: 210780 - DNA, 1366 bp, Unknown
  Bacterial polypeptide expressing nucleotide sequence isolated from the Sargasso Sea
gagcctgaaggatcaaaaattcatgaacaatcaacaggttggaatagtaatttcaaaagcggtaaaggagttgacacaatcagcagtgggatcgaaggtgcttggacacaaaatccaataaaatgggatatgggttatttagattgtttgtatgatcatgagtgggagttgacaaaaagtcctgcaggagcacatcaatggacaccaaagaaaaatggacaaaaaattaaaatggttccagatgcacatgacaaaaacaaaatgcatcctccaatgatgcaaactacagatatttcattaaaagttgatccaagttacggtcctataacaagacattttcacaaaaatccaaaagaattccatgatgcgtttgctagagcatggtttaaattaacgcatagagatatgggcccaaaagtttgttatttaggaccagaggtaccaaaagaagatctgatttggcaggacccaattccaaagcaaaaatacaaattaaataaaagagatataggtaatcttgaaaatcaaattttaaaatcaggattatccatttctcaattagtttcgacggcatgggcctcagcctcaacttttagaggatctgataaacgtggtggcgctaacggcgcaagaattagactacagccacaaaaggactggcatattaacaagatttcaaaagttgataaagtaattaaagtattagaaaaaattaagaaaaactttgataaaaaaaataaaaacgtatcaattgctgatcttattgttttagctggaaatgttgcaattgaaaaagctgcaaaaaagtccgggcacaaaattaaaattccttttacacaaggaagaggtgatgctttacaagaacaaacagatgttttctcgtttaatttattagaaccagttgcagatgcttttgtgaattatcaaaaaagtgtatctaacacatcatccgaggaaatgatgatagataaagctcagttgatgcaattaactagtccagaaatgactgtcttatttggtggaatgagagttttaggaacaaactttgacggctctaattacggtgtttttacaaagaaagtaggaactttgacaaatgactattttaaaaaccttttggatatgaatattacttggaatgaaaaaggtgaagatgagcagtattttgagggaagaaatagaaaatcaaaaaaagttgtatgggaaggatcaagagtagacttaatatttggttcaaattcccaattaagagcaatagccgaagtttatgcatctgaggattctaataaaaaatttgtaaatgattttgctaaagtgtggtcaaaagtaatgaatcttgatagatttgataaaaaaataaattagt

SEQ ID NO: 210781 - DNA, 560 bp, Unknown
  Bacterial polypeptide expressing nucleotide sequence isolated from the Sargasso Sea
tatggataatactgaaaccgatattgaaaaatgtccagtcatgcatggctcaatgactaaaaatactacgagcggaacttcaaacaaagattggtggcctgatcagctgaatttaagcattcttcatcagcacgataagaaatctaaccctatgggtgaagattttgactacaaatctgaattcgaaaaacttgattattatgctctcaaacaggatctattagatcttatgacagattcgcaagagtggtggccagctgattatggtcattatggcccattcttcataagattaacttggcatgctgccggaacatatcgttctacagatggaagaggtggtggtggcactggtgcacaaagatttgcaccactgaatagttggcctgacaacggaaatctagataaagcaagacgtttactttggcctgttaaagaaaaatacggtaataaaataagttgggctgatttgctaatccttgcaggtaatgtagctatcgaaatcatgggaggaaaaacctatggattcagcggtggaaggccagacatctggtcacctg

SEQ ID NO: 210782 - DNA, 1270 bp, Unknown
  Bacterial polypeptide expressing nucleotide sequence isolated from the Sargasso Sea
aatggggtttgggtggaagaatgctcacggctctggaaaaggtagtgacacaataacaagtggaatcgaaggagcttggacaacaaatcctactaaatgggataacggttattttgatttacttttaaacaatgagtgggaactagtaaaaagtcctgcaggagcaaatcagtggcatattgtaaatccaaaagatgaagatcttgcaccagatgctggagatgatacaaaacgcgttccaacaatgatgacaactgcggatatggctatgagagaagatccagattacagaaaagtatcagaaagatttcataagaatccagatgaatttgccgatgcttttgcaagagcatggtttaaattacttcatcgtgatatgggtccaaaagtcagatatcttggtcctgaggtacctgaagaagatcttatttggcaagatccagttccagtaggtaatagtgactttgatgttaaagaagtcaaagaaaaaattcttgcaagtgatctgagtatccaagaaatgattgaaacagcttggtctagtgcttcaacttttagaggttctgatatgagaggtggagcaaatggagcaagagtaagacttgcaccgcagaaagattgggatgctaacaaaccagaacaattagcaaaagttttaggtgtgcttgaaggtatagcaagtgaaacaggagcatctgttgctgatgtcatagtcttggcaggtaatgttgctatagagaaggcatctggagtagaagttccatttttatctggcagaggagatgcaacgagtgaacatacagatgttgaatcatttgaagtccttgaacctcttgcagatgggtttaggaattatcaaaaaatagacttttctgtaactccagaagaaatgcttgttgataaagctcaattacttggtctgactgcccctgaaatgacagtattagttggtggtttaagatcacttggggttagtgcagatggtcatggtgtttttacagataatataaatactttatctaatgatttctttaaaacacttttagatatgagtgttgaatggaaaccagtcagcaaaaactcttatgaagcgacagatagagtaagcggtgaaaaaataaggactgcatcaagagttgatcttgtatttgggtcgaattcacagctaagagcaattgcagaagtatatgctgaagatgattctaaaaataaatttgtaaatgactttattgctgcctggaataaagtaatgaatgcggatagatttgat

SEQ ID NO: 210783 - DNA, 1565 bp, Unknown
  Bacterial polypeptide expressing nucleotide sequence isolated from the Sargasso Sea
gggagtcgaagatgaatggctcgaaaataaaaggtataaaggtgaacgggaactagataatcctttggctgccgttcaaatgggtttgatctatgtaaatcctcaaggtccagatgcaaatccagaccctttagccagcgctcacgatattagagaaacatttggtcgaatggcaatgaatgattacgagactgttgctcttgttgctggaggtcatacttttggaaaatgtcatggagcaggagatgctgaattagtccaagatgagccagagggagcacctatagaacaaatgggtcttggttggaccaataaacatggatcaggtcttggagctgattccataactagtggtcttgaaggtgcctggacaacaaatccaatcaagtgggataacggttactttgatcttctattcaaatacgaatggaagctcggcaagagtcctgccggtgctcatcaatggtatgcagttgatcaagacgaggaagatatggcgccaagcgcacatgatccttccataaaagaacctacaattatggcaactactgatattgctttaagagaagatcccgaatacaacaagatctcaaagcactttcacgaaaatcctgatgagtttgccgatgcttttgctaaagcttggttcaagttacttcacagagatatgggtccgaaggcaaactacataggtcctgaagtgcctgaggaggaactcatatggcaagatccagttcctgctggaaattctgattacgatgttgcagctgtgaaaagtaagatagatggtcttggtttaagcattcaagaaatgaccgagactgcttgggcaagtgctttcacctacaggggatcagatcttagaggcggtgctaacggtgcaagattgaggttagctccccaaaaagactgggaagtaaacaaaccagagcaactatctaaagttctttcagcttacgaaggtatctccgaagatacgggagtatctatggcagatattattgttcttgctggtaacttagcgattgagaaagcctctggttcagaagttccttttacgcctggaagaggcgatgcttcacaagagcaaactgatgaagaatcttttgcttatctagagccattctcagatgcatttagaaactatcatcgttccggtttggatgtcagtgctgaagaaatgatgctcgataaagctcaacttttaggcataactgctccagagatgactgttcttcttggtggcatgagatccctaggtattactgcgagtgattacggattggtatctgagaactctgatactttatctaatgactacttcaaaacacttttggacatgagagttcagtggaagcccaatggaactggaaactcttacgaagcttttgatagagtctctggtgaaaaagcaagaactgcttcaagagccgacctagtatttggttcaaattctcagctaagagcttacgttgaagtttacgctcaagatgattcatctgaaaaattcactaaggatttcatcaaagcatggaacaaagtaatgaataacgacttgttctaac

SEQ ID NO: 210784 - DNA, 681 bp, Unknown
  Bacterial polypeptide expressing nucleotide sequence isolated from the Sargasso Sea
tatgagcgaacagtcaaaatgtccatttactggcgcaggaacgccacctaaacatccgacaggaagaggtacatctaataaagactggtggccaaataatcttaatcttaaaattttaagtcaacattcctctttagtaaatccaatggataaaaagtttagttatgcgaaagaatttaaaaaactaaactataaatcacttaaaaaagatttaaataaattgatgacaaattctcaggaatggtggccagctgattacggtcattatggccccttgtttataagattagcatggcatgctgctgggacttataggactggagatggacgtggaggcgctggtactgggaatcagcgttttgctcctcttaacagttggcctgataacgtaaatttagataaagctagattattactatggccaattaaaaaaaaatatggaaaaaaaatttcttgggcagatttatttattttagttggtaacgtatcactggagtctatgggttttaaaacttttggttttggagcaggaagagaagatatttgggagcctgaggaagatatttattggggttcagaaaaagaatggttaggtgttaatcgctatagtggtaaaagagatctggaaaatcccctaggagcatctcacatgggcttaatatatgttaatcctcaaggacc

SEQ ID NO: 210785 - DNA, 1093 bp, Unknown
  Bacterial polypeptide expressing nucleotide sequence isolated from the Sargasso Sea
ccagttaatcccatcggaagaggatatggctccagatcctgaagatcctactaaaaaagtaaatacaattatgactacagcggatatggcaatgaaaatggatccagaatacaataagatatccaaacatttccatgaaaaccccgaagaatttgcggatgcgtttgctagagcatggttcaaattattgcatcgcgatatgggccctaaaaaacgctatcttggccctgaggttcctagtgaagacttaatttggcaagacccagttccagaaggcagtacagattatgatgttgaaagcgtgaaaaaacagatcaaagagagtggcctttcaattcaggaaatggttgaaactgcatgggcgagtgcgtcaacctatcgccatacagatatgcgtggtggagctaatggtgctcgtattcgacttgctccgcaaaaagactgggccgtaaataaaccagaacagcttcaaaaggttctaaatatccttgagccaatcgctgaacaaaataaggcctcagttgctgatgtaatagttttagctggaaacatcggcatagaaatggctaccggtaaatcattaacattttcacctggaagaggagatgcttctcaagatcagaccgatattgaatcgtttgcagttcttgagccgttttctgatggttttagaaattatcataataaggatttttcaataaacgctgaaaatatgttattagataaagcacatttactaggtctaaatgccccagagatgaccgtgctcgtaggtggaatgagatcattgggtatagactttaatgaaaatggaaatttcacagatgatcaaaattctttaaccaatgattttttcaataacctccttgatatgaacgtcaaatgggaaccagctggaagaaacagttacaatggaaacgacagatcatcgggagaagttattagatcagcaacgcgtgctgacctagtatttggttcgaattcgcaattacgcgcattggctgaggtatattcccaagatgattctagtgtaaaattcatcaatgactttatagatgcatggacgaaggttatgaataacgatcgcttttaa

SEQ ID NO: 210786 - DNA, 610 bp, Unknown
  Bacterial polypeptide expressing nucleotide sequence isolated from the Sargasso Sea
ggtatagcttcagacatcggagctagtgttgcagacataatagttttagctggaaatgtaggaatagaaaaagcatctggagtgtctgtcccttttactcctggtcgcggagatgctacacaagaaaatactgatattgaatcttttaatgttcttgaacccgaagcggatggttttagaaattatttaaagaaaaattatacagtaacaccagaagagttaatgttagataaagctcacttactaggtcttactgcgccagagatgacagtattatatggaggaatgcgctcacttggtattagttctgatgaccgaggtattttctctgataattcagaaaagctcactaaccaattttttactaaacttttggatatgtcagtaaaatgggaagcaacaggcagcaattcttatcaagcaactgaccgtcaatctggctctaaaataagacgagcatccagaacagatcttgtttttggttctaattctcaattacgagctttggcagaagtatatgcacaatctgactcacatgataaatttattgcagactttataattgcttggaataaagtaatgaatgcagatagattcgatttgaattaaa

SEQ ID NO: 210787 - DNA, 939 bp, Unknown
  Bacterial polypeptide expressing nucleotide sequence isolated from the Sargasso Sea
tatgagtgcggaatctaaatgtccatttactggagtaggaactccaccaaaatttccaactggtagaggaacatcaaatagagattggtggcctaatagtttaaatctaaaaattttaagtcaacattcttctttggttaatccaatggataaaaaatttaattataaaaaagaatttaaaaaacttaattttaaggcactaaaaaaagatttacaaaaattaatgacagattcacaagattggtggccagcagattatggccattatggaccattgtttataagattgtcttggcatgcagctggaacttatagaactggagatggcagaggtggtgcaggaacaggaaatcaacgttttgctccattaaatagttggccagataatgttaatttggataaagcaagattattgctttggcctatcaagaaaaaatatggaaataaaatttcatgggctgatttatttatattagttggaaatgtagccttagaaacaatgggttttgaaacttttggttttggcggtggaagagaagatatatgggagcccgaagaagatatatattggggatccgaaaaagaatggcttggagtaaatcgttatagcggtaaaagagaattagagaatcccttaggtgcatcacatatgggattaatatatgttaatccgcaaggtcctgacgcaaatccagaccctcttttagccgctcacgatattcgtgaaacttttggtcgtatggcaatgaatgattatgagacagtagctctggtagcaggcggtcatacattcggaaaatctcatggtgctgcttcagaatcatttaaaggacctgaacctgaaggttcaaaaattcaagaacaggcaacaggatggaacagtaattataaaagtggattaggtgctgacactattagtagtggaatagaaggtgcatg

SEQ ID NO: 210788 - DNA, 448 bp, Unknown
  Bacterial polypeptide expressing nucleotide sequence isolated from the Sargasso Sea
aatggatgccgagagtaaatgcccagtaatgcacggtgcgaatacaaaaaatacaggagaaggaactactaatagagattggtggcctaatcagctagacataagtattcttcatcaacatgatgaaaaatctaacccaatggaaaaagattttaattatcgtgagcactttaaaaaaattgattacgatgggttaaaaaaagatcttaatgagttaatgactaactcacaagattggtggcctgcagactatggtcactacggaccttttttcattaggatgacttggcatgcagcaggaacttaccgaaccgctgatggtcgcggtggcggtggaactggcgcacaaagatttgctcctttaaatagttggccagataatgggaatttagataaagcaagaagactcttatggccaattaagcagaaatatggaaaccaaaattag

SEQ ID NO: 210789 - DNA, 693 bp, Unknown
  Bacterial polypeptide expressing nucleotide sequence isolated from the Sargasso Sea
aaaaattttttgaaagaattaaaaaaaactttgataataagaagaaatcaatttttttagcagatttgattgttttaggtggatgtgttgcaattgaaaaagctgcaaaaaaagctggacataatataaatgttccttttaaaccaggaagaggggatgcttctcaagatcaaacagactcttattcttttggattgttagaacctaaagcagatggctttagaaattatattgtaaaaccaacaaacggttcttcaaataaaccaaccgtatcagctgaggaaatgctagttgataaagcacaactaatgaaactaacagctcctgaaatgacagttcttattggaggacttagaatgttaaatacaaattttgataaatctaaaaatggtgtttttacaaaaaaacaagaaacactttccaacgatttctttgttaatttacttgatatgaaaactatttggaaagaagttgataaagaagaagaattattcataggtagagatcgtaaaacaaataaagttaaatggactgccacaagagttgatttgatttttggttcaaattcacaactaagagcaatttcggaagtttatgcttcagaagattctaaatccaagtttattgaagactttgtaaaagcttggactaaggtgatgaatcttgatagattcgatgtaaatcaaaattagt

SEQ ID NO: 210790 - DNA, 757 bp, Unknown
  Bacterial polypeptide expressing nucleotide sequence isolated from the Sargasso Sea
tatggaatcacaaaataaatgtcccgtttcccatggcgcagagagtcaacatacccaaggtgctcactcgaatcaccaatggtggcctgacaatataaatttagatattcttcatcaacatgataaaaaatcaaatcccatgaatggctttgattataaaaaagaatttgaaaagttagactatgaatcattaaaaaacgatttgcataaattaatgaccgattctcaagaatggtggcctgctgactatggtcattacggtccgttttttattcggatgacctggcacgctgcaggaacttatcgcaccgcagatggcagaggtggtggaggtacaggcgcacagcgctacgcgccattaaacagttggcctgataatggaaatttagataaggcaagaagattactttggcctattaagaaaaagtatggaaatcagattagctgggcagacctaatcatccttaccggtaatgttgctatcgaatccatgggtggaaaagtatttggttttggtggtggtcgagatgatatctgggctccggaaaaagatattttttggggcaaggaaactgaatggctaacgaacgaaagatataccggtgagcgtgaattagaccaaccactagccgctgtacaaatgggattgatttatgtaaatccacaaggtccagatggaaatccagatccgttaaaaagcgctgtagacattagagaaacctttaaaaggatggccatgaatgattacgagacggtt

SEQ ID NO: 210791 - DNA, 2167 bp, Unknown
  Bacterial polypeptide expressing nucleotide sequence isolated from the Sargasso Sea
atgagcgaaggtcttaaaaaaaacggaaatggaaatggtaaatgccctgtaatgcacgggggcgttactaaagcaggcgagtctaacacttcgcgacaatggcctaatagtatcaatcttgatattttacatcaacacgacacaaaaactaatcctctacctaaatttgactacaaaaaagaggtaaaaaaattaaattttaaagcacttaaaaaagatttattaaaattaatgaccgatagccaagaatggtggcctgcagatttaggaacttatagtggccttatggtaagactaacttggcaccaagttggaacttacagagaatttgatggaagaccgaacgtgggatcacatagattttcacctcaggactcttggccagataacacaaacttagataaagcaagacgtttactttggccaatcaaaaaaaaatatggaaatagattaagttggtctgaccttatggttctagctggaaccatggcttatgagcacgctggatttaaaacttttggtttttcatttggtagagaagatatttgggaacctgaaaaagatgtttattggggtaaagagacagaaccattagcagtaaatagatatggtgatccaaaagatcgctcctctttagaagctccactcgcggcatctcattttcaacttgtatatgttaaccctcaaggagttgaaggaaaacctgatccagtaagaactgcaatggatgtgcgtgaaacttttggccgaatgggaatgaatgatgtagaaaccgctgctcttacagtcgggggtcactctattggaagagcccacggtaatggcaatccagacaatttaggtccggaacccgctggagctgatattcatgaacaaggttttggatggaatcaaaaaaatggaacaggtgctaaccaaattacctcaggccttgaaggagcttggaccactaaccctgacaaatgggaccatcaatatttagatcttttacttaattacaagtgggaaagtaaaaaaagtccagcaggtgcttggcaatgggaacccgttaatcttgaagaagataaaaaaccgagagatttaggagatccaaataaaaaagcaagattaatgtttaccgacgctgacatggcaatggcaatggatccagagtatagaaaaatttcagaaagattttatgcagatccaaagttttttgaagactcatttgcacgtgcttggtttaagctaacacatagaacgatggggaataaaggtaattatattggtccttgggcacctaaagaagatctgctctggcaaggaaacgttacatccccaaaaaagaaatacaatgtaaataaagtaaaaaaaatgatttcagctaccagtttatcaactggcgatttaattactattgcttgggatagtgctagaacttatagaagaactgataaaagagggggagctaacggcgcaagaattcgattagcacctatgaaagactgggaagcaaatgagccaaaaaaacttgcaaagactttaaaaatacttgaaaacatagctaataaaacaggagcaactatagctgacacaattattcttgcagggaatgttgggcttgaaaaagcgattaagaaagctggttcgaaagttaaagttccatttagtcctggtagaggagattcgtctcaagagcaaacagaattaaaaagcttcaaatggttagaacctttacatgacggtttcagaaattatgctaaagcagattactctgtcatgcctgaggaacttatattagaacgtgcttctctgatgggattaactgcacaagaaatgacttgtctagtaggaggtatgagagttcttggaactaatcatgaatctgcaaaagataaaggacttctcacaaataaagttggcgctttaacaaatgatttcttcattaatctgttggatatgaagtatacttggaaaccgactggtaaaaactcttatgacatagtcgaccgtaaaacaaacagagtaaaatatactgcttccagagcagacttggtttttgggtcaaattcaatattaagatcttatgctgaggtatatgctcaagacgacaacaaagaaaaattcatagaagactttgttaaaatatggacaaaaattatgaacgcagatagacaagttcattaaa

SEQ ID NO: 210792 - DNA, 616 bp, Unknown
  Bacterial polypeptide expressing nucleotide sequence isolated from the Sargasso Sea
tgttttaggaggatcagttggaattgaaaaagcagctaagaatgctggccataaaataaacgtaccatttatacctggtagaggcgatgcaacgcaagatcaaacagatacccattcttttggtttacttgaaccaaaagctgatggatttagaaactatattacaaaaatgataaatggatcttcaagaaaacctaccgtttctgctgaagagatgttagttgataaagctcaacttatgaaactatcagcacctgaaatgacagttttaattggtggaatgagagttttaaacagtaattttgataattctaatattggcgtttttacaaaaaaaccagaaacacttacaaatgacttctttatcaatctacttgatatgggaataacttggaaagagactgatagtaatgagcaattatttaatggtagagatcgtaaaacaaacaaagttaaatggacagcttcaagagttgatttaatttttggttcaaattctcaacttagagcaattgcagaagtttacgcttgtgaagattctaaaataaagtttatttctgattttattgctgcatggacaaaagttatgaatttagatcgctttgatcttaattaa

SEQ ID NO: 210793 - DNA, 1114 bp, Unknown
  Bacterial polypeptide expressing nucleotide sequence isolated from the Sargasso Sea
tatgggttatttagattgtttatatggtcatgattgggaattaacaaaaagcccagctggagctcatcaatggactccaaagaaaaatggtcaaaaaattaaaatggttcctgatgcacatcagaaaggtgtgcttcatccaccaatgatgcaaacaacagatatatcaatgaaagttgatccgagttatggaccaattacaaagcattttcataaaaaccctaaagagtttcatgatgcatttgctcgggcatggtttaaattaactcatagagatatgggtccaagagtttgttacttgggtaatgaagttccaaaagagcaattaatttggcaagatccaattgataaaccaaagtacaaacttaaatcaaaagatataaaagatttaaaaaacaaaatttctaaatcaaaaatatcaatttcagatttagtttctactgcatgggcatcagcgtcaacatttagaggatcagataagagaggtggcgctaacggtgcaagaataatgttagaaccacaaaaaagctgggctgtgaataatcctaagaaactatcaactgtggttaaagctttgaataaaattaaagatcaatttgataataaaaagaaaagtgtatcaatggcagacttgattgtcttagctggtggtgttggcattgagatggctgctaataaggcagggtataaagttaatgttccattttcagcaggcagaggagatgcaagacaagatcaaactgatattcattcttttggtcttcttgagcctcaggcagatggttttagaaactatctaaatggtggagcttcaaatgtctcagcagaagaaaaattggttgataaagcacaactaatgggcctgactgcaccagaaatgacagcacttataggcggtatgagagttttaaatactaactatgatggttcaaattatggggtttttacaaataaacctggttctcttactaacgattacttcgtaaatctattggacatgaatactacatggaaagaggaagataaatcagaacaaacttttgttggaaaagacagaaaaactcagaaaaataaatggaaagcaacaagagttgatttgatttttggttcaaac

SEQ ID NO: 210794 - DNA, 682 bp, Unknown
  Bacterial polypeptide expressing nucleotide sequence isolated from the Sargasso Sea
tcgtcttgcaccacaaaaggactgggaggcaaataagcctgaacagttgtctcgcgttcttggagtacttgaaaatattgcatcagaaacgggagcctctgtcgctgacgtcatagtgttagcaggaaatgttggtattgaaaaagcttcaggagaaagcgtaccgtttacaccaggccgtggagatgctactcaggagcatacagacgaacactcgtttgcagttcttgagcctgtttcagatggatttagaaactaccataaaaaaggatttgatattaattctgagcatatgctggttgacaaagcacaattacttggcctgaccgcatcagagatgacggtccttattggtggaatgagagcacttggtatcagtgcagatgggcatggcgttttcacagatacaccaggtaaacttacaaatgactggtttgtaactctgctggacatggatgttgaatgggaagcaacaggcagaaacacctatgtagcaaaacatcgcagtacaggtgatgaaataaggacagcaacaaggtctgaccttgtttttggttcaaactctcagctaagagcattagcagaggtttatgcagctgatggttcacatgataaatatgtaaaggattttatcagtgcatggaacaaggtaatgaatcttgatcgttttgatcaggcttaa

SEQ ID NO: 210795 - DNA, 643 bp, Unknown
  Bacterial polypeptide expressing nucleotide sequence isolated from the Sargasso Sea
gataccaaaaagaaaacagtctcaatagctgatttaatagttttgtctggaaatgttggtatagaaaaagctgcaaaaaaagctggtaaaaaagttgagataccttttctacctggtcgtggagatgcaactcaaaaacaaacagatattcattccttcaatttattagagcctttagctgacggttttagaaattatctaaaatctggcaaatctataacttcagctgaggaaaaacttgtggataaagctcaattaatgggtttaactgctcccgaaatgacagtgctcgttggtggattaagagttttaaatactaattttgataattctaaaaacggtgttttcacaaaaaatccaggagcacttactaatgattattttataaatcttctagatatgaatatcacttggaaagaaatagatgaaaaagacgaatttttcgaaggaaaagaccgtaaatcgaataaaataaagtggaaagggtcaagagttgatttgatatttggttcaaattctcagcttagagctatttcagaagtttatgcatgcgaagactcaatgcctaaatttattaatgattttgtaaatgcatggactaaagttatgaatttagatcgttttgatgtaaggtataattaat

SEQ ID NO: 210796 - DNA, 973 bp, Unknown
  Bacterial polypeptide expressing nucleotide sequence isolated from the Sargasso Sea
tcacagagatatgggtcctagagtttgctatcttgggaatgaggtaccaaaagaacaactaatttggcaagatccaattgataaaccaaaatacaaacttaaatcaaaagatattaaagatttaaaaaatatgatttctaagtccaaaatatcaatttcagatttagtatctactgcatgggcatcagcctctacttttagaggatcagacaaaagaggtggtgctaacggtgcaagagtgatgttggaaccacaaaaaaattggaaagtaaataatccaaaaaaattatcaatagtaactaaagctctaagtaaaataaaaagcaaatttgataataaaaagcgaaacgtttcaatggctgacttaattgtgctagctggaggtgttggtatcgaaatggccgcaaaaaaagctggttacaaagttcaagttccattttctgcagggcgaggggacgcaagacaagatcaaactgatattcactcatttagtttacttgagccgaatgcagatggttttagaaattatttaaatggaggagcttcaaatgtttctgcagaggaaaaattggtagataaagctcaattgatgggcttaactgcaccagaaatgactgcacttgttggtggaatgagagtattaaatactaactatgatggctcgaaacatggtgttttcacaaatagacctggttctcttacaaatgattatttcgtaaatcttttagatatgaacactacttggaaagaagaagataaatcagagcaaacatttgttggaaaagatagaaaaacacaaaaaacaaaatggaaagcaacaagagttgatttaatttttggttcaaattctcaattaagagctctagcagaagtctatgcatgtgaggactcaggtgataaattcgttaaagattttattgcagcatgggtaaaagttatgaattctgatcgatttgatttaagattaaactaa

SEQ ID NO: 210797 - DNA, 478 bp, Unknown
  Bacterial polypeptide expressing nucleotide sequence isolated from the Sargasso Sea
gatgactgataaatcagaaggtaaatgtcctgtaatgcatggggcaatgacaacaaatagttcaagtggaacttcgacaagagactggtggccaaatcagcttaacctcaatattttgcatcagcatgataaaaaatcgaatcctatggatgaagattttgattacagagaagagtttaaaaaaatagattatgaagctctcaagaaggatttaaatgaattaatgacagattcacaagattggtggcctgcggactatggtcactatggaccatttttcattagaatgacctggcatgctgctggtacctatagaaatacagatggccgaggtggtggtggtactggcgctcaacgttttgctccactaaatagttggcctgataatggtaatctagataaagctagaaggttgttgtggccaatcaaacaaaaatatgggaaacaaattagttgggcagatttattaattctagct

SEQ ID NO: 210798 - DNA, 1369 bp, Unknown
  Bacterial polypeptide expressing nucleotide sequence isolated from the Sargasso Sea
gagcagtgtctcgcttgtttcgaacaacgtgtcaacaaaccgtgcgaagtccggagataacctgacccttttcttcacttccagcgaaccgatccctgtcccgactgtgacgctgtcaggatcaacaacaacagcgactagtggaaacggtacggactggcaggcagtgcacccggtgggcaacaacaccccgaatggatcagccagcttcagtatcagcttcgtggacgaggctggtaatgttggcactgcggttacaacgactacggatcagtcttcggtcaatgtagacaccacgaccccgactttaacattggtcaaactgaagtcgaacaacagtgacaatacaagtcttgcgaagtttggagacacagtgacgcttgagttcgatgcctctgaaaccattgaagcgccatcggtccaaatcaatgggattgaatcaaccgtatcttttggttcagactcggactggatggcgacatacaatgttccggaataccgggcaaaggtttcaacctatgctggtcaagcaggggtgtcgggtctggtcaatgcacaagggtctgaagccagaatgaaatatccttacggtcttgcttatgactcagctggcaatctttatttttcagatcaaggaaatcattcaatcagaaaaattgatactttagggaacattactacttttgcaggttcaggaatttctggatcaactgatggacaaggtctgtcagcttcattcaataatccctatgggatagtttttgaccaagcagataacctctatgttgttgataatctaaataaaaaaattcgaaagatagatcctagtggttatgtctcaacttttgcaggcaacgggacagctagcttaattgatggtcaaggaacggatgcatcattcaacaagcctacaaatatagccatagacagttcaggtaatttatatgtttcagaatatggaagtagttcaatcagaaaaattacaccagatgcaaatgttaccacctttgctggaacaggaagtcgaggttccaataatggtcaagggacttcagcttcgtttgaccggccttatggtttagtttttgactcttcttccaatctttatgttggagattatggaaatcacgtcatacgtaaaatcgatccatccggaaatgtaacgacatttgctggaattatggatagttccgggttcagtgatggacaaggtacgtcagcatccttttatgggccagtcggattgactattgatcctcaagggaatttatatgtgacagatcaaaggaatcattcaatcaggaaaattgatccttcaagaaaagtaataacgattgcaggaacagggagtgaaggggcagcggaggaa

SEQ ID NO: 210799 - DNA, 787 bp, Unknown
  Bacterial polypeptide expressing nucleotide sequence isolated from the Sargasso Sea
agctaaactctcagactgtggtctgagcattcaagaaatggtcgaaactgcctgggctagtgcatcgacatttagaggttctgacttaagagggggagcaaatggatctcgaattcgtcttgctccacaaaaagattgggaagccaataaaccagaacagcttgcaagagttcttggtgtatatgaatcaattgcttcagagtctaatgcctccttggcagatgttattatacttggtggaaacgttggtattgagaaagcctctggtgctcaagttccattcacaccaggccgaggtgatgccagcgaggagcaaactgatgctgactcatttgatgctcttgagccaattgctgatggttttcgtaatttccaaaaagaaggctccagccttccatctgaggaaatgatgcttgatagagctcaactgcttgggttaactgcacctgaaatgacagtgctcataggaggtatgagagctctgggtataagttcaaataatcatggagtctttacagaaacacctggaaaattaaccaatgatttctttgtgaatcttctagatatgggtgttgagtggaaatcaacaggtgagaactcttatgaggccattgaccgtcagtcaggcgacaaagtaagaacagcaactagggtagacttggtctttggatctaattcacaacttagagcaattgctgaagtttatgcttctgatgactcaaaagagaagtttgtttcagatttcgttgctgcttggaataaggtgatgaacgcagatctgacctaa

SEQ ID NO: 210800 - DNA, 544 bp, Unknown
  Bacterial polypeptide expressing nucleotide sequence isolated from the Sargasso Sea
acctggtcgaggtgatgcgacgcaagatcaaactgatacccattcttttaatttacttgaaccaaaagctgatggatttagaaactatattacaaaaatgacaaatggatctacaaaaaaacctactgtttctgcggaagagatgttagttgataaagctcaacttatgaaactatcagcacctgaaatgacagtattaataggaggaatgagagttttaaacagtaactttgataaatctaatattggtgtttttacaaaaaaaccagaaacacttacaaacgatttctttataaatctacttgatatgggaataacttggaaagagactgatagcaacgaacaattgtttaatggtagagaccgtaaaacaaacaaagttaaatggacagcttcaagagttgatttaatttttggttcaaattctcaacttagagcaatcgcagaagtttatgcttgtgaagattctaaaataaagtttatttctgattttattgctgcatggacaaaagttatgaatttagatcgctttgatcttaattaa

SEQ ID NO: 210801 - DNA, 817 bp, Unknown
  Bacterial polypeptide expressing nucleotide sequence isolated from the Sargasso Sea
ggaagagtcacagggcgtgaaatctctggatgctgaggctgtgactaaaactcagggcatggattttaaccacctgacccgcgatttgtatcagaacatcaatgccggcaataacccgaaatgggatctgtatgtacaggtgattacaccggagcagctggatgatttcgactttaatccactggatgccactaaaacctggcctggtgtgaaagagcgtaaagtcggcaccatgacgttaaaccggatgccggataacttctttgaagaaactgaacaagcggcttttgcaccagccaacctgatcccaggtattgagccgtctgaagatcgcttgttgcagggccgcatattctcttatgccgatactcagctgtatcgtttaggggttaatcacagccaactgcctattaacagagccagagtgatggtggataaccacaatcaggacggtgtgatgaactttggcaacagtacatccactgtcaattacgagccaagccggattgaaccaaaaactgtaacgacagcagcccgagctgtggaaacccagctggatggcactgtgatgcaaaaagccatcagtaagcaggacaactttagtcaggctggtgctttgtaccgcagctttgataagcaacagcaagccaacctgatccgcaatttgtccggtgatttaggtcaggtcaaagatgcagtcactaaacacaaaatgctggcgcatttctacaaagccgacagcgactatggcactcgtttaaccaaagccgttaatggcgatttaaagcaagtgcagcaaatcgctaaatccctgtaa

SEQ ID NO: 210802 - DNA, 1132 bp, Unknown
  Bacterial polypeptide expressing nucleotide sequence isolated from the Sargasso Sea
aacttgtaaaagtccagctggagcattgcaatggtttgctgttgatcaaaaagaagaggacatggctccggatgctcatgatccaactaagaaagttccaactatgatggcaacaacagacatagctctcaaagaagatcctatttataaggtcatttcaaaacgtttccatgaaaatccagaggagtttgcagatgcatttgcaagagcctggtttaagttacttcatcgagacatgggaccaaaatcaagatatatgggaccagaagctcctgatgaggaattaatttggcaggacccagttccagcaggcaacgctgattacgacatagattctgtaaaagaaaaaattaatcaaagcggtctaactattcaagaaatggtagaaactgcatgggctagtgcttctacctatcgaggatctgatatgcgtggtggagccaatggtgcaagaattagactagcgcctcagaaagattgggaagttaataaaccagaacaattgtcaaaggtcctagaagtttatgaaaaaatttcttcagatactggtgcctcaatagcagatgttattgtattagctggaaatgtagggatcgagaaagcttcaggaatggatgttcctttttcacccggaagaggtgatgcatctcaggatcaaaccgatattgaatcctttgcttacttagaaccacgctcagacggcttcaggaattaccatgagtcagggattgaagttaaacctgaggagatgctcttagataaatctcagctactaggtttaactgccccagagatgacagttcttattggcgggatgagatctttaggtattaatcacagtgattacggcatcaaacctgaaaatcctgatgccttagataatgatttctttaaaactcttctagatatgagagtttcttggaaaccaaatggtacgggaaattcttacgaaggatctgacagggtaactggagagtctgtaagaacagccacaaggccagacctggtatttggttcaaattctcagctaagagctcttgttgaggtttatgcagctaatgattctaaagaaaaatttctaaaagattttgtaaaagcatgggataaagtaatgacaaacgatttgttttaa

SEQ ID NO: 210803 - DNA, 634 bp, Unknown
  Bacterial polypeptide expressing nucleotide sequence isolated from the Sargasso Sea
aatgactgacaaaactgaaggcaaatgtcctgtaatgcatggagcaatgacaactcatagctctagtggaacatcaaataaagattggtggcccaatcaattaaatttaaatatattgcatcagcatgatagaaaatctaatccaatggatgacgattatgattacagaaaagagtttgaaaaaattgattatgatgcgcttaaaaatgatttggttgagctaatgacagattcacaagaatggtggccagcagattatggtcattatggacccttctttattagaatgacttggcacgcagctggaacatatagaaatacagatggaagaggtggaggaggaacaggtgcgcaacgtttcgcacctctaaacagttggcctgataatggcaatcttgataaagctcgaagattattatggccagttaaacaaaaatatggaaagcaaatcagttgggcggacttattaattcttgcaggtaatgttgcaattgaatcaatggggggtacaacttttggatatagtgggggacgaccagatatttgggggcttgaagatgatattcattggggtctagaatcagaatggttagataacaaaagatataaaggcgaaagagagctagataaccct

SEQ ID NO: 210804 - DNA, 1552 bp, Unknown
  Bacterial polypeptide expressing nucleotide sequence isolated from the Sargasso Sea
cagtggttagaaaatactcgatacaagggagaaagggaactcgataatcctctcgctgcagttcaaatggggttaatctatgtgaatccgcaaggaccagatgctaacccagaccctatggccagtgctcatgatatacgcacaacttttggaagaatggcaatgaatgattacgaaaccgttgcactgattgctggaggacatacttttggtaaatgccatggagccggtgatgcagaattagttgagtcagagcctgaaggtgctcctattgagcaaatgggacttggttggactaatggacacggaaccggacttggacaagatgccataacgagtggcttagaaggtgcttggactagtaatcctatccaatgggataacggctactttgagttgttattcaagtatgaatgggaactaggcaaaagtcctgctggtgcacatcaatggtatgcaaaagatcaggctgaggaagatatggctcctgatgcccatgatccaagcaaaaaagtacctaccattatggcaactactgatatagcacttaaaactgatccaagttataagaaaatatctgaaggtttcctgaataatcctgaggagttcgctgacgcttttgctaaggcttggttcaaactgctacatagagacatgggtccgagatctaattatatgggccctgaaagtcctgaagaagatttaatatggcaagaccctattcctgaaggtaatgctaattacgatgtttctgaggtaagaagcaagcttgaggcttcaggtttgtctttacaagaaatgattgaaacggcatgggcaagtgcttcgacttatagaggttcagatatgcgcggtggagcaaatggcgctagaatccgtttagcacctcaaaaagattgggaagcaaataagcctgaacaactttctaaagtactagccatttatgacagcatagcagcagaaactggtgcatctgttgccgacgtcattgtccttgctggaaatataggaattgagaaatcagccggggttgaagtgcctttcacaccaggtagaggtgacgcaaccgaagatcagacagatccagagtcttttgaatattttgaaccactttcttgtgctttcagaaattaccatagatcaggcctctctgtaagtgctgaagaaataatgctcgataagtcacaacttttagggctcacagctcctgaaatgactgttctaattggtggcatgagatcattgggtattacaggtagtgattatggcttgatatcagagagtatcgatgagctatcaaatgactacttcaaaactctccttgatatgagggtccagtggaaaccaaatggtaccggtaattcttatgaggcatttgacagagtaactggagaaaaagctagaactgcctccagagcagaccttgtttttgggtctaattcacaacttagagctcttgtggaagtatatgcaacagatgataataaagataaatttgttgctgactttatatctgcatggaacaaagttatgaatgctgatttattttaac

SEQ ID NO: 210805 - DNA, 805 bp, Unknown
  Bacterial polypeptide expressing nucleotide sequence isolated from the Sargasso Sea
gaagcatcaagaattcaagatcaatcgactggatggaacagcgattataaatcaggaaaaggtgttgatactataagcagtggtattgaaggagcatggacacagtcacctataaaatgggatatgggttattttgattgcctatttaatcatgaatgggaattaacaaaaagccctgcaggagctcatcagtggacaccaaaacaaaatggccaaaaaattaaaatggttcctgatgctcatgataaaaataaaatgcatcctccaatgatgcaaacaacagatctttctttaagaatggatccttcgtatggtccaatatcgaaacatttttacaataaccctgctgaatttgcagatgcttttgcaagagcgtggtttaaattaactcatagagatatgggtccaagagcatgttacttgggtaacgaggtaccaaaagaggagttaatatggcaagatccagtaaaaaaaccaaaatataaattaaagaaaagtgatattaaaactcttaaatctaaaatatctaaatctaaattgtctgtatcagagttagtaagcacagcttgggcatcagcttcaacttacagaggatcagataaaagaggtggagccaatggagctagagtttcattagagccacaaattaattgggatgttaatgatccaaatcagattaaaaaagttatcaaaactttagaaaaaattaaaaataaattcgataataagaaaaaatctgtttcattggctgacttaattgtacttggtggaaacgcaggtattgaaatggcagctaaaaaagcag

SEQ ID NO: 210806 - DNA, 865 bp, Unknown
  Bacterial polypeptide expressing nucleotide sequence isolated from the Sargasso Sea
atggatgcagaaagtaaatgcccagtaatgcatggagcaattacaaaaaatatgggagaaggtacatcaaaccgcgaatggtggcctaatcaactaaacttaaatatacttcatcaacatgatcgtaagtccgatccaatggaagtgggttttaactaccgtgaggaattcaaaaagatagactatgctgcattaaaaaaagacctcaatgacttaatgactgattcacaagattggtggcctgctgattatggacactatggtggtttctttattagtatgacatggcatgctgcagggacgtatagaactggagatggtcgtggtggtggtggaacaggtgctcaacgttttgctcctttaaatagttggcctgataatggaaacttagataaagcaagaagattactttggcctataaagaaaaagtatggaaataaaattagttgggccgatctatttattctaactggaaatgttgctattgaatctatgggcggaaaaacatttggatttagtggaggaagaccagacatctgggcgccagaagaagatatttattggggagttgaagaagaatggcttcaaaacaaaagatacacaggtgatagaattttagacaacccgcttgcagcagttcaaatgggattaatttatgttaaccctgaaggaccagatggaaaagcagatccacttgcaagtgcaaaagacattagagaaacttttgcaagaatggcaatgaacgatactgaaactgttgccttaaccgcaggaggacatacttttggaaaagcacatggtgcaggtgatccagctttagttggagctgaaccagaaggtgctccgttagaacaaatgggtttag

SEQ ID NO: 210807 - DNA, 940 bp, Unknown
  Bacterial polypeptide expressing nucleotide sequence isolated from the Sargasso Sea
tatggaaagaaaatttcatgggctgatttgtttattttagttggaaatgttgctcttgactctatgggctttaaaacttttggctttggtgcaggtagagaagatatttgggagccagaggatgacatttattggggttcagaaaaagaaatgttagatgttaaaagatatagtggaaaaagagatttagaacaaccattaggagcttcacatatgggtctaatttatgttaaccctcaaggtcctgatgctaatcctgatccgttattagctgcacatgatattagagagacatttggaagaatggcaatgaatgattatgaaactgctgcattagttgcaggtggtcatacatttggtaaatcacacggtgcagcaccagagtctcacaaaggtcctgaccctgaggcttcaagaattcaagatcaagccacaggctggaatagtaactataaatctggaaaaggtgtggacacaataagtagtggtattgaaggtgcgtggactcaaaatccaatcaagtgggatatgggatatctagattgtctttatggacacgaatgggaacttactaaaagtccagcaggtgctcatcaatggacaccaaagaaaaatggtcaagaaattaaaatggttccagatgctcataataagaatgtttttcatcctcctatgatgcagactacagacatttcattaaaagttgatccaagttatggtcctatcacaaggcattttcatgagaatccaaaagagtttcatgatgcttttgctagagcctggttcaaattaactcacagggatatggggccaagagcttgttatttaggaagtgacgtgcctaaagaggaattaatttggcaagatccgattgataaaccaaaatataaattaaaatcaaaaaaaataaattttttaaaagcaaaaatattgaaatcaa

SEQ ID NO: 210808 - DNA, 947 bp, Unknown
  Bacterial polypeptide expressing nucleotide sequence isolated from the Sargasso Sea
aatggatgcagaaagtaaatgccctgtaatgcacggagcaattacaaaaaatatgggagaaggtacatctaaccgcgaatggtggcctaatcaacttaacttaaacatacttcatcaacatgatcgtaaatcagatccaatggaagctggatttaactatcgagaagagttcaaaaaattagattatgctgcattaaaaaaagacctccataatctgatgactgattctcaagattggtggccagctgattatggtcattatggtggtttctttattcgtatgacatggcatgctgctggaacatatagaactggtgatggccgtggtggtggtggaacaggagctcaacgttttgccccattaaacagttggccagataatggtaacttagataaggcaagaaggcttctttggccgataaagaaaaaatatggaaataaaattagttgggctgatttatttattttaacaggtaacgttgcaattgaatctatggggggtaaaacttttggatttagtggtggccgtcctgacatttgggcaccagaagaagatatttactggggtgtagaagaagaatggctacaaaataaaaggtatactggtgatagaattttagataatccacttgcagcagtgcaaatgggattaatttacgtaaaccctgaaggaccagatggaaaagctgatccgcttgctagtgcaaaagatataagagaaacttttgcaagaatggcaatgaacgacactgaaactgtggctctcactgcaggtggacatacttttggtaaagcacatggtgctggtgatccagctctagtaggagcagaaccagaaggagctcctttagaacaaatgggtttaggttggaataacttgcacggttcaggtgttggtcgtgataccacaacaagtggtatagaaggtccgtggacacctaatccac

SEQ ID NO: 210809 - DNA, 1031 bp, Unknown
  Bacterial polypeptide expressing nucleotide sequence isolated from the Sargasso Sea
aaaccctgatgaatttgcagatgcatttgctagagcttggtttaaacttacacatcgtgatatggggccgcgtgcttgttatttaggtccagaagttccaaaagaacaattaatctggcaagatccagtaacaaaacctaaatataaaattaaaaataatgatattaatgcacttaaattaaaaatattaaaatcaggtctttctatatctcagttagtttctacagcttgggcatcagcatcaacttttagaggttcagacaagagaggtggagccaatggagcaagagtaagattagctcctcaaaaagattggaaagttaataatccagctgaattatctaaagttcttaaaactctagaaaaaattaaaaaaagctttgatggaaaaaagaaaagtgtatcaatggccgatttaatcgttttaggaggatgtgctgctattgaaaaagctgctaagaaagctggtcataatataaaagttccattttcgccaggtcgtggagacgcatcacaagaccaaacagacgtacattcgtttggtttacttgagccaaaagctgatggatttagaaactatattacaaaaaaaactaacggttcatcaacaaaacctactgtatcagcagaagaaactcttgttgataaggctcaacttttaaaacttacagcgcctgaaatgacagtgcttataggaggtatgcgtgtactaaatacaaattttgataaatcaaaacatggggtattcacaacaaaaccagagacacttacaaatgatttttttgttaatttacttgatatgagcacaacatggaaagaaacttctaaagaagaggatttgtttactggaaaaaatcgtaaaacaaataaagttaagtggactggcacacgttttgatcttatatttggatcaaactctcaactaagagcaatcgctgaagtttatgcctgtgaagattctaaaccaaagttcattgctgatttaatatctgcttggacaaaagtaatgaatttagatcgctttgattgaa

SEQ ID NO: 210810 - DNA, 964 bp, Unknown
  Bacterial polypeptide expressing nucleotide sequence isolated from the Sargasso Sea
gattcttgctggtaatgttgcaattgaatcaatgggaggcacaacctttggatacagtggtggacgtccagatatttggggccctgaagaagatatacattggggcgttgaatcagaatggcttgataataaaagatacaagggagaaagagagcttgataatccattagctgctgttcaaatggggttgatatatgtgaatcctcaaggtccggatggaaatcctgatcctttagcaagcgctcatgacatcagagagacttttggaagaatggcaatgaatgatgaagaaactgttgcattagttgcaggaggtcatacttttggtaaggcccatggtgccggtgcagaagatcatgttcaatctgaaccagaaggggctccattagaagaaatgggttttggatggtcaagtacttatgcatcgggtgtaggtagtgatactattacaagcggcattgaaggtgcttggacagcaaatccaactcaatgggataacggatattttgatttattatttggttatgaatgggaattgactaaaagccccgcaggcgctcatatttggcatgctgttggtcaaaccgaggaagatatggcacctgatgctgaggattccgaaaagaaagtaccaacaatgatgactacggctgatatggctttaagagaagacccgagttataacaaaatttcaaaaagatttcatgaaaatcctggtgaatttgcagatgcatttgcaagagcttggtttaaacttttacacagagatatgggacctaaaacaaggtatatgggtccagaagtgcctgaagaggaactaatttggcaagatccagtaccagcaggtaatacagaatatgatatagaagaagtaaaacagtcaattattaactcaggattgtctatccaagaaatggtgaaactgcatgggcaagcgcatcaacttttagaggttcggatatgc

SEQ ID NO: 210811 - DNA, 1009 bp, Unknown
  Bacterial polypeptide expressing nucleotide sequence isolated from the Sargasso Sea
aatcctcaaggaccagatgggaatccagacccacttaaagctgcacgagatataagagaaacttttggaagaatggctatgaatgattatgaaatagttgcattggtagctggcggtcatacttttggcaagtctcatggagctgcatctgaatcttataaaggtccagagccagagggatcaaaaattcaagaacaaggaactggttataacagtagttacaaaagtggaattggagcagacacaataagtagtggtattgaaggagcatggacttctaatccaattaaatgggatatgggttattttgacaatttatttgggtataattggcagttgaccaaaagtcctgcaggagcatatcaatggaaaccaaaaagaaatggtaaagcaattgagatgacgcctgatgcacacattaaaggcaagaaaaatatgccaatgatgcaaacgactgacttgtcaatgagaatggacccaggctttggaagaatttcaagacatttccatactaacccagacgagtttgctgatgcttttgcaagagcttggttcaagctaactcacagagatatgggacctaaagtaaactatctaggacctgaagtgccaaaagaaaatttaatttggcaggatccagttcctaaaaataattataaactaaaaaatagtgaagttgagtctttgaagagaaaaattgcaagttcaggattatcagtatcaaaacttgtttcagttgcatggtcttcagcatcaacttatagatcttctgataaaagaggtggagcaaatggtgccagaataagattagctccaatgaaaaattggaaagttaataatccaactgtattatcgaaagtaattaaggtttatgagaaaatacaaaaatcgtttaataccaagtccaaatcagtatctatagcagatttgattgttctaggtggatctgttggaattgaacaagcggctaaagcagctggtaaaaaagtaaaagttccttttagaccag

SEQ ID NO: 210812 - DNA, 841 bp, Unknown
  Bacterial polypeptide expressing nucleotide sequence isolated from the Sargasso Sea
acatacaatggatgccgaaagcaaatgcccagtaatgcacggtgcaaacactaaaaacaaaggtgaaggaaccacaaataaagattggtggcctaaccaattagacataagtattcttcatcaacatgatgaaaaatctaatccaatgggaaaagattttgattaccgtgaacattttaaaaatattgattatgatggattaaaaaaagaccttaatgatttaatgactgactcccaagattggtggccagcagattacggtcattacggccccttctttattagaatgacttggcatgtagctggaacatacagaactgctgatggtcgtggtggtggtggtacaggcgcacaaagatttgctcctttaaatagttggcctgataacggaaacttagacaaagctagaagattgttgtggccaataaagcaaaaatatggaaatcaaattagctgggctgatttacttattttaactggcaacgttgcaattgaatcaatgggcggaaaaacatttggtttcagtggaggccgacctgatatatgggcgcctgaagaagatatttactggggtctagaaacagaatggttaacaaacaaaagatattctggagaccgtgtattagaaaatcctctagccgctgttcagatgggactaatatatgtaaaccctgagggacctgacggaaatcctgatccactagcgagcgcaagagacattcgtgaaacttttgggcgtatggccatgaatgatgaagagacagttgcactgactgcgggtggtcatacttttggtaaagcacaaagagcaggtgatgcctctcttgttgggccagagcca

SEQ ID NO: 210813 - DNA, 1038 bp, Unknown
  Bacterial polypeptide expressing nucleotide sequence isolated from the Sargasso Sea
aaagatacaggaacatcgaatagagactgggtggccaaaccagctaaatctttttattcttcatcagcatgatcaaaaatctaatcctatgaataaagactttgattataaggaagaatttaagagtcttgactatactgctttaaaaaaagatcttacaaatcttatgacagattcacaagattggtggcctgcagattatggacattatggtcctttttttattcgtatgacttggcatgcggctggaacttatagaactggagatggaagaggaggcggcggaactggagcacagagatttgcccccctgaatagttggcctgataatggaaaccttgataaagcacgaaggttgctttggcctattaaacaaaaatacggcaataaaattagttgggcagacttattgatattagcaggaaatgttgcaatagaatcaatgggtggaaaaacttttggctacagtggtggtcgtccagatatatgggctcccgaagaagatatttattggggcattgaaaaagagtggttagaaaataaacgatacaaaggagagcgtgaattagacaatcctttagctgcagttcaaatgggtttaatttatgttaatcctgaaggaccagatggcaaccctgatcctcttgctagtgcaaaagatattcgtgaaacttttggaagaatggctatgaatgatgaagagacagtagcgcttactgcaggtggtcacacctttggcaaagcacatggcgctggagatccttctcttgttgggcctgaaccagaaggtgcaaaaattgaagaaatgggctttggatggattagtaaacatggctctggcaatggtagtgatacgataaccagtggaattgaaggcgcttggacgaccaatcctgtcaagtgggacaatgggtattttgatcttcttttaaactatgaatgggagcttactaaaagtcctgctggagcaaacatatggcatgcagtaaaccaaaaagatgaagataaagctcctgatgctgaagattcctctaaacg

SEQ ID NO: 210814 - DNA, 955 bp, Unknown
  Bacterial polypeptide expressing nucleotide sequence isolated from the Sargasso Sea
tggcctgataatggaaatcttgataaagctagacgactgctatggccaatcaaacaaaaatatggcaaaaaaataagctgggctgatctattaatattagccggtaatgtagcaattgagtccatgggtgggaagacctttggttttagtggcggaagacctgatatctggggtccagaagaagatattcattggggtgttgaaactggatggcttgaaaataatagatataagggtgacagagaacttgataatcctctagctgccgttcagatgggattgatttatgtaaatcctcagggcccagatggaaatcctgatccacttgcaagtgcaagagatataagggagacatttggcagaatggctatgaatgatgaagaaacagttgcacttgttgctggtggacatacttttggtaaggctcatggagcaagtactgaggatcatgttcaagcagaaccagaaggggctcctcttgaagagatgggttttggatggacaagtagctatggttcaggagttggaagtgacactattactagtggtattgaaggtgcatggactgcaaatccaacacagtgggataatggatactttgatttgctctttggatatgagtgggagctaaccaagagtcctgcaggtgcacacatttggcatgctgttgggcaaaaagaggaggatatggctccagatgcggaggatgcttcagtgaaagttccaacaatgatgacaactgctgatatggcgatgagagaagatccaagttataaagaaatatcaaaacgttttcatgagaacccagacgagtttgcagatgcttttgcaagagcttggttcaagttattgcatagggatatggggcctaaaacaagatatatggggccagaagttcctgaagaggaattaatttggcaagatcctgtccctgctggaaatttcaacttatgat

SEQ ID NO: 210815 - DNA, 951 bp, Unknown
  Bacterial polypeptide expressing nucleotide sequence isolated from the Sargasso Sea
caagaacaagcaactgggttggaatagtaattataaaagtggtttaggagttcatactataagcagcggtctcgaaggagcatggacagcggatcctataaaatgggatatgggttattttgataatttatttaactatgaatggaagctaacaaaaagtcctgcaggcgcacatcagtggacaccaaagcaaaatggtagtgctatagaaatggttccggacgcacatgataaatcaaaaaaacatcctcctatgatgttaactactgatctttctttaaggatggatcctaaatacggcccaatttctagaaattttcatgaaaacccagatgagtttgcggatgcatttgctagagcttggtttaaacttacacatcgtgatatgggacctcgagcttgttatttaggtccagaagttccaagagaagaactaatttggcaagatcctgtatcaaaacctaaatacaaacttaaaaataatgatgtaaatgctcttaaagcaagaatattaaaatcaggactttctatatcggagctcgtttctacggcttgggcatcagcttcaacttttagaggctctgataagagaggtggagctaatggagcacgaattagactagcgccacaaaaagattggaaagttaataatccgactcaattatctaaagttcttaaaactcttgagaaaatcaaaaaaaactttgattctaaaaagaaaaatgtgtcattagctgatttaattgttttaggtggatctgctgcaattgaaaaagctgccaaaaaagccggccaaaatgtaaaagttccattttcacctggtagaggagatgcatcacaagatcaaacagatgcgtattcatttggtctacttgaaacaaaagctgacggatttagaaactacatttacaaaagaactaacggatcatcagaaaaacctacagtgtcagc

SEQ ID NO: 210816 - DNA, 1027 bp, Unknown
  Bacterial polypeptide expressing nucleotide sequence isolated from the Sargasso Sea
gcaaagatatcagaagaaacattttggaagaatggcgatgaatgatgaagaaacagtggctttaattgctggaggacatacctttggtaaggcacatggtgcatcattagaatcaaatgttggagtagagcccgaaggtgctccaattgaatcaatgggatttggttggaaaaatgaacacggttctggtgttggtggtgatgcaataacaagtggtcttgaaggcgcatggactgcagatcctatcaaatgggataatggatattttgatttgcttttcggatatgattgggaattaggcaaaagccctgcgggagcacaccagtggtttgcaaaagaccagaaagatgaagatatggctccggatgctcatgactcatcaaagaaagtacctactatgatggctactactgatatagctctaagagaagatccaatttataaagagatttctaaaagatttcatgaaaatcccgatgaatttgccgatgcatttgcaagagcatggtttaagcttttacacagagatatgggcccaataacaaattatattggaccagaagcccctactgaagaattgatttggcaggatcctgtacctgctggaaataaagattatgatgtagaatctgttaaaagtaaaattgaggaatctggtctaagtattcaagaacttgttgaaactgcttgggcaagtgcctcaacatttagaggctcagacctcagaggaggagcaaatggtgctcgtataagacttgaacctcaaaaaagttgggaagttaataaaccagagcaacttaaaaaagttttatcagtttatgaaactatttcctcagaaacaggagtatcagttgctgatattataattcttggtggaaatcttggaattgaaaaagcttctggcaagactttagattttactcctggtagaggtgattcatctcaagatcaaacagatatagactcttttgcttatttagagccaatttctgatggtttcagaaattatcataaggatggtcttgat

SEQ ID NO: 210817 - DNA, 850 bp, Unknown
  Bacterial polypeptide expressing nucleotide sequence isolated from the Sargasso Sea
attttaagtcagcattcatctttggttaatccaatggataataaatttaattactcaaaagaatttaaaaaattgaattataaagcactaaaaagagatttagtgaaattgatgacacaatctcaaagttggtggcctgctgactacggtcattacgggccattgtttataagattagcttggcatgctgctggaacatatagaactggcgatggaagaggtggggctggaacaggaaatcaaaggttcgcaccacttaatagttggccagacaatgttaacttagataaagctagacttcttctttggcctataaaaaaaaaatatggaaaaaaaatttcttgggctgatttatttgttttgattggaaatgttgcacttgagtcaatgggatttaaaacatttggttttggcgcaggtagagaagatatatgggaaccagaagaagatatatattgggggtcggaaaaagaatggcttggagtaaaccgatatagtggtaaaagagaattagagaatccgttaggggcttctcacatgggtttaatttatgttaacccacaaggacctgatgcaaacccagaccctttactagctgcacatgatattcgtgaaacatttggtagaatggctatgaatgattatgagactgtagcattagttgcaggaggacatacttttgggaaatcccatggagcagccccagagtcacataaaggtccagaacctgagggatcaaaagttcaagatcaagcaactggttggaacagtaattataaaagtggcttaggtgctgatacaataagcagtggtattgaaggagcttggactagtaatcctattaaatggg

SEQ ID NO: 210818 - DNA, 849 bp, Unknown
  Bacterial polypeptide expressing nucleotide sequence isolated from the Sargasso Sea
ctaggtgttaaccgttatagcggtaaaagagatcttgaaaatcctttaggcgcttctcatatgggtttaatttatgtaaatccacaaggtcctgatgcgaatccagaccctcttttagctgctcacgatattcgagaaacttttggtcgtatggctatgaatgattatgaaacagtagcacttatagctggcggtcatacttttggaaaatctcatggcgctgcacctgagtcacacaaaggtccagaaccagaaggctcaagaattcaagatcaagctactggttggaatagtgattataaaagtggtaaaggagttgatactattagcagtgggctcgaaggagcttggacaattaatccaacaaaatgggataatggttattttgatttattatttaaccatgaatgggaattaacaaagagtcctgcaggcgcacatcagtggaaaccaaaaaaaaatggggcagatataaatgttgttcctgatgcacacgattcaaccaaaaaacaccctcctatgatgttaactacagatctttctatgaggatggatcccaaatatggactaatttctaaaaaatttcatgaaaaccccgatgagtttgcagatgcatttgcaagagcctggtttaagcttacgcaccgtgacatgggacctcgtgcttgttatttgggttcagaagttccaaaagaggaactaatttggcaagaccctataccaaaagttaaatacaaactaaaaaataaagatattaacactcttaaagcaaaaattttaaaatcaggattttctatccctaagctagtttctacagcttgggcatctgcatcaacttttcgaggttca

SEQ ID NO: 210819 - DNA, 610 bp, Unknown
  Bacterial polypeptide expressing nucleotide sequence isolated from the Sargasso Sea
gatgtttaacaaatactttttacttattttctctttattttttatttctaattgcgaacaaacctatgttgataaaaatggtgatagttcctttcgaggaaagtttaaaacaaaccgtgaatggtggccaaatcaacttgatcttagcgttctaaggaagcactcatcactttcaaatccaatggattcaaactttaattacgaagaagcttttaatagtttagattatcaagctctaaaaaaagaccttaaagacttgatgacagattcaaaagattggtggcctgcagattatggtcactatggtggattatttatcagaatggcttggcacagtgctggtacgtatagaaccggagatggtagaggtggtaccagagaaggacagcatagatttgcacctcagaatagttggcccgataatgccaatttggataaagctagaagactcatctggccaataaaacaaaaatatggtaataaaatttcttgggcagatttaatgatattgacaggaaatgttgcattagaatctatggggtttgagactctaggttttgctggtggaagagaagatgtttgggagcctgcaggtaatatctattggggg

SEQ ID NO: 210820 - DNA, 682 bp, Unknown
  Bacterial polypeptide expressing nucleotide sequence isolated from the Sargasso Sea
ggcgttgaatcagaatggcttgaaaataaaagatataagggtgaaagagaattagataacccacttgcagctgttcaaatgggattaatatatgttaacccgcaaggaccagatggaaatccagaccctcttgcaagtgctcatgatatcagagagacatttggaagaatggcaatgaatgatgaagaaactgttgcgcttgtggctggaggtcatactttcggaaaagcacatggagctggagcagaagatcatgttcaatcggaaccagaaggagctccattagaggagatgggatttggttggacaagcacatacgcatctggagtaggaagcgacaccataactagtggtattgaaggagcgtggactgcaaatcctactcagtgggacaatggatattttgatttattgtttggttatgaatgggaattaactaaaagtcctgcaggagctcatatttggcatgctgttggtcaaactgaagaagatatggctccggatgctgaagatgcttccaaaaaagttccaacaatgatgacaactgctgatatggctttaagagaagatccaagttataagaaaatttcaaaaagatttcatgagaatcctgatgaatttgcagatgcttttgcaagagcatggttcaaacttcttcacagagatatgggtccaaagtcgc

SEQ ID NO: 210821 - DNA, 740 bp, Unknown
  Bacterial polypeptide expressing nucleotide sequence isolated from the Sargasso Sea
aatgttaagagaacaatcaaaatgtccatttacaggagtaggaacacccgcaaagcattctgctggaaaaggtcaaacagcaagagatttctggccaaatagcctgaatttaaaaattttaagtcagcactctgatttatccaatccaatggagaaaaaatttaattattcaaaagaattcaaaaaacttaattataaagaacttaaaaaagatttaagaaaattgatgaaagactcccaagattggtggccagctgattacgggcattatggacctttttttattagattagcttggcatgcagccggcacttatagaactggtgatggaagaggaggagctggaacaggtaatcaaagatttgctccattaaattcttggccagataatgttaatttagataaagcaagattacttttgtggccaataaagcagaaatatggaaaaaaaatatcttgggcagacttatatatattagtaggtaatgttgcattagagtcgatgggttttaaaacatttggttttggtgcaggtagagttgatatatgggagcctgaggatgatatttattggggctctgaaaaagaaatgttaggtgttaatagatatagtggaaaaagagatcttgaacaacctttgggggcttctcacatgggattgatttatgtaaatccacaaggacctgatgcaaatccagatccgttattagcagcacatgatattagagaaacatttggaa

SEQ ID NO: 210822 - DNA, 746 bp, Unknown
  Bacterial polypeptide expressing nucleotide sequence isolated from the Sargasso Sea
tcccaaagcaagcgctaaagatattagagaaacttttggcagaatggcgatgaatgatgaagagactgtggctttggttgcaggtgggcatacatttggaaaggctcacggcgcagctcccgatagtcatgttgaagctgagccagaaggtgcggcagttgaaaatatgggttttggttggaatagtagctttggatctggaaaaggaagggatactataacaagcggaattgaaggcgcatggaccgcaaatccaacccaatgggacaatgggtattttgatcttttgctagggtatgactgggaactaaccaagagcccagcaggtgctaatatatggcatgcagtaaatcaaacaaatgatcatatggcaccagatgcagaagacccgtcaatcaaagttccaacaatgatgactactgcagatatcgcaatgattgaagaccctgattataaaaaaatatctgtacgctttcatgaaaatccatcagaatttgcagatgcttttgcaagggcatggttcaaattattacatagagacatggggccaaaatctcgatatatggggccagaaattcctgaagaagagttaatatggcaagatccagttccagaaggtaatagcgactacgacctaaatattttaaaagaaaaaattttagcaagcggactcaataaccaagaaatgattgagactgcttgggcaagcgcttcaacgtacagaggtactgatatgagaggtggcg

SEQ ID NO: 210823 - DNA, 781 bp, Unknown
  Bacterial polypeptide expressing nucleotide sequence isolated from the Sargasso Sea
gccagctgattatggtcattatggtcccttttttataagaatgacttggcatgcagcgggaacatatagaacaggtgatggccgaggcggaggtggaacaggcaatcaacgttttgcaccactaaatagttggcctgacaatggaaacttagataaggctagaaggttgctttggcctattaaacaaaaatatgggaataaaataagttgggctgatttatttattctcacgggtaatgtagccatagaatctatgggtggaaaaacttttggttttggtggaggacgtcctgatatttgggctccagaagaagatattgattggggtgcagaaaaagaatggctagcaaatgaaagatattcaggtgaaagagatttagctaatccgttgggcgctgttcaaatgggattgatttacgttaatccgcaaggtcctgatggagatcctgatccaatcgcgagcgggaaagatgttagagaaacttttggcagaatggctatgaatgacgaagagacagtcgcacttgtagctggaggacatacttttggtaaaggccatggggctggtccagaagaaaatgtacaagttgaaccagaaggggcttctctcgagaatatgggctttggttggatgagcaatcatgcttctggtaagggtactgatactataacaagtggcttcgaaggtgcctggactgcagatccaactaaatgggataacggatattttgatctcttatttggttatgagtgggaaaaagtagaaacacccgctggaaaa

SEQ ID NO: 210824 - DNA, 731 bp, Unknown
  Bacterial polypeptide expressing nucleotide sequence isolated from the Sargasso Sea
tggaaacaaaattagttgggctgacttagtaattttagcaggtaatgttgcgattgagtccatgggaggtaaaacctttggttatagtggtggacgtcctgatatatgggctccagaggaggatatatactggggtaaagaaaaagaatggttatcaagtagtcgttatacaggagatagagatttagaaaatcctcttgcagcagttcagatgggtttaatttatgttaatccagagggtccagacggaaaccccgatccagttgcaagtgccaaagatataagagaaacatttggtcgaatggctatgaatgatgaagaaactgttgctctaattgcaggtggtcatacttttggtaaagttcatggtgctggagatgcagctctggtaggccctgctccagaaggtgctccaatagaagaaatgggattgggatggagaaacgcacacgggtctggaaaaggaagagacactataactagtgggcttgagggtgcttggacttcaaatccaattaaatgggataatggttattttgatatgctttttggttatgagtggaagcttgttaaaagccctgcaggagcaaatcagtggcatgctataaatcaaaaagatgaggacttagctccagatgctgaagattcttccattcgtgttcctacagtaatgttaacttcagacatggctatgcgtgaagatcctatttataataaaatttcaaaacatt

SEQ ID NO: 210825 - DNA, 952 bp, Unknown
  Bacterial polypeptide expressing nucleotide sequence isolated from the Sargasso Sea
aacttttggaagaatggctatgaatgatgaagagacagttgctcttactgcgggtgggcacacttttggaaaagcacatggagcaggtgatgcttctcttgttggtcctgaacctgaggctgctgctattgaagaaatgggattaggatggattagtaagtacgcttcaggtaaagggagtgattctattactagtggtatagaaggtgcttggacagcaaatccgacaaaatgggataatggttattttgatattttgttagggtatgaatggaagctaacaaagagtccagcaggtgcaaatatttggcatgcgatagatcccaaagaagaacatcttgcacctgatgcagaagattcatcaaaacgtgttccaacaatgatgacaactgctgatatggcaatgcgtgaagatccagaatatagaaaaatatctgaacgatatcataagaatccaaaagaatttcaagatgcttttgctcgtgcatggttcaaattgcttcatcgtgatatggggcctaaatcacgctacattggacctgaagttccaaaagaagatttaatttggcaagatccaatacctaaaggaaattcaaattatgatgtcaatgctgctaagactaaaatttcagaaagtggattaactattcaacaaatggttgaaactgcttgggcaagcgcatcaacatttcgtcaaactgatatgcgtggtggagctaatggtggtcgtatcagacttgaaccacaaaaaaattgggaagtaaataagccagatcaactttcaaaagtattgaaaatattagaaggaatagctgcagaaacaggggcctctgttgctgatattattgttcttgcaggaaacgtaggcattgaaaaagcatcgggcgccattgtacaatttacacctggtcgtggtgacgcaactcaagaacatacggatatagagtcgttt

SEQ ID NO: 210826 - DNA, 912 bp, Unknown
  Bacterial polypeptide expressing nucleotide sequence isolated from the Sargasso Sea
ccgaaagcctgttacctggggccggaagtgccgaaagaggacctgatctggcaagacccgctgccggctgccacgcataacccgactgctgccgatatcgctgacctgaaggcgaagatcgcggcgtccgggctgtcggtcggcgatctggtgtccgtggcctgggcctcggcctccaccttccgcggtggcgacaagcgcggcggcgccaacggcgcgcgtctggccctggcaccgcagaaggattgggcggtcaatcagcgggcgatcaaggtgctgccgaagctggtggagatccagcaggcttcgggcaaggcgtcgctggccgatgtgatcgtcctggccggcaacgtcggtgtcgagcaggcggccaaggctgccggcgtcgcggtggacgtgccgttcgccgccggccgtgtcgatgcccgtcaggatcagaccgatgtcgagtcttttgacgtgctcgagccggctgccgatggcttccgcaactacagcaagggcaacctgggcgtgccgaccgagacgatgctggtggacaaggcgcagatgctcaccctgaccgcgccggagctgaccgcgctggtcggcggcctgcgggttctgggggccaaccatgacggcagccagcatggtgtgttcaccgacaaggtcggcgtgctgtccaacgacttcttcgtcaatctgctggacatgggcaccgtatggaaggccaccgatgacagcaatgaagtcttcgaggggcgtacgcgcaaggacggtcaggtgaagtacaccgctacccgcaacgatctggtgttcggctcgaactccatcctgcgtgcctacgccgaggtctatgccagctccgacggcaaggagaagctggtccatgacttcgtcgcggcctggaccaaggtgatgaacctggat

SEQ ID NO: 210827 - DNA, 619 bp, Unknown
  Bacterial polypeptide expressing nucleotide sequence isolated from the Sargasso Sea
catgaaattaaattcgtggggatccctcaggtacggggcccacggatattttgaaacgtacgagtcactatctgacatcacctgtgctgaaatttttcaggaaaaaggtaaaaagaccccggtattcactagattctctaccgtagcgggcaaccagggttctccagatttagcgcgcgatgtacgaggttttgctgttaaattctatactcaagagggcaattgggatttagttggcaataacattcccgtcttctttattcaagatgctatcaagttcccagatttagttcactcagctaaacaagagcctgaccgaggttttccacaagcgcaaaccgcgcacgataacttttgggacttcacaagcttaagcccagagtctgttcacatgcttatgtgggcgatgtcagaccgcgctattccgcgttcattccgcttcatggaaggttttggtgtacacacctttaagcttataaatgccaaaggtgaaatgaaatatgtgaagtttcattggaaaccgaaacaaggtttgcagtcagtcgtgtggaatgaagcactgaaaattaatggtgcagatcctgaggtatccccacaaataatgactaaaattcagtaa

SEQ ID NO: 210828 - DNA, 495 bp, Unknown
  Bacterial polypeptide expressing nucleotide sequence isolated from the Sargasso Sea
catgagtaagtgtccattttcaggtacagccataaaccctaccacgctaacgtctagcaatggtgcgcccgttgctaatgacaaccaaagtcgcaccgccggacctcgtggccctgttactttcgacaaccactatttattcgagaagcttgcgcactttaaccgcgagcgcattcctgaacgcgtagttcacgctagaggtagtgcagcgtatggtacttttacgcttactaagagtttatccgattacaccattgccgactttcttcagcaagaaggacagcaaactaacgtctttctacgtttctctacagtaggtggtggtcaagattcaagcgactacgctcgcgacccccgtggtttttctgtgaagttttacaccgaacagggcaactgggatatggtgggcaataatacgccagtgtttttcttgcgagatggcattaagttccctgattttatacacagccagaaaaagaacccgcgaactaactt

SEQ ID NO: 210829 - DNA, 991 bp, Unknown
  Bacterial polypeptide expressing nucleotide sequence isolated from the Sargasso Sea
tataagacttgcttggcatgcggctggcacatacagaactggtgatggtagaggtggagctggaacaggaaatcaaagatttgcaccgttaaactcttggccagacaatgttaacttagataaagcaagattacttttatggccaataaaaaaaaagtatggaaataaaatttcttgggcagatctatttattttagtaggcaatgttgcattagattctatgggatttaaaacatttggttttggagctggaagaactgatatttgggaaccggaagatgatatttactggggatcggaaaaagaaatgttgggtgtagatagatacactgagaaaagagatctagagcagcctttaggtgcttctcacatgggtttaatatatgtcaatccgcaaggacctgacgctaatccagatccaaaacttgcagcacatgatatcagagaaacttttggaagaatggctatgaatgactacgaaactgcagcattggtagctggtgggcatacttttggaaaatcccatggtgcagcaccagagtcacacaaaggtccagatcctgaagcttcaagaattcaagatcaatctactggatggaatagtggatataaatcaggcaaaggcgttgatacaataagtagcggtatcgaaggtgcttggacacaaaatccaattcaatgggatatgggttatttagattgtttatatggtcacgattgggagcttacaaaaagcccagcaggagcacatcagtggacaccaaaaaaaaatggacaaaagataaaaatggttccagatgctcacaataaaggtgtccttcatccaccaatgatgcaaactacagatatatctatgaaagttgatccaagttatggtccaataacaagacatttccatgaaaatccaaaagagtttcatgatgcatttgcaagagcatggtttaagctgacgcatagagatatgggcccaagagcctgttacttaggcgct

SEQ ID NO: 210830 - DNA, 921 bp, Unknown
  Bacterial polypeptide expressing nucleotide sequence isolated from the Sargasso Sea
ctttaaaccggacccacgcactaacctggacgatgactcgcgccgtttcgacttcttctcccatgttccagagtccactcgtacactgaccgagttgtactcggactccggcacccctgccagttaccgcgaaatggacggcaacggcgtacatgcctacaagttgattaacgccaaaggcgaagtgcactacgtcaagttccactggaagagccagcagggcatcaagaaccttgatcccaagcaagttaccgaggtgcaggggcgtgactacagccatatgacccatgatctggtcacgcacatcaacaaaggcgacttccctaaatgggacctgtatgtgcaggtgctcaagcctgaagacctggccaagtttgatttcgacccactggatgccaccaagatctggccgaatgtgcccgagcgcaaagtcgggcaaatggtgctgaaccgcaacccggccaatgtgttccaggaaaccgagcaagtcgcgatggccccggccaacctggtaccgggtatcgagccgtcggaagaccgcctgctgcaggggcgcgtgttctcctacgccgatacgcaaatgtaccgcctgggcgcgaacgccttgcagttgccgatcaacgctccacgggtcaccgtcaacaacggcaaccaggacggcgcgatgaacgtcggcaagaccaccaccggcgtcaactaccagccaagccgcctgttgccccgcgaagagccgcaagccgcacgctacagccagtcgccgctgtcgggcagcacccagcaggccaagatccagcgtgagcagaacttcaagcaggccggtgatctataccgttcctacaccaagaaagagcgcgaggacttgatcaacaacttcggcggctcattggccaccaccgatgacgagagcaagcacatcatcct

SEQ ID NO: 210831 - DNA, 916 bp, Unknown
  Bacterial polypeptide expressing nucleotide sequence isolated from the Sargasso Sea
tatgcatggcgctatgacaagtaatagttcatgtggtacatctaataaagattggtggcctgagcaactaaatttaaatattctgcatcagcatgatagaaaatctgatccaatggatgagggttttgactatagaaaagaatttgaagatatcgactatgatgctctgaaaaaagatctaaatgatctcatgactgattcacaggaatggtggcctgcagactatggtcactatggtccatttttcataagaatgacttggcatgctgctggaacatatagaagtacagacggtcggggtggaggtggaactggtgcacaaagattcgctcccttaaatagttggcctgataatggaaacttagataaagctagacgactactttggccaatcaaacaaaaatatggcaagaaaataagttgggctgatctattaatattagccggcaatgtagcaattgagtccatgggtggaaagacctttggtttcagtggtggaagacctgatatctggggtccagaagaagatattcattggggtgttgaaactggatggctagagaataatagatataaaggtgatagagagcttgataacccccttgctgctgtccagatgggattgatttatgttaatcctcagggtccagatggaaatcctgatccgcttgcaagtgcaagagatattagggagacctttggtagaatggctatgaatgatgaagaaacagttgcacttgttgctggtggacatacttttggtaaagctcatggagcaagcactgaagatcatgttcaagcagagccagaaggagctcctcttgaagagatgggatttggatggacaagtagttatggttcaggtgttgggagtgacacaattactagtggtatcgaaagcgcatggactgcaaat

SEQ ID NO: 210832 - DNA, 850 bp, Unknown
  Bacterial polypeptide expressing nucleotide sequence isolated from the Sargasso Sea
ggcgatggaagaggaggtgctgggacaggtaatcaacgttttgcacctcttaatgcttggccggataatgttaatttagataaagcaagattattattatggccaattaaacaaaaatatggaaaacaaatttcatgggctgacttatttattttggttggaaacgttgctttagagtcaatgggttttaaaacttttggttttggagcaggaagagttgatatttgggagccagaggatgatatctactggggatctgaaaaagaaatgctaggagtggaaagatacagtggaaaaagagatttagaacaaccgcttggagcttctcacatgggtttaatctatgtaaatccacaaggaccagatgcaaatcctgatccattacttgctgctcatgatattagagaaacttttggaagaatggcgatgaatgactatgaaactgttgctttagttgctggaggtcatacatttggaaaatcacatggagctgcatcagagtcacacaaaggtccggacccagaggcatcaagaattcaagatcaagcaactgggtggaatagtgattacaaatcaggaaaaggcgttgatactataagtagtggaattgaaggcgcttggacacagtctcctattaaatgggatatggggtattttgattgtttgttcaatcatgaatgggaacttacaaaaagtcctgcaggagctcatcaatggactcctaaacaaaatggtcaaaaaattaaaatggttcctgacgcacatgacaaaaacaaaatgcatccaccaatgatgcaaacaacagacctttcactaagaatggatccttcatatggtccgattcaaaaca

SEQ ID NO: 210833 - DNA, 908 bp, Unknown
  Bacterial polypeptide expressing nucleotide sequence isolated from the Sargasso Sea
gctgaaggcggatctaaagacgttgatgactgactcccaggactggtggcctgcggactgggggcattacggcggcctgttcattcgtttggcatggcacagcgctggcacttatcgcagcgccgacgggcgcggtggcgccggtcacggcaaccagcgttttgcccctctcaatagttggcctgacaacaccaatctcgacaaggcccgaaggttgctctggccactgaaacgcaaatacggcaatgcgatttcctgggctgacttaatcattctcagcggcaatgtggcactggaatccatgggattccgcacctttggctttgccggcggtcgtacagatatttggcaacccgaagaagacgtgttctggggcaaggaaaccgagtggttaggggatgaacgccacaacaaccagggaaaactggaccagccgctggcggctgtcgagatgggactgatttacgtcaatccagaggggccgcacggcaatcccgatccggtggcctctgggccgcaagtgcgtgacacgtttgctcgaatggggatgacggtggaggagaccgtcgctctcgtggcgggtggccatacctttggaaagtgtcacggtgcggctcctgcttcacatttggacgcggaaccggagggggctgaactgcatcagcagggcctgggctggcagaaccgttttgagagcggcaagggggaacacaccatcaccagtggcattgaaggggcctggaaacccaacccaacccgttgggaccagggctatttcgaaatgatgtttagctacgagtgggaactgaccaaaagtcctgcaggtgcttggcagtgggtcgccaaaaatgtgaaaccggaacacatggttccggatgcccatgttcccggtcgctcgtcggcaccga

SEQ ID NO: 210834 - DNA, 964 bp, Unknown
  Bacterial polypeptide expressing nucleotide sequence isolated from the Sargasso Sea
aaaagagatttagagcagccattaggagcttcacatatgggtctaatttatgtaaatcttcaaggacctgatgctaaccctgatccattgctcgccgcacatgatattagagagactttcggtagaatggcaatgaatgattacgagacagctgcattagttgcaggtggtcatacttttggaaaatcacatggtgctgcaccagaatctcataaaggtcctgatcctgaggcctcaaaaattcaagatcaagctactggatggaacagcggttataaatctggaaaaggtatagatacaataagtagcggtattgaaggtgcatggacacagaacccaactaaatgggacatgggatatcttgattgcctttatggacatgattgggaacttactaaaagtcctgcaggtgctcatcaatggacaccaaaaaaaaatggacaagaaataaaaatggtaccagatgcgcataataaaaatttaatgcatcctcctatgatgcaaacaaccgacatttcattaaaagttgaccctagttatggtcctataactaaacatttccataaaaatccaaaagaatttcatgatgcatttgcaagagcttggtttaaattaactcacagagatatgggtcctagagcttgttatttaggaagtgatgttccaaaagaagaattaatttggcaagatccgatagatagaactaaatataaattaaaatcaaaagatattaatgacttaaagtcaaaattactaaaatcaaaactatcagtttcagacttagtttctactgcatgggcttcagcttcgacctttagaggttcagacaagagaggtggtgctaacggagcaagaataatgctggaaccccaaaagaattggaaagtaaataatccttctagattattaaaagtaatttcagttttaaagaaaataaaaaaccaatttgataatagaaagagat

SEQ ID NO: 210835 - DNA, 970 bp, Unknown
  Bacterial polypeptide expressing nucleotide sequence isolated from the Sargasso Sea
cagcattctaatttatcaaatcctatgataaaaaaattcaaatattcaaaagaatttaaaaaacttaacttcaagtctcttaaaaaagatttaaaaaaattaatgacagactcacaagaatggtggccagcagattatggtcattatggtccattatttattagattagcttggcatgcagcagggacttatagaacaggagatggtagaggaggagcaggaacaggaaaccaacgttttgcaccattaaattcttggccggataatgtaaatttagataaagcaagactgcttttatggccaatcaaaaaaaaatatggaaaaaaaatttcttgggctgatttgtttattctagtcggtaacgtagctttagattctatgggattcaaaacatttggttttggtgctggaagaatagatatttgggaaccagaagatgatatttactggggctcagaaaaagaaatgttagatgttaaaagatatagtggaaaaagagatttagaacaacctttaggagcctcacatatgggattaatttatgtgaatccacaaggaccagatgctaatcctgatccattgcttgcagcacatgatattagagaaacatttggaagaatggctatgaacgattatgaaactgcagcattagttgcaggtggtcatacatttggaaaatcacacggagcagcacccgaatctcataaaggcccggaccctgaagcatcaagaattcaagatcaagctactggatggaacagcggttataaatcaggaaaaggtgtagatacaataagtagcggtattgaaggtgcttggactcagaatcctattaaatgggatatgggttatttagattgtctttatggacatgaatgggagcttacaaaaagtccagcaggagcacatcaatggacaccaaagaaaaatggacaagagattaaaatggtacccgatgccaccatgataa

SEQ ID NO: 210836 - DNA, 925 bp, Unknown
  Bacterial polypeptide expressing nucleotide sequence isolated from the Sargasso Sea
acctatagaattggtgatggaagaggtggagccggtacaggtgcacaaagattttcacctttaaactcatggcctgataatggaaatttagataaggctagaaggttgctttggccaatcaagcaaaaatatggaaaacagttaagctgggctgatttattggtcttggctggcaatgctgcgattgaatcaatgggaggtaaaaccttcggcttcggcggaggcagacctgacatttgggaacctgaagaagacatatactggggtccagaagaagagatgcttggaaacaataggtatgttggggagagagttcttaataatccactagctgccgtccagatgggtttaatttacgttaatcctcaagggccagatgcaaatccagatccaaagcttagtgcacacgatatccgagaaacctttggaagaatggcaatgaatgattatgaaactgtggctttaattgctggcggacatacatttggtaaatgtcatggtgcgggagatgataatcttgtgggtgttggaccagaggatgcaccgattgaacaacaacagtttggctggaagagtggacatggaaaaggtatgggtagagatacaattaccagtggccttgaaggtccatggactaaggatcctgcgaaatgggacaacggttactttgaaaaccttttcaaatatgaatatgaacttgtaaaaagccctgcaggagcatttcagtggcatccaattgatctggaggaagaaaactatgcaccagatgttgaggatccaaatatgaaagtaacgacaattatgctgacttctgatttggcgctgaaagaggatccagagtatagaaaaatatcaatgcactttaaggataatcctgatgaatttgcagatgcatttgcaagagcatggtttaagttgttgcata

SEQ ID NO: 210837 - DNA, 817 bp, Unknown
  Bacterial polypeptide expressing nucleotide sequence isolated from the Sargasso Sea
gaagccgttaaaaaagatatcaatgacgttctgacaacgtcacaagactggtggcctgccgattacggtaactatggcccgttcttcatccgcatggcatggcacagcgccggtacataccgcgttactgatggtcgcggcggcgcaggtggcggtcaacaacgctttgacccgctaaacagctggccagataacgccagccttgataaagcacgccgtttgttgtggccgctgaagcaaaaatatggcgcaaatatttcatgggcagatttgatggtgctggctggcacagtggccatggaaaatatgggctttaaaacacttggatttgcgggtggccgcgttgacgaatgggaacctgatatcgtgtattggggtccagaaacagaatggctagccagtaaccgccacggcaaagacggcaagctatcacgtccacttggcgcgacgcatatggggttgatttacgtgaacccagaaggcccgaacgcgaaccatgatcctttatcagccgccgacgccatccgtgatgcgtttggccgcatggcgatgagcgaagaagaaacggttgccctgattgcaggtggtcacacatttggtaaggcacacggtgcgcacgatccgaaaaaatgcctaggcgccgagcctggcgcagccccaatcgaagcccaaggctttggctggcataacaaatgtggcaaaggtaacgctgaagacacaatcaccagtggccttgaaggtgcgtggacatctgcccctgcacagtggacgcacatgtatttggataacttgttcagttttgaatgggaaaaagcaa

SEQ ID NO: 210838 - DNA, 889 bp, Unknown
  Bacterial polypeptide expressing nucleotide sequence isolated from the Sargasso Sea
agatattcgtgaaacttttggaagaatggcaatgaatgatgaagaaacagttgcacttacagcaggtggtcatacatttggaaaggcacatggagcaggtgatgctgcattagttggtccagaaccagaaggtgctcctatggaagaaatgggttttggatggattagtaaacacgcctctggtgtaggaagcgatactattacaagtggcattgaaggtgcttggacaacaaatcctacaaaatgggataatggttattttgatttacttcttggttatgagtggaagctaacaaaaagcccagcaggtgcaaatatttggcatgcagtggatcaaaaagaagaacacatggcgcctgatgcagaagatgcgtctaaaaaggttccaactatgatgacaactgctgatatggcaatgcgtgaagaccctgagtatagaaaaatatctgagcgttttcataaaaaccctgatcagtttcaagatgcctttgcacgcgcttggtttaaacttctgcatcgtgatatggggccaaagactcgatacattggacctgaatctccagaagaagttttaatttggcaagacccagttcctgcaggaaacacaaactatgatgttgatagtgtgaaagcaaagattgaagatagcggtttatcaatccaagagatggttgaaacagcttgggctagtgcttcaacgtatcgacacaccgatatgcgaggtggcgcaaatggagcgcgaataagattagagcctcaaaaaaattgggaagttaataaaccagatcaattatctaaagttcttgaaaaattagaaactattgcttctgaaactggagctagtgttgctgatgttattgttcttgcaggtaatgtaagaataggaaaa

SEQ ID NO: 210839 - DNA, 918 bp, Unknown
  Bacterial polypeptide expressing nucleotide sequence isolated from the Sargasso Sea
caaacccgatttaaatgggatatgggatattttgataatttatttggctatgattgggaattaactaaaagccctgcaggagcgcatcaatggaaacctaaaaggaatgggcatgatatagaaatgactccagatgcccatgatagatctaaaaaaaatcttccaatgatgcaaactactgacctttcattaaaattagatcctaaatatgggccaatttcaaaacattttcatcaaaatcctaatgaatttgccgatgcctttgcaagagcttggttcaaacttacccatcgtgatatgggtccaaaagcaaattatcttggttctgatgttccaaaagagaatttaatctggcaagatccaataccaaaaaataaatataagcttaaaaataaagatattgagttattaaagaaaaaaatatctaaatctggtttatctgtttctcagctagttacaactgcatgggcttctgcatcaacttttagaggatcagataaaagaggaggtgctaatggagctagaatagctcttgaacctcaaaaagactggcaagttaataatccttcaaaattgtctgctgtaataagaattttaaataaaattaaaaaaggatttgattcaaaaaataaatcggtttcattagcagacttaatagttttaggaggatcagtcggtattgaaaatgctgctaaaaagagtggtaaaaaaattaaagttccattcaaagcaggaagaggtgatgcaaaacaagatcaaacagacaaaaattcatttaatcttcttgaacctatagcagacggttttagaaactatattaagctacatgcgaaaggatataccaatggaaaaggcatccctactaattcagctgaagaaatgttgatagataaagctcaacttcttggattaactggt

SEQ ID NO: 210840 - DNA, 812 bp, Unknown
  Bacterial polypeptide expressing nucleotide sequence isolated from the Sargasso Sea
tatgcacggcgcaatgacatcggcggggcaaagtaacagagactggtggcctgaggcgttaaacctagacattcttcatcaacacgatacaaaaaccaatccaatggaccccaattttaactaccgcgaggaagttaaatcgctagattttgacgggttaaagcgcgacctacacgcattaatgacagattcacagtcatggtggccagccgattgggggcactatggtggccttatgatccgtatggcatggcacgcagccggttcttatcgtattgctgatgggcgtggtggtgccgcaacaggcaaccagcgttttgcgccactcaattcatggccagacaatgtaaaccttgataaagcaagacgccttctttggcccgttaagaaaaagtacggcaataaaattagttgggcagaccttattgttttagccggtaccattgcttatgaaagtatggggctaaaagtctatggctttgcttatggtagagaagatatttggcacccagaaaaagacacatattggggggctgagaaagaatggttagccccaagtgacagccgatacgacgatgtggataaacctgagtctatggaaaacccactcgctgcggtgcaaatgggtcttatttacgttaaccctgagggcgttaacgggaatcctgacccgcttaaaaccgcacagcaagtaagggaaaccttcgcgcgtatggcgatgaacgacgaagagaccgttgcgctaactgcgggtggtcatacagtgggcaagtgccatggcaacggcaatgctgacaatttaggggcagacc

SEQ ID NO: 210841 - DNA, 909 bp, Unknown
  Bacterial polypeptide expressing nucleotide sequence isolated from the Sargasso Sea
tcaaaaattcaagaacaatcaacaggatggaatagcaattataaaagtggcttaggtgctgatacgattagcagtggaatagaaggtgcttggactagcaatccaataaaatgggatatgggatattttgataatttatttggatatgattgggagcttactaaaagtcctgcaggcgcacatcaatggaaaccaaaacaaaacggacatgatattgatatgacccctgatgctcatattaagtcaaagaaaaatcttcctatgatgcaaacaaccgatttgtctttaaaaatggatccgaaatatgaaccaatatcaaaacactttcatgacaatcccaaagaatttgcagatgcatttgctagagcttggtttaagcttacacatcgtgatatgggacctagaacttgttatttaggccctgaggttccaaaagagcaattaatttggcaggaccctgttcctaaaaataaatataaaattaaaaataaagatattaagactcttaaattaaaaatattaaaatcgggattatctacttcagacttagtttcaacagcatgggcatcagcatctacttttcgaggttcagataaaagaggtggagctaatggcgcaagaataaacttgcaaccacagaaaagttgggaagttaataatccctctcaattatctaaagttatcaaaacatttgaaaaaataaaaaaagaatttgatagtaaaaagaaaaatgtttctttagcggatctaattgttcttggaggatgtgttgggattgaaaaggcttctaacaaatcaggcaaaaatataaacgttccgtttactcctggaagaggagatgccacacaagagcaaacagatattaattcatttagtttacttgagccaaaagccgaggatcagaaacta

SEQ ID NO: 210842 - DNA, 884 bp, Unknown
  Bacterial polypeptide expressing nucleotide sequence isolated from the Sargasso Sea
tatgacaccagatgctcatattaaaggaaaaaaaaatctaccaatgatgcaaactacagacttatcaatgagatttgaccccgagtttggaagaatttcaagacatttccataataatccagatgagtttgcagatgcttttgctcgagcttggtttaaacttactcacagagatatgggtcctaaagttaattatttaggaaatgaagttccaaaagaagatttgatttggcaagacccagttcctaaaaataaaactaaacttaaaaataaagatattgaagctctaaaaactaaaatttctaaatcaggactttcggtagctcagctagtatttgtagcttgggcttctgcctcaacttttagaagttcagacaaaagaggtggtgctaatggcgcgcgtataagactcgctccacaaaaagattggaaagtaaacaatccttctcaactttctaaaacaattaaagtttacgaaaaaattcaaaaaggatttaattctaaaaaaaaatatgtttctttagcagatttaattgttctaggaggaaatgttggtatagaaaaagctgcaaaagatgcaggaaaaaaaataaaattgaccttttcacctggaagaggggatgcttctcaagaccaaacagacatacattcttttagtcttttagaaccacaagcagatggtttcagaaactatgcaaattctgaaagtgccagtaaagcggaagaattactagttgatagagctcaattaatgaagctaacagctccagaaatgacagttttaattggtggtatgagagttcttggaataacttatgatggttcaaagcacggtatatttaccaaaagacctggaaaattaacaaatgatttctttgttaacc

SEQ ID NO: 210843 - DNA, 704 bp, Unknown
  Bacterial polypeptide expressing nucleotide sequence isolated from the Sargasso Sea
ccaactatctaaagttcttaaaactttagagaaaattaagaaaaaatttgaaactaaaaagaaaagtgtctcattagctgatttaattgttttaggaggttgtgctgcagtcgaaagagccgctaaaaaagctggccacaatgtaaaagttccattttcaccaggtcgtggagatgcgtcacaagaacaaacagacatacattcgtttggtttacttgaaccgaaagctgatggatttagaaactacattataaacaaaactaatggatcatcaaaaaaaccatcagtgtcagcagaggaaacacttgttgataaagcacagttattaaaacttactgcgcctgaaatgactgttcttttgggaggcatgcgtgtattaaacacaaattttgataaatcaaaaaatggagtgtttacaaaaaaacctgagacacttacaaatgatttttttgttaatttacttgatatgagtacaacgtggaaagaagtttctaaagaagaagatttatttagaggaaaaaatcgtaaaacaaataaagtcaagtggacaggtactcgttttgatcttatatttggatcaaattcccaacttagagcattagccgaagtttacgcttgcgaggattcaaaatctaagtttataaatgattttatatctgcgtggacgaaagtcatgaatcttgatcgttttgatctaaaataaa

SEQ ID NO: 210844 - DNA, 846 bp, Unknown
  Bacterial polypeptide expressing nucleotide sequence isolated from the Sargasso Sea
tatgggaggattatttataagaatggcttggcattctgcgggaacttacagaattgcagatggtcggggaggaagtggaaccggcaaccacagatttgctcctcttaattcatggcctgacaatactaatctagataaagctagaagattactttggccgattaaaaaaaaatatggaaataaaatcagttgggctgacttaatgattttagctggaaacatggcttatgagtcgatgggattaaaaatgtacggtttctcttttggaagagaagatatatggcatcctgaaaaagatgtttattggggatcagaaaaagaatggcttcaaaataaaagatattcaagtaatagtaatcgtgaatccttagctaaccctttggctgcagtagtaatgggtttaatttatgtaaatccagaaggagttgatggaaagccagaccctttaagaactgctcatgatgtaagagaaacatttggtagaatggccatgaatgatgaggagacttgtgcattaacagtcgggggtcattctgtaggaagagcgcatggtaatggagatgcgtctttattaggacctgaaccagaggcgggagaaattcatgaacaaggatttggttggaatcgcaaaggtggaggcggattaggagttaatcaagtaactagtggtatacaaggcgcttggacaacacatccaaacaaatgggacgacacttatttaaaacttttactagattatgaatgggaactaaaaaaaagcccagcgggagctaatcaatgggaaccaataaacatgaaagaaaaggataagccagtcgacttgggtgacccatcatttaaaaagaa

SEQ ID NO: 210845 - DNA, 855 bp, Unknown
  Bacterial polypeptide expressing nucleotide sequence isolated from the Sargasso Sea
agcagactatggacactatggaccattatttattcgtcttgtttggcatgcggcaggaacatatagaactggagatggtagaggtggtgcaggaactggaaatcaaagatttgcaccaataaatagttggccagataacgtcaacttagataaggcaagactacttctttggccgattaaaaagaaatacggaagaagaatttcatgggcagatttgtttatacttgttggaaatgttgctcttgaatctatgggttttaaaacatttggttttggaggaggaagagaagacatttgggaaccagaagaagatatttattggggttctgaaaaagtttggctagataacgaaagatataattcaaaaagagaattagaaaatccacttggtgctgttcaaatgggtttaatatatgtaaatccacaaggaccagatggaaatccagacccactgcttgcagctagagatattagagaaacatttggaagaatggcaatgaatgattatgaaatagttgcattagttgctggagggcatacgtttggaaaatcacacggtgcagctccagaatctcacaaaggacctgaaccagaaggatctaaaatacaagatcaagctacaggctggaatagtaattataaaagtggacttggagcagatacaataagcagtggtattgaaggtgcttggacttcaaatccaatcaaatgggatatgggttattttgataacctttttggttatgagtgggaattatcaaaaagtcctgctggcgctcatcaatggaaaccagttgaaaatggtcatgctcctaatatgacaccagatgctcatattaaaggaaggaaaaacct

SEQ ID NO: 210846 - DNA, 715 bp, Unknown
  Bacterial polypeptide expressing nucleotide sequence isolated from the Sargasso Sea
aatggatgccgaaagcaaatgcccagtaatgcacggtgcaaacacaaaaaacaaaggtgagggaacaacaaatagagattggtggcctaatcaactagacataagtattcttcatcaacatgatgaaaaatctaatccgatgggaaaagattttgattaccgtgaacattttaaaaatattgattatgatggattaaaaaaagaccttaatcatttaatgactgactcccaagattggtggccagcagattatggccattatggacctttctttattaggatgacttggcatgcagctggaacatacagaacagcagatggccgtggtggtggtggcacaggcgcacaaagatttgctcctttaaatagttggcctgataacggaaacttagataaagcaagaagattgctatggccaataaaacaaaaatatggaaatcaaattagctgggctgatttacttattttagctggtaacgttgcaattgaatcaatgggtggaaaaacatttggcttcagtggaggcaggtctgatatatgggcacctgaagaggatatttactggggtctagaaactgaatggttaacaaacaaaagatattctggagaccgtgtattagaaaatccgctagcagcagttcagatgggactaatatatgtaaaccctgagggacctgatggaaaccctgatccgctagcaagtgcaagagacatt

SEQ ID NO: 210847 - DNA, 879 bp, Unknown
  Bacterial polypeptide expressing nucleotide sequence isolated from the Sargasso Sea
acggcacaaacaactcctacacattggtggccaaaaaatcttaatttagatattttgcatcagcatgacaccaaaacaaatccaatggataaaaagtttgactataaaaaagaggtaaaaaaattaaactttaaaggaattaaaaaagatttactaaaactaatgactgatagccaagaatggtggcccgctgacctaggtcactacggaggtctctttattagaatggcctggcattctgctgggacttacagaattgctgatggccgcggaggaagtggaacaggcaatcatagatttgctcctcttaattcctggccggataataccaatttagataaagctagaagattgctttggccaattaaaaaaaaatacggaaataaaataagttgggctgacttaatgatattagctggaaatatggcctatgagtcaatgggattgaagatgtatggattctcttttggaagagaagatatatggcatcctgaaaaagatgtttattggggttcagaaaaagaatggcttcaagataaaagatattcaaataatggtaatcgtaaatcattggctaatcctttagcagcagttgttatgggattaatttatgtaaatccagaaggtgttgatggaaaaccagatcctttaagaactgctcatgatgtaagagagacatttggtcgaatggctatgaacgatgtagagacatgcgcattaactgtgggtggccattcagttggaagagcccatggaaatggtgatgcatctttattgggaccagagcccgaagcaggagaaattcatgaacaaggatttggctggaatcgaaaaggaggaggcggtttaggagttaatcaagtaactagtggtatacaa

SEQ ID NO: 210848 - DNA, 852 bp, Unknown
  Bacterial polypeptide expressing nucleotide sequence isolated from the Sargasso Sea
tatgcacggaagcatgacagagcaatctacacctactcattggtggccaaaaaatttaaacttagatattttgcatcaacatgacgctaaaacaaatccaatggataaaaagtttgattacaaaaaagaggtaaaaaaattaaattttaaaggtataaaaaaagacttacttaaattaatgacagatagccaagagtggtggccagccgaccttggacactatggaggtttgtttattagaatggcatggcattcagccggtacttatagaattgcagatggtcgaggtggaagtggaactggaaaccatagatttgctcctcttaactcttggccagacaataccaatttggataaagcaagaagattactttggccaattaaaaaaaaatacgggaataaaataagctgggctgatttgatgatattagctggaaatatggcttacgagtctatgggattaaaaatgtatgggttctcttttggaagagaagatatatggcatccagaaaaagatgtgtactggggttcagaaaaagaatggcttcaagataaaagatactcaaataatggaaaccgtaaatcattagctaaccctttagcagcagtggttatgggtttaatttatgtcaatccagaaggtgtggatggcaaacctgatcctttaagaactgctcacgatgtaagagaaacttttggtagaatggctatgaacgatgaagaaacatgcgcgttaacagttggcggtcattcagtaggaagagcccatggtaatggtgatgcttctttattaggaccagaacctgaagcaggtgaaattcatgaacaaggatttggatggaatcgaaaaaa

SEQ ID NO: 210849 - DNA, 873 bp, Unknown
  Bacterial polypeptide expressing nucleotide sequence isolated from the Sargasso Sea
attaagcagaaatatggaaaccaaattagttgggcagatttaattatcttagctggaaacatagcaattgaatcaatgggtggaaaaacttttggctttagtggaggtcgatctgatatttgggctcctgaacaagatatatattgggggcttgaaacagaatggttaacaaataaaagatattctggtgaccgtgtattagaaaaccctttagcagccgtacaaatgggattaatttatgtaaacccagagggccctgatggaaaccctgatccacttgcaagcgcaagagatattcgagaaacatttggacgtatggcaatgaatgatgaagagacagttgctcttacagcaggtggtcatactttcggcaaagcacatggagctggagatgctggtcttgttgggccagaacctgaaggggcgccattagaggaaatgggatttggttggattagcaaacatgcttcaggcaaaggtagtgattcgattacaagtggaattgaaggtgcctggacaactaatccaacaaaatgggataatggttactttgatttacttcttggttacgattggaagttaaccaaaagtccagcaggtgcaaagatttggcatgctgtaaatcaaaaagaagagcatatggctcctgatgcagaagatgcttcaaaaaaagtaccaaccatgatgacaacagctgatatggcaatgcgtgaagatccagaatatagaaaaatctctgaacgttttcataaaaatcctgatcagtttcaagatgcttttgcacgtgcttggtttaaattacttcaccgtgacatggggcctaaaacgcgttacatcgggcccgaagcgcctgcggaagatcttatttggcaa

SEQ ID NO: 210850 - DNA, 978 bp, Unknown
  Bacterial polypeptide expressing nucleotide sequence isolated from the Sargasso Sea
aggtccggtactgctgcaggacttcattttgcaggaaaatcttgctcattttgtaagagaaagaatcccggaaagaattgttcatgcaaaaggaacgggagcttacggaacttttacggttacccacgatattacccaatatacaaaagcaaaattattttctaaagttggcaattcatgcagaatgtttgcccgcttttccacagtaggcggagagaaaggaagtgcagataccgcgagagatccaagaggttttgctttaaaattctacacagaagacggaaactgggatcttgttggaaacaacacgccggtttttttcatcaaggatgcgaaaaaattcccggatttcatccatacccagaaaagagttccgaaaaccaatctgaaaagcgcaactatgatgtgggatttctggagcctgaatcctgaatctcttcatcaggttttgatcttaatgtcggacagaggtacaccttacggacacagacacatgcacggtttcggttctcacacattctctatgatcaatgctcagaacgaaagagtctgggttaagtttcatttaaaatccaaacagggaattaaaaatttcacgaatgatgaagcggtaaaaatggctggggaaaatccggatttcgctcaggaagacctttgcaatgccatcgaggaaggaaatttcccgaaatggacgatgtacattcaggtgatgacggaagaacaggcaagagacttcagatggaatccttttgacattaccaaagtatggttccaaagtgatttcccgttaattgaagtcggagaaatggaattgaacgaagttcctgtcaattattttgcacacgtggaacaatctgttttttcgccaagcaatttaatcgacggtatcagtttttcgccggataaaatgcttcagggaagattattttcttatccggatgcgcaccgatacagagtgggcgtaaatgctcatctgct

SEQ ID NO: 210851 - DNA, 888 bp, Unknown
  Bacterial polypeptide expressing nucleotide sequence isolated from the Sargasso Sea
attagacttgaaagcacttaaacaagacctttatgacctaatgactgactcgcaagattggtggcctgccgattatggtcattatggtccgttttttatcagaatggcatggcacagtgctggtacttatcgtattggagatggccgtggtggagcaggtgccggtgcacagcgttttgccccactcaatagctggccagataatgccaacttagataaggcgcgccttttattgtggccaatcaaacaaaagtatgggaagaaaatttcatgggcagacctgatgattttggcaggtaactgtgcattagaatctatggatttcaagaccttcggttttgcaggtggccgtgcagatgtttgggagccagaagaagatatttattgggggcctgagaatgaatggctaggagataagcgttacacaggcgcccgtcaattagaaaatccgctggcagcagtacagatgggattgatttatgtgaatccagaagggccgaacggtacacctgacccattggcatctgcacatgacatcagagaaacttttggccgtatggctatgaatgatgaagaaacggtggcacttattgccggtggacacaccttcggaaaaacccacggtgcggctgaccccaacgaatatattggctcggagccagcaggagccagcattgaagagcaaggtcaaggttggaaaaatacgtttggtagtggtaatggcgccaacaccatcacaagtggtctagaaggtgcttggacaagcactcccacaaaatggagcaatagttattttgagaacctgtttggttttgaatgggaattgaccaaaagccccgcaggtgcgcaccaatggagacctaaaaatggtggaggagcagggactat

SEQ ID NO: 210852 - DNA, 886 bp, Unknown
  Bacterial polypeptide expressing nucleotide sequence isolated from the Sargasso Sea
tttgctccattaaatagttggccagataatgtaaatttagataaagcaaggcttttactatggcctattaaaaagaaatatggaaaaaaaatatcttgggcagatttatttatacttgttggaaatatatctctagagtcaatgggttttaaaacttttggttttggagctggaagagaagatatatgggagccagaagaggatatttattggggatctgaaaaagaatggcttggagtaaatcgatatagtggaaaaagagaactagaaaaccccttaggagcgtcacatatgggtttaatttatgttaatcctcaaggacctgatgctaatccagatccttatttagctgctcatgatattagagaaacttttggacgtatggcaatgaatgattatgagacggtagcattagttgcagggggacatacatttggaaaatctcatggtgctgcaccagagtcacataaaggtcctgagccagaaggttcaaagattcaagatcaagcaactggatggaatagtaactacaaaagcggtttaggagtagatactattagcagcggtattgagggcgcatggacttcaaacccgattaaatgggatatgggatattttgataatttatttggctatgattgggaattaactaaaagccctgcaggagcacatcaatggaaacctaaaaggaatggacatgatatagaaatgactccagatgctcatgatagatctaaaaaaaatcttccaatgatgcaaactactgacctttcattaaaattagatcctaaatatggtccaatttcaaaacattttcatcaaaatccgaatgaatttgccgatgcatttgcaaaagcttggttcaaacttactcatcgtgatatgg

SEQ ID NO: 210853 - DNA, 970 bp, Unknown
  Bacterial polypeptide expressing nucleotide sequence isolated from the Sargasso Sea
ttagactctatgggattcaaaacttttggttttggggcaggtagagtggacatttgggaaccagaagatgatatttactggggatctgaaaaagagatgttagatgtcaaaaggtatagtggtaagagagacctagaacaacctttaggagcttcacacatgggtttaatttatgtaaatccccaaggaccagatgcaaatcctgatccattacttgctgcgcatgatattagagaaacttttggaagaatggcaatgaatgattatgaaacagcagcgttggttgctggtgggcatacatttggaaaatcccatggagcagcacctgaatcacataagggccctgatccagaggcatcaagaattcaagatcaagcaactggatggaatagcggttacaaatctggaaaaggcgcagacacgataagtagtggcatagagggagcttggacacaaaacccaattcaatgggacatgggatatctagattgtctttatgaacatgattgggaattaacgaaaagtccagcaggggcgcatcaatggacaccaaagaagaatggacaaaagataaaaatggtgccagacgcacatgataaaaatgtacttcatcccccaatgatgcaaacaacagatatttctatgaaggttgatccaagctatggaccaattacaaaacattttcataataaccctaaagagtttcatgatgcttttgcaagagcatggtttaagttaactcatagagatatggggccaagagcatgttatttaggtactgatgttccgaaagaggaattgatttggcaagatccaatagataaaccaaaatataaattaaaatcaaaagacattaattatttaaaatcaaaaatttccaaattgaaattatcagtctctgaattagtatctacagcatgggcttcagcatctacttttagaggttctgataaaagaggaggtgcttatg

SEQ ID NO: 210854 - DNA, 760 bp, Unknown
  Bacterial polypeptide expressing nucleotide sequence isolated from the Sargasso Sea
tgattatggtcattatggtggtttctttattcgtatgacatggcatgctgccggaacttatagaactggtgatggccgtggtggtggtggaactggagctcaacgttttgccccgttaaacagttggccagataatggtaacttagataaagcaagaagacttctttggccaattaagaaaaaatatggaaataaaattagttgggctgatttatttattttaacaggtaacgttgcaattgaatctatgggtggaaaaacttttggatttagtggcggacgtccagacatttgggcaccagaagaagatatttactggggtgtagaagaagaatggctacaaaataaaaggtatactggtgatagaattttagataatccacttgcagcagtgcagatgggattaatttacgtaaaccctgaaggaccagatggaaaagctgatcctcttgctagtgcaaaagatataagagaaacttttgcaagaatggcaatgaacgacaccgaaactgtagcactaactgcaggtggacacacttttggtaaagcacatggtgctggtgatccagctctagttggagcagaaccagaaggtgcttctttagaacaaatgggtttagggtggaataacttacacggttcgggtgttggtcgtgataccacaacaagtggtatagaaggtccatggacacctaatccaactcagtgggataatggatactttgatatgcttcttggttacgaatggaaactcgtttaa

SEQ ID NO: 210855 - DNA, 919 bp, Unknown
  Bacterial polypeptide expressing nucleotide sequence isolated from the Sargasso Sea
ggaagaccagatatctgggctccagaagaagagattaattgggggcttagaaactgaatggttaactaatgagcgatatagcggagaaagagatcttgctaatcctctaggagctgtgcaaatgggtttaatctacgtaaatccacagggcccggacggaaatccagatccagttgcaagcggaagagacattagagaaaccttcggcagaatggccatgaacgatgaggaaactgtagcattagtagccggcggacatacatttggaaaaggtcatggagctggtccagatgataatgttggtgttgagcctgaaggagcttcactagaagagatgggttttggatggactagttcttatggttctggaaaaggagcagatactataacgagcggatttgaaggtgcgtggacctctaacccaacacagtgggacaacggttactttgatttactttttggttacgaatgggaacaagttacaactccagctggagcaatagtttggcacgccattgatcaaaaagaggaagatatggcacctgatgctcacgatccttctaaaaaagtccctacaatgatgactactgctgatatggcacttagagaagacccaatttataaagatatttctaagcgtttccatgaaaatcctgatgaattggctgatgcatttgccagggcttggttcaaattacttcatagagatatggggccaaaatcaagatacttgggacccgaagtacctgaagaagaactaatttggcaggatccagttcccgaaggaaattcaacttacgacgttgaaagtgtaaaagctaagattgctgagagtgatctaactatacaagagatggttgagacagcctgggcaagtgcatctacttatagaggttcggatatgagaggtggtgcaaac

SEQ ID NO: 210856 - DNA, 880 bp, Unknown
  Bacterial polypeptide expressing nucleotide sequence isolated from the Sargasso Sea
acgtatggcaatgaatgattatgagacggtagcacttgttgcaggcgggcatacttttggaaagtctcatggtgctgcaccagagtctcataaaggtcctgaaccagaaggttcaaagattcaagatcaagcaactgggtggaatagtaattataaaagtggtttaggagtagatactattagcagcggtattgagggcgcatggacttcaaacccgattaaatgggatatgggatattttgataatttatttggttatgattgggaattaaccaaaagccctgctggagctcatcaatggaaacctaaaaggaatgggcatgatatagaaatgactccagatgctcacaataaatctaaaaaaaatcttccaatgatgcaaactaccgacctttcattaaaactagatcctaaatatggaccgatttctaaacattttcatcaaaatccaaatgaatttgctgatgcctttgcaagagcgtggtttaaacttactcatcgtgacatgggtccaaaagcaaattaccttggttctgatgttccgaaagaagagttaatttggcaagatccaataccaaaaaataaatataaacttaaaaataaagatattgaattattaaagaaaaaaatatctaaatctggtctatctgtttcccagttagttacaactgcatgggcatctgcttcaacttttagaggatcagataaaaggggaggcgctaatggagcgagaatagctcttgaaccgcaaaaagactggaaagttaataatccttcaaatttgtctgctgtaattagagttttaaataaaattaaaaaaggatttgattcaaaaaataaatcggtttcattagcagacttaatagttctaggaggatca

SEQ ID NO: 210857 - DNA, 742 bp, Unknown
  Bacterial polypeptide expressing nucleotide sequence isolated from the Sargasso Sea
ccaatggggagaaaaatttaattacaaaaaagaatttaaaaaacttaactttaaagcattaaaaaaagatcttcataaattgatgactgatactcaagattggtggccggcagattatggtcattatggtccattttttattcgtcttgcttggcatgctgctggaacttatcggacaggagatggaagaggtggagctggaactggaaatcaaagatttgctccattaaatagttggccagataatgtaaatttggataaagcaaggcttttactatggcctgttaaaaaaaaatatggaaaaaaaatatcttgggcagatttatttatacttgttgggaatatatccttagagtcaatgggtttcaaaacttttggttttggggctggaagagaagacatatgggagccagaagaggatatttattggggatctgaaaaagaatggcttggagtaaatcggtatagcggaaaaagagaactagaaaatcccttaggagcatcacacatgggtttaatttatgtaaatccccaaggacctgatgctaatccagatccttatttagctgctcatgatattagagaaacttttgggcgtatggcaatgaatgattatgagactgtagcactcgttgcaggtggacatacatttggaaaatctcatggtgctgcaccagagtcacataaaggtcctgaaccagaaggttcaaagattcaagaacaagcaactgggtggaatagt

SEQ ID NO: 210858 - DNA, 831 bp, Unknown
  Bacterial polypeptide expressing nucleotide sequence isolated from the Sargasso Sea
catgcacggtttcggcagccacacttacagcctgatcaacgcccagggcgagcgtcattgggtgaagtggcactacaagaccaagcaaggcattaaaaacttggctccggccgaggctgcgcgcttggcgggtaccgatcctgactacgcccagcgcgatctgtttggtgcaatcgagcgcggtgacttccccaagtggcgcgtgtgcatccagatcatgaccgaggcacaggcgaacgcccattacgagaacccgtttgacgtgaccaagacctggtcgcaaaaagaattcccgttgattgaagtgggtgagttggagctcaatcgtaatccgcagaactacttcgccgaagtcgagcaggccgcatttggcccaagcaacatggtcccaggcgttggcctgtcgccagaccgtatgctccaaggtcgagttttcgcctacgccgatgctcaccgttatcgtgtgggcactaaccaccagcaactgccggtgaacgcaccacgtagcccggttaacagctaccagcgtgacggttccatggctttcggcagcaatggtggggcggctccgaactacgagccaaacagctatgccgacgcaccaaaacaagccccgcaatatgcagagccagcactggccctgagcggtgccgccgatcgttacgatcaccgcgaagatacggactactacagccacgccggtgcgctgttccgtctgatgaatgatgagcaaaaagcgttgctcaccaataacatcgcgggcgcaatggctggggtttccagcgatgtggtccagcgtcaactgcagcacttctataagtccgacccggc

SEQ ID NO: 210859 - DNA, 754 bp, Unknown
  Bacterial polypeptide expressing nucleotide sequence isolated from the Sargasso Sea
atgacacctgatgcccatataaaatcaaagaaaaatcttcctatgatgcagacaaccgatttgtctttaaaaatggatccaagttatggtccaatttcaagaaattttcacaataaccctaaagaatttgcagatgcatttgctagagcttggtttaaacttacgcatcgtgatatgggacctagagcttgctatttaggcccagaggttccaaaagaacaattaatttggcaggatcctattccaaaaaataagtataaaattaaaaataaagatattaaagctctcaaaacaaaaatattaaaatcaggattatctatttctgagctagtagcaacagcttgggcatcagcttctactttccgtggctctgataaaagaggtggatctaatggagcaagaataagattagaaccgcagaaaaattgggaagttaataatccagctcaattatccaaagtaattaaaactttacaaaaaattaaaaagaaatttgataataaaaagaaaaatgtttcattagcagatctaatagttttaggtggatgtactgctatagaaaaagctgcaaaaaaatctggtaataatataaatgtaccatttaccccaggtagaggagatgcatcccaagaacaaactgatacttattcattcggtttgcttgaaccaaaagcagatggatttagaaactatattgtaaataaatcgaatggatcttctacaaaaccaaaggtatcagcagaggaaatgttaa

SEQ ID NO: 210860 - DNA, 826 bp, Unknown
  Bacterial polypeptide expressing nucleotide sequence isolated from the Sargasso Sea
ccaaaacaaaatggtcaaaaaattaaaatggttcctgatgctcatgataaaaataaaatgcatccaccaatgatgcaaacaacagatctttctttaagaatggatccttcgtatgggccaatatcgaaacatttttacaataaccctgctgaatttgcagatgcttttgcaagagcatggtttaaattaactcacagagatatgggtccaagagcatgttatttgggtaacgaggtaccaaaagaggagttaatatggcaagatccagtaaaaaaaccaaaatataaattaaagaaaagtgatattaaaactcttaaatccaaaatatttaaatctaaattgtctgtgtcagagttagtaagcactgcttgggcatcagcttcaacttatagaggatcagataaaagaggtggagctaatggagctagagttgctttagaaccacaaattagttgggatgttaatgatccaaaacagattaataaagttatcaaaactttagaaaaaattaaaaataaattcgacaataagaaaaaatctgtttcgttagctgatttaatagtgcttggtggaaacgtaggtattgaaatggcagctaaaaaagcaggagtaaatgttgatatgcctttctatgcaggaagaggagacgctacacaagaacaaactgatatccattcatttagtcttttagaaccacaagctgatggatttagaaactacaacaaagatgagacatctacagtttcagctgaggaaaagttaatagacaaagcacaattaatgggtttaacggctccagaaatgacagttcttgttggtggtatga

SEQ ID NO: 210861 - DNA, 776 bp, Unknown
  Bacterial polypeptide expressing nucleotide sequence isolated from the Sargasso Sea
aatggatgccgaaagcaaatgcccagtaatgcacggtgcaaatacaaaaaacaaaggtgagggaacaacaaatagagattggtggcctaaccaattagatataagtattcttcatcaacatgatgaaaaatctaatcccatgggaaaagattttgattaccgtgaacattttaaaaatattgattatgatggattaaaaaaagaccttaatgatttgatgactgactcccaagattggtggccagcggattatgggcattacggacctttctttattagaatgacttggcatgccgctggaacatacagaacagcagatggccgcggtggtggtggcactggtgcacaaagatttgctcctttaaatagttggccggataacggaaacttagataaagcaagaagattgttatggccaataaaacaaaaatatggaaatcacattagctgggctgatttacttattttagctggtaacgttgcaatcgaatcaatgggtggaaaaacatttggtttcagtgggggtcgacctgatatttgggcaccggaagaagatatttactggggtcttgaaacagaatggttaacaaataaaagatattctggagatcgtgttttagaaaatcctttggccgcagttcagatgggattaatatatgtaaatcctgagggacctgatggaaagcctgatccactggcaagcgcaagagacattcgagaaacttttggtcgtatggcaatgaatgatgaagaaacagttgcattgacggcaggag

SEQ ID NO: 210862 - DNA, 933 bp, Unknown
  Bacterial polypeptide expressing nucleotide sequence isolated from the Sargasso Sea
gcctgcagactatggtcattatggaccattctttgtgagattgacctggcatgctgctggaacctacagaattggcgatggtagaggtggagctgggactggtgcacaaagattctcacctttaaattcttggcctgataatggaaatcttgataaagctagaagacttctgtggccaatcaaacaaaaatatggcaagcaattaagctgggctgacctcttggttcttgctggtaatgcagcaatagaatctatgggaggtaaaacctttggttttggtggtggcagaccagatatttgggaacctgaagaagacatttattggggtcctgaagaagagatgttaggaaacaacagatatgtgggtgaaagattgctaaataatccacttgcagcagttcaaatgggtttaatttatgtaaatccacaaggtcctgatggaaatcctgatccaaaacttagtgcacacgacattagagagacatttggaagaatggctatgaatgattatgaaactgtcgcgctaattgctggaggacatacttttggtaagtgtcatggagctggtgatgacggtcttgttggtgttggtccagaagacgctccaatggaacaacaacaatttggctggaagaacggttatggcaaaggaatgggaagagataccattacaagtggtttagagggaccgtggaccaagaatcctgcacagtgggataacggttattttgagaacttgttcaagtatgactatgagctagttaaaagtcctgcaggcgctttccaatggcatcctaaagatttggaagaggaaaattacgctcctgatgttgaagatccaaatcaaaaagtaactacaatcatgctaacttcagatttagctcttaaagaggatcctgaatacagaaaagtctcactgcactttaaagataa

SEQ ID NO: 210863 - DNA, 584 bp, Unknown
  Bacterial polypeptide expressing nucleotide sequence isolated from the Sargasso Sea
tatgagtcaacagtatttaacaagccaaagcggttctccaattgctgacgatcaaaactcattgtcagcgggcgagcgtggtccattactactgcaagattggcatttaattgaaaagcttgcccactttaaccgtgagcgtattcctgagcgtgttgtgcatgccaaaggcactggcgtatacggtactttcaccctaaccaaagacttaagcgaatacaccatcgccgaccactttaacggtgttggtaagcaaactgaaaccttcgtgcgcttctctaccgtaggtggggaaatgggctctgccgatgccgaacgcgacccccgtggttttggtctgcgcttttataccgctcgtggtaatcacgatatcgtgggtaacaacacgccgaccttcttcctgcgtgacgggattaagtttccagactttatccatacccaaaagcgtaacccattgacgaatttgaaagatccacaagctatgtgggacttctggtcattaaaccctgaagccatgcaccaagtgacgattctgatgtctgaccgcggtattccggcaaactaccgccaaatgcatggttatg

SEQ ID NO: 210864 - DNA, 852 bp, Unknown
  Bacterial polypeptide expressing nucleotide sequence isolated from the Sargasso Sea
aatggatgcagagagtaaatgccctgtaatgcacggagcaattacaaaaaatatgggagagggtacatctaatcgcgaatggtggcctaatcaacttaacttaaacatacttcatcaacatgatcgtaaatcagatccaatggaagctggatttaactatcgagaagaattcaaaaaattagattatgctgcattaaaaaaagacctccataatctgatgactgattctcaagattggtggccagctgattatggtcattatggtggtttctttattcgtatgacatggcatgctgctggaacttatagaactggtgatggccgtggtggtggtggaacaggggctcaacgttttgctccattaaacagttggccggataatggtaacttagataaagcaagaagacttctttggccaataaagaaaaaatatggaaataaaattagttgggctgatttatttattttaacaggcaacgttgctattgaatctatggggggtaaaacctttggatttagtggcggacgcccagatatttgggctccagaagaagatatttactggggtgtcgaagaagaatggcttcaaaataaaagatatactggtgatagaattttagataatccacttgcagcagtgcagatggggttaatttacgtaaaccctgaaggaccagatggaaaagctgatccacttgctagtgcaaaagatattagagaaacttttgcaagaatggcaatgaacgacactgaaactgttgcactaactgccggtggacatacttttggtaaagcacatggtgcaggtgacccagctttagttggagcaaaaccagaaggtgctcctttaaa

SEQ ID NO: 210865 - DNA, 872 bp, Unknown
  Bacterial polypeptide expressing nucleotide sequence isolated from the Sargasso Sea
atttaaaaataaagatatagaaagtttaaaagtaaaaatgcaaaaatcaggactttcggtatctcaactagtatcaacagcttgggcctcggcttctacatatagaggttcagacaaaagaggaggtgctaatggagctcgtgtaagacttgcgcctcaaaaagattggaaagtaaataatccatctcaactttctaaagcaattaaagtatatgagaaaatccaaaaagcatttaactcaaaaaataaacgagtttctttagcagacttaatagttctaggagggaattttggaattgagaaagctgcaaaagatgcaggtaaaaaaatcaagttacctttttcacctggaagaggtgatgcttctcaagatcaaacagatatacactcttttagtcttttagaaccgcaagcggatggttttagaaattatgcaaactctgaaagcgcaacacaagccgaagaactgctagttgataaagcacagctaatgcaattaactggacctgaaatgacagttctagttggaggaatgagagtactcggtacaaacttcgatggttcaaaacatggagtatttactaaaagacctggtaaattaacaaatgatttctttgttaatttgttagacatggacgtcaaatggaaagaaacttccagtaaagaagatcttttcaatggtgttgatcgaaaatcaggtaaagtaaaatggacaggtacaagagcagacttaatatttggttcgaactcacaattgagagctctagccgaagtatatgcgacagatgattcgtctgaaaagtttgtaaatgactttacagcagcttggactaaggttatgaatgctgatcggtttgatttacagaaataat

SEQ ID NO: 210866 - DNA, 505 bp, Unknown
  Bacterial polypeptide expressing nucleotide sequence isolated from the Sargasso Sea
gcgcaggggcagacagacatcgagtccttcggtgttctcgagccgctcgccgacggtttccgcaactatctgcaggctgacttctcggtatcggctgaagagctgcttctcgacaaggcacagctgatgaccctgtcggcacctgagatgaccgtgcttgtcggtggcatgcgcgcgctcgatgccaacaccgatcaggcgagccatggtgtcctcaccgaccgcccaggaacgctcagcaacgatttcttcgtcaacctgctggatatgggtaccgaatggaagcccgcatcggcagctgaagatgtgttcgagggccgtgaccgtgtgagcggcgacctgaagtggaccggcacacgtgtcgatctcgtctttggttcgaactcgcagcttcgtggcctggcggaagtctatgccggcgccggaggcgaggcgcggttcgtcggtgactttgtcgccgcatggacgaaggtgatgaacctcgacaggttcgacgtcgcctgac

SEQ ID NO: 210867 - DNA, 868 bp, Unknown
  Bacterial polypeptide expressing nucleotide sequence isolated from the Sargasso Sea
tggccaattaaaaaaaaatatggaaataagatttcttgggcggatctatttattctagtaggaaatgttgctttagactcaatgggatttaaaacatttggttttggagctggaagaacagacatttgggaaccagaagatgatatttattggggatcagaaaaagaaatgttaggtgtagaaagatatactgaaaaaagagacttagaacaaccacttggcgcttcacacatgggtcttatatatgtaaatccacaaggtcctgatgcaaatccggatccaaaacttgcagctcatgatattagagaaacatttggtagaatggcaatgaacgattatgaaacagccgcactagtggctggtggacatacatttggaaaatcacatggagcagcacctgaatcacataaaggtcctgatcctgaagcttcgagaattcaagatcaatcaaccggatggaatagtggatataaatctggaaaaggtgtagatacaatcagtagcggtattgaaggtgcttggacacaaaatccgattcaatgggacatgggttatttggactgtctttatgatcacgaatgggagcttacaaaaagtcctgctggtgctcatcagtggacaccaaagaaaaatggacaaaagataaagatggttcctgatgcacatgataaaaatgttcttcatcctccaatgatgcaaacaacagatatttcaatgaaagttgacccaagttatgggcctattacaaaacattttcataaaaatccaaaagaattccatgatgcatttgctagggcttggtttaaactaactcacagggacatgggaccaagagtttgttatctggcagcgatgttccaaaagaaca

SEQ ID NO: 210868 - DNA, 895 bp, Unknown
  Bacterial polypeptide expressing nucleotide sequence isolated from the Sargasso Sea
ttaagtcaacattcttcattggtaaatccaatgggagaaaaatttaattacaaaaaagaatttaaaaaacttaattttaaagcattaaaaaaagatcttcataaattgatgactgatacacaagattggtggccagcagattacggtcattatggtccattttttattcgtcttgcttggcatgctgccggaacttatcgaacaggagacggaagaggtggtgctggaactggaaatcaaagatttgctccattaaatagttggccagataatgtaaatttagataaagcaaggcttttactatggcctattaaaaagaaatatggaaaaaaaatatcttgggcagatttatttatacttgttggaaatatatctctagagtcaatgggtttcaaaacttttggttttggtgctggaagagaagacatatgggagccagaagaggatatttattggggatcagaaaaggaatggcttggagtaaatcggtatagtggaaaaagagaactagaaaaccccttaggagcatcacacatgggtttaatttatgttaatcctcaaggacctgatgctaatccagatccttatttagctgctcatgatattagagaaacttttggacgtatggcaatgaatgattatgagacggtagcgctagttgcaggtggacacacatttggaaaatctcatggtgcagcaccagaatcacacaaaggtcctgaaccagaaggttcaaagattcaagatcaagcaactgggtggaacagtaactacaaaagtggtttaggtatagatactattagcagcggtattgaaggggcatggacttcaaaccctattaaatgggacatgggatattttgataacttatttggctatgattgggaattaacta

SEQ ID NO: 210869 - DNA, 812 bp, Unknown
  Bacterial polypeptide expressing nucleotide sequence isolated from the Sargasso Sea
taccagcaatagtggtagcggaacctcaaatcgagaatggtggccaaatcagttaaacctaaatattttacatcaacatggtaaaaagtctaatcctgaaaaaattgattttaattatagaaaagaatttaaaaaacttgattataattcattaaaaaaagatctaaataatcttatgacagattctcaagaatggtggcctgctgactacggtcattatggtcctttttttattcgtatgacctggcatgcagcaggaacatacagaactggagatggtcgtggtggaggtggcacaggcgcacaacgttttgctcctcttaatagctggccagataatggaaatttagataaagcccgaagactcttgtggcctattaaaaaaaaatatggtgacaaaattagttgggcagatttagtaattttagcaggtaatgtggccattgaatctatgggtggtaaaacttttggttatagtggtggtcgctcagatatttggtcgccagaagaagatatctattggggcaaagaaaaagaatggttggataataaacgttacacaggagatcgtaatcttgaaaatccattagctgcagtacaaatgggtttaatatatgttaatcctgaaggtcctgatggtaatccagatccagttgcaagtgcaaaagatattagagaaacatttggtcgtatggcaatgaatgatgaagaaactgttgctcttattgctggaggtcatacttttggaaaagttcatggagcaggtgacgctgcccttgtaggtgcagcgccagaaggagctccaatagaag

SEQ ID NO: 210870 - DNA, 880 bp, Unknown
  Bacterial polypeptide expressing nucleotide sequence isolated from the Sargasso Sea
ttctcgcgcattggtaagacgacggagatgtttgctcggttctcgacggttgcaggagagcgaggggcagcagacgccgagagagatattcgcggcttcgctctgaagttttatacggaagaggggaattgggatctggtcggaaacaacacaccggtcttctttttgagagatcctctgaagttccctgacctcaaccatgcaatcaagcgcgacccgcggaccggcctgcgaaatgccgaaagcaactgggacttctggacgcaactaccggaggctttgcaccaggtcacaatcgtgatgagcgaccgcggtattccgcgctcgtaccgccacatgcatggctttggtagccatacgttcagcctcatcaatgcgagcaacgaacggttctgggtgaagttccatatgcgcagcgagcagggaatcgaaaacctgaccgacgaggaagctacgcggatcatgggttccgaccgcgaaagtcaccaccgcgacctctacgagagcatcgaggcgagacagtttccgaggtggaacctgtacttccaggtaatgccggagagtgaggcttccgcgtacaaggtgaatccgttcgacctgacgaaggtctggtcgaagaaggactacccacttatcgaggtagggtacttcgaactgaaccgtaacgcggagaactggttcgcagacgtagagcaggctgccttcaatcctgcaaatgtcgttcctggaatcagcttttctccggacaagatgctgcagggccgtcttttctcttatggcgacgcgcagcgataccgactgacggtcaaccatttccagattcccgtgaacgctccgcgtgcgtcgacgcacaccaacagctatcaccgtgacggtgttc

SEQ ID NO: 210871 - DNA, 559 bp, Unknown
  Bacterial polypeptide expressing nucleotide sequence isolated from the Sargasso Sea
catgagcaagcgcactaacgacgaccccgctaccgagaacctgaccggcctcgcaccatccccagccgatgccaaccgctccgagcaggcggccgccgtacttgccgagttgccgggtgaatcgctgaccaccaaccaagggttgctgatcagtgacaaccagaactcgttacgcgccggtgtgcgcggcccgacgctgctggaagatcacatcctgcgcgaaaagatcatgcactttgaccatgaacgcatccccgagcgcgtggtgcatgcgcgcggtgccggcgcccatggcgtgtttgaggtgtatgagtcgatgagcgacctgaccaaagcagggtttctgcaggaccccagcctgaaaaccccggtgtttgtgcgtttctccacggtggccggctcgcggggctctatggatacggcgcgcgatgtgcgcggcttctcggtgaggttctacaccgagcagggtaatttcgacctggtcggcaacaacatgccggtgttctttattcaggatgcgatcaagttttccgacctcattcatgcccgtcaaacctga

SEQ ID NO: 210872 - DNA, 670 bp, Unknown
  Bacterial polypeptide expressing nucleotide sequence isolated from the Sargasso Sea
gattttgattacaaagaagagtttaaaaaaatagattatgaggctttaaaacaagacttatatgacctaatgaccgattcaaaagaatggtggcccgcagactatggtcattatggaccattctttgtgagattgacctggcatgctgctggaacctacagaattggcgatggtagaggtggagctggtactggtgcacaaagattttcacctttaaattcttggcctgataatggaaatcttgataaagcgagaagacttctatggcccatcaaacaaaaatatggcaagcagttaagctgggccgacctcttagttcttgctggtaatgcagcaatagaatccatgggaggtaaaacttttggttttggtggaggcagaccagatatttgggaacctgaagaagatatttattggggtcctgaagaggaaatgttaggaaacaacagatatgtaggagaaagattattaaacaatccacttgcagcagttcaaatgggtctaatttatgtaaatccacaaggtcctgatggaaacccagatccaaaacttagtgcacacgacattagagagacatttggaagaatggctatgaatgattatgaaactgtagcattaattgctggaggacatacttttggtaagtgtcatggagctggtgatgatggta

SEQ ID NO: 210873 - DNA, 784 bp, Unknown
  Bacterial polypeptide expressing nucleotide sequence isolated from the Sargasso Sea
tatggacatagaaagtaagtgccctgtaatgcatggtgcaaatacgcaaaacaaaggggagggaacatccaatagagattggtggccaaatcaattagacttaagcattcttcatcaacatgataaaaaatcaaatccaatggaagaaggttttagttacaaagatgagtttaaaaaaattgattatgaagctttaaaaaaagatcttacaagccttatgactgactctcaagactggtggcctgcagactatggtcattatggtcctttttttattcgcatgacatggcatgctgctggaacttatagaactggtgatggtcgtggcggaggtggaactggtgctcaaagatttgctcctctaaatagttggcctgacaatggcaatttagataaagcaagaagacttttgtggccaataaaacaaaaatatggaaataaaataagctgggctgatttaataattttagctggcaatgttgctattgagtctatgggtggtaaaacttttggctatagtggggggcgtcaagatatttgggctcctgaacaagatatttattggggtgttgaaaaagagtggttagataataaaagatataaaggggatcgagaattagataatcctcttgcggcagttcaaatgggattaatttatgttaatccagaaggtcctgatggaaatccagatcctattgcaagtgcaagagatattcgtgaaacttttggtcgaatggctatgaatgatgaggagacagtagcccttactgctggtggtcatact

SEQ ID NO: 210874 - DNA, 851 bp, Unknown
  Bacterial polypeptide expressing nucleotide sequence isolated from the Sargasso Sea
gattggtggccaaaccaaattaaatttaaacatccttcaccagcatgataggaaaacgaatccaatggatgaggattttgattatgctgaagaattcaaaaaacttgattttaatgccctcaaaaaagatcttaaagatcttatgactgactctcaggaatggtggcctgcagattacggtcactatgggccattctttatcagaatgacatggcacgctgcaggtacttatcgaaccggcgatggaagaggcgggggcggaactggtgctcaaaggtttgctccattaaatagttggccagataatggaaatcttgataaagctcgaagacttctttggccaataaaacagaaatatggaaaaaagattagctgggctgatttgttaatactagctggtaatgtagctattgaatcaatgggtggaaaaacatttggatttggaggaggaagacctgatatttgggctcctgaagaggacataaattggggagctgaaacagaatggctttccaatgaaagatacagtggagtgagggacttagcgaacccattgggtgctgttcaaatgggtttaatttatgtaaatcctcaaggtcctgatggagatcccgatccaattgcaagcggtagggatgtcagagaaactttcgcaagaatggcaatgaatgatgaagagactgtagctttggttgcaggcggtcatacctttggaaaaggtcatggtgctggtacagaggatcatgttcaaaatgagccagagggcgcgccacttgaaaatatgggatttggatggcaaagcagtcatgcatctggaaagggctctgatactatcacccagtggttttgaa

SEQ ID NO: 210875 - DNA, 835 bp, Unknown
  Bacterial polypeptide expressing nucleotide sequence isolated from the Sargasso Sea
gtggcctgaacaattaaacctggcgccgctgcgtcagcatggggtggaatccagccctatggatcaaagctttaactacgcagaagaatttaaaaagctggatttaaaggcagtcaaagccgacatcaccaaactgatgaccacgccgcaagactggtggccgccggattatggtcactatgggccgttttttattcgtatggcctggcacagcgctggtacctatcggatttccgatggtcgtggtggtgctggtggtgggcagcagcggtttgagcctttaaatagctggcctgataacgtcaatttagataaagcccggcgcttgctctggcctattaaacaaaaatatggccggcaaatttcatgggctgacttaatggtgctgacaggcaatgtggcgctggagtctatgggctttaaaacctttggttttgccggtggtcgcaccgatgactgggaagccgatattgtttactggggaccggaaactaaattcctggatgacaagcgctacagcggtgatcgtaagctacaaaaacctctggctgccgtacaaatgggcctgatttatgtcaatcctgaagggcctaatggtaatcctgatccgctgcttgccgccaaagacattcgcgaaacctttggccgtatggcgatgaacgacgaagaaacagtggccttaatagcgggcggtcatacctttggtaaagcccacggtgcgcataaacctgaagaatgtgtcggtaaagagccggccgctgctggtttggaagagcaaggctttggctggaaaaaggaatgtggcaaaggccattccgaagatacagtcacttcg

SEQ ID NO: 210876 - DNA, 715 bp, Unknown
  Bacterial polypeptide expressing nucleotide sequence isolated from the Sargasso Sea
tcattggtagattcaatggataaaaaatttaattattcaaaagaatttaaaaaacttaactttaaagcgctaaaaaaagatttacataaattaatgacagattctcaagattggtggcctgcagattatggtcattatggacctctgtttattagattagcttggcatggtgcaggtacatatagaactggagatggttgtggaggtgctggaactggaaatcagagatttgctccactaaacagttggccagataatgtaaatttggacaaggcaagattattactttggccaattaaaaaaaaatacgggaaaaaaatatcttgggctgacctatttattttggttggaaatatttctttagaatcaatgggatttaaaacttttggttttggtgcaggcagagaggatatatgggagccagaggaagatatatattggggttccgagaaagaatggctaggcgtaaatcgttacagtggaaagagagatttagagcagcctttaggagcatctcatatgggcttaatatatgttaatccacaaggacctgatgctaatccagatcccttgctagcagcacatgatattcgtgagactttcggcagaatggccatgaacgattatgagacagttgctcttgtcgcggggggtcatacttttggaaaatctcatggtgcagccccggaatcacataaaggactcgagccagagg

SEQ ID NO: 210877 - DNA, 928 bp, Unknown
  Bacterial polypeptide expressing nucleotide sequence isolated from the Sargasso Sea
gatttcaactacgccgctgagttcaagaagatcaactattcagaactcaagggcgacatcaagaaggccatgaccgactcccaagagtggtggccggctgactggggcaactacggtggcctcttcatccgcatggcttggcacagtgccggcacctaccgcctggttgacggccgtggtggtgcgggtcgcggccagcaccgctttgccccgctgggctcctggccggacaacgccaacctggataaaagccgccgcctgctctggccggtgaagcagaagtacggccagaaaatcagctgggccgacctgtttgtgctggcgggcaacattgcgctggaagcctcgggcttccgcacctttggcttcgcggccggccgcatcgacagctgggagccggacaacgacgtcaactggggtgtagaaaaagcctggctagaacaccgtaaatccgaagccctgaaagacagccctctgtcggccaccgagatgggtctgatctacgtcaacccggaaggccccgaggccagcggcgaccccaaatccgccgccccctttattcgcgcaacctttggcaatatggcgatggacgatgaagaaatcgtcgcgctgattgccggcggccacaccctgggcaaaactcacggcgcggtgcctggcgacatgatcggtccggacccggaaggcgctcccattgaatccatgggcctgggctggaccagcggccagggcagcggcgtcggcaaagattcaatcacctcaggccttgaggtcatctggacgcaaacgcctacccagtggagcaactacttcttcgagaacctgttcaagtacgaatgggtgcagactcgctcgccggctggcgccattcagtgggaagccaaagacgcgcccgagatcatgcccgaccccttcgacccgtcgaaga

SEQ ID NO: 210878 - DNA, 867 bp, Unknown
  Bacterial polypeptide expressing nucleotide sequence isolated from the Sargasso Sea
aagaatttaaaaaattaaaatttaaatctctaaaaaaagatttacataaattgatgacaaattcacaagattggtggcctgcagattatggtcattatggaggactttttattcgattagcatggcatgcagcaggaacatataggactggcgatggacgtggaggcgcaggaacaggcaatcaacgttttgctccactaaacagttggccagataatgttaatttagataaagccagattactgctttggccaattaaaaaaaagtatggaagaaaaatttcttgggcagatttatttattttagtaggcaatgtagcattggagtctatgggttttaaaacttttggttttggaggcggaagagaagatatatgggaaccagaagaagatatttattggggatcagaaaaagaatggctaggtgttaatcgatacagtggtaaaagagaacttgaaaatccattaggagcttcacatatgggattaatttatgtaaatcctcaaggaccagatgctaatcctgaccctcttctagcagctcatgatattcgggaaacttttggtagaatggctatgaatgactatgagacagtagcacttatagctggagggcatacttttggaaaatctcatggagcagcatcagaatcatataaaggacctgagccagaaggatcaaaaatacaagaacaggcaacaggttggaatagtgattataaaagcggcaagggagtagacactattagtagcggacttgaaggtgcatggactcaaaatccaaaaaaatgggacatgggttattttgataatttatttggatatgattgggaactaacaaagagcccagcaggagcacatcaatgaa

SEQ ID NO: 210879 - DNA, 670 bp, Unknown
  Bacterial polypeptide expressing nucleotide sequence isolated from the Sargasso Sea
aagctcgattatgaagctttgaaaaaagatctacatgatctcatgacagattctcaggattggtggccagctgattatggtcactatggtcccttttttatcagaatgacatggcacgccgcgggaacatacagaacaggtgatggccgaggtggaggtggaacaggaaatcaacgttttgcaccgctaaatagttggcctgacaatggaaatttagataaagctagaagattgctttggcctattaaacaaaaatatggaaataaaataagttgggctgatttgttcattctcacaggaaatgtagccatagaatctatgggtggaaaaacttttggttttggtggaggacgtcctgatatttgggctccagaggaagatattgattggggtgcagagaaagaatggttggcaaatgaaagatattcaggtgaaagagatttagctaatccgttgggcgctgttcaaatgggattgatttacgttaatccgcaaggtcctgatggagatcctgatccaatcgcgagcggtaaagatgttagagaaacttttggcagaatggctatgaatgatgaagagacggtcgcacttgtagctggaggacatacttttggtaaaggccatggagctggtcctgaagaaaatgttcaagtgaaccagaaggagcttc

SEQ ID NO: 210880 - DNA, 903 bp, Unknown
  Bacterial polypeptide expressing nucleotide sequence isolated from the Sargasso Sea
ctcgtcgactacttttggcctattaaacaaaaatacggtaataaaattagttgggcagacctattaattcttgctggaaacgttgcgattgaatccatgggcggaaaaacttttggttttggaggaggacgtcctgatatttgggcaccagaagaagatattcattggggtatagaaacagaatggttagccaatgagagatactcaggggagcgagacctagctaatcctttgggtgccgtacagatgggtttgatttatgttaacccacaaggtcccgatggtgaacctgaccccattgccagcggtaaagatgtcagagagacatttggtcgaatggccatgaacgatgaagaaaccgtggctcttgttgctggtggacacacctttggtaaagggcatggcgccggagatgaggaacatgtgcaagccgaacctgaaggagcaccattagaaaaaatgggttttggctggcaaagtaaccatgcatcgggaatgggtagtgacaccatcaccagtggctttgaaggagcttggacggctaatcctacgcaatgggacaacggatacttcgatctcttatttggttatgaatgggagaaggtggaaacacctgcaggcaaaattgtttggcacgcgatagatcagaaagaagaagataaggctccagacgccgagaactcctctgttcgcgtctctactatgatgactacggcggatatggctatgcgagaagatcctatctataaaaaaatctcaaaacgtttccatgaaaatccagacgaatttgctgatgcatttgctagagcatggtttaaactgctgcatcgtgacatgggacctctttctcgatacttgggtcctgaagttcctaaagaagaacttatttggcaagaccccgtt

SEQ ID NO: 210881 - DNA, 751 bp, Unknown
  Bacterial polypeptide expressing nucleotide sequence isolated from the Sargasso Sea
catggcacgaacccccacttcgcgcggcgcggcaccaaaatcgccgtctgcactgccctcttccacccagtctgaaacctttcgcggcaacgccggtgagctgcaacagcaagccggtggcaagcacccggtgctgaccacgcagcagggcattgcggtggcagacaaccagaactctctgcgcccctcgccacgcgggcccgcgctgctggaagacttcatcctgcgcgagaagatcacgcactttgaccacgaacgcattcccgagcgcatcgtgcacgcgcgtggctcgggtgcgcatggctttttcgagctgacacattcgctcaagaaatacaccacagcccaggtgctgaccgaagtaggcgtgcagacgcccgtgttcacccggttttccaccgtggcgggcggtgcaggctcggtggacactccgcgcgacgtgcgcggctttgccgtgaagttctacacgcctgagggcaactgggacctggtgggcaacaacattccggtgttcttcatccaggacgcgatgaagttcccggacctggtgcacgccgtgaagatggagccggaccgcgccttcccccaggcggccagcgcccacgacaccttctgggactttgtttcgctgatgcccgagtccatgcacatggtgatgtgggccatgagcgaccgcaccctgccgcgcagcatgcgcaccatggagggctttggcgtgcacagcttccgcctcatcaatgcggcgggcgaa

SEQ ID NO: 210882 - DNA, 703 bp, Unknown
  Bacterial polypeptide expressing nucleotide sequence isolated from the Sargasso Sea
gacactaagactaatccaatggataaaaaatttgactacaagaaagaagtaaaaaaattaaattttaaaggcatcaaaaaagatttacttaaacttatgaccgatagtcaggaatggtggccagctgacctaggtcattacggtggattattcataagaatggcttggcattcagcgggtacttatagaattgctgacggtcgaggaggaagtggaactggtaaccatagatttgctccacttaattcatggccagataatactaatttggataaagctagaagattgctttggccaattaaaaaaaaatatggaaataaaattagctgggccgatttaatgatattagccgggaacatggcttatgagtccatgggattaaaaatgtatggcttctcctttggaagggaggatatatggcatcctgaaaaagatgtttattggggctcagaaaaagaatggcttcaagataaaagatactcaaataatggtaaccgtaaatcattggcaaatccattagccgctgttgttatgggactaatttatgtaaatccagaaggtgttgatggaaaaccagatcccttaagaactgctcatgatgtaagagagacttttggcagaatggctatgaacgatgaagagacttgtgcattaacagtcggaggtcactcagtaggaagagcccatggtaatggtgatgcat

SEQ ID NO: 210883 - DNA, 842 bp, Unknown
  Bacterial polypeptide expressing nucleotide sequence isolated from the Sargasso Sea
aatggaagataaatctgaaggaaaatgtccagtgatgcatggtgctatgacaagaaacagcacttctggtactgctaatcaggattggtggccagaccaactaaacttaaatattcttcaccagcatgataaaaaatcaaatccaatgggagaggattttgattatagagctgagtttgaaaagatagattatgcagctttaaaaaaagatttgaacgatctaatgaccgattcacaagattggtggcctgctgattacgggcattacggtcctttctttataagacttacttggcacgcggccggaacttacagaagtaccgatggcaggggtggcggaggaacaggcgcacaaagattcgctccattaaacagttggcctgataacggcaacctagataaagcaagaagattgctttggcctattaaagaaaagtatggaaataaaattagttgggctgatttattaattttgtcgggtaacgttgcaatagaatcgatgggtggcaagacttttggttttagtggtggcagacctgatatttgggctcccgaagaagacatcttatggggagtggaagacgaatggcttgaaaatagacgttatcaaggagaaagggagttagacaatccattggcagcagttcaaatgggattaatatatgttaatccccaaggaccagatgctaatcctgatcctttagcgagtgctcatgacattagagaaacttttggccgaatggctatgaatgattatgaaacagtggctttagttgccggaggacatacttttggcaaatgtcatggagcgggagatgctgatctagttcaagtagagccgg

SEQ ID NO: 210884 - DNA, 808 bp, Unknown
  Bacterial polypeptide expressing nucleotide sequence isolated from the Sargasso Sea
ctggtttcagtcgcctgggcttcagcttctaccttccgtggctcagataaacgcggtggtgccaacggcgcccgtattcgtctggcaccacaaaaagattggaccgtcaaccagcctgcgcaattaagcaaagtactctctgtgcttgaacaaactcaagccagtttcaatcagcagtcagcaagccgtaaagtgtctctggctgatttaattgtactggcaggtgctgcagctattgaacaggccgcaaaaaatgccggtgttgctatagaagtgccttttaagccgggtcgtgctgatgcgacacaagagcaaactgatgtggagtcttttgctgtgctggaaccggtcgctgatggtttccgtaactatgttaaaggccgctactcagttaaagctgaagagctgttgctggataaagctcagttactcactttaactgcgccacaaatgacagctctgctcggtggtctgcgggtgttaaatatcaatgcagacaaatcggcgcatggggttttcactaaacaggctgacacattaagcaccgacttttttgtcaatctgttggatatgaacacagtctggactccggtctctgcagaagccgaagtgtttgaaggcaaagaccgcaaaacgggcgcgttgaagtggaccgccagtcgggttgatctggtgtttggctccaactctcagttgcgtgctttggctgaagtttatgcccagcatgataacaagcaaaagtttgtccgcgactttgtcactgcctggaataaagtgatgaacgctgaccgttttgacttaaagtaaa

SEQ ID NO: 210885 - DNA, 941 bp, Unknown
  Bacterial polypeptide expressing nucleotide sequence isolated from the Sargasso Sea
cttaaccgcaggtaaacgtggtccaacattaatggaagatcacgtcttccgtgaaaagatgtttcattttgatcatgaacgtattccagagcgagttgtgcacgcaagaggctatggtgcacatggttactttgaaacatacgatacacttgaagatcttacgtgtgcggatatttttcaacgcaagggagaaaaaacacctgttttcacacgtttttcgactgtagcaggtaataagggctcacccgatttagcacgagatgtgcgtgggtttgcagtaaaattttacaccaaagaaggtaattgggatttagttggcaataatatccctgtttttttcattcaagacgcaatgaaattcccagatttaatccacagtgccaaagccgagcctgatcgtggttttccgcaagcacaaacggcgcatgataacttttgggattttgtgagtttatcgcctgagtctatgcacatggtcatgtgggcaatgtcagacagagcgattccacgctcattacgttttatggaaggctttggtgtgcatacatttaagtttgttaatgcgaaaggtgaacagaagtacgttaaatttcactggaaaccaaaagcaggaatgcagtctgtggtgtggaatgaagcattaaaacttaatggtgcagatcctgattttcaccgtcgtgatatgtgggaatcaattcaaaatggcgactttcctgaatgggagctaggtgtacaagtatttgaccaagcttttgcagatgaatttgaatttgatgtttttgatgctacaaaactcatacctgaagaacaggtgccagtaaaaattattggtcgcatggtgctcgatagagttgtcgataacttttttgcagagacagagcaagttgctttttgtactcaaaacatagtacctggcattgattttacccctgatccactat

SEQ ID NO: 210886 - DNA, 904 bp, Unknown
  Bacterial polypeptide expressing nucleotide sequence isolated from the Sargasso Sea
tggaaatcaaagatttgcaccaataaatagttggccagataacgtcaacttatataaggcaagactacttctttggccgattaaaaaaaaatatggtagaagaatttcatgggcagatttatttatacttgttggaaatgttgctcttgaatctatgggttttaaaacatttggtttcggtggtggaagagaagacatttgggagccagaagaagatatttattggggttctgaaaaagtttggttagataacaaaaggtatgattcaaaaagagaattagaaaatccacttggtgctgttcaaatgggattaatatatgtaaatccacagggaccagatggaaacccagacccactattagcagctagggatattagagaaacattcggcaggatggcaatgaatgattacgaaattgttgcactagtggctggaggacacacattcggaaaatcacatggtgcagctccagaatcgcacaaaggtcctgaaccagaaggatctaaaatacaagatcaagctactggatggaatagtaattataaaagtggtcttggagcagatactataagtagtggtatcgaaggcgcttggacttcaaatccaattaaatgggatatgggttattttgataacctttttggctatgagtgggaattaacaaaaagtcctgccggagcacatcaatggaaaccaatagaaaatggtcatgctccaaatatgacaccagatgctcatataaaaggtaaaaaaaacctaccgatgatgcaaactacagatttatctatgagatttgatcctgagtttggaagaatttcaaaacactttcataacaatccagatgagttttctgatgcttttgctcgtgcatggttcaaacttacacatagagatatgggtcct

SEQ ID NO: 210887 - DNA, 811 bp, Unknown
  Bacterial polypeptide expressing nucleotide sequence isolated from the Sargasso Sea
atacagaaataccgatggaaggggcggcggtggaactggcgcgcagcgttttgcgccgttaaatagctggcctgataatggaaatcttgataaggcaagaagacttttatggccaattaagcagaaatatggaaagcaaattagctgggcagatttaattattctggcaggaaatgttgcaattgaatctatgggagggacaacttttggatacagtggtggtagaccagatatatggggtcctgaagaagatattcattggggtgttgagtctgaatggttagaaaataaaagatataaaggcgaaagagaattagacaatcctcttgcagcagttcaaatgggattaatttatgttaatccgcaaggaccagatggaaacccagatccactggcaagcgctcatgatattagagaaacatttggaagaatggcaatgaatgacgaagagactgtagctttagttgctggtggtcatacttttggtaaatctcatggtgcaggggctgaagataatgttcaatctgaaccagaaggtgcaccaattgaagaaatgggttttggatggtcaagtacttatggttctggtatgggtagcgatactattactagcggtattgaaggtgcttggacggcaaatccaactcagtgggataatggatattttgatttattattaggctatgagtgggagcttacaaagagtcctgcaggggcacatatatggcatgcaattggtcaaacagaagaagatatggctcctgatgctgagaatgcatcaaagaaggtacctacaatgatgaccactgcg

SEQ ID NO: 210888 - DNA, 856 bp, Unknown
  Bacterial polypeptide expressing nucleotide sequence isolated from the Sargasso Sea
aaagctctcaaaaaagatctccataaactaatgacacagtcacaaaattggtggccagcagactatggtcactatggaccattatttattcgtttagcatggcacgccgcagggacatatagaaccggagatggtagaggtggtgcaggaacaggaaatcaaagatttgcgccaatcaatagttggccagataatgttaacttagacaaggcaagacttcttttatggccaattaaaaaaaaatatggtcaaagaatttcgtgggcagatttatttatacttgttggaaatgttgctttagaatctatgggttttaaaacatttggttttggaggtggaagaaaagatatttgggaaccagaagaagacatttattggggttctgaaaaagcttggttagataacaaaagatataattcaaaaagagaattagaaaatccgcttggtgcagttcaaatgggtttaatatatgtaaatccacagggaccagacggaaatccagaccctctattagcagccagagatattagagaaacatttggaagaatggcaatgaatgattatgaaatcgttgcattagttgccggaggtcatacttttggaaaatcacatggcgcagctccagaatctcacaaaggtcctgaaccagaaggatctaaattacaagatcaagccacaggatggaatagtaattataaaagtggacttggtgcagatacgataagtagtggtattgagggtgcttggacatcaaatccaatcaaatgggatatgggatattttgataatctttttggttatgagtgggaattatcaaaaagtccagccggtgctcatcaatggaaacccagttgaa

SEQ ID NO: 210889 - DNA, 771 bp, Unknown
  Bacterial polypeptide expressing nucleotide sequence isolated from the Sargasso Sea
tatggatgcagagagtaaatgccctgtaatgcacggagcaattacaaaaaatatgggagaaggtacatctaaccgcgaatggtggcctaatcaacttaacttaaacatacttcatcaacatgatcgtaaatcagatccaatggaagctggatttaactatcgagaagagttcaaaaaattagattatgctgcattaaaaaaagacctccataatttgatgactgattctcaagattggtggccagctgattatggtcattatggtggtttctttattcgtatgacatggcatgctgctggaacttatagaactggtgatggccgtggtggtggtggaacgggagctcaacgttttgccccgttaaatagttggccggataatggtaacttagataaagcaagaagacttctttggccgataaagaaaaaatatggaaataaaattagttgggctgatttatttattttaacaggtaacgtggcaattgaatctatgggaggaaaaacttttggatttagtggtggacgtcctgacatttgggctccagaagaagatatttactggggtgtagaagaagaatggcttcaaaataaaaggtatactggtgatagaattttagataatccacttgcagcagtacagatgggattgatttatgtaaatcctgaaggaccagatggaaaagctgatccgcttgctagtgcaaaagatataagagaaactttttgcagaatggcaatgaacgatactgaaactgtagcactaactgc

SEQ ID NO: 210890 - DNA, 818 bp, Unknown
  Bacterial polypeptide expressing nucleotide sequence isolated from the Sargasso Sea
tactggtttaggtactccttcgaagcatccaacttgcaaaggaacttcaaatagagattggtggccaaatagcctaaatctaaaaattttaagccaacattcttcaatggtaaatccaatggataaaaagtttgattatgcaaaagaatttaaaaaattaaactttaaagctttaaaaaaagatctaaaaaaattaatgacagactcccaagactggtggccagctgattatggtcattatggaggccttttcattcggttagcttggcatgcagccggaacttatagaactggtgatggccgtggaggtgctggaactggaaaccaaaggtttgctcctttaaatagttggcctgataatgttaatttagataaagccagattgttactttggccaattaagaaaaagtatggaaataaaatttcatgggcagatttgtttattctagtaggaaatgtggcattagaatcaatgggatttagaacatttggttttggaggtggaagagaagatatttgggaaccagaagaagatatttattggggatcagaaaaagaatggctaggagttaatcgttacagtgggaaaagagaactagaaaatccattaggagcttctcatatgggattaatttatgtaaatccgcaaggcccagatgcaaatccagatccagttttagcagcacatgatattcgtgaaacttttggacgtatggcgatgaatgattatgaaacagtagcacttgttgctggaggacatacttttggtaaatctcatggagcagcatccgaatcttttaaagggccagagccagagg

SEQ ID NO: 210891 - DNA, 870 bp, Unknown
  Bacterial polypeptide expressing nucleotide sequence isolated from the Sargasso Sea
aatatatgtaaatccacagggaccagatggaaatccagacccactattagcagctagggatattagagaaacatttggcaggatggcaatgaatgattacgaaattgttgcactagtggctggaggacacacattcggaaaatcacatggcgcagctccagaatctcataaaggacctgaaccagaaggatctaaaatacaagatcaagctactggatggaatagtaattataaaagtggtcttggagcagatactataagtagtggtattgaaggtgcttggacttcaaatccaattaaatgggatatgggttattttgataacctttttggctatgagtgggaattaacaaaaagtcctgccggagcacatcagtggaagccaatagaaaatggtcatgctccaaatatgacaccagatgctcatataaaagataaaaaaaacctaccgatgatgcaaactacagatttatctatgagatttgatcctgagtttggaagaatttcaaaacacttccacaacaatccagatgagtttgctgatgcttttgctcgtgcatggttcaaacttacacatagagatatgggtcctaaagtaaattatttaggaagtgaagtgcctaaagaagatttaatttggcaagatccagtacctaaaaataaattaaaattaaaaaataaagatattgaaagtttgaaagtaaaaattactaagtcaggactttcagtatctcaacttgtatctacagcttgggcttcagcttctacttttagaggttcagacaaaagaggtggggctaatggtgcacgtgtaaggcttgcgccacaaaaagactggaaagtaaacaatccagctcagctttctaaagc

SEQ ID NO: 210892 - DNA, 928 bp, Unknown
  Bacterial polypeptide expressing nucleotide sequence isolated from the Sargasso Sea
ttaaatttaaaaattcttagtcaacactcctctttagttgatccaatggggcaaaaatttaattattcaaaagaatttaaaaaacttaactttaaagcactaaaaaaagatttacataatttaatgacagactcacaagattggtggcctgcagactatggtcattatggacctttatttatcaggttagcttggcatgctgcgggaacttatagaactggggatggtagaggtggcgctggaactggaaatcaacgttttgctcctttaaatagttggccagataatgtgaatttagataaagcaagattactgctttggccaattaagaaaaaatatggcaaaagaatttcatgggctgatctttttattttaattggaaacgttgcactagaatcaatgggatttaaaacttttggttttggtggtggaagagaagatatttgggaacccgaagaagacatttattggggatctgaaaaagaatggttaggggtaaatcgatatagtggtaaaagagacctcgagaatcctttaggagcatctcatatgggattaatatatgtaaatccacaaggacctgatgcaaatccagatcctcttttagcagcgcacgatattcgtgaaacttttgggcgtatggcaatgaacgattatgaaacagttgcccttgtagctggaggacatacatttggtaaatctcatggtgctgcctcggaatctcacaagggaccagagcctgaaggctctaaaatacaagaacaagcgactggatggaatagtaattataagagtggtttaggtgctgatactataagtagtggaatagagggtgcttggactagtaatccaataaaatgggatatgggatattttgataatttatttggttatgattgggaacttacaaaaagtcctgctgagcaca

SEQ ID NO: 210893 - DNA, 930 bp, Unknown
  Bacterial polypeptide expressing nucleotide sequence isolated from the Sargasso Sea
ggcgttgagccggaaggcggcgccttgcacgatatgggctttggctggttaagcagctttaacagcggtaaaggccgtgacactattaccagcggtatcgaaggcgcctggacccccacaccaacacaatgggataacagctattttgacgtgctgtttggctacgaatggcagctgaccaagagccctgccggagcccatcagtgggcggcaaaaaacctggcagaaaaagaccacgcgccggatgcagaaatcgccggcaaaaaagtcggcatcatgatgaccacggctgacatggcgatgcgtgaagacccggcctatcgtaaaatatcacagcactttcaccagaacccggacgagtttgcagatgccttcgcccgtgcctggtttaagttaacgcaccgtgatatggggccaaaatcccgttatctggggccggaagtaccggcggaagatttaatctggcaagacccggtgcctgcggttgatcatgaactggtaaataccgctgacattgccagtttgaaacacgccatactggcatcgggtttaacggtgtctgaactggtctataccgcctggtcgtcagcatcaacctttcgcggctcggattgtcgtggtggagctaacggcgccaggatccggctggcaccgcaaaaagattggcaagttaaccagcctgagcagctgaaaaaggtgttgcacattcttactgacattcagcacaagtttaatggcagtcaaagtggtaacaagaaaatctcgctggcagacctgattgtgcttggcggcagtgcagcgatagaaaaagcagcagccgacgccggtaccaccataacagtgccgtttgctccgggccgcacagatgcaaccgacgaacagactgatgcagattcattcgatgtgcttgagccgatagctgatggtttc

SEQ ID NO: 210894 - DNA, 785 bp, Unknown
  Bacterial polypeptide expressing nucleotide sequence isolated from the Sargasso Sea
aagaatttcttgggcagatctatttattttagttggaaatatatcgttagagtctatgggttttaaaacttttgggtttggagctggcagagaagatatttgggaaccagaggaagatatatattggggatccgagaaggaatggcttggagtaaatagatatagtggcaaaagagatttagagcagccattaggtgcatcacacatgggtttaatttatgtaaatccacaaggaccagatgcaaatcctgatcctttgcttgctgcacatgatattagagaaacttttggtagaatggcaatgaatgattatgaaacagttgcattagttgcaggaggtcatacttttgggaagtctcatggagcagcaccagagtcacacaagggaccagaaccagaaggatcaaaaattcaagaacaagcaactgggtggaatagtaattataaaagtggcttaggagtagatactataagcagtggtatagaaggagcctggactgctaatccaataaaatgggatatgggttattttgataatttgtttggctacgagtgggagcttacaaagagtccagcaggcgcacatcagtggaaacctaaaaaaaatggttttgatattgaaatgactccagatgcacatgaaaaatctaaaaaaaatcttccaatgatgcaaacaactgacttatcccttaaaatggatccagattatggaccaatttcaagacattttcataataatccaaaagagtttgctgatgcatttgcaagagcttggtttaaactta

SEQ ID NO: 210895 - DNA, 805 bp, Unknown
  Bacterial polypeptide expressing nucleotide sequence isolated from the Sargasso Sea
tatgagtaaagaaaatgaagaaaaatgtccagtaatgcatggatccttaaccagcaatagcgcttcaggaacatcaaatcaagattggtggccaaatcaattaaatctaaatatccttcatcagcatgatcagaaatctgatcctttagctgaggattttgattatcgagaggaatttaaaaagcttgattataaagctctaaaaaaggacctgaatgatctaatgacagattcacaagattggtggccagctgattatgggcattatggtcctttctttattcgaatgacttggcacgcagcaggtacttacaggattggggacggtcgtggcggtgggggaacaggtgcacagcgattcgctccgcttaatagttggccggataatggaaacttagacaaagctcgtcgtctactttggcccataaaacaaaaatacggcaataaaattagttgggcagaccttctaatccttgctgggaacgtcgcgattgaatccatgggtggaaaaacttttggttttggtggagggcgtcctgatatttgggcaccagaagaagatattgattggggtatagagacggaatggttagccaatgaaagatactcaggtgagcgagatttagctaatcctttgggtgccgtacagatgggtttaatttatgttaacccgcaaggccctgacggtgaacctgaccctattgcaagcggtaaagatgtcagagagacatttggtcgaatggccatgaacgatgaagaaaccgtggctcttgttgctggcggacacacctttggtaaggggcat

SEQ ID NO: 210896 - DNA, 935 bp, Unknown
  Bacterial polypeptide expressing nucleotide sequence isolated from the Sargasso Sea
gttcccaactggcagaggtacttcaaatagagattggtggccaaatagtttaaaccttaaaattttaagtcaacattcttctttagttgatccaatggataagaaatttaattatgcaaaagaattcaaaaaacttaaccttaaagcattaaaaaaagatttacataaattaatgacagactcacaggattggtggcctgccgattacggtcattatggacctttgtttatacgactagcatggcatgccgcaggaacatacagaactggtgacggtcgtggtggtgctggtactggtaatcaaagatttgccccgctcaatagttggccggacaatgttaatctagataaagcaagattattaatgtggcctattaagaaaaaatacggtaaaaaaatttcgtgggccgatctcttcatactagttggaaatgtagctttagaatcaatgggttttaaaacttttggatttggaggaggtcgagaagatatttgggaacccgaagaggatatttattggggatcagaaaaagaatggcttggtgttaaccgttacagtggtaaaagagatcttgaaaatcctttaggtgcgtctcacatgggtttaatttatgtgaatcctcaaggtccggatgcaaatccagatccttttttagctgctcatgatattcgcgaaacttttggtcgtatggctatgaatgattatgaaacagttgcacttatagctggagggcatacttttggaaaatctcatggcgctgctcctgaatcacataaaggtccagaaccagaaggttcaagaatccaagagcaagccaccggttggaatagtaattataaaagtggtaagggagttgacactatcagtagtggactagaaggagcttggacaggtaacccaacaaaatgggacaatgggtattttgatttgttat

SEQ ID NO: 210897 - DNA, 829 bp, Unknown
  Bacterial polypeptide expressing nucleotide sequence isolated from the Sargasso Sea
tatgagtgcggaatcaaaatgtccatttacaggagctggaactcctccaaagtttccaacaggaagaggaacatcaaatagagattggtggcctaatagtttaaatttaaaaattttaagtcaacactcatctttagttaatcctatggatgaaaaatttaattataaaaaagaattcaaaaaacttaattataaagatttaaaaaaagatttacatagactaatgaccgattcacaagattggtggcctgcagattatggccattatggacctctgtttataagattatcatggcatgcagctggaacttatagaactggagatggtagaggtggcgcaggaacaggaaatcaacgttttgctccattaaatagttggccagataatgttaatttagataaagcaagacttttactttggcctattaaaaaaaaatatggaaataaaatttcatgggctgatctatttatattagttggaaatgtagctttagaatcaatgggatttaaaacttttggttttggaggtggaagaacagatatatgggaaccagaggaagatatttattggggatctgaaaaagaatggttgggtgtaaatcgttacagcggtaaaagagaactagaaaatcctttaggtgcatctcacatgggactaatatatgtaaatccacaaggtccagatgctaacccagatccttttttagctgctcatgatatcagagaaacttttggacgtatggcaatgaatgattatgaaacagttgcactcgttgctgggggtcatacatttggtaaatcacatggtgctgctccagagtctcataaa

SEQ ID NO: 210898 - DNA, 758 bp, Unknown
  Bacterial polypeptide expressing nucleotide sequence isolated from the Sargasso Sea
ttggtggccagcagattatggtcattatggtccattttttattcctcttgcttggcatgctgctggaacttatcgaacaggagacggaagaggtggtgctggaactggaaatcaaagatttgctccattaaatagttggccagataatgtaaatttagataaagcaaggcttttactttggcccatcaaaaagaaatatggaaaaaaaatatcttgggcagatttatttatacttgttggaaatatatctctagagtcaatgggtttcaaaacttttggttttggtgctggaagagaagacatatgggagccagaagaggatatttattggggatctgaaaaagaatggcttggagtaaatcggtatagtggaaaaagagaactagaaaaccctttaggagcatcacacatgggtttaatttatgttaatcctcaaggacctgatgctaatccagatccttatttagctgctcatgatattagagaaactttcggacgtatggcaatgaatgattatgagacggtagcactcgttgcaggcggacatacatttggaaaatctcatggtgccgccccagaatcacacaaaggtcctgaaccagaaggttcaaagattcaagatcaagcaactgggtggaatagtaactacaaaagtggcttaggtgtagatactattagtagtggtattgagggcgcatggacttcaaacccgattaaatgggatatgggatattttgataatttatttggctatgatt

SEQ ID NO: 210899 - DNA, 864 bp, Unknown
  Bacterial polypeptide expressing nucleotide sequence isolated from the Sargasso Sea
aaagtggcctaggagccgatactattagtagcggaatagagggcgcttggacaagcaatccaataaaatgggacatgggatattttgataatttatttggttatgattgggaattaacaaaaagtcctgctggtgcacatcaatggaagccgaaacaaaatggacatggtgttaatatgacacctgatgcacatataaaaacaaagaaaaacctacctatgatgcaaacaacagacttgtctttaaaaatggatccgagttatggaccaatttcaagaaattttcataataatccaaaagaatttgcagatgcattcgcaagagcttggtttaaacttactcatcgtgatatgggacctagggcttgctatttaggtccagaagttccaaaagaacaattaatttggcaggatccgattccaaaagcaaagtataaaattaaaaacaaagatattaaaactcttaaaacaaaaatactaaagtcaggattgtctatttctgagctagtatcaacagcctgggcatcagcctctactttccgtggttctgataaaagaggtggagccaatggtgcgagaataagattagagccccaaaaacactgggaagttaataatcctaatcaattatctaaagtaattaaaactttacaaaaaattaaaaaaaattttgatagtaaaagtaaaaacgtttcgttagcggatttaatagttttaggtggatgtgctgcgatagaaaaagctgcaaaaaaatctggtaagaatataaatgttccatttattccaggtagaggagatgcatctcaagaacaaacagatacttattcatttggtttgcttgaaccaaaaagcggatggatttaga

SEQ ID NO: 210900 - DNA, 994 bp, Unknown
  Bacterial polypeptide expressing nucleotide sequence isolated from the Sargasso Sea
ttgatgactagttcccaggaatggtggccagctgactatggtcattatgttccgctatttattaggcttgcatggcatgctgcaggtacttacagaactggagacggtagaggtggagcaggaactggaaatcaacgttttgcgcctctaaattcttggccggataatgtaaatttggataaagctagactacttttatggccaattaaacaaaaatatggaaaaaagatctcttgggcagacctttttattttggttggtaacgtggcgttagattcaatgggatttaagacatttggttttggtgctggaagagtagatatttgggaaccagaggatgatatttactggggctcagaaaaagagatgttagatgtaaaaagatatagtggaaaaagagatttggagcagccgttaggagcttcacacatggggctaatctatgtaaaccctcaaggtccagatgcaaatccagacccattgctcgcagctcatgatattagagaaacgtttggaagaatggcaatgaatgattatgaaacagctgcattagttgcgggtggacacacatttggtaaatcacatggtgcagcaccagaatcccataaaggtcctgatcctgaagcatcaagaatccaagatcaagctactggatggaatagtggttataaatcaggaaaaggtattgatacgataagtagtggtatcgaaggtgcttggacacagaatccaactaaatgggatatgggttatttagattgcctttatggacatgaatgggaacttacaaaaagcccagcaggtgcacatcagtggacaccaaagaaaaatggtcaagaaataaaaatggtaccagatgcacacgataaaaatgttcttcatcctccaatgatgcaaacaactgacatatcattaaaagttgacccaagttatggtccaataactagacattttcacgaaaatccaaaagagtttcatgacgcatttgctagag

SEQ ID NO: 210901 - DNA, 949 bp, Unknown
  Bacterial polypeptide expressing nucleotide sequence isolated from the Sargasso Sea
tttttcattagactaacttggcatgcagcaggaacttacaggacatgggatggaagaggtggaggaggtactggagatcaaaggtttgctccacttaacagttggcctgataatggaaacttagacaaagctagaagattgttatggcctttaaaaaaaaagtatggaagcaagattagttgggctgatttgtttatcctagctggtaatgttgccatagagtccatgggtggtaaaacatttggttacagcggaggtcgtccagatatttggactcctccagaagatatttactgggggaaagaaaatgaatggctgaaaaacgaaagatatactggggaaagagtgcttgaaactcctcttggtgctgttcaaatgggattaatttatgtaaatcctcaaggacctgatggtaatcctgatccaaaagctagtgccatggatattagagaaacatttgctagaatggccatgaatgacgaagaaactgttgcattaactgcaggtggacatactttcggcaaagctcatggagcagctcctgaagaaaatgttggtccagaaccagaaggagctccaattgagcagatgggttttggttggaagaacgtacatggtgttggaaaaggaggagatactattacaagtggtatagaaggtccttggacaaccaaccccacaaaatgggataattcttattttgaacttttatttaaatatgattgggaattagttaaaagccctgctggagcgttccagtggcatccaataaatccggatgagaatgatttagcaccagatgccgctgattcctcaaaaaaagtcacaacaattatgacaacggcagatatggccatgaaagaagatccagcttacaacaagatatcaagaaggtttcttgaaaatcctgatgaatttgctgatacatttgcaagagccatggtttaaa

SEQ ID NO: 210902 - DNA, 955 bp, Unknown
  Bacterial polypeptide expressing nucleotide sequence isolated from the Sargasso Sea
agttggccggataatggtaacttagataaagcaagaagacttctttggccaataaagaaaaaatatggaaataaaattagttgggctgatttatttattttaacaggtaacgttgcaattgaatctatggggggtaaaacttttggatttagtggtggacgtcctgacatttgggcaccagaagaagatatttactggggcgtagaggaagaatggctacaaaataaaaggtatactggtgatagaattttagataatccacttgcagcagtgcaaatgggattaatttatgtaaaccctgaaggaccagatggaaaagctgatccgcttgctagtgcaaaagatataagagaaacttttgcaagaatggcaatgaacgacactgaaactgtggctctcactgcaggtggacatacttttggtaaagcacatggtgctggtgatccagctctagtaggagcagaaccagaaggagctcctttagaacaaatgggtttaggttggaataacttgcacggttcaggtgttggtcgtgataccacaacaagtggtatagaaggtccgtggacacctaatccaactcagtgggataatggatactttgatatgcttctaggttacgaatggaagttagtaaaaagtccagcaggtgctcaaatctggcatgcgattgatcaaaaagaggaacacatggcacctcaagttgatgatccatcagtaaaagttcctacaatgatgacaacagcagatatggcaatgcgtgaagatcctgaatacagaaaagtatcagaaaaatttcacaaagacccagaatattttgctgatcaatttgctagagcttggtttaaacttctacatcgagatatgggtccaaaaactagatatatggggccagaagttccagaagaagaattgatttggcaagacccctgtgcctcaaggtcatttcaaaata

SEQ ID NO: 210903 - DNA, 964 bp, Unknown
  Bacterial polypeptide expressing nucleotide sequence isolated from the Sargasso Sea
aaaattaagatggtacctgacgcacatgacaaaaacaaaatgcatccaccaatgatgcaaacaactgacctttcgctaagaatggatccttcatatggtccgatttcaaaacatttctttaataatccggatgaatttgcagatgcttttgcaagagcatggtttaaattaacacatagagatatgggtccaagagcatgttatttaggcagtgaagttccaaaggaggaattaatttggcaagatccggttaaaaaaccaaaatacaaattaaaagcaaaagatataaaagacttaaaatctcaaatatcaaaatcaaaactatctgtatctgaattggtaagcactgcttgggcatctgcttcaacttacagaggatctgataaaagaggtggagcaaatggtgctagaataagattagaaccacaaattaactgggaagttaataacaatggcaagacaacaaaagtaattagtgcacttgaaaaaatccaaaacaaattcagcactaagaaaaaatcagtttcattagcagatttaatagtgcttggtggaaacgttggagtagagatggctgctaaaaaggccggtaagaaaattgaagttccattttcaccaggaagaggcgatgctactcaagagcaaactgacgttcactcttttggtttattggaaccacaagctgatggatttagaaactacaataaggatgaacaaactaaagtttcagctgaggaaaaactgattgataaatctcagttgatgggtcttacagcaccggaaatgactgtcttgttaggtggaatgagagttcttgatacaaactttgataactcaaaaaatggtgttttcactaaaaaacctggaacattaactaatgactatttcgtaaatcttttagatatgaatactacttggaaagagactgatagttcagaaccagttattgaaggaaagacagaaa

SEQ ID NO: 210904 - DNA, 896 bp, Unknown
  Bacterial polypeptide expressing nucleotide sequence isolated from the Sargasso Sea
ttacagtggcaaacgtgatcttgaaaatcctttgggagcgtcacatatgggattaatttatgttaatccacaaggacccgatgctaatccagatcctcttttagccgctcatgatattcgtgaaacttttggtcgtatggctatgaacgattatgaaacagtagcacttgttgcaggaggacacacttttggaaagtctcatggagccgcgccagagtctcacaaaggtccggagccagaaggttcaaaaattcaagaccaagcaacaggttggaatagtaattataaaagcggtaaaggagtagacaccataagtagcggactagaaggtgcttggacacaaactcctataaaatgggatatgggatatttagattgtctttatgaccatgaatgggaattaaccaagagccctgctggtgcacatcagtggacaccaaaacaaaatggtcaagctataaaaatggttcctgacgcacatgatagaacaaaaaaacatcctcctatgatgttaacaaccgatatttctatgagagtagaccctcagtacggacctatttctaaaaaattccacgagaatccagatgaatttgctgatgcttttgctagagcatggtttaaattaacccatcgtgatatgggtcctaaagcttgctatttaggtcctgaagttccaaaagaaaacttaatttggcaagatcctgtaccaaaagcaaaatataaacttaaaaataaagatattaacactttaaaaaaacaaatttcaaaatcaggcctttcaatttcccaactagtatctactgcttgggcctcagcatcgactttccgtggttcagacaaaagaggtggagctaatggagctagaattagacttgagcctcaaaaagactgggaag

SEQ ID NO: 210905 - DNA, 964 bp, Unknown
  Bacterial polypeptide expressing nucleotide sequence isolated from the Sargasso Sea
catgggggagtagaatcagaatggctggaaaacaaaagatataagggtgaaagagaattagacaatcctcttgcagctgtccaaatggggctaatttatgtaaatcctcaaggacctgatggaaaccctgatcctctagctagtgctcatgatattagagagacatttggaagaatggctatgaacgatgaagaaactgtagctcttgttgctggaggtcatacttttggaaaagcacatggagctggagcagaagatcatgttcaatcagagcctgaaggagctccattagaagaaatgggatttggttggacaagcacatacgcatctggagtaggtagcgacacgataactagtggtattgaaggagcatggactgcaaatccaactcagtgggataatggatattttgatttattgtttggttacgaatgggaattaactaaaagtcctgctggagctcacatttggcatgctgttggtcaaactgaggaagatatggctccggatgccgaagatgcttcaaagaaagttccaacaatgatgacaactgctgatatggctttaagagaagatccaagttataagaaaatttcaaaaagatttcacgaaaatcctgatgaatttgcagatgcttttgcaagagcatggttcaaacttcttcacagagacatgggtccaaagtctagatacatgggtccagaagttcctggtgaggaattaatatggcaagatccagttcctttaggcaattctgattacgatattgaaaaagtaaaagagatgataagcaaatcaggtttatcaattcaagaaatggtagagactgcttgggcaagcgcatctacattcagaggctccgacatgcgaggaggagctaatggttcaagaattagattagctccgcaaaaagattggggagccaataatccgagccaactctgtaaagttttggatatatacg

SEQ ID NO: 210906 - DNA, 544 bp, Unknown
  Bacterial polypeptide expressing nucleotide sequence isolated from the Sargasso Sea
catggacaagactcaacactctcaaggtaaatgccccgtgatgcatggggcaaattcagccgttgccagcaacaatatggattggtggcctaaggcacttaatctcgatattttgcatcagcatgataagaagacggatcccatggatcccaactttaattaccgtgaagcctttaagacccttgacctcgctgccgtgaagcaggacttgcattcccttatgaccgatagccaagattggtggccagccgattgggggcattatggcggcttgatgatccgcatggcatggcactctgcgggaacctatcgcattgccgatggccgtggcggtgcggggacgggtaatcaacgctttgccccactcaatagctggcccgataacgccaaccttgataaagcccgccgtttactctggccgattaagaaaaaatatggcaacaaactctcatgggcagatttgatgatcctcgcgggtaatgtggcctacgagtctatgggcttaaaaacctatggatttgccggcggtcgagaggatatttgg

SEQ ID NO: 210907 - DNA, 835 bp, Unknown
  Bacterial polypeptide expressing nucleotide sequence isolated from the Sargasso Sea
ggacaaacaaatagagatttttggccaaatagtttgaatttgaaaattttaagtcagcactcgaatttatcaaatccaatggagaaaaaatttaattattctaaagaatttaaaaaactgaattacaaagcactcaaaaaagatttaaacaaattaatgacagactcacaagattggtggccagcagattacggtcattatggtcctttatttattagattagcatggcacgcagcaggtacatacaggacaggtgatggtagagggggagctggaacaggtaatcaaaggtttgcaccgttaaatgcttggcctgataatgttaatttagataaagctagattacttttgtggccaataaaacagaaatatggaaaaagaatttcttgggcagatttatttatactagttggaaatgtagcattagagtcaatgggctttaaaacgttcggttttggagcgggaagaactgatatctgggaaccagaagatgatatttactggggttcagaaaaagaaatgctaggtgttaagagatacagcggaaaaagagatcttgaacaaccattgggggcttctcacatgggattaatttatgtaaatccacaaggtccagattttaatccagacccattgaaagcagctcatgatattagagaaacatttggacgaatggcaatgaatgattatgaaacagttgcactagttgctggtggtcatacttttggaaaatctcatggtgccgcacctgaatcacataaaggacctgatccagaagcatcaagaattcaagatcaagcaactggttggaatagtaattacaaatcaggaaaag

SEQ ID NO: 210908 - DNA, 863 bp, Unknown
  Bacterial polypeptide expressing nucleotide sequence isolated from the Sargasso Sea
ttcgaatagagactggtggccaaatcagttaaatttatcaattcttcatcagcatgatcaaaaatctaatccaatgaataaagattttgattatagagaagaatttaagagcattgattatactgctttaaaaaaagatcttacaaatcttatgacagattcacaagactggtggccagctgattatggacattatggtcctttttttattcgtatgacatggcatgcggcaggaacttatagaactggagatggcagaggaggcggaggaactggagcacagagatttgcccccttgaatagttggcctgataatggaaaccttgacaaagcacgaaggttgctttggcctattaaacaaaaatatggcaataaaattagttgggcagacttattgatattagcaggtaatgttgcaatagaatcaatgggtggaaaaacttttggttatagtggtggtcgttcggatatatgggctcctgaagaagatatttattggggcgttgaaaaagagtggttagagaataaacgatacaaaggagagcgtgaattggacaatccattagctgccgttcaaatgggtttaatttatgttaatcctgaagggccagatggtaatcccgatcctcttgctagtgcaaaagatattcgtgaaacttttggcagaatggcaatgaatgatgaagagactgtagcgcttactgcaggtggtcacacttttggtaaagcgcatggcgccggagatccttctcttgttgggcctgaaccagaaggtgcaaaaattgaagaaatgggctttggatggattagcaaacatggctctggcaaaggtagtgattctataacgagtggaattgaaagga

SEQ ID NO: 210909 - DNA, 884 bp, Unknown
  Bacterial polypeptide expressing nucleotide sequence isolated from the Sargasso Sea
tggtgatggccgtggaggtgctgggactggaaaccaacgttttgctccattaaatagctggccggataatgttaatttagataaagcaagattattactttggcctatcaaaaaaaaatacggtaaacaaatttcatgggctgatctttttattttagttggaaatgttgcgttagaatcaatgggttttaaaacttttggttttggtggaggaagagaagacatttgggaaccggaagaagatatttactggggatctgaaaaagagtggcttggtgttaaacgttacagtggcaaaagagagcttgaaaatcctttaggagcatcacatatgggattaatttatgtaaatcctcaaggtcccgatgcaaatcctgatcctcttttggctgctcatgacattcgtgaaacttttgggcgtatggccatgaatgattatgaaacagtagcgcttgtagctggaggacatacttttggaaaatctcatggtgctgcacctgagtcacataaagggccagaacccgaaggttcaaaattgcaggagcaagctactggttggaatagtaattataaaagtggtaaaggagtagataccattagtagtggtcttgaaggagcttggacgcacaatcctattaagtgggacatgggttattttgataacttatttagttacgattgggaattaacaaaaagtccagctggagcacatcaatggaaacccaaacaaaatggaagtgcaataaaaatggttcctgacgcacatgataaatctaaaaagcatcctcctatgatgctaacgacagacctttctatgagaatggatccaaaatatggtccaatatctaggaacttttttgaaaatccagatagaatttgctgat

SEQ ID NO: 210910 - DNA, 753 bp, Unknown
  Bacterial polypeptide expressing nucleotide sequence isolated from the Sargasso Sea
aaaaaagatcttcataagctaatgacacaatcacaaagttggtggcctgcagactatggtcactacggacctttatttattcgtcttgcttggcatgccgcaggaacttacagaactggggatggtagaggtggcgcaggcacaggaaatcaaagatttgcaccaatcaatagttggccagataacgtcaacttagataaggcaagacttcttctttggccgattaaaaagaaatatggaaaaaaaatttcttgggcagatttgtttatacttgttggtaacgttgcacttgaatccatgggattcaaaacatttggttttggaggtggaagagaagatatttgggaaccagaggatgatatttattggggttccgaaaaagaatggctagctaataatagatataattcaaaaagggaattagaaaacccacttggagcagttcaaatgggtttaatttatgtaaatccacaaggtccagatggaaatccagacccattattagctgctagagatattagagaaacattcggtagaatggctatgaatgattacgaaattgttgcactagttgccggaggacacacttttggaaaatcacacggtgcagccccagaatctcacaaagggaatgaaccagaagggtctagaatacaagaccaggcaactggttggaatagtgattataaaagtggtattggagccgatactataagtagtggtatcgaaggagcatggacttctaatccgatt

SEQ ID NO: 210911 - DNA, 897 bp, Unknown
  Bacterial polypeptide expressing nucleotide sequence isolated from the Sargasso Sea
ctattaaatgggatatggggtattttgattgtttgttcaatcatgaatgggaacttacaaaaagtcctgcgggagctcatcaatggacacctaaacaaaatggtcaaaaaattaagatggttcctgacgcacatgacaaaaacaaaatgcatccaccaatgatgcaaacaacagacctttcactaagaatggatccttcatacggtccgatttcaaaacacttttttaacaatcctgatgaatttgcagatgcgttcgcaagagcatggtttaagttaactcatagagatatgggtccaagagcatgttatttaggtagcgaagttccaaaagaagaattaatttggcaagatcctgttaaaaaaccaaaatacaaattaaaagcaaaagatataaaagatttaaaatctcaaatatcaaaatcaaaactatctgtatctgaattggtaagcactgcttgggcatctgcctcaacttacagaggatctgataaaagaggtggagcaaatggtgctagaataagattagagccacaaattaactgggaagttaataacaatggtaagacaacaaaagtaattagtgcacttgaaaaaatccaaaacaaattcaacactaagaaaaaatcagtttcattggcagatttaatagttcttggtggaaacgttggaatagagattgccgctaaaaaggccggcaagaaaattgaagttccattttcacctggaagaggtgatgcaacacaggagcaaacagatgttcactcatttggtttattagaaccacaagctgatggatttagaaactacaataaggatgaaaaaactaaagtttctgctgaggaaaaattaattgataaatctcaaattaatgggtcttacagcacccagagatgac

SEQ ID NO: 210912 - DNA, 439 bp, Unknown
  Bacterial polypeptide expressing nucleotide sequence isolated from the Sargasso Sea
gcgtaacccattgacgaatttgaaagatccacaagctatgtgggacttctggtcattaaaccctgaagccatgcaccaagtgacgattctgatgtctgaccgtggtattccggcaaactaccgccaaatgcatggttatggttcgcatactttctcgttctggaatgctaaaggtgagcgtttctgggtgaagttccacttcaaatcgcagcaaggcgtggtgaacttaaccaacgagcaagccgataagttaaagggtatcgaccctgactcatcccagcgcgatatggtggtggctgtgactgacggtaacttcccacgttggacggtgaacgtacagattatgcctgagagcgacgccaacacttaccatatcaacccattcgatttaactaaggtgtggccacatggcgattacccgttaattgaaattggtgtg

SEQ ID NO: 210913 - DNA, 808 bp, Unknown
  Bacterial polypeptide expressing nucleotide sequence isolated from the Sargasso Sea
ccaatttctaaacattttcatcaaaatcctaatgaatttgctgatgcctttgcaagggcttggttcaaactcactcatcgtgatatgggtccaaaagcaaattatcttggttctgatgttccaaaagaaaatttaatctggcaagatccaataccaaaaaataaatataaacttaaaaataaagatattgagctactaaagaaaaaaatatctaaatctggtttatctgtttctcagttagttacgactgcatgggcgtccgcatcaacttttagagggtctgataaaagaggaggtgctaacggagctagaatagctcttgaacctcaaaaagactggaaagttaataatcctacaaaattgtctgccgtaatcagaatttttaataaaattaaaaaaggttttgattcaaaaaataaatcggtttcattagcagatctaatagttttaggaggatcagttggtattgaaaatgccgctaaaaagagtggtaaaaaaattaaagttcctttcaaagcaggaagaggtgatgcaaaacaagatcaaacagacaaaaattcatttaatcttcttgaacccatagcagatggttttagaaactatattaagctgcatgctaaaggatataccaatggaaaaggtatccctactaattcagctgaagaaatgttgatagataaagcccaacttcttggattaactggtccagaaatgacagttttaattggaggaatgagagtattaaatactaactatgatggttcagattatggtgtatttacaaaaaaacctggatcattaactaatg

SEQ ID NO: 210914 - DNA, 904 bp, Unknown
  Bacterial polypeptide expressing nucleotide sequence isolated from the Sargasso Sea
ggtcatacatttggaaaatcacatggagcagcatctgagtctcataaaggtccagatccagaagcatcaagaattcaagatcaatcgactggatggaatagtgattataaatcaggaaaaggtgttgatactataagcagcggtattgaaggtgcatggacacagtcacctataaagtgggatatgggttactttgattgtttgtttaatcatgaatgggaattaacaaaaagccctgcaggagctcatcagtggacaccaaaacaaaatggccaaaaaattaaaatggttcctgatgctcacgataaaaacaaaatgcatccaccaatgatgcaaacaacagacctttcattaaggatggatccttcgtatgggccaatatcgaaacatttttacaataaccctgctgaatttgcagatgcttttgcaagagcgtggtttaaattaactcatagagatatgggtccaagagcatgctacttgggtaatgaggtaccaaaagaggagttaatatggcaggatccagttgaaaaaccaaaatataaattgaagaaaagcgatattaaaattcttaaatctaaaatatctaaatctaaattgtctgtgtcggagttagtaagtacagcttgggcatcagcttcgacttacagaggatcagataaaagaggtggggctaatggagctagagttaaattagagccacaaattagttgggatgttaataatccaaaacagattaataaagtaatcaaagctttagaaaaaattaaaaacaaatttgacaataagaaaaaatctgtttctttagctgatttaatagtgcttggtggaaacgtaggtattgaaatggcagctaaaaaagcaggtattaaagtagatgtacctttctctccaggaagaggtg

SEQ ID NO: 210915 - DNA, 860 bp, Unknown
  Bacterial polypeptide expressing nucleotide sequence isolated from the Sargasso Sea
tttcagcggcggtagagttgatatttggtctccagaagaagatatttattggggtaaggaaaaagaatggttggcaaacaatcgctacaccggagatcgtaatcttgaaaatccacttgcagcagttcaaatgggattaatttatgtaaaccctgagggacctgatggaaaccctgatccactagcaagtgcaagagacattcgagaaacttttggacgtatggcaatgaatgatgaagaaacagttgcattgactgcaggtggtcatacttttggtaaggcacatggggcaggtgatgctggtctcgttgggcctgaaccagaaggtgcgccaatcgaagaaatgggttttggatggattagcaaacatgcttcaggaaaaggaagtgataccatcacatctggtattgaaggtgcttggacggccaacccaactaaatgggataatggttattttgatttactccttggttacgattggaagttaactaagagtcctgctggtgcaaatatttggcatgcagtggatcaaaaagaagaacatatggcacctgacgcagaagattcttcaaaaaaagttcctacaatgatgacaactgctgatatggcaatgcgcgaagatcctgagtatcgaaaaatatctgagtattttcataaaaatcctgatcaatttcaagatgcatttgcacgtgcttggttcaaattacttcaccgtgatatgggaccaaagacacgttacatgggacctgaagcgccagcagaagatctgatttggcaagaccccattccatctggaaacaaagattatgatatagaatctgtaaaaacaagaatatcagaaagtgggattaacaattaaa

SEQ ID NO: 210916 - DNA, 929 bp, Unknown
  Bacterial polypeptide expressing nucleotide sequence isolated from the Sargasso Sea
tctggaaaaggacaaacaaataaagattgggtggccaaatagtttaaatttgaaaattttgagtcaacattcatctatggttaatccaatggataaaaaattcgattataaaaaggaatttaaaaaacttaattttaaagctttaaaaaaagatcttcataagttaatgactcaatcacaaagttggtggccagctgattatgggcactatgggcctttgtttattcgtcttgcttggcatgctgctggaacttatagaacaggagatggtagaggaggagccggtactggtaatcagagatttgcaccaataaatagttggccggataacgtaaacttagataaagcaagacttcttttatggcctataaaaaagaaatatggaaaaaatatttcatgggcggacttatttatattagttggaaatgttgcacttgagtcgatgggatttaaaacttttggttttggaggtggaagagaagatatttgggaacctgaggaagatatctactggggttccgaaaaagaatggcttgctaataatagatataattcaaaaagagaattagaaaatccacttggagcagttcaaatgggtttgatatatgtaaatccacaaggaccagatgggaatccggacccgttactagctgctagagacattagagaaacatttgggagaatggcaatgaacgattatgaaatagttgcactcgttgctggaggacatacatttggtaaatcacatggcgcagcgcccgagtctcacaaaggtcctgaaccagaggggtctaaaatacaggaccaatcgactggatggaacagtaattataaaagtggacttggatcagatacaataagtagtggaattgaaggcgcatggacttcaaatccaataaaatgggatatgggatattttgataaccttt

SEQ ID NO: 210917 - DNA, 891 bp, Unknown
  Bacterial polypeptide expressing nucleotide sequence isolated from the Sargasso Sea
acttttggcagaatggcaatgaatgatgaagagacagtagcacttactgcaggtggtcacacttttggtaaggcgcatggtgccggagacccttctcttgttgggcctgaaccagaaggagctaaaattgaagagttgggctttggatggattagtaaacatggttctggcaaaggtagtgatgcaataactagtggtatcgaaggtgcttggacaacaaatcctacaaaatgggataatggatatttcgatcttctattaaattatgaatgggagcttaccaaaagtcctgctggtgcaaatatatggcatgcagtaaatcaaaaagatgaacacaaagctcctgatgctgaagattcttcgaaacgagttccaacaatgatgacaactgctgacatggctatgcgtgaagatccgagctatagaaaaatttcagaaagattccataaaaatcctgatgagttccaagatgcatttgctcgtgcttggtttaaacttttacatcgtgatatgggaccaaaaactcgttacatgggtcctgaagttccaaaagaagaattaatttggcaagatccaattccaaaaggaaatgcagattacgatatagattctgttaaaacaaaaatagttgaaagcggattatctattcaagaaatgatagaaacggcatgggctagtgcatctacatttcgaggaacagacatgagggggggtgcaaatggtgctcgtatacgtcttgagcctcaaaaaagttgggaagtaaataaaccagagcagctttcaaaagtattaagtatatttgaaggaatagcttcagaaacaggagccagcgttgcagatattatagttttagcaggaaatgtaggaatagagaaagcgtcaggtgtaccc

SEQ ID NO: 210918 - DNA, 700 bp, Unknown
  Bacterial polypeptide expressing nucleotide sequence isolated from the Sargasso Sea
aggcactggtgcgcaacgctttgcaccattaaatagttggcctgataacggaaaccttgataaagctagaagacttttgtggccaataaaacaaaaatatgggaagaaaattagttgggctgatttattaatccttgcaggtaatgttgctattgaatcaatgggtggtgagacttttggttttagtggaggaagaccagatatttggggcccagaggaagatattcattggggtgtagaatcagaatggttagataacaagcgttataaaggcgaaagagaattagataatcctcttgctgctgtacagatgggtttaatatatgttaatcctcaaggtccagatggaaaccctgatcctcttgctagtgctcatgacatacgaacaacttttggaaggatggcaatgaatgatgaggagactgtagctcttgttgctggtggtcacacttttggcaaatctcatggagctggacctgaagataatgttcaacaagaacctgaaggtgctccacttgaggaaatgggttttggttggtcaagcacatttggttcgggtgtaggcagcgacactattacaagtggtatagaaggagcttggacagcaaacccaactaaatgggacaatggatactttgatcttttatttggctatgactgggaattaacaaaaagtccggctggtgcccatatttggcat

SEQ ID NO: 210919 - DNA, 973 bp, Unknown
  Bacterial polypeptide expressing nucleotide sequence isolated from the Sargasso Sea
tttctttattcgtatgacatggcatgctgctggaacttatagaactggtgatggccgtggtggtggtggaacaggagctcaacgttttgctccgttaaacagttggccggataatggtaatttagataaagcaagaagacttctttggccaataaagaaaaaatatggaaataaaattagctgggctgatttatttattttaacaggtaacgttgcaattgaatctatggggggtaaaactttcggatttagtggtggacgtcctgatatttgggcaccagaagaagatatttactggggtgtagaagaagaatggctacaaaataaaagatatactggtgatagaattttagataatccacttgcagcagtgcaaatgggattaatttacgtgaaccctgaaggaccagatggaaaagctgatccgcttgctagtgcaaaagatataagagaaacttttgcaagaatggcaatgaacgatactgaaactgtagcactaactgcaggtggacatacttttggtaaagcacatggtgctggtgatccagctctagtaggagcagaaccagaaggtgctcctttagaacaaatgggtctaggttggaataacttgcacggttcaggtgttggtcgtgatactacaacaagtggtatagaaggtccatggacacctaatccaactcagtgggataatgggtactttgatatgcttcttggttacgaatggaaattagtaaaaagtccggcgggtgctcaaatctggcatgcgattgatcaaaaagaggaacacatggctcctcaagttgatgatccatcagtaaaagttcctacaatgatgacaacagcagatatggcaatgcgtgaagaccctgaatacagaaaagtatcagaaaaatttcacaaagacccagaatattttgcggatcaatttgctagagcttggtttaacttctacatcgagatatgggtccaa

SEQ ID NO: 210920 - DNA, 574 bp, Unknown
  Bacterial polypeptide expressing nucleotide sequence isolated from the Sargasso Sea
atggaaaatgaaggtaagtgtcctgttatgcatggcgctatgacaagtaatagttcaagtggtacatccaataaagattggtggcctgagcaactaaatttaaatattctgcatcagcatgatagaaaatctgatccaatggatgagggttttgactatagaaaagaatttgaagatatcgagtatgatgctctgaaaaaagatctaaatgatctcatgactgattcacaggaatggtggcctgcagactatggtcactatggtccattttttataagaatgacttggcatgctgctggaacatatagaagtacagacggccgaggtggaggtggaactggtgcacagagattcgctccattgaatagttggcctgataatggaaaccttgataaagctagacgactactttggccaatcaaacaaaaatatggcaagaaaataagttgggctgatctattaatattagccggcaatgtggcaattgagtccatgggtggaaagacctttggtttcagtggtggaagacctgatatctggggtccagaagaagatattcattggggtgttgaaa

SEQ ID NO: 210921 - DNA, 781 bp, Unknown
  Bacterial polypeptide expressing nucleotide sequence isolated from the Sargasso Sea
attgaggatagtggactaactattcaggagatggtcgaaactgcatgggctagtgcttcaacatttcgtggatctgatatgcgcggtggagcaaatggctctaggatacgtttagctcctcaaaaagattgggaggcaaataagccagaacagcttgcgcgagtattagcgatacttgaaggtattgctgcagatactggagcttcagttgcggatgtgattgtactcgcgggaaatattggcgtcgaacaagcttctggtgctgaagttccatttactcctgggcgtggagacgcgagtcaagagcaaacagatgttgactcatttgaagttctagaaccattttctgatggttttagaaattatcatgataaaaatcttgaagttacacctgaacaaatgttgcttgataaagctcaacttcttggcctcacggcccctgaaatgacagttttagttggaggtatgagatcactaggaattagttcagatggtcatggaatttttactgattctccaggaaagttaaccaatgatttctttgttaacttacttgatatgtcagtagagtggaaaccaacaggtagaaattcttatgaagctagtgatcgttcatcaggtgaaaagcaaagaactgctacaagggttgatcttgtttttggttctaactctcaattgcgagcattagctgaagtatatgcgactgataattcaaaacaaaaatttgtggatgattttgtcgctgcttggaataaagttatgaatcttgatcgtttttgat

SEQ ID NO: 210922 - DNA, 901 bp, Unknown
  Bacterial polypeptide expressing nucleotide sequence isolated from the Sargasso Sea
ccctttactggagcaggaacacctccgaagtttccaacgggcagaggtcaatctaatagagactggtggccaaacagtttaaatcttaaaatcttaagtcaacattcctctttagttgatccaatggaaaaaaaatttaattatgcaaaagaatttaaaaaactaaattttcaagcattaaaaaaagatttacataaattaatgacagactcacaggactggtggccagcggactatggtcattatggaggactttttattcggttagcgtggcatgcagcaggaacatacagaactggcgatggacgtggcggagctggaactggcaatcaacgttttgctccgttaaatagttggccagataatgtaaatctagataaagcaaggttattactttggcctattaaaaaaaaatacggtaaaaaaatttcatgggctgatctttttattttagttggaaatgtagctctagagtcaatgggatttaaaacttttggttttggaggaggtcgagaggatatttgggaaccagaagaagatatttattggggttcagaaaaagaatggcttggtgttaatcgttacagcggtaaaagagaacttgaaaatcctttaggagcatcacacatgggcttaatttatgtaaatccacaaggtcctgaagcaaacccagaccctgttttggctgcgcacgatattcgtgaaacttttggtcgtatggcaatgaatgattatgaaacagttgcgctgatagctggcggacatacttttggaaaatctcatggagccgctcctgaatcacataaaggtccagaaccagagggttcaaaaattcaagaacaagctacaggctggaatagcaattacaaaagtggtttaggtgttcatacaataagtagtg

SEQ ID NO: 210923 - DNA, 886 bp, Unknown
  Bacterial polypeptide expressing nucleotide sequence isolated from the Sargasso Sea
atgagtagagaactaattaaagaacaatcaaaatgtccgttcacaggagcaggcacaccttctaagcatcctactgggaaaggaacttccaatagagattggtggcctaacagtttgaatcttaaaatattgagtcaacattctcttttagttgatcctatggacaaaaaatttaattatgaaaaagaatttaaaaaacttaaacttaaatcattaaaaaaagatttacataaactaatgaccaattctcaagattggtggcctgctgactatggtcactatggacctctttttataagattagcttggcacgcggcaggaacatatagaactggtgatggacgtggtggcgctggaaccggaaatcaacgttttgctccgttaaatagttggccggataacgtcaatcttgataaagcaagattattgctttggcctattaaaaaaaaatatggtaaaaaaatttcttgggctgatctttttattttagttggaaatgtagccctagaatcaatgggttttaagacctttggatttggcggaggtagagaagatatatgggaacccgaagaagatatttattgggggtcagagaaagaatggcttggtgttaatcgttatagcggaaaaagaaatttagaaaatcctttaggagcatctcatatgggtctaatttatgtaaatccgcaaggtcctgatgccaatccagatcctcttttagcagcacatgatattcgagaaacttttggccgtatggctatgaatgattatgagacagtcgcgcttgttgctggaggacacacctttggaaaatctcatggtgcagcgccagaatcccataaaggtcctgaacctgaaggatcgaaaattcaagaacaagccacag

SEQ ID NO: 210924 - DNA, 899 bp, Unknown
  Bacterial polypeptide expressing nucleotide sequence isolated from the Sargasso Sea
aaaaaaattaatgactgactcacaagagtggtggccagccgattatggtcattatggcccactctttatcaggcttgcttggcacgctgcagggacttacagaactggagatggtagaggtggagctggaacgggtaatcaaagatttgcgccacttaattcttggccggataacgtaaatttagataaagctagattgcttttatggccaatcaaaaagaagtacggaagaaaaatttcatgggcagatttatttatacttgttggaaatgttgctctagactcaatgggtttcaaaacttttggtttcggagcaggtagaacagatatatgggaaccagaagatgatatttattggggttcagaaaaagaaatgctaggtgtagagagatatagtggaaagagggatttagaacagcctttaggagcatcgcatatgggtttaatttatgtgaatccacaaggtcctgatgccaatccagatcctatacttgcagcacatgatattagggagacatttggaagaatggctatgaatgactatgagacagcagcattggttgctggaggacatacatttggaaagtctcatggcgcagcatcggagtcgttcaagggtcctgatcccgaggcctcaaaacttcaagatcagtctactggatggaatagtggatacaaatctggaaaaggtgttgatacaataagtagtggtattgagggtgcttggactcaaaatcctattaaatgggatatgggctatttagattgtctatatggacatgagtgggagcttacaaaaagcccagctggtgctcatcaatggacacctaaaaaaaatggtcaagaaattaaaatggtaccagacgcacataaaaaaggtgtttgcatccacctatgat

SEQ ID NO: 210925 - DNA, 883 bp, Unknown
  Bacterial polypeptide expressing nucleotide sequence isolated from the Sargasso Sea
cctgaaccagaaggttcaaagattcaagatcaagcaactgggtggaatagtaactacaaaagtggtttaggtgtagatactataagcagcggtattgagggtgcatggacttcaaacccgattaaatgggatatgggatattttgataatttatttggctatgattgggaattaaccaaaagccctgcaggagctcatcaatggaaacctaaaagaaatgggcatgatatagaaatgacaccagatgctcatgatagatctaaaaaaaatcttccaatgatgcaaactactgacctttcattaaaattagatcctaaatatggaccaatttctaaacattttcatcaaaatccaaatgaatttgctaatgcctttgcaagagcttggttcaaacttactcatcgtgatatgggtccaaaagcaaattatcttggttctgatgttccaaaagaaaatttaatctggcaagatccaataccaaaaaataaatataaacttaaaaatagagatattgacttactcaagaaaaaaatatctaaatctggtttaactgtttcccagctagttacaactgcatgggcgtctgcatcaacttttagagggtcagataaaagaggaggtgctaatggagcgagaatagctctcgaacctcaaaaagattggaaagttaataatccttcaaaattgtctgccgtaatcagaatctttaataaaattaaaaaaggttttgattcaaaaaataaatcggtttcattagcagacttaatagttttagggggatcagttggtattgaaaatgctgctaaaaagagtggtaaaaaaattaaagttcctttcaaagcaggaagaggcgatgcaaaacaagatcaaacagacaaaaatt

SEQ ID NO: 210926 - DNA, 526 bp, Unknown
  Bacterial polypeptide expressing nucleotide sequence isolated from the Sargasso Sea
aatggatgatcaaagtataagtaaatgtcctgtaatgcatggttcagcaacacaaaatagtggtataagtacaacaaatcgagattggtggcccaaccaattaaatgtaaatattctacatcaaaatgataaaagatctaaccctatgagtatagactttgattacagagaagaatttaaaaaagtagattactttgctttaaaaaaagatctaacagatttaatgactgactcaaaagattggtggcctgcagattacggtcactatggacctttttttataagaatgacttggcatgctgctggtacatataggactgctgacggaagaggtggcggaggcactggtgatcaaagatttgcacctttaaatagttggcctgacaatgggaacttagacaaagccagaagacttttgtggccaataaaacaaaaatatggaaataaaattagttgggctgatttatttatattaacaggtaatgttgctatagagtcaatgggaggtaaaacttttggtttcagt

SEQ ID NO: 210927 - DNA, 740 bp, Unknown
  Bacterial polypeptide expressing nucleotide sequence isolated from the Sargasso Sea
tttaaaattgatcatgattatagaaaagaatttttaaagttagattattttgctctcaaggatgaccttagaaaccttatgacagattcgaagacatggtggcctgctgattttggccactatggtccattctttataagactcacttggcatgcagccggaacatacagaactggtgacggtcgtgggggagcaggtactggtgcacaaagacttgcacctctaaatagttggcctgataatggaaatttggataaagcacgaagattgctctggccaattaaacaaaaatatggaaaaaaaattagctgggctgatttattggtcttagcaggaaatgttgctattgagtcaatgggtggaaaaacgtttggtttcagtggtggccgtacagatatttggtctccagaagaagacattttttggggtgttgaaaaaggatggttagacaataatcggtataaaggtaaaagagagttggatatacctttagctgcagtgcaaatgggattaatatatgttaatcctgaaggccctgacggaaatccagatccattggcaagtgctcatgatattcgagaaacctttgcgagaatggctatgaatgatgaagaaacagttgcattagttgctggtggtcacacttttggtaaagcccatggtgcaggaaatcctgatttagttggagccgagcctgaaggtgcgcccattgagcaaatgggacttggctggaaaaatga

SEQ ID NO: 210928 - DNA, 776 bp, Unknown
  Bacterial polypeptide expressing nucleotide sequence isolated from the Sargasso Sea
agaaccggcgatggtagaggtggtaccagagaaggacagcatagatttgctcctcagaatagttggcccgataatgccaatttggataaagctagaagactcatctggcctataaaacaaaaatatggtaataaaatttcttgggcagatttaatgatattgacaggaaatgttgcattagaatctatgggttttgagactctaggttttgctggtggaagagaagatgtttgggagcctgcaggtaatatctattgggggatggaagaaaaatggcttgaggatggtcgctattctggaaatcgagaattagagaaaccgcttgctgctgtacaaatgggattaatctatgttaacccagaaggaccaaacggcaatcctgatccaattgcagcagctaaggatattcgtgaaacctttggaagaatgggtatgaatgatgaagaaactgtcgcactaattgcaggcggtcatactttaggcaaaactcatggagctggtgctgcttctcatgtaggagtcgaacctgaggctgcagccattgaagaacaaggttttggatggaagagtaattataaatcaggtaaaggagctgatgctataacctcaggtttagaggttatatggacttcaacgccaacaaaatggaatcatacctattttaaaatgctctttgataatgagtgggagctaacaaaaagtccagctggtgcgaaccagtgggtagctaaagatatgggcgccatattcccagatgcttttgatgaaaataaaaa

SEQ ID NO: 210929 - DNA, 893 bp, Unknown
  Bacterial polypeptide expressing nucleotide sequence isolated from the Sargasso Sea
catggggtattttgattgcttatttaatcatgaatgggaattaacgaaaagtcctgctggtgcccatcaatggacaccgaaaaaaaatggacaagaaataaaaatggttccagatgcattcgattcaaataaaaaacatcctccaatgatgcaaacaacagatctttccttaaggatggatcctagttatggcccgatttcaaaaaattttcacgaaaatccagatgaatttgcagatgctttcgcaagggcatggtttaaacttactcatagagacatgggaccgaaagtaaattatctaggtccagaagttcccaaagaacaattaatttggcaggatccaatcccaaaagctaaatacaaattaaataaacaagatattaatgctttaaaatctaaaattttaaagtctggtttgactatttcggaattagttaaaactgcctgggcgtcagcttcaacctttagaatttccgataagagaggtggagcaaatggagctagaattaggctatctccacaaaaagattgggaagtaaatagtcccaagaagcttagcaaagttataagtgtttatgaaaaagtaaaaaaaagcttcgataataaaaagaaatccgtttctatagctgatttaatagttcttggaggatgtgccgctattgagaaagccgcaagtaaagcaggcaataaaatcaacgttccatttactccaggtcgaggtgatgcaactcaagatcagactgatgcattttcgtttgatttattaaaacctaaagctgatggtttcagaaactacaaatactcaaatggatcaaaaatttctgctgaagaaatgcttatagataaagctaacttaatggaacttacaggtccaaaaatgactgtactagttg

SEQ ID NO: 210930 - DNA, 490 bp, Unknown
  Bacterial polypeptide expressing nucleotide sequence isolated from the Sargasso Sea
atggatgatattggcaaatgtccagtaatgcatggctcagtcacgacaaatagcggtgtaagcacaacaaatcgtgattggtggccaaaccaacttaacctaaatatacttcaccaaaatgataagagatcaaatccaatgagtttggattttgattatagagaagaattcaaaaaacttgattatcaggctttaaaaaaagatttacatgatttgatgacagactcccaggattggtggcctgctgattatggtcattatggtcctttcttcattagaatgacttggcatgctgccggaacatacagaactagcgatggtcgtggaggtggaggaactggtgatcaaaggtttgccccactgaatagctggcctgataacggtaacttagataaggcaagaagattgttatggcctattaagcaaaaatatggaaataaaatcagttgggctgaccttttcattttaactggaaacgttgccatcgaat

SEQ ID NO: 210931 - DNA, 868 bp, Unknown
  Bacterial polypeptide expressing nucleotide sequence isolated from the Sargasso Sea
tatagaacaggagatggtagaggaggagctggtactggaaatcagagatttgctccaataaatagttggccggataatgtaaacttagacaaagcaagacttcttctatggcctataaaaaagaaatatggaaaaaatatttcatgggcagacttatttatattagttggaaatgttgcacttgagtcgatgggatttaaaacttttggttttggtggtggaagagaagacatctgggagcctgaggaagatatatactggggctctgaaaaagaatggcttgctaataatagatatgattcaaaaagagaattagaaaatccacttggagcagttcaaatgggtttgatatatgtaaatccacaaggaccagatgggaatccggacccattattagctgctagagacattagagaaacatttgggagaatggcaatgaacgattatgaaatagttgcacttgttgctggagggcacacatttggtaaatcacatggcgcagcacctgaatctcacaaaggcccagaaccagagggatctaaaatacaggaccaatcgactggatggaacagtaattataaaagtggacttggatcagatacaataagtagtggaattgaaggcgcatggacttcaaatccaataaaatgggatatgggatattttgataacctttttggatatgagtgggaattaaccaaaagtcctgcaggagcacatcaatggaagcctgtaaaaaatggacatgctccaaacatgacacctgatgctcatataaaaggaaagaaaaatttaccaaatgatgcaactacagactttatcatgagatttgatcctgagtttggaagattttctaacactctataat

SEQ ID NO: 210932 - DNA, 871 bp, Unknown
  Bacterial polypeptide expressing nucleotide sequence isolated from the Sargasso Sea
tatgatgcgttaaagaaagatctgactgatctaatgactgattctcaagattggtggcccgctgattatggacattatggaccttttttcattaggatgacttggcacgcagcaggcacatatagaaatactgatggaagaggcggtggcggaactggcgcccaacgttttgctccccttaatagctggcctgataacggaaatctagataaggcaagaagacttttgtggccaattaaacaaaaatatggaaaaaaaataagttgggcagatttattaattcttgctggcaatgttgcaattgaatcaatgggaggaactacatttggttatagtggcggaagaccagacatatggggtcctgaagaagatattcattggggaattgaatcagaatggttagaaaacaaaagatataaaggagaaagggaattagataatccattagcggctgttcaaatgggactgatatatgtaaatcctcaaggtccagatggaaaccccgatcctctagcaagtgcgcatgacatcagagagacttttggaagaatggcaatgaatgatgaagaaactgtagcattagttgcaggaggccatacttttggtaaggctcatggcgctggtgcagaagatcatgttcaatctgaaccagagggcgctcctctagaagaaatgggttttggatggtcaagtacttatgcatcaggtgtaggtagcgatacaattacaagtggtattgaaggtgcttggacagcaaatccaactcaatgggataacggatatttcgatttgttatttggttatgattgggaactaactaaaagcccagcaggcgctcatatttggcatgctgttggtcaaaccgaggaag

SEQ ID NO: 210933 - DNA, 742 bp, Unknown
  Bacterial polypeptide expressing nucleotide sequence isolated from the Sargasso Sea
gaatagagactggtggccaaaccagttaaatttatcaattcttcatcagcatgatcaaaaatctaatccaatgaataaagattttgattatagagaagaatttaagagcattgattatactgctttaaaaaaagatcttacaagtcttatgacagattcacaagactggtggccagctgattatggacattatggtcctttttttattcgtatgacatggcatgctgctggaacttatagaacaggagacggtagaggaggcggtggaactggagcacagagatttgcccctctgaatagttggcctgataacggaaaccttgataaagcacgaaggctgctttggcctattaaacaaaaatacggcaataaaattagttgggcagacttattgatattagcaggaaatgttgcaatagaatcaatgggtggaaaaacatttggttatagtggtgggcgtccggatatatgggcccctgaagaagatatttattggggcgttgaaaaagagtggttagaaaataaacgatacaaaggagaacgtcaattggacaatcctttagctgccgttcaaatgggtttaatttatgttaatcctgaagggccagatggaaatcctgatccccttgctagtgcaaaagatattcgcgaaacttttggtagaatggctatgaatgatgaagagacagtagctcttactgctggcggtcatacatttggtaaagcacatggcgctggagac

SEQ ID NO: 210934 - DNA, 832 bp, Unknown
  Bacterial polypeptide expressing nucleotide sequence isolated from the Sargasso Sea
aggtcttgaaccagaaggctctagaatacaagaccaatctactggatggaatagtaattataaaactggtctcggagcagatacaataagcagtggcatagaaggagcttggacttctaacccaattaaatgggatatgggttattttgacaatctatttggttatgagtgggaattaactaaaagcccagctggtgctcatcaatggaaaccaaaaaaaaatggacacgctccaaatatgactccagatgcccatattaaaggtaagaaaaacctaccaatgatgcaaacaactgatttatcaatgagatttgacccggaatttggaagaatttcaaaacattttcacaacaatccagatgagtttgctgatgcttttgctcgtgcttggtttaaacttacacacagagatatgggacctaaaataaattatttgggaactgaagtaccaaaagaagatttaatttggcaggatccagttcctaaaaacaaatctaaacttaaaaacaaagatattgagactttaaaatcaaaaatttctaattctggactttcagtttcacaattagtatctacagcatgggcatctgcctccacctacagaggatcagataaaagaggaggtgctaatggtgcacgtttaagactatatccacaaaaggattggaaagtaaataacccatctcaactttctacagtaattaaagtatacgaaaaaattcaaaagaaatttaattctaaaaaaaaatatgtttcactagcagatttaatagttctaggcgggaatgtaggaattgaaaaagctgcaaaaagtgcaggtaaaaagattaaa

SEQ ID NO: 210935 - DNA, 829 bp, Unknown
  Bacterial polypeptide expressing nucleotide sequence isolated from the Sargasso Sea
tctaagtattttcatcaaaatccaaatgaatttgctgatgcctttgcaagagcttggttcaaacttactcatcgtgatatgggtccaaaagcaaattatcttggttctgatgttccgaaagaagagctaatttggcaagatccaatcccaaaaaataaatataaacttaaaaataaagatattgaattattaaagaaaaaaatatccaaatctggtttgtccacttctcagctagtcacaactgcatgggcatctgcttctacttttagaggatcagataaaagaggaggagctaatggagcgagaatagctcttgaacctcaaaaaggctggaaagttaataatccttcaaaattatcagctgtaattaaagttttaaataaaattaaaaaagattttgattcaaaaaaaaaatcggtttcattagcagacttaatagttctaggaggatcagttggtattgaaaatgctgctaaaaagagtggtaaaaaaattagagttccattcgttgcaggaagaggcgatgcaaaacaagatcaaacagacaaaaattcatttaatcttcttgaacctatagcagatggttttaggaactatattaaaatgcatgccaaaggatataccaatggaaaaggtatcccaactaattcagctgaagaaatgttgatagataaagctcaacttcttggactaactggcccagaaatgacagttttaattggaggtatgagagtattaaatactaactatgatggttcagattatggtgtatttacaaaaaaacctggaacattaaccaatgacttttttgttaatctattagatagaa

SEQ ID NO: 210936 - DNA, 574 bp, Unknown
  Bacterial polypeptide expressing nucleotide sequence isolated from the Sargasso Sea
gatcgaggtgggcgtgctggagctcaatcgcaacccggacaaccatttcgccgaggtagagcaggccgcgttctcgcctgccaatgtcgtacctggcattggcttttcaccggacaagatgttgcaggcgcgtctgttctcctacggcgatgcccagcggtatcggctgggtgtcaacttcaacctgatcccggtcaatgcgccgcgctgcccataccacagctaccaccgggacggtcagatgcgcaccgacggtaatcagggctcgaccatcgcccattaccccaacagtcagggcgaatgggaggatcggcaggaactgcgcgagccgccgttaccactgcaggggagcgcgaccaactgggatcaccgcgtcgacgatgaccactttcagcagccgggggatctgttccgcctgatgagcccggcgcagcggcaggtgttgttcgagaacacggccagggcgatgggcgacgcatccgctgagatcaaacggcgccatatcgccaattgcagcaaggctgatcccgcttatggggcaggggtggccagggcgctgggtttgggtgactga

SEQ ID NO: 210937 - DNA, 914 bp, Unknown
  Bacterial polypeptide expressing nucleotide sequence isolated from the Sargasso Sea
aaaaagaatatcatgggctgatttatttatattggtggaaaatgtagctctagagtcgatgggttttaaaacatatggattcggtggtggtagagtagatatttgggaaccagaggaagatatttattggggctcagaaaaagagtggcttgctaataatagatataattcaaaaagagaattagaaaatccacttggcgcagtgcaaatgggtttaatttatgttaatcctcaaggtccagatgggaacccagatccgttgttagctgctagagatattagagaaacatttggaagaatggcaatgaatgactacgaaatcgtagcattagttgctggaggtcatactttcgggaaatcacatggagcagctcctgaaagtcataaaggacctgagccagaaggctctagaatacaagatcaatctactggatggaatagtaactacaaaactggtcttggagcagatacaataagcagtggaatcgaaggggcatggacttcaaatccgataaaatgggatatgggatattttgataatttatttggttatgaatgggaattaacaaaaagtcccgcaggagctcatcaatggaaaccagtaaaaaatggtcatgttcctaatatgacgccagatgctcatataaaaggtaagaataacttgccaatgatgcaaacaaccgatttatctatgcgttttgatcctgagtttggaagaatttcaaaatattttcataacaaccccgatgagtttgcggatgcttttgcacgtgcttggtttaaattaactcatagagatatgggtccaaaaataaactacttaggaaacgaagttccaaaagaagatttgatttggcaagatcaagttccaaaaaataaattcaagcttacaaataaagacattgagacttaaa

SEQ ID NO: 210938 - DNA, 940 bp, Unknown
  Bacterial polypeptide expressing nucleotide sequence isolated from the Sargasso Sea
aacagaaaacaaaggtttgcaccactttatagttggccggacaatgttaatttagataaagctagacttcttctttggcctataaaaaagaaatatggaaaaaaaatttcttgggccgatttatttgttttgattggaaatgttgcgcttgaatcaatgggatttaaaacttttggttttggtgcaggaagagaagatatatgggaacctgaagaagatatatattgggggtcagaaaaagaatggcttggagtaaaccgttatagtggaaaaagagaattagagaatccgttaggagcttctcacatgggtttaatttatgttaacccacaaggtcctgatgcaaatccagaccctttacttgctgcgcatgatattcgtgaaacattcggtagaatggctatgaacgactatgagactgtagcattagttgcaggaggacatacttttgggaaatctcatggagcagctccagaatcgcataagggtccagaaccggagggatcaaaaattcaagatcaagctactggctggaatagtaattacaaaagtggtttaggagaggacacaataagtagtggtattgaaggagcatggactagtaatcctatcaaatgggatatgggttattttgataatctttttggatatgagtgggagctctcaaaaagtccagctggtgctcaccaatggaagccaattaaaaacggtaaggctataaatatgacacctgacgctcacatcaagtcaaaagaaaatttaccaatgatgcaaacaactgatttatccttaaaattagatccatcttatggaccaatttctagacatttccataataacccagaagagtttgctgatgcttttgctagagcttggtttaagcttacgcatcgtgatatgggacctcgtgcatgctacttaggacctgaagtccaaaaga

SEQ ID NO: 210939 - DNA, 884 bp, Unknown
  Bacterial polypeptide expressing nucleotide sequence isolated from the Sargasso Sea
gaacttgagaatccgctaggagcctctcatatgggccttatttacgtaaatcctcaaggccctgatgcacatccagatccaattttggctgctcatgatattagagaaacatttggtcgtatggcgatgaatgattacgaaacagtcgctcttattgctggaggacacacttttggaaaatctcacggagcagcgtcagagtctcataaaggaatagagcctgaaggttcaaaaatacaagaacaagccacaggatggaatagtgattataaaagtggaaaaggaattgatacaataagcagtggtttagaaggtgcttggactcaaaatcctaaaaaatgggatatgggatattttgataatttatttcaatatgactgggaactaacaaaaagtccagctggtgcccatcaatggacacctaaaaaaaatggtcatgcaattaaaatggttcccgatgcgcatgatagaactaaaaagcatgcaccaatgatgttaacaactgatctttcaatgagaatggatcctaaatatggaccaatttcaaaacattttcataaaaatccaaaagaatttgctgatgcttttgctagagcttggtttaaactaacacatagagatatggggcctagaccctgttatttaggaccagaagttccaaaagaaaaattaatttggcaagatcctgtaacaaaacctaaatacaaacttaaaagcaaagatatcaaaatcctaaaagcgaaaataattaagtctggtctttcaatttcacagttagtatcaactgcatgggcatcggcttcgacttttaggggttctgataaaagaggtggagctaatggtgctagaataagattgttgccacaaaaagaatgggaagtaaa

SEQ ID NO: 210940 - DNA, 787 bp, Unknown
  Bacterial polypeptide expressing nucleotide sequence isolated from the Sargasso Sea
gctgaaagcaatctaactatacaagaactagttgaaacagcatgggcaagtgcttcaacatttcgtagttcagatctaagaggcggagcaaatggcgcaagaattcgtcttgcaccacaaaaggactgggaggcaaataagcctgaacagttgtctcgtgttcttggagtgcttgaaaatattgcttcagaaacgggagcctctatcgctgatgtgatagtacttgcaggaaatgttggtattgaaaaagcttcaggagcaagcgtatcgttcacaccaggccgtggagatgctacgcaggaacatacggatgaacactcgtttgcagttcttgagcctgtttcggatggatttagaaactaccataaaaaaggatttgatattaattcggagcatatgctggttgataaagcacaattactaggactgaccgcatcagagatgacggtccttattggcggaatgagagcacttggtatcagcgcagatgggcatggtgttttcactgatacagcaggtaaactaacaaatgattggtttgtaactctgctagacatggatgttgaatggaaagcaacaggcagaaacacatatgcagctaaacatcgtacgactggtgatgaaataaggacagcaacaaggtctgaccttgtttttggttcaaactctcagctaagagctttggccgaggtctatgctgcagacgggtcgcatgataagtttgtaaaggattttatcagtgcctggaccaaggtaatgaaccttgaccgttttgatcaggcttaaa

SEQ ID NO: 210941 - DNA, 686 bp, Unknown
  Bacterial polypeptide expressing nucleotide sequence isolated from the Sargasso Sea
tatgaatgatataagcaaatgtcctgtgatgcatggtgccataactagtaacagcagtgctggaacatctaataaagattggtggcctaatcaattaaatctaaatattcttcatcagcatgacaaaaagtcgagtccaattaataatggatttaattacagaaaagaatttaaaaaacttgattatcaatcactaaaaaatgatcttctaaagcttatgactgactcacaagattggtggccagctgattatggacattatggccctttttttattcgtatgacttggcacgccgctggtacttacaggaccggcgatggaagaggtggcggaggaactggggcgcaaagatttgccccccttaatagttggccagataatggaaacttagataaagcaagacgtcttctttggcctataaaacaaaaatatggaaataagattagctgggctgatttagtgattttagccggcaatgttgctattgaatccatgggcggcaaaacttttggttatagtggtggccgcgaagacatttggtctcctgaagaagatatttattggggcaaagaaacagaatggcttgaaaacaaccgatatactggtgaacgtaatctcgaaaatcctcttgctgcagttcaaatgggtttaatttatgttaatccggaagggccagatggaaacc

SEQ ID NO: 210942 - DNA, 972 bp, Unknown
  Bacterial polypeptide expressing nucleotide sequence isolated from the Sargasso Sea
ttgatgaaagatacacaagattggtggcctgcagattatggccattacggtccattttttattcgtcttgcttggcatgctgctggaacttatcgaacaggagatggaagaggtggtgctggaactggaaatcaaagatttgcaccattaaacagttggccagataatgtaaatttagataaagcaagacttttgctatggcctattaaaaagaaatatggaagcaaaatatcttgggcagatctatttatacttgttggaaatatatctctagagtcaatgggctttaaaacttttggatttggtgcaggtagagaagatatttgggaaccagaagaagatatttattggggttctgaaaaggaatggcttggagtaaatcgttatagcggaaaaagagaattggaaaatcctttaggtgcatcacatatgggcttaatttatgttaatccccaaggacctgatgctaatccagatccttatttagctgctcatgatattagagaaacttttggacgtatggcaatgaatgattacgagacggttgcactcgttgcaggaggacatacatttggaaaatctcatggtgctgctccagagtcacataagggtcccgaaccagaaggttcaaagatccaatatcaggcaactggttggaatagcaactacaagagtggtttaggagttgatactattagtagtggtattgagggtgcatggacttcgaaccctattaaatgggatatgggatattttgataatttatttggatatgattgggaattaactaaaagcccagcaggagctcatcaatggaaaccaaaaaagaatgggcgtgcaatacaaacaacaccagatgcccatgacagatctaaaaaaaatcttccaatgatgcagactactgatctttcattaaaattagaccctaaatatggtccaatttctagacatttcatcaaaatccaaaggaat

SEQ ID NO: 210943 - DNA, 826 bp, Unknown
  Bacterial polypeptide expressing nucleotide sequence isolated from the Sargasso Sea
gttgaaaaatctttccatggaaaattcaaaaaaaataaagattggtggccaaatcagcttgaccttggcgtgcttagagaacagtcttcattaaccaatccgatgggtgaagagtttgattatgaaaaagcatttaatagtttagattatcaagctttaaaaagtgacataaaagatttaatgacagagtctaaggactggtggcctgcagactatggtcattatggtggattaatgataaggatggcttggcatagtgcaggtacctataggacaggagatggtagaggtggaactcgtgaaggtcaacatcgatttgctccacaaaatagttggccagataatgctaatttagataaggctagaagattagtatggcctattaaacaaaaatatggaagtaaaatttcatgggctgacttaatgattttatcagggaatgttgctcttgaatctatgggtttcaaaacacttggatttgctggtggaagagaggatatctatcaaccagctggtagtatttattggggttcagaagaaaagtggctaggcgatgataaaagatataaaggtgagagagagcttgagaagccacttgctgctgtccaaatgggacttatttatgttaatccagaagggccaggtggaaattctgacccattagcagctgcgaaggatattcgtgagacatttggaagaatgggaatgaacgatgaagaaacagtagcacttattgctggtggtcatacactagggaaaactcatggagctggtaaaacttctcatgttggggcagctcctgaaggtgctggcatcgaggaacagg

SEQ ID NO: 210944 - DNA, 910 bp, Unknown
  Bacterial polypeptide expressing nucleotide sequence isolated from the Sargasso Sea
cgtatggctatgaatgactatgaaacagtagcacttatagctggaggacatacttttggaaaatgtcatggtgcggcttctgaatcacataaaggtcctgaaccagaaggctcaaaaattcaggaacaagcaactggatggaacagtagctacaaaagcggtattggtgttgatactattagcagtggacttgaaggagcttggacacaaaacccaaaaaaatgggatatgggttacttagataatttatttcaatatgattgggaactaacaaaaagcccagcaggtgcacatcagtggaaaccaaaacaaaatggccatgctataaaaatggttccagatgcacatgaaaaatcaaaaaaacatgcgccaatgatgttaactacagatctttctttgagaatggatccaaaatacggtccgatttctaagcattttcatgaaaatccagatgagtttgctgatgcttttgcaagagcatggttcaaacttacccatagagatatgggccctcgttcgtgttatttaggtccagaagttccaaaagaaaaactaatttggcaggatcctattgcaaaaaataaatacaaacttaagaaaaaagatattaaaactcttaaaacaaaaatattaaaatcaggaatttctatttcagagctagtaaaaacagcttgggcatctgcttcaacatttagaggttctgacaaaagaggtggagccaatggggcgaggataagactatctccgcagaaagactggaatattaacaatccatctgaactatcaaaagttattaaatcttatgaaaaaattaaaaaaggatttgatacaaagaaaaaagttgtatcaatagctgatttaatagttttaggtggatgtgctgcaattgaaaaagctgccaaaaaagcag

SEQ ID NO: 210945 - DNA, 501 bp, Unknown
  Bacterial polypeptide expressing nucleotide sequence isolated from the Sargasso Sea
catggatggtgaaaacagatgccctgtaatgcatggggctttgacgaatgcagccgctggcggtaccacaacacgggattggtggcctaaccagcttaatctcaacatcctgcatcagcattctgcccaggcagatccgatggatccggattttgattacgccgaggctttcaatgcgctcgattacaaggcgctgaaacaggatctgcatggtctcatgaccgactcgcaggattggtggccagccgattatgggcattatggtccgtttttcatccgcatgacatggcacgctgccggcacttacagaaccgcagatggccgtggtggcggtggcacgggtgcgcagcgttttgcgccgctgaacagctggcccgacaatggcaatctggacaaagcgcgtcgcctgttgtggccgattaagcagaaatacggcaggaatatcagctgggctgatctgctgattctagctggcaatgtcgccatcgaatccatggggtg

SEQ ID NO: 210946 - DNA, 742 bp, Unknown
  Bacterial polypeptide expressing nucleotide sequence isolated from the Sargasso Sea
gatgagtaaggtaccccctttaaccaatgccacaggcgccccggttcccgacaataccaataccatgactgcaggcccacgcggcccggctttattacaggatatctggcttttagagaagttggcccattttgatcgcgaagtgatacctgagcgtcgtatgcatgccaaaggcgctggtgcttacggcaccttcacagtcactcacgatattagccgttacaccagagctaaattgttttctcaaattggaaaaaagactgatgtatttttacgcttctccactgtagcaggcgaacgtggcgcggctgatgccgaacgggatattcggggttttgctgtaaagttttataccgaagaaggtaactgggatattgtcggcaacaatacgccggtgtttttctttcgtgatccaatgcgctttcctgacttaaaccacgcggtaaaacgtgacccccgcacaggcttacgcagtgccgaaagcaactgggatttttggactttattgcctgaggctttgcatcaggtcaccatagtgatgagtgacagaggtattccagcaacataccgccatatgcacggatttggcagccatacctttagttttattaacgccgccaatgaaagatattgggtgaagtttcattttcactcccagcaaggtattaaaaatctgagtgctgaagagtcggaaaaggtgataggcaaagacagggaaagccatttacgcgatttgtacgac

SEQ ID NO: 210947 - DNA, 666 bp, Unknown
  Bacterial polypeptide expressing nucleotide sequence isolated from the Sargasso Sea
aatggatccaaaatatggaccaatttcaaaacattttcataataatcctgaggaatttgcagatgctttcgctagggcctggtttaagcttactcatagagatatgggtcctaagtcttgttatttaggtcctgatgttccaaaagaaaatctaatttggcaagatccaatagctaaacaaaagtataagttaaaaaataaagatattaaattcttgaagtctaaaattttaaaatctagtctttcagtttccgaacttgtttctactgcatgggcctcagcatcaacttttagaggttctgataaaagaggtggagcaaacggtgctagagtaagactagaaccacagagaaactgggaagttaacaatccaaaaaaactgtcaaaagttcttcataaatttgaaaaaatcaaaaaaaattttgacaataaaattaaaaatgtatcacttgctgatttaatagtattaggtggatgtgttggaatagaaaaggctgcaaagaaagccggttataaagtaaatgtaccttttacgtcaggacgaggggatgctttgcaaaatgaaactgacgaattctcttttggtttattagagccaaaagctgacggatttagaaattacgtaacaagaaaaactaacggtcatggtaaaagctcaatttcggc

SEQ ID NO: 210948 - DNA, 799 bp, Unknown
  Bacterial polypeptide expressing nucleotide sequence isolated from the Sargasso Sea
aatgaacgaaaaatcaaaatgtccattcacaggagcaggaactccacctaagtttccaactggtagaggtacttctaatagagattggtggccaaacagtttaaatcttaaaattttaagtcaacattcttccttagttgatcctatggataagaaatttaattatgaaaaagaattcaaaaaacttaactttaaagcactaaaaaaagatttacaaaaattaatgacggactcaaaagactggtggcctgctgactacggtcattatggaggactttttattcgattagcgtggcatgctgctggaacatacagaactggcgacggacgtggtggcgcaggaacgggcaatcaacgttttgctccactaaatagttggccagataatgttaatctagataaaggaagattgttactttggcccattaagaaaaagtatggtaaaaaaatttcatgggccgatcttttcattctagttggaaacgtagctttagagtcaatgggttttaaaacttttggatttggtggaggccgagaggacatttgggaacctgaagaagatatttattggggatcagaaaaagaatggctcggcgttaaccgttatagtggcaagcgagatcttgaaaatcctttaggtgcaactcatatgggcttgatttacgtaaatccacaaggtcctaacgcaaatccagatcctcttttagcggctcatgatattcgcgaaacttttggtcgtatggcgatgaatgattatgaaacagtggcacttatagctggtgggcatacttttggaaaa

SEQ ID NO: 210949 - DNA, 829 bp, Unknown
  Bacterial polypeptide expressing nucleotide sequence isolated from the Sargasso Sea
aaaaaaaaatatggaaaaagaatttcatgggcggacttatttattttggtcggaaacatttctttagagtcaatgggttttaaaacatttggttttggtgctggtagagaagacatttgggaaccagaagatgatatatattggggatcagaaaaggaatggctaggagtaaatcgatatagtggaaaaagagatttagaacagccactaggagcatctcacatgggtttaatttatgttaacccacaaggaccagatgcaaaccctgaccctttgcttgccgcacacgatattcgtgaaacttttggccgaatggcaatgaacgactatgagacagttgccttggttgcaggaggacacacttttggtaagtctcatggggcggcgccagagtcacataaaggacctgagccagaaggatctaaaattcaagaacaagcgactggttggaatagtaattataaaagcggtttaggagtagacactataagtagcggcatagaaggagcttggactactaatccaataaaatgggatatgggttattttgataatttatttggctatgaatgggaacttacaaagagtccagcaggtgctcaccaatggaaacctaaaaaaaatggtcatgatattgaaatgacaccagacgcacatgaaaaaaccaaaaaaaatcttccaatgatgcaaacaactgatctatctcttaaaatggatgaaaattatggaccaatttcaagacattttcataataatccgaaagaatttgcagatgcttttgcaagagcttggtttaaacttacacatcgtgatatgggtcccaaagcat

SEQ ID NO: 210950 - DNA, 692 bp, Unknown
  Bacterial polypeptide expressing nucleotide sequence isolated from the Sargasso Sea
aatggttaatccaatggataaaaaatttaagtattctaaagagtttaaaaaattaaattataaaggtcttaaaaaagatttagtaaaattgatgacacagtctcaaagttggtggcctgcagattatggtcattatggtcctttatttataagactagcatggcatgcagcaggtacttatagaacaggagatggtcgtggtggtgctggaaccggtaatcaaagatttgcaccacttaatagttggccggataatgtaaatttagataaagccagacttcttttatggccaataaaaaaaaaatatggaaaaaaaatttcttgggcagacttatttgttttaatagggaacgttgcgctcgagtcaatgggatttaaaacttttggttttggtgctggaagagaggatatttgggagccagaagaagatatatattggggatcagaaaaagaatggcttggagtaaatcgttatagtggaaaaagagaattagagaatccgttaggggcttctcacatgggattaatttacgttaacccacaaggtccagatgcaaacccagaccctttactagctgcgcacgacattcgcgaaacatttggaagaatggccatgaatgactatgaaactgtagctttagttgcaggaggacatacttttggtaaatctcatggagcagctccagaatcac

SEQ ID NO: 210951 - DNA, 777 bp, Unknown
  Bacterial polypeptide expressing nucleotide sequence isolated from the Sargasso Sea
gtcgggtgcgttcggtacctttaccgttacacacgacgtcacacgatacacccgggcaaaaatattctcgcgcattggtaagacgacggagatgtttgctcggttctcgacggttgcaggagagcgaggggcagcagacgccgagagagatattcgcggcttcgctctgaagttttatacggaagaggggaattgggatctggtcggaaacaacacaccggtcttctttttgagagatcctctgaagttccctgacctcaaccatgcaatcaagcgcgacccgcggaccggcctgcgaaatgccgaaagcaactgggacttctggacgcaactaccggaggctttgcaccaggtcacaatcgtgatgagcgaccgcggtattccgcgctcgtaccgccacatgcatggctttggtagccatacgttcagcctcatcaatgcgagcaacgaacggttctgggtgaagttccatatgcgcagcgagcagggaatcgaaaacctgaccgacgaggaagctacgcggatcatgggttccgaccgcgaaagtcaccaccgcgacctctacgagagcatcgaggcgagacagtttccgaggtggaacctgtacttccaggtaatgccggagagtgaggcttccgcgtacaaggtgaatccgttcgacctgacgaaggtctggtcgaagaaggactacccacttatcgaggtagggtacttcgaactgaaccgtaacgcggagaactggttcgcagacgtagagcaggctgccttcaatcctgc

SEQ ID NO: 210952 - DNA, 816 bp, Unknown
  Bacterial polypeptide expressing nucleotide sequence isolated from the Sargasso Sea
tatgagcggagaattaattaaagagcaatcaaaatgtccattcacaggcgcagggacaccggcaaagcatccgactgggagaggcacatccaatagagattggtggccaaatagtttaaatctaaaaattctaagtcaacattcttctttagttgatccaatgggacaaaaattcaattatttaaaagagtttaaaaaacttaactacaaagcactaaaaaaagatttaaataaattaatgaccgactcacaagattggtggcccgcagactatggtcattatggacctttatttattagattggcctggcatgccgcaggaacctatagaactggtgatggcagaggtggtgctggaactggaaatcaacgttttgctcctttaaatagttggccagataatgtcaatttagataaagcaaggttattactttggcctattaagaaaaaatacggcaaaagaatttcatgggccgatctatttattctaattggaaatgttgcgttagagtcaatgggatttaaaacttttggttttggtggaggaagagaagacatttgggaacctgaagaagatatatattggggatctgaaaaagaatggctaggagtgaatcgatatagtggtaagagagaactcgaaaatcctttaggagcatctcatatggggttaatatatgtaaatcctcaaggtcctgatgcaaatccagaccctattttagctgctcatgatattcgtgaaacgtttggacgtatggctatgaatgattatgaaacagttgctcttgtagctggaggacatacatttggtaaatc

SEQ ID NO: 210953 - DNA, 903 bp, Unknown
  Bacterial polypeptide expressing nucleotide sequence isolated from the Sargasso Sea
cctgaagttccaaaagagcaattaatttggcaagatccgattacaaaacctaagtacaaacttaaaaataaagatattaaaactttaaaaacacaaatattgaaatcaggtctttcaatttcgcagctagtatcaacagcttgggcatcagcttcaacttttagaggttcagataaaagaggaggagctaatggagccagaataagtttggcaccccaaaaagattgggaagttaataatccatctaagctttcaaaagtaattgaatctttaaaaaaaataaaaaataaatttgataaaaaaaagaaagaagtttcacttgctgatctaattgtattgggtggaaatactgctattgaaaaagctgctaaaaaagctggacacaaagtaaaggtaccattcacttcaggtcgaggagatgcattacaaaatcaaactgatatattttcattcagtttactggaaccaaaagctgatggttttagaaattatattacaaaaaatactaatggttcttcaaataaaccaacagtatctgcagaagaaatgttaatagataagtcgcagttaatgaaactaagcgcacctgaaatgacagttttagttggaggtatgcgtgtattaaatactaattttgacaaatctaatcatggagtttttacaaagaatactgaaatacttacaaacgatttttttgttaatctacttgatatgagtacaacttggaaagaagttgataataatgagcaattatttaaaggaagagatcgtaaatcaaataaagttaagtggacagctactagagttgatctaatctttggttcaaactctcagcttagagcaatatctgaagtttatgcgttagaagattctaaaaaaaaatttgttaatgattttgtttct

SEQ ID NO: 210954 - DNA, 728 bp, Unknown
  Bacterial polypeptide expressing nucleotide sequence isolated from the Sargasso Sea
gatgagtaccaagaagccagccaccccgcccaagagtgaactcgcgggcactgataccctggaccgagggaataccaacgccaaactgcaggcattggaagaattccgttccgacgcgaccggccaggccctgcgcaccaaccagggcgtgaagatttccgacaaccaaaacagcctgaaagtcggcgcccgcggcccttcgctgctggaagacttcatcatgcgtgaaaagatcacgcactttgaccatgagcgtatccccgagcgcatcgtgcatgcccgtggtaccggcgcccatggttacttccagagctatggcgaccactcggcactgaccaaggccggtttcctgcgcacgcctgaacacaaaaccccagtgttcgcacgtttttccacggtgcagggcccgcgtggttccggcgacaccgtgcgtgacgtgcgcggttttgccgtgaagttcttcaccgacgaaggcaacttcgacctggtgggcaacaacatgccggtgttcttcatccaggatgcgatcaaatttcctgacttcgtccacgcggtgaaacccgagcctcataacgagattcctaccggcggttcggcccacgatacgttctgggactttgtttcgctgcaaccggaatccgcgcacatggtgatctgggccatgtccgaccgcgccattccaaaaagcctgcgcgccatgcagggctttggggtgcacaccttccgtt

SEQ ID NO: 210955 - DNA, 921 bp, Unknown
  Bacterial polypeptide expressing nucleotide sequence isolated from the Sargasso Sea
agaggcggtggaggtacaggcgcacaacgatttgcaccattgaatagttggcccgataatggaaacttagacaaggcgcgaagattgctttggcctattaagaaaaagtatggaaatcagattagctgggcagacctaatcatccttaccggtaatgttgctatcgaatccatgggtggaaaagtatttggttttggtggtggtcgagatgatatctgggctccggaaaaagatattttttggggcaaggaaactgaatggctaacgaacgaaagatataccggtgagcgtgaattagaccaaccactagccgcagtacaaatgggattgatttatgtaaatccacaaggtccagatggaaatccagatccgttaaaaagcgctgtagacattagagaaacctttaaaaggatggccatgaatgactatgagacagttgcattaactgcgggtggacatacttttggtaaagcccatggcgcagctagcgaagatcataaaggacctgaacctgaagctgccgcgattgaggaaatgggttttggttggtccagtgattataaatcaggagttggaagggatacaatcaccagtggaattgaaggcgcttggactgcaaacccaacacaatgggacaatggttatttcgatttattattcaaatatgaatatgaattaaaacaaagtccagctggcgcacatcagtggcatccagttaatccatcggaagaggatatggcgccagatcctgaagatcctactaagaaagtaaatacaattatgactacagcggatatggcaatgaaaatggatccagaatacaataagatatccaaacatttccatgaaaaccccgaagaatttgcggatgcatttgccagagcatggttcaaattattgcatcgcgatatgggtcccaaa

SEQ ID NO: 210956 - DNA, 841 bp, Unknown
  Bacterial polypeptide expressing nucleotide sequence isolated from the Sargasso Sea
tggaaatcaaattagctgggctgatttacttattttaactggcaacgttgcaattgaatcaatgggtggaaaaacatttggtttcagtggaggccgacctgatatatgggcgcctgaagaagatatttactggggtctagaaacagaatggttaacaaacaaaagatattctggagaccgtgtattagaaaatcctctagccgcagttcagatgggactaatatatgtaaaccctgagggacctgacggaaatcctgatccgctagcaagcgcaagagacattcgtgaaacttttgggcgtatggcgatgaatgatgaagagacagttgcactgactgcgggtggtcatacttttggtaaagcacatggagcaggtgatgcctctcttgttggaccagagccagaaggtgcgccaatcgaagaaatgggttttggatggattagcaaacatgcttcaggaaaaggaagtgataccatcacatctggcattgagggtgcttggacgactaatccgactaaatgggataatggttattttgatttactccttggttacgattggaaattaactaagagtcctgctggggcaaatatttggcatgcagtaggtcaaacaaaagaacatatggcacctgatgcagaagactcttcaaaaaaagttcctacaatgatgacaactgctgatatggcaatgcgcgaagacccagagtatcgaaaaatatctgagcattttcataaaaatcctgatcaatttcaagatgcatttgcacgtgcttggttcaaattacttcaccgtgatatggggacaaagacacgctatatgggacctgaagcgccagaa

SEQ ID NO: 210957 - DNA, 778 bp, Unknown
  Bacterial polypeptide expressing nucleotide sequence isolated from the Sargasso Sea
cctgcagacttcgggcattatggtccttttttttatccgtatgacatggcatgcagcaggaacatatagaactggagatggaagaggtggaggtggaactggtgcacaaagatttgccccgctcaatagctggccagataacggtaacttagataaagctcgaagattgctttggccgattaagcaaaagtacggcaataaaattagttgggctgatttattaattttagcaggaaatgttgcaatagaatcaatggggggaaaaacttttgggtatagtggaggacgtgaagatatatgggcccccgaagaagatatttattggggtgttgaaaaggaatggcttcaaaacaaacgctataaaggagatcgtgaacttgataatccattggcagcagttcaaatgggtttaatttatgttaatccagagggtccagacggcaatcctgacccgttagcaagcgcaagagatattcgtgagacctttggaagaatggcaatgaatgatgaagaaacagtagctcttactgcaggtggtcatacttttggtaaagctcatggtgcaggagatccaacgaatgtaggacctgaacctgaaggagcagaaattgaagaaatgggatttggttggattagtaaacacggttcaggtaagggtagtgatacaatcacaagtggtatcgagggtgcttggacaacaaacccaacaaaatgggataatggttattttgatcttctgctaaagtatgaatggaagcttgtaaaaagtcctgcagga

SEQ ID NO: 210958 - DNA, 761 bp, Unknown
  Bacterial polypeptide expressing nucleotide sequence isolated from the Sargasso Sea
taaaaaatttaattatgccaaagaatttaagaaattaaattacagagaattaaagagagatttaacaaaattaatgacagattcgcaagaatggtggcctgcagactatggtcattacggacctttttttatcagactagcttggcatgctgctggcacatatagaactggcgatggtaggggtggagctggaacaggcaatcaaagatttgcaccattgaatgcttggccggacaatgtcaatttagataaagctagattattactttggccgattaaacaaaagtatggaaaacaaatttcatgggctgatttatttattttagttggaaacgtagcgttagagtcaatgggtttcaaaacttttggttttggaggaggaagagtagatatttgggaaccagaggatgatatttattggggatctgaaaaggaaatgttaggagttgaaagatacagtggaaaaagagatctggaacaaccacttggagcttcacacatgggattaatttatgtaaatcctcaaggtcctaatgcaaatcccgatcctcttttagctgctcatgatattagagaaacgtttggaagaatggcaatgaatgattatgagactgttgctttagttgctggaggtcatacctttggaaaatcacacggagcagcatctgagtctcataaaggtccagatccagaggcatcaagaattcaagatcaatcgactgggtggaatagtgattataaatcaggaaagaggtgttgat

SEQ ID NO: 210959 - DNA, 850 bp, Unknown
  Bacterial polypeptide expressing nucleotide sequence isolated from the Sargasso Sea
tacggacattatggtccattatttatcagacttgcatggcatgcagcaggtacttacagaactggtgatggtagaggtggagctggaacaggcaatcaacgtttcgcgccattaaattcttggcctgataatgtaaatttagataaagcaagattacttttgtggcctataaaacaaaaatatggaaaaaaaatatcatgggcagatctttttattttagttggaaatgtagcattagattcaatgggatttaaaacatttggttttggagcaggtagagtagacatttgggaaccagaagatgatatttactggggttcagaaaaagaaatgttagatgttaaaagatacagtggtaaaagagatttagaacagcctctaggagcctctcatatgggtcttatttatgtaaatccacaagggcctgatgcaaacccagatccattgctcgcagctcatgatattagagaaacttttggaagaatggcaatgaatgattatgaaacagcagcattagttgctggaggccatacgtttggtaaatcacatggtgcagcatctgagtcacataaaggaccagatccagaagcatcaaagatccaagaccaagctactggatggaatagtggatataaatctggaaaaggtggagatacaattagtagtggtattgaaggtgcatggactcaaaatccaattaaatgggatatgggatacttagattgtctttatggacatgaatgggaacttacaaaaagtccagcaggtgcacatcaatggacaccaaaaaaaaacggacagaaaattaaaatggtacctgatgcacatgataagaatgtgctcaccctcc

SEQ ID NO: 210960 - DNA, 769 bp, Unknown
  Bacterial polypeptide expressing nucleotide sequence isolated from the Sargasso Sea
agacgtcttttatggcctataaaacaaaaatatggtaatcagatttcttgggctgaccttcttattttaacaggaaatgttgctatcgagtcaatgggtggcgaaacatttggttttggaggcggtagagcggatatttggcatccagaagaagacatatactggggtgcagaaaatgaatggctcattgttggcaaggataacaagagatattcaggtgagagaaatttggagaatcctttagcagctgtacaaatgggtttaatttatgtaaatccacaagggcctgatggaaatcctgatcctctagcaagcgcttctgatataagagaaacttttgcaagaatggctatgaatgatgaagaaactgttgctcttgttgctggtggtcatacttttggtaaagcacatggtgctggtagtgaggataatgtagctgcagagcccgaaggagccccaattgaaaatatgggtcttggttggaataataagtttgggaaaggattggggcgtgatacaattacaagtggaattgaaggcccttggactactaatcctattaaatgggataatggttattttgacttacttcttggttatgagtgggaactaacaaaaagtccggctggtgcacatatctggcatgctgtgaatcaaaagaaagaggatcttgctccagacgttgaagatagtaataccaaagttcctactatgatgaccactgcagatatagctcttataactgatagtaattacaaaagaatttcac

SEQ ID NO: 210961 - DNA, 403 bp, Unknown
  Bacterial polypeptide expressing nucleotide sequence isolated from the Sargasso Sea
tatgagtcaacagtatttaacaagccaaagcggttctccaattgctgacgatcaaaactcattgtcagcgggcgagcgtggtcctttactactgcaagattggcatttaattgaaaagcttgcccactttaaccgtgagcgtattcctgagcgtgttgtgcatgccaaaggcactggcgtatacggtactttcaccctgaccaaagacttaagtgaatacaccattgccgatcactttaacggtgttggtaagcaaactgaaaccttcgtgcgcttctctaccgtgggcggtgaaatgggttctgccgatgccgagcgcgacccccgtggttttggtctgcgcttttataccgctcgtggtaatcacgacatagtgggtaataacacgccgaccttcttcctg

SEQ ID NO: 210962 - DNA, 883 bp, Unknown
  Bacterial polypeptide expressing nucleotide sequence isolated from the Sargasso Sea
cctgaagaagatatttattgggggtcttgaaacagaatggttaactaataaaagatatacaggagaccgtgttttagaaaaccctcttgccgcagttcaaatgggattaatttatgtcaaccctgaaggcccagatggaaatcctgatcctcttgcaagcgcaagagatatccgtgaaacttttgggcgtatggcaatgaatgataaagaaacagttgcacttactgctggtggtcatacatttggaaaagctcacggtgcaggagatgctgcgttggtagggcctgaacctgaaggtgctccaatggaagaaatgggatttggatggatcagtaaacatgcgtcaggaaaaggaagtgatgcaattactagtgggattgaaggtgcttggacaacaaacccaacagtttgggataatggttattttgatttacttttaggatacgattggaagttaacaaaaagccctgccggtgcaaacatttggcatgcagttgatcagaaagaagatcacatggcgcccgatgccaaagatgcttctaaaaaagttccaacaatgatgacaaccgcagatatggctatgcgtgaagatccagagtatagaaaaatatctgaacactttcataaaaacccagatgattttcaagatgcatttgcacgtgcttggttcaaattacttcaccgtgatatgggtccaaaaacccgttacatgggaccagagtcaccagaagaatctttaatttggcaggacccaattccagcaggtaatacaagatatgatgttaatgctgttaaagcaaagattactgatagcggtctatcaattcaagaaatggttgaaactgcttgggctagtgcctctacctatcgccatactgatatg

SEQ ID NO: 210963 - DNA, 889 bp, Unknown
  Bacterial polypeptide expressing nucleotide sequence isolated from the Sargasso Sea
gcacagtgccggcacctaccgtatcggtgatggtcgcggcggcggcggtcgtggccagcaacggtttgcccccctgaacagctggccggataacgtgaacctggataaggcgcgccgcttgctgtggccgatcaagcagaaatacggtcgcaagatttcctgggcggacctgatgattctcgccggtaacgtggcgctggaatccatgggcttcaagacgttcggttttgccggtggtcgtgaagacacctgggagccggacctggatgtgtactggggggcggaaaaaggctggctggatggcgacaagcgttattccggcaaacgggacctggaaaaccccctggccgcggtacagatgggcctgatctacgtgaatccggaaggtccggatggcaacccggatccgaaagccgctgcccatgatatccgcgaaaccttttcccgcatggccatggacgacgaggaaaccgtggccctgattgccggcgggcacaccttcggcaaggcccatggtgccggcgacccggacaagattggtcccgatccggaagctgcaggcctggcggaacagggcatgggctggcacaacccggtgggtaccggcaagggcgacgacaccatgggtggcggcccggaggtgacctggagccagacgccaacccagtggagtaattactttttcgaaaacctgtttgggtatgaatgggagctgaccaccagcccggccggtgccaagcagtgggtggccaaggatgcggatgaagtcattccgtacgcccaggataaaaccaaaaagcacaagccgatgatgctgaccacggacctgtcgctgcgttttgatccggactacgaaaagatttcccgtcgcttctacgagaacccggag

SEQ ID NO: 210964 - DNA, 832 bp, Unknown
  Bacterial polypeptide expressing nucleotide sequence isolated from the Sargasso Sea
aatggatgccgagagtaaatgcccagtaatgcacggtgcgaatacaaaaaataccggacaaggaactactaatagagattggtggcctaatcaactagacataagtattcttcatcaacatgatgaaaaatctaacccaatggaaaaagattttaattatcgtgagcacttcaaaaaaattgattatgatgggttaaaaaaagatcttaatgagttaatgactaactcacaagattggtggcctgcagactatggtcactacggaccttttttcattaggatgacttggcatgcagcaggaacttatagaactgcggatggtcgtggtggtggtggaactggtgcgcaaagatttgctcctttaaatagttggcctgataatggcaacttagataaggcaagaagattactatggccaataaaacaaaaatatggaaatcagattagttgggctgaccttattatattagccggtaatgttgcaattgaatcaatgggtggaaaaacttttggctatagtggtggtcgacctgatatctgggctcctgagcaagatatatattggggacttgaaacagaatggttaacaaataaaagatattctggtgatcgcgtattagaaaatcctttagcagctgttcagatgggattaatttatgttaacccagaaggcccagatggtaaccctgatccacttgcaagcgcaagagatattcgagaaacattcggtcgtatggcaatgaatgatgaagagacagttgctcttacagcaggtggtcatacttttggtaaggcgcacggagcaggagatgctggtcttgttgggccagaa

SEQ ID NO: 210965 - DNA, 917 bp, Unknown
  Bacterial polypeptide expressing nucleotide sequence isolated from the Sargasso Sea
catggcacgaccccctacctcgcgcagcgcggaccacaaatcgccgtctgccctgccctcttccacccagtccgacaactttcgcggcaatgcgggcgaactgcagcaacaggctggcggcaagcacccggtactgaccacgcagcagggcattccggtcgccgacaaccagaactcgctgcgcgcagggccgcgcggcccggcgctgctggaagacttcatcctgcgcgagaagatcacccactttgaccatgaacgcattcccgagcgcatcgtgcatgcacggggcacagcggcccatggcttctttgaactcacgcactcgctcaaaaagtacaccaccgccaaggtgctgaccgagctaggggtgcagacccctgtgttcacccgcttttccaccgtggccggtggcgcgggctcggtggacacaccgcgcgacgtgcgcggctttgccgtcaagttctacacgcccgaaggcaactgggacctggtgggcaacaacatccccgtgttcttcattcaggacgcaatgaaattcccggacctggtgcacgccgtgaagatggagcccgaccggggctttccgcaggctgccagcgcgcacgacaccttctgggactttgtctcgctgatgcccgaaagcatgcacatgatcatgtgggccatgagcgaccgcaccatcccgcgcagcctgcgcatgatggaaggctttggcgtgcacagtttccgcctgctgaatgcagcgggcgagagcacgtttgtgaagttccactggcggcccaagctgggcattcagtccaccgtgtgggacgaggcggtcaagctgcaatcggccgacaacgacttccatcggcgcgacctgttcgagtccatcgagggcgggagacttcccgagtgggagctgtcggtgcagctgt

SEQ ID NO: 210966 - DNA, 835 bp, Unknown
  Bacterial polypeptide expressing nucleotide sequence isolated from the Sargasso Sea
ttaaacagattaatgacagattctcaagattggtggccagcagattatggtcattatggacctctttttataagattagcctggcatgcggcaggaacatatagaacaggcgacggacgaggaggtgcagggactggaaaccagcgctttgctccattaaatagttggccagataatgttaacttggataaagcaagattattactttggcctattaaaaagaaatatggtaaaaaaatttcatgggctgacctatatattttaattggaaatgtggcattagaatcaatgggttttaaaacttttggcttcggtggaggtagagaagatatttgggaaccagaagaagatatttattggggatctgaaaaagagtggcttggtgtaaatcgttacagtggtaagagagaacttgaaaatcctttaggagcatctcatatggggttaatatatgtaaaccctcaaggcccagatgcaaacccagatcctcttttagccgctcatgatattcgtgaaacttttggacgtatggctatgaacgactatgagacagttgctcttgtggcaggaggacatacttttggaaaatctcatggtgcagcagcagagtcttataaagggccagagccagaaggttcaaaaattcaagatcaagcaaccggatggaatagtagttataaaagtggtttaggcgttgatactattagcagtggaatagaaggtgcctggactagtaatccaataaaatgggatatgggatattttgataatttattcggctatgattgggaacttacaaaaagtccagcaggagcacatcaatggaaacctaaac

SEQ ID NO: 210967 - DNA, 789 bp, Unknown
  Bacterial polypeptide expressing nucleotide sequence isolated from the Sargasso Sea
ggtggtgctggtggtgggcagcagcggtttgagcctttaaacagctggccttataacgtcagtctggataaagcacggcgtttgctctggcctattaaacaaaaatatggccggcaaatttcatgggctgatttgatggtgttaacaggcaatgtagcgttggagtctatgggctttaaaacctttggttttgccggtggtcgcactgacgattgggaagccgatattgtttactgggggcctgaaaccaagtggctggatgataagcgctacagcggtgatcgcaagctgcaaaaacctctggctgctgtgcaaatgggcctgatttatgtcaatcctgaagggccaaatggcaatcctgatcccttgcttgccgccaaagatattcgcgaaacctttggccgcatggcgatgaacgacgaagaaacagtggctttaatagcaggcggtcatacttttggtaaagcgcacggtgcgcataaacctgaagactgtgtcggtaaagagccagctgctgctggtttggaagaacaaggctttggctggaaaaacaaatgtggcaaaggccattcggaagatacagtcacttcgggtttagaaggggcatggacagtcaaccccatagcctggaccactcagtatctggataacctgtatgcctttgactgggtaaaaaccaaaagcccggctggcgccacccagtggatcccgaaagatggtcaggcggcgaatttagtgccggatgcccacgacaaaaccaaacgtcatgcgcctattatgttcaccaca

SEQ ID NO: 210968 - DNA, 826 bp, Unknown
  Bacterial polypeptide expressing nucleotide sequence isolated from the Sargasso Sea
aaaagaaatacggaaaaaaaatatctgggcagatttatttatacttgttggaaatatatctctagaatcaatgggtttcaaaacttttggttttggagccggaagagaagacatatgggagccagaagaggatatttattggggctccgaaaaggaatggcttggagtaaatcggtatagtggaaaaagagaactagaaaatcctttaggagcatcacacatgggtttaatttatgttaatcctcaaggacctgatgctaatccagatccttatttagctgctcatgatattagagaaacttttggacgtatggcaatgaacgattatgagacggtagcactcgttgcaggcggacacacatttggaaaatctcatggtgctgcaccagagtcgcataaaggtcctgaaccagaagggtcaaagattcaagatcaagcaactgggtggaatagtaattacaaaagtggtttaggtgtagatactattagcagcggtatagagggtgcatggacttcaaacccgattaaatgggatatggggtattttgataatttatttggttatgattgggaattaactaaaagccctgcaggagctcatcaatggaaacctaaaaggaatgggcatgatatagaaatgactccagatgctcatgatatatctaaaaaaaatcttccaatgatgcaaactaccgacctttcattaaaattagatcctaaatatggtccaatttctaaacattttcatcaaaatccaaatgaatttgccgatgcctttgcaagagcttggtttaaacttactcatcgtgatatgggtccaaaagca

SEQ ID NO: 210969 - DNA, 835 bp, Unknown
  Bacterial polypeptide expressing nucleotide sequence isolated from the Sargasso Sea
gtccagatgggcttaatatacgttaatcctcaaggcccagatggagatccagacccagttgcaagcggaagagatgtaagagaaacctttgcgcgtatggctatgaatgatgaggaaacagttgcacttgtagccggcggtcatacttttggaaaagggcatggtgcaggagcagaagatcatgttcagttagaaccagagggcgcgccattagaaaatatgggttttggctggcaaagcacccatgcatctggaaaaggagcagacactattacaagcggttttgagggagcttggaccgctgatcctactaaatgggacaacggatattttgatcttttatttggatacgagtgggagaaagtagagactcctgctggaaaaatagtttggcatgcaataggacaaaaggaagaagatatggcgccggatgcagcagacccttcgaaaaaggtaccaactatgatgactaccgcagatatgtcaatgcgagaagatccagcatatagggaaatctcgaagcgttttcatgaaaatcctgaagagtttgccgatgctttcgcgcgcgcttggtttaagttgttgcatagagatatggggcctaagggaaggtatttaggcccagaggttcctgctgaagaattgatatggcaagacccagttccagaaggaaatatcgactatgatttaactgctcttaaaaaagctctttctgaatcaggactttcaattcaagaaatggtagaaacagcttgggcaagtgcttcaacatttagaaattcagatcttagaggtggtgctaatggtgcaagaattcgcttagctcctcaaaagg

SEQ ID NO: 210970 - DNA, 913 bp, Unknown
  Bacterial polypeptide expressing nucleotide sequence isolated from the Sargasso Sea
agttggccggataatggtaacttagataaagcaagaagacttctttggccgataaagaaaaaatatggaaataaaattagttgggccgatttatttattttaacaggtaacgttgcaatagaatctatggggggtaaaacttttggatttagtggtggacgtcctgacatttgggcaccagaagaagatatttactggggtgtagaagaagaatggctacaaaataaaaggtatactggtgatagaattttagataatccgcttgcagcagtgcaaatgggattaatttacgtaaaccctgaaggaccagatggaaaagctgatccacttgctagtgcaaaagatataagagaaacttttgcaagaatggcaatgaacgacactgaaactgtagctctcactgcaggtggacatacttttggtaaagcacatggtgctggtgatccagctctagtaggagcagaaccagaaggagctcctttagaacaaatgggtttaggttggaataacttgcacggttcaggtgttggtcgtgataccacaacaagtggtatagaaggtccgtggacacctaatccaactcagtgggataatggatactttgatatgcttcttggttacgaatggaagttagtaaaaagtcctgcaggtgctcaaatctggcatgcgattgatcaaaaagaggaacacatggcacctcaagttgatgatccatcagtaaaagttcctacaatgatgacaacagcagatatggcaatgcgtgaagatcctgaatacagaaaagtatcagaaaaatttcacaaagacccggaatattttgctgatcaatttgctagagcttggtttaaacttctacatagagatatgggtccaaaaactagatatatgggaccagaagtccagaagaagaact

SEQ ID NO: 210971 - DNA, 792 bp, Unknown
  Bacterial polypeptide expressing nucleotide sequence isolated from the Sargasso Sea
ggtcctgatgcgaacccagatcctcttttagctgctcatgatattcgagaaacttttgggcgtatggctatgaatgattatgagacagttgcacttattgctggaggtcatacgtttggtaaatcacatggtgctgcttcagagtctcacaaaggacctgaaccagaaggttcaaaaattcaagagcaagcaacaggatggaatagtaattataaaagtggcttaggagctgataccattagtagcggaatagagggtgcgtggactagcaacccaattaaatgggatatgggatactttgataatttatttggttatgattgggaattaaccaaaagtcctgcgggagcacatcaatggaagcccaaacaaaatgggcacgatataaacatgactcctgacgctcatataaaatcaaagaaaaatcttcctatgatgcaaacaacagatttatctttaaaaatggatccaagttacggaccaatttcaagaaattttcataataatcctaaagaatttgccgatgcatttgcaagagcttggtttaaacttacacatcgtgacatgggaccaagagcttgctacttaggtcctgaagtaccaaaagaacaattaatttggcaggatcctattccaaaagctaattataaaattaaaagtaaagatattaaagctcttaaatctaaaatattaaaatcaggactatctatttctgagctggtatcaacagcatgggcatcagcttctacttttcgtggttctgataagagaggcggtcctaatggtgcaagg

SEQ ID NO: 210972 - DNA, 896 bp, Unknown
  Bacterial polypeptide expressing nucleotide sequence isolated from the Sargasso Sea
catgggggcagttactagtaataattctgaaagaactaccaataaagaatggtggcctaatcagcttaggataaatattctacatcaacatgataaaaggtctaatcctctaaaagttgatcatgattacaggaaagaatttttaaagttagattatttttctctcaaagaagaccttaaaaaacttatgacagactcaaaaaaatggtggcctgcagactttggtcattatggtcctttttttataaggttaacatggcatgcagcaggaacatatagaactggtgatggtcgtggaggagctggtactggcgcacaaagatttgcacctctaaatagttggcctgataatggaaacttagataaagcacgaagattgctttggccaatcaagaaaaaatatggaaaaaaaattagctgggcagatttattggttttagcaggtaacgttgctatcgagtcaatgggtggaaaaacttttggttttagtggtggccgagctgatatttggtctcctgaagaagatattttttggggagttgaaaaaggatggttagataataatcgatacaaaggtaagcgagaattggatatacctttagctgcagttcaaatgggattaatatatgtcaatcctgaaggccctgacggcaatccagatccattggcgagtgctcatgatattcgagaaacatttgcgagaatggctatgaatgatgaagaaacagtagccttagttgctggagggcatacttttggtaaagcccatggtgcaggaaaccctgatttagttggtcctgagcctgaaggtgcacctatcgagcaaatgggacttggttggaaaaatgatcatggaacaggcgttggtagagatgctactacaagtggcatagagg

SEQ ID NO: 210973 - DNA, 920 bp, Unknown
  Bacterial polypeptide expressing nucleotide sequence isolated from the Sargasso Sea
actgggcgcaggaacacctcctaaacaccctactggtaaaggacaaatttacaaagattggtggcctaacagcttaaatttgaaaattttaagtcaacattcatcattggtaaatccaatgggagaaaaatttaattataaaaaagaatttaaaaaacttaactttaaagcattaaaaaaagatcttcttaaactgatgacagattcacaagattggtggccagcagattatggtcattatggtccattttttattcgtctagcttggcacgctgctggaacttatcgtacaggagacggaagaggtggtgctggaactggaaatcagagatttgctccattaaatagttggccagacaacgtaaacttagataaagcaagacttttactatggcctattaaaaaaaaatatggaaaaaaaatatcttgggcagatttatttatacttgttggaaatatatctctagagtcaatgggtttcaaaacttttggttttggagctggaagagaagatatttgggaaccagaagaagacatatattggggatctgaaaaggaatggcttggagtaaatcggtatagtggacagagagaattagaaaatcctttaggagcatcacatatgggattaatttatgttaatcctcaaggacctgatgctaatccagatccttatttagctgctcatgatattagagaaacttttggacgtatggcaatgaacgactatgaaacagttgcactcgttgcaggaggacatacatttggaaaatctcatggtgctgcatcagaatcacacaaaggtcctgaaccagaaggctcaaagattcaagatcaagcaactgggtggaatagtaactacaaaagtggcttaagtgtagacactattagcagtggtatcgagggcgcatggacttcaa

SEQ ID NO: 210974 - DNA, 883 bp, Unknown
  Bacterial polypeptide expressing nucleotide sequence isolated from the Sargasso Sea
caaggaccagatggaatcccagaccctctgcaaagtgctcatgatatcagagagacatttggaagaatgccaatgaatgatgaagaaactgttgcgcttgtggctggaggtcatactttcggaaaagcacatggagctggagcagaagatcatgttcaatcggaaccagaaggagctccattagaggagatgggatttggttggacaagcacatacgcatctggagtaggaagcgacaccataactagtggtattgaaggagcgtggactgcaaatcctactcagtgggacaatggatattttgatttattgtttggttatgaatgggaattaactaaaagtcctgcaggagctcatatttggcatgctgttggtcaaactgaagaagatatggctccggatgctgaagatgcttccaaaaaagttccaacaatgatgacaactgctgatatggctttaagagaagatccaagttataagaaaatttcaaaaagatttcatgagaatcctgatgaatttgcagatgcttttgcaagagcatggttcaaacttcttcacagagatatgggtccaaagtcgcgatacatgggtccagaagttcctggtgaggaattaatatggcaggatccagttcctttaggcaactctgattacgatattgaaaaagtaaaagaaatgattagtaagtcaggtttgtcaattcaggaaatggtggagactgcttgggcaagtgcatctacatatagaggctctgacatgcgaggaggagctaatggttcaagaattagattagctccgcaaaaagattgggaagccaataatccgagtcaacttagtaaagtcttggacatatacgaatcaatttcaaatgaaacaggagcct

SEQ ID NO: 210975 - DNA, 678 bp, Unknown
  Bacterial polypeptide expressing nucleotide sequence isolated from the Sargasso Sea
catggacaataaatcaaacggaaaaggagacgttagtaaatgcccctatttaggtggtgttttaagagaaggagctggaggaggaagtgtaaatagagattggtggccaaaccaattaaatttaaatatactacgccaacattcttctttatctgatccaatggatgagaattttgattacgcagaagaatttaaaaagttagacctagccgctgtcaaacaagatttatacgaattaatgaccaattctcaagaatggtggcctgcggattacggtcattacggtccattctttatcagaatggcatggcatagtgctggaacatatagaattgcagatggtcgtggcggtgctggtgcaggtatgttgcggtttgcgccacttaatagctggccggacaatgctaatttagaaaaagcaagacttttactatggcctattaaacaaaaatatggtaaaaaactctcttgggcagatttaatggttttaactggtaattgtgctatggagtccatgggtttcaagacttttggttttggaggtggccgagaggatcaatgggaaccagaagaagatgtttattggggtcctgaatctgaatggttaggagacaaaagatatactggaaaccgtgaattagaaaatcctcttggagctgtacaaatggggttaatata

SEQ ID NO: 210976 - DNA, 691 bp, Unknown
  Bacterial polypeptide expressing nucleotide sequence isolated from the Sargasso Sea
atgactgataaatcagaaggtaaatgtcctgtaatgcacggggctatgacaacaaatagttcaagtggaacttcaacaagagactggtggccaaatcagctgaacctaaatattttgcatcagcacgataaaaaatctaatcctatggatgaagattttgattatagagaagagtttaaaaaaattgattatgaagctcttaaaaaggatttaaatgaattaatgacagactcacaagattggtggcctgcagactatggtcactatggaccgtttttcattagaatgacctggcatgctgctggtacctatagaaacacagatggccgaggtggtggcggcactggcgctcaacgttttgctccactcaatagctggcctgataatggtaatttagataaagcaagaaggttgttgtggccaattaaacaaaaatatggcaaacaaattagttgggcagatttattaatattagctggaaatgtagcaattgaatccatgggtggaactacctttggttttagtggtggaagagcagatatttggggtcctgaagatgatattcattggggcgttgaatctgaatggctagaaaataaaagatataagggtgaaagagaattagataacccccttgcagctgttcagatgggattaatatatgttaatccccaaggaccagatggaaatc

SEQ ID NO: 210977 - DNA, 1565 bp, Unknown
  Bacterial polypeptide expressing nucleotide sequence isolated from the Sargasso Sea
aatgagcactgaatttaaagacggaaacttcaaatcaaatgaattaagcaaatgtccatttactggggcaggtacatcagcaaaattttcagctggaagaggtcaaacaaacagagacttttggccaaatagtttaaacttaaaaatattaagtcaacactccaatttgactaatcctatggataagaagtttaactattcaaaagaattcaaaaaattaaattacaaagcacttaaaaaagatcttaaaaaattaatgacagactcccaagaatggtggccagcagattatggtcattatggaccattctttatcagactagcttggcatgcagcgggaacttacagaacaggcgatggaagaggtggggctggaacaggaaatcaacgttttgcaccccttaatgcttggccggataatgttaatttagataaagcaagattattattatggccaatcaaacaaaaatatggaaaacaaatttcatgggctgacttatttattttggttggaaacgttgctttagagtcaatgggttttaaaacttttggttttggagcaggaagagttgatatttgggaaccagaggatgatatctactggggatctgaaaaagaaatgctaggtgtagaaagatacagcggcgaaagagatttagagcaaccacttggagcctcacacatggggttaatttatgtaaatccacaaggaccagatgcaaatcctgatccactgcttgccgctcatgacattagagaaacttttggaagaatggcgatgaatgactatgaaactgttgctttagtagctggtggtcatacatttggaaaatcacatggggctgcatcagagtctcacaaaggtccagacccagaagcatcaagaattcaagatcaatctactggatggaatagtaattataaatcaggaaaaggggttgatactataagtagtggaattgaaggtgcttggacacagtctcctattaaatgggatatggggtattttgattgtttgttcaatcatgaatgggaactcacaaaaagtcctgcgggagctcatcaatggacacctaaacaaaatggtcaaaaaattaaaatggttcctgacgcacacgataaaaacaaaatgcatccaccaatgatgcaaacaacagacctttcactaagaatggatccttcatacggtccgatttcgaaacatttctttaacaatcctgatgaatttgcagatgcgtttgcaagagcatggtttaagttaactcatagagatatgggtccaagagcatgttatttaggcagtgaagttccaaaagaagaattaatttggcaagatcctgttaaaaaaccaaaatacaaattaaaagcaaaagatataaaagatttaaaatctcaaatatcaaaatcaaaactatccgtatctgaattggtaagcactgcttgggcatctgcttcaacctacagaggatctgataaaagaggtggagcaaatggcgctagattaagattagaaccacaaattaactgggaagttaatgacaatggtaagataacaaaagttatta

SEQ ID NO: 210978 - DNA, 868 bp, Unknown
  Bacterial polypeptide expressing nucleotide sequence isolated from the Sargasso Sea
aagatctgaaggtaaaaatactaaaatcaggagtatctatttcacaattggtttcacagcttgggcatcagcttctacttttcgtggttcagataaaagaggtggagctaatggagcaagaataagattgtcaccacagaaagactgggatgtaaataatccaccccaactatctaaagttataaaaactttagaaaaaataaaaaaaagttttgacaataaaaaaaaaagtatttcactagctgatctaatagttttaggtggatgtgttgcaattgaaaaagctgctaaaaaaggtggttataatgtaaatgttccatttactccaggaagaggagatgcttcccaagatcaaacagatatatattcttttggtctgcttgagccgaaagctgatggatttagaaattatattgtcaaaaggtcaaatggatcttcgacaaaacctagtgtatctgctgaagaaatgttaatagatcgagcacaattgatgaaacttactgcacctgaaatgatagtgcttttaggcggtatgagagtactaaatacaaattttgataaatcaaataatggagtttttacagataaaaaagaaacactttcaaacgatttttttataaatcttcttgatatgagtacaacttggaaggaagttgataaaaacgaggaattatttgagggaaaaaatcgtaaaacaaataaagttaaatggactggaacacgtgttgatttaatttgtggttcaaactctcaattaagagcaattgcagaggtttatgcatgtgaagattctaaatccaaatttattactgattttgtatctgcatggtcaaaagtaatgaatttagatcgttttgatctaagttaa

SEQ ID NO: 210979 - DNA, 864 bp, Unknown
  Bacterial polypeptide expressing nucleotide sequence isolated from the Sargasso Sea
atattaaaaacctaaaatctaagatatctaaatctaagttgtctgtatcagagttagtaagtacagcttgggcatcagcttcaacttacagaggatcagataaaagaggtggagctaatggagctagagttgctttagaaccacaaattagttgggatgttaatgatccaaaacagattaataaagttatcaaaactttagaaaaaattaaaaataaattcgataatatgaaaaaatctgtttcgttagctgatttaatagtgcttggtggaaacgtaggtattgaaatggcagctaaaaaagcaggtattaaagcagatgtacctttctctccaggaagaggagatgctacacaagaacaaactgatatccattcatttggtcttttagagccacaagctgatggatttagaaattacaataaagatgagacatctacagtttcagctgaggaaaagttaatagacaaagcacaattgatgggtttaacggctcctgaaatgacggttcttgttggtggtatgagagtgttaaatacaaattttgaccattcaaaaaatggtgtatttactaaaaaaccaggaactttaacaaacgactattttgttaatcttttagatatgaatactacttggaaagaaacagataaatctgaacaattgtttgtgggaaaagatagaaaaacaaataaagttaagtggcatggtactagagtggacttaatatttggttcaaactcacaattaagagcattagccgaggtttatgcatgcaacgactcatctaaaaaattcattaatgactttgtttcagcatggacaaaagtcatgaattctgacaggtttgatctaaaattaaattaat

SEQ ID NO: 210980 - DNA, 1169 bp, Unknown
  Bacterial polypeptide expressing nucleotide sequence isolated from the Sargasso Sea
tggaaaaccagacccgcttgcagcagcaatcgacattcgagagaccttctatcgcatggcaatgaatgacgaagaaacggtcgcgctcatcgcaggcggtcatacttttggaaagtcacacggcgcagcacctgcagatcatcttggacctcccccagaaggcgcgtcaattgaagagcaaggccttggctggaaaaatagttttggttcagggaacgccggcgacacaatttcaagcgggcttgaaggtgcatggacctcaacaccaacccgttggtcacatggatatttgcaaaacctgtttcaatacgaatgggaattaaccaaaagcccagctggtgcctggcagtggacacccaaggacacatcggcacagaacacagtgcctgatgcacatgacccgacgtgttctcatgcacccatgatgtttacaacagatctggctctccgagttgatcctgattacgaagtgatttctcgccgcttccttaaaaacccggctgaatttgctgatgcatttgcaagagcctggtacaaactgactcatcgagatatggggccagtcacacggctccttggaccagaggttcccgaagcccaactctggcaagatcctgtgcccaatggtgattatgaaacaattgatcaacacgatgtttcagttttgaagcaacgtattctgtcatcagatttatccatcacagatcttgtacgtacggcatgggcggccgcatcaacatttcgtgggagtgacaaacgaggaggtgccaacggcgcacgcattcggctctcaccacaaaaagactgggaagtaaatgacccaactcaattagcacaggttcttgctgctcttgaagatatccagaagacatttaacaccacagcacacgataagaagcaggtctcactcgcagatctgattgttctcggaggctgcgcagcagttgaagaagctgcacgtcgggctggatatgaagcctctgtttcctttcatcctggacgaactgatgcaactggtgaaatgactgacatcgagtcttttgctgtgctcgaaccaaaagcagatgggtttcggaattacgttgccaagcatatcgatcgtcctgccgaggaactcttgcttgacaaagccgatcttttgacgctcactgcgaaagaaatgacagttc

SEQ ID NO: 210981 - DNA, 1416 bp, Unknown
  Bacterial polypeptide expressing nucleotide sequence isolated from the Sargasso Sea
cattataaattattatttatgagcagtgaattaagcaaagagccatcaaagtgtccatttacgggcgcaggaacaccatctaaacatcctactggaagaggaacttcaaatagagattggtggcctaacagcctaaatcttaaaattttgagtcaacattcatcactggttgatccaatggataaaaaatttaattataaaaaggaattcaaaaaacttaacttaaaaaaattaaaaaaagatttacataaattaatgacagattcacaagattggtggcctgcagactatggacactatggaggactttttattagattagcgtggcatgccgcaggaacatatagaactggtgacggacgaggcggcgctggaactggaaaccaacgttttgctccattaaatagttggccagataatgtaaatttagataaagcaagattattactttggcctatcaagaaaaaatatggaaaaaaaatctcatgggctgacctatttatattagttggaaatgtggctctagagtcaatgggatttaaaacttttggatttggtggaggtagagaagatatttgggaacctgaagaagatatttactggggatctgaaaaagaatggcttggtgtcaaccgttatagtggtaaaagagatcttgaaaatccattaggagcatctcatatgggattgatttatgtaaatccacagggccctgatgcaaatccagaccctcttttagctgctcacgatattagagaaacttttggacgtatggcaatgaacgactatgaaacagttgctttaatagctggaggccacacttttggaaaatctcatggtgctgcaccagaatcacacaaaggtcctgagccagagggttcaaaaatccaagaacaagctactggctggaatagtaattataaaagtggtaaaggcgttgatactattagcagtggactagaaggtgcatggacacaaaatcctaaaaagtgggatatgggttactttgataatttatttggatatgagtgggaattaacaaagagtccagcaggcgcacatcaatggacaccaaaacaaaatgggcatgatataaaaatggttcccgatgcacatgacaagtcaaaaaaacaccccccaatgatgttaactacagatctttctatgagaatggaccctagttacggaatgatttctgaaaattttcataaaaacccagaagaatttgctgatgcttttgcgagggcttggtttaagcttacgcatcgagatatgggacctcgtgcttgttatttaggggtggaagttccaaaagaagagctaatttggcaagatcctattccaaaagctaaatataaacttaaaaataaagatatcaaagatcttaaaacaaaaatactaaaatcaggactatct

SEQ ID NO: 210982 - DNA, 1033 bp, Unknown
  Bacterial polypeptide expressing nucleotide sequence isolated from the Sargasso Sea
tatgattgaggaattaactaaaagccctgcaggagcccatcaatggaaacctaaaagaaatgggcatgatatagaaatgaccccagatgctcatgataaatctaaaaaaaatcttccaatgatgcaaactactgacctttcattaaaattagatcctaaatatgggccaatttctaaacattttcatcaaaatccaaatgaatttgctgatgcctttgcaagagcttggtttaaacttactcatcgtgatatgggtccaaaagcaaattatcttggttctgatgttccaaaagaaaatttaatctggcaagatccaataccaaaaaataaatataaacttaaaaataaagatattgagttactaaagaaaaaaatatctaaatctggtttatctgtttctcagctagttacgactgcatgggcgtctgcatcaacttttagaggatcagataaaagaggaggcgcaaatggagcgagaatagctcttgaacctcaaaaagactggaaagttaacaatccttcaaaattgtccgctgtaatcagaattttaagtaaaattaaaaaaggttttgatacaaaaaataaatcggtttcattagcagatctaatagttttaggaggatcagttggtattgaaaatgctgctaaaaagagtggtaaaaaaattaaagttccattcaaagcaggaagaggtgatgcaaaacaagatcaaacagacaaaaattcatttaatcttcttgagcccatagcagacggttttagaaactatattaagctgcatgctaaaggatataccaatggaaaaggtatccctacaaattcagcagaagaaatgttgatagataaagcccaacttcttggattaactggtccagaaatgacagttttaatcggaggaatgagagtattaaatactaactatgatggttcagattatggtgtatttacaaaaaaacctggatcattatctaatgatttctttgttaatctattagacatgaaaactacttggagagaagtagataaagaaaga

SEQ ID NO: 210983 - DNA, 1153 bp, Unknown
  Bacterial polypeptide expressing nucleotide sequence isolated from the Sargasso Sea
aatggatgcagagagtaaatgcccagtaatgcatggagcaattacaaaaaatatgggagaaggtacatcaaaccgcgaatggtggcctaatcaacttaacttaaacatacttcatcaacatgatcgtaagtctgatccaatggaagtaggatttaactaccgtgaagaatttaaaaaaatagactatgctgcattaaaaaaagacctcaatgatttaatgactgattcacaagattggtggcccgctgattatggacactatggtggtttctttattcgtatgacatggcatgctgcagggacttatagaactggagatggtcgtggtggtggtggaacaggtgcacaacgttttgctcctttaaatagttggcctgataatggaaacttagataaggcaagaagattactttggcctataaagaaaaagtatggaaacaaaattagttgggctgatctatttatactaacaggtaacgttgctattgaatctatgggtggaaaaacttttggatttagtggtggaagaccagacatctgggctccagaagaagatatttattggggagtagaagaagaatggcttcaaaacaaaagatacacaggtgatagaattttagacaacccacttgcagcagtacaaatgggattaatctatgttaaccctgaaggaccagatggaaaagcagatccgcttgcaagtgcaaaagacattagagaaacttttgcaagaatggcaatgaacgatactgaaactgtggccttaactgcaggaggacatacttttggaaaagcacatggtgcaggtgatccagctttagttggagctgaaccggaaggtgctccgttagaacaaatgggtttaggatggaataacttacacggttctggtgttggaagagatgcaacaacaagtggtattgaaggtccttggacagcaaatcctacacagtgggataatggatattttgatttacttcttggctatgaatggaagttagtaaaaagtcctgctggagctcaaatctggcatgccattgatcaaaaagaagaacatatggcaccacaagttgatgatccatcaataaaagttccaactatgatgacgactgctgatatggcaatgcgtgaagatccagaatatagaaaagtt

SEQ ID NO: 210984 - DNA, 1046 bp, Unknown
  Bacterial polypeptide expressing nucleotide sequence isolated from the Sargasso Sea
cagaggatgatatttattggggttcagaaaaagaaatgttaggcgtggaaagatacagtggaaaaagagatttagaacagccgttaggcgcttcccacatgggtttaatttatgtaaatccacaaggtccagacgcaaatccgaacccattattagcggcacacgatattagagaaacttttggaagaatggctatgaacgactatgagaccgcagctttagttgctggaggacatacatttggaaaatctcacggagcagcatcagaatcttacaaaggtccagatccagaagcttcaaaacttcaagaccaatctactggatggaatagtggatataaatctggaaaaggtgttgatacgataagtagtggtatcgaaggtgcttggactcaaaatcctacaaaatgggatatgggttatttagactgtttatatggtcatgattgggagctaacaaaaagcccagctggagctcatcaatggactccaaagaaaaatggtcaaaaaattaaaatggttcctgatgcgcaccaaaaaggcgtgcttcatccaccaatgatgcaaacaacagatatatcgatgaaagttgatccgagttatggaccaattacaaagcattttcatcaaaacccaaaagagtttcatgatgcatttgctcgggcatggtttaaattaactcatagagatatgggtccaagagtttgttacttgggtagtgaagttccaaaagagcaattaatttggcaagatccaattgataaaccaaagtacaaacttaaatcaaaagatattaaagatttaaaaaataaaatttctaagtcaaaaatatcaatttcagatttagtttctactgcatgggcatcagcttcaacttttagaggatcagataaaaggggtggtgctaatggtgcgagaataatgctagaaccacaaaagagttgggacgtgaataatcctaagaaattatcaactgtggttaaagctttaaataaaattaaagatcaatttgataataaaaagaaaagtgtatcaatgcagatttaa

SEQ ID NO: 210985 - DNA, 1444 bp, Unknown
  Bacterial polypeptide expressing nucleotide sequence isolated from the Sargasso Sea
aatgaatgattatgaaatagttgcattagttgcaggaggccatacatttggaaaatctcatggtgcagctccagagtcacacaaaggaccagaaccagagggatcaaaaatacaagatcaagcaacaggttggaatagtaactataaatcaggattaggggctgacacaattagtagtggaatagagggtgcctggacttcaaatccaattaaatgggatatgggttattttgataatttatttggttacgattggggactttcaaaaagtccagcaggtgcttaccaatggaaaccaaagaaaaatggtcatgcaatttcaatgacaccggatgcacatattaaaggaagacaaaatttaccaatgatgcaaactactgacttatctttgaaaatggatccaaaattttcagtaatttctagacattttcataacaatccagatgaatttgccgacgcttttgcaagagcgtggtttaaattaactcatagggatatgggaccaagagtgaattatttaggcagcgaagtacctaaagaagatttaatctggcaggatccaattccaaaaaataaatataaacttaaaaatcaagacattgaggttttaaaaaagaaaatagctaaagctggcttgaatatttctgatttagtttctactgcatgggcttcagcatcaacatacagaggatcggacaaaagaggtggggctaacggatcaagaataagactcgctccccaaaaggattggaaagtaaataatccaaaattagtttcaaaagtaattaacaaatataacaaaatacaaaaaaattttaattcgaaatcaaaatttgtatcaatagcagatctaattgtgcttggtggaaatttaggaattgaaatggcagcaaaaaaggctgggaaaaaagtaaaagtaccattcaaaccaggaagaggtgatgcaactcaagatcaaacagacattttttcttttggattattggagcctgttgccgacggttttagaaattatgcaaagggagacaactctacaatcgctgaagaattattaattgataaagcgcaacttttaaatttatctgcaccagaaatgacagtcctggtaggggggatgagagttttgggtacaaattttgacaattctaaacatggagttttaacaaaaaatgttggaaagctttcaaacgattttttcataaatttattagatatgaacgttaagtggaaggaaacttctaaaaaagaggttgctttcgagggaagagatagaaaaacaaacaaagttaaatggaccgggacaagggctgaccttatatttggatcaaactcacaacttagagcgttagctgaagtttatgcaacagacgactctcatgataagtttgtaaatgactttgttgttgcttggactaaagtaatgaatttagatcgattttattaa

SEQ ID NO: 210986 - DNA, 1570 bp, Unknown
  Bacterial polypeptide expressing nucleotide sequence isolated from the Sargasso Sea
atgagtagtgaattagttaaagaacaatcaaaatgtccttttacaggagttggaacaccacccaaacattcaacaggcaagggacaatcgaatagagattggtggccaaatagtttaaatcttaaaattttaagtcaacattcatcattggtaaatccaatgggtgaaaaatttaattataaaaaagaatttaaaaaacttaattttaaagcgttaaaaaaagatctatataaattgatgacggactctcaaagttggtggcctgctgactatggtcactatgggcctttttttatacgtcttgcttggcatgcagcaggaacatatagaactggtgacgggagaggtggagctggaactggaaatcagagatttgccccattaaatagttggccagataacgtcaatttagataaagcaagattactactttggccaattaaaaaaaaatatggcaaaaaaatttcttgggcagacctatttatattagttggaaatatatcgctcgagtctatgggttttaaaacttttggttttggagctggaagagaagatatttgggaaccagaggaagatatttattgggggtctgaaaaagaatggttaggtgtaaatcgttatagtggaaaaagagagttagaaaaccctttaggagcctcacatatgggtttaatttatgttaatcctcaaggtcctgatgctaatccagacccttatttagcagctcacgacattagagagacttttggacgtatggcaatgaatgattatgaaacagttgcacttgttgctgggggacacacttttggaaaatctcatggagcagcaccagaatctcataaaggaccagagccagaaggatcaaaaatacacgagcaagcaactggttggaatagtaattataaaactgggttaggagttgatacaataagcagtggaatagagggtgcttggacctcaaatccaattaaatgggatatgggttattttgataatttgtttgggtatgattgggaactaacaaaaagtccagctggagcgcatcagtggaaaccaaaaaaaaatggccatgcaattgatcttactcctgacgcacatgataagacgaagaaaaatttgccaatgatgcaaactacagatttatctttaaagttagaccctaaatatggtccaatatcaagacattttcataaaaatccagctgagttcgctgatgcttttgcaagagcatggtttaaactcactcatagagatatgggtccaagggcaaactatcttgggagtgatgttccaaaagaagaacttatttggcaggatccaataccaaaaaataaatataaactaaaaaataaagatgtcgaaattttaaagaaaaaaattttaacatctggcttaagtatttctcaactagtatcaacagcatgggcttcagcatcaacttttagaggatctgataaaagaggtggcgcgaatggtgcaagaattgctctttaccctcagaaaaattggaaagttaataatccttctaaattatcaaaagtaataaaaactcttaataaaattaaaaagg

SEQ ID NO: 210987 - DNA, 1134 bp, Unknown
  Bacterial polypeptide expressing nucleotide sequence isolated from the Sargasso Sea
aatgagcactgaatctcaagaaaaatgcccagtaatgcatggagcattaactagcaatcaatcatcgggaacatcaacaaaagattggtggcctgaacaattaaatctaaacattttgcatcaacatgaccagaaatctaatcccatgggcgaggatttcaattacagagaagagttcgccaagattgactataaagctcttaaaaaagatctaaatgatttaatgactgactcacaagaatggtggcctgcagattatggtcattatggaccattttttattagattaacttggcatgctgcaggcacttacagaagtactgatggaagaggcggaggaggaacaggtgctcagcgatttgctcctttaaatagctggccagataatggaaatttagataaagcaagaagactgctgtggcctattaaacaaaaatatggaaatcaaatcagttgggcagatctactaatcctagccggtaatgttgctattgaatctatgggtggaaaaacatttggtttcagtggaggtcgagatgatatttgggggccagaagaagacattctttggggtgccgaaaatgagtggcttgaaaataatagatataaaggtgaaagagaattagatagtccattagctgcagttcaaatgggactcatttatgttaatcctcaaggtcctgacggcaatccagatccattagctagcgctaaagatataagagaaacttttggcagaatggctatgaatgacgaagaaactgttgcactagttgcaggaggccatacgtttggtaaagcccatggtgctggagatgattctcaggttggagttgagccagaaggcgctcctctagagcagcttgggcttggttggacaaactctcaaggaaatggagtaggatctgacacaatcacaagtggattagagggtgcgtggacatcaaatccaatcaagtgggataacggatactttgatcttctatttggctatgactgggaacttggtaaaagtccagctggggcgttgcaatggttcgctgttgatcaaaaagaagaggacatggctccagacgctcatgatccctctaagaaagttccaactatgatggcaacaacagatatagctctaaa

SEQ ID NO: 210988 - DNA, 913 bp, Unknown
  Bacterial polypeptide expressing nucleotide sequence isolated from the Sargasso Sea
atggaaaatgaaagtaaatgcccagtatcgcacggttctgaaagtcaacatagtcaaggatcgcggtctaataataattggtggcctgataatttaaatttagatattcttcatcaacatgatgttaaatcaaatccaatgaatggatttgattatcgtgaagaatttaaaaaactagattatgatgctttaaaaaaagatttgaatgatttaatgacagattcacaaagttggtggcctgctgattatggacattatggtccattcttcattcggatgacttggcacgcggcaggtacatacagaactactgatggccgtggtggcggtggaaccggtaatcaacgttttgcgcctctaaatagttggccagataatggaaatcttgacaaagctcgtcgactcctatggccaataaaacagaaatatggaaataagattagttgggcagatttgcttatacttactggaaatgttgcaatagaatcaatgggtggtaaaacatttggttttggtggtggacgacctgatatctgggcaccagaaaaagatattttttggggaaaagaaactgagtggttaggcaatgatcgttatacaggtgatcgtgagttagaccagccattaggagctgtacaaatggggttgatatatgtaaatccccaaggtccagatggaaatcctgaccccgtagcaagtgcgagagatattcgtgaaactttcaagagaatggcaatgaatgattatgaaacagttgctttaactgctggagggcatacttttggtaaagcacatggcgctgctagtgaagattttaaaggacctgagccagaaggcgcatctatagaagaaatgggatttggatggactagtggtcatggcactggcgtgggtcgtgatacaattacaagtg

SEQ ID NO: 210989 - DNA, 1274 bp, Unknown
  Bacterial polypeptide expressing nucleotide sequence isolated from the Sargasso Sea
tatgtcaaatgaattaataaaagaacaatcaaaatgtccttttacgggtgcaggaactccaccaaagcatccaacaggcaaaggacaaacaaataaagattggtggcctaatagtctaaatttaaaaattttaagtcaacattcatcattggtaaatccaatgggagaaaaatttaattacaaaaaagaatttaaaaaacttaattttaaagcattaaaaaaagatcttcttaaattaatgactgatacacaagattggtggccagcagattatggtcattatggtccattttttattcgtcttgcttggcatgctgctggaacatatcggacaggagacggaagaggtggtgctggtactggaaatcaaagatttgctccattaaatagttggccagataatgtaaatttagataaagcaaggcttttactatggcctattaaaaaaaaatatggaaaaaaaatatcttgggcagatttatttatacttgttggaaatatatctttagagtcgatgggtttcaaaacttttggttttggggctggaagagaagacatatgggagccagaagaggatatttattgggggtctgaaaaggaatggcttggagtaaatcgctatagtggaaaaagagaactagaaaatcccttaggagcatcacacatgggtttaatttatgttaaccctcaaggacctgatgctaatccagacccttatttggctgctcatgatattagagaaacttttggacgtatggcaatgaatgattatgagacggtagcactcgttgcaggtggacatacatttggaaaatctcatggtgcagcaccagagtcacataaaggtcctgaaccagaaggttcaaagattcaagatcaagcaactgggtggaatagtaattataaaagtggtttaggcgtagatactattagcagcggtattgagggtgcatggacttcaaaccctattaaatgggatatgggatattttgataatttatttggctatgattgggaattaactaaaagccctgcaggagctcatcaatggaaacctaaaaggaatggtcatgatatagaaatgaccccagacgctcatgataggtctaaaaaaaatcttccaatgatgcaaactactgacctttcgttaaaattagatcctaaatatgggccaatttctaaacattttcatcaaaatcccaaagaatttgctgatgcttttgcaagagcttggttcaaacttactcatcgtgatatgggcccaaaagcaaatt

SEQ ID NO: 210990 - DNA, 1175 bp, Unknown
  Bacterial polypeptide expressing nucleotide sequence isolated from the Sargasso Sea
tactacttttggttttagtggaggacgtcctgatatttggggtcccgaagaagatattcattggggagttgaaaccggttggttagaaagtaacaggtatcaaggtaaacgagagcttgataatccgcttgcagcagtccaaatgggactaatatatgtgaacccacaaggcccagatggaaatcctgatccgcttgccagtgcgcatgacatcagagagacatttggacgaatggctatgaatgatgaagaaacagttgcccttgtagctggaggccatacgtttggaaaagctcatggagctgcaaccgaagatcatgttcaagcagagcctgaaggagcacctcttgaacagatggggtttggttggaccagttcgtatggatctggtgttggcagtgatactattactagtggtattgaaggtgcatggactgcaaatccaactcagtgggataacggttacttcgatttactctttggatatgaatgggaattaacaaaaagtcctgctggtgcgcacatttggcatgcagttgatcaaaaagaggaagatatggcaccggatgcggaagatggctctatcaaagttccaacaatgatgacaacggcagatatggcaatgcgtgaagatcctgcctacagggaggtttcaaaacgttttcacgagaatcctgatcaatttgcagatgcttttgcccgtgcatggtttaagttgttacaccgagatatgggaccaaaagttcgttatatggggcctgaagttccagaagaagagttgatttggcaagatccagtgcctgctggtaatgcagattttgatattgctgccgcaaaatcagcaattcttgatagtggattgtcaattcaaaccatgattgaaactgcttgggcaagtgctgctactttcagaggttcggatatgcgaggtggtgcgaatggagcacgtattcgtcttgaaccccagagaagttgggaggcaaataatcctgcacaactaaatgaagtacttccgatatatgaaaaaattgctgcagaatgcggggcttctgttgctgacattattgtattggctggaaacacagctatcgagcaagctgccggcattgaagtgccctttacaccaggtcgaggtgatgcgtctcaagaccaaactgatatgaatcattgccgta

SEQ ID NO: 210991 - DNA, 964 bp, Unknown
  Bacterial polypeptide expressing nucleotide sequence isolated from the Sargasso Sea
atgagtaaagaaacacaaagttcagaatcaaaatgtccagtcatgcatggaagtctttcttccaatagctccactggaacatctaatcaagattggtggccaaaccaattaaatttaaacattcttcatcagcatgataggaaaacgaatccaatggatgaagattttgattatgctgaagaattcaaaaaacttgattttcatgccctcaaaaaagatcttaatgatcttatgactgactctcaggaatggtggcctgcagattacggtcactatgggccattctttattagaatgacatggcatgccgcaggtacctatcgtaccggcgatggaagaggcgggggcggcactggtgctcaaaggtttgctccattaaatagttggccagataatggaaatcttgataaagctcgaagacttctttggccaattaaacagaaatatggaaaaaagattagctgggccgatttattaatacttgctggtaatgtagctattgaatcaatgggtggaaaaacatttggatttggaggaggaagacctgatatttgggctcctgaagaggatataaattggggagcagaaacagaatggctttccaatgaaagatacagtggagtgagggacttagcgaacccattgggcgctgttcaaatgggtttaatttatgtaaatcctcaaggtcctgatggagatcctgatccaattgcaagcggtagggatgtcagagaaacattcgctagaatggcaatgaatgatgaagagactgttgctttggtcgcaggtggtcatacctttggaaaaggtcatggtgctggcgcagaggagcatgttcaaaatgagccagagggtgcgccacttgaaaatatgggatttggatggcaaagcactcatgcatctggaaagggctctgatactattaccagtggttttgaaggagctggacggctgatccaattaa

SEQ ID NO: 210992 - DNA, 1161 bp, Unknown
  Bacterial polypeptide expressing nucleotide sequence isolated from the Sargasso Sea
atattggttcctggatgcacacaactccttctaaaaaagttcctccgatgatgctaactacagatctttcgttaagaatggatcctaaatatggtccaatttctaaaaattttcatgaaaatctagatgagtttgcagatgcatttgcgagagcttggtttaagcttacacatcgtgatatgggacctcgtgcttgttatttaggtccagaagttccaaaggaacaattaatttggcaagaccctatctcaaaagttaaatataaacttaaaaataaagatattaatatacttaaagcaaaaatattaaaatcaggactttctatatcccagttagtttctacagcttgggcgtcagcatctacatttcgtggctcagataaaagaggtggagctaatggagcaagaattcgacttgaacctcaaaaagattggaaagttaacaatccatctcaattatctaaagttcttaaaactttagaaaagatacaaaaaggttttaatactaaaagtaaaatggtttcgatggctgatttaattgttttaggtggttgcgttggagttgaaaatgcggctaaaaaagctggtcacaaaataacagttccatttacaccggggcgtggcgatgcttcacaagagcaaacagatgtatattcttttggtttacttgaaccaaaagcagatggatttagaaactatattgtaaaaacatctaacggatcaggaaaaaaacctactgtatcggccgaagaaatgctggttgataaggcacagttaatgaaacttactgcgcccgaaatgacagttcttgttggtggcatgcgtgtattaaatacaaattttgataaatcaaaacacggagtatttacaacaaaaccagaaacacttacaaatgatttttttgttaacttgctggatatgggaacaaaatggaaagaagtttccaaagcagaagatttatttgaaggaaaagatcgtaaaacaaataaagtaaagtggatcggcactcgtgctgatcttatatttggatctaattctcaactaagagctttagcggaagtttacgcttgcgaagactctaaacctaagtttattgcagattttatatcagcatggacaaaggtaatgaatttagatcgttttgatttgaaaaaaatttaaa

SEQ ID NO: 210993 - DNA, 1183 bp, Unknown
  Bacterial polypeptide expressing nucleotide sequence isolated from the Sargasso Sea
atgagtaagtgtccattttcaggtgcagctataaaacctactacgctaacgtctagcaatggtgcgcccgttgccaatgataatcagagccgaacagcggggccacgcgggccggttacgttcgacaaccattatttgtttgagaagcttgcgcacttcaaccgcgagcgaattccagagcgtgtagttcacgcaaggggcagtgctgcatatggcacctttacgctaactaagagcttatctgactacactattgcagactttctgcaaaaagaggggcaaaaaaccgacgtgtttttgcgcttttctaccgtaggtggtggtcaggattcaagtgactatgcccgtgatcctcgtggtttctcagtgaagttttataccgaacagggaaactgggacatggtagaaaataatactccggtattcttcttacgagatggcatcaagtttcctgacttcattcacagtcaaaagaaaaacccgcgtacgaatttgccggatccgcaggccgtgtatgagttttgggcgaacaaccctcagtcattacaccaatcgacaatcttgatgtctgatcgcggtattccactttcatatcgccatgtgaatggttatagctctcatacgttgagtttctggaataacgcaggccaacgctattgggtgaaatggcactttaaaactaaccaaggtattaaaacgctaactagcgaagaagcggcaaagatgcctgcttatggcgctcagcaagacttggtcgaaagcattgataacggagaatttccatcgtggaccgtgaatgtgcagattatgactgaagaggaagcgcgtaattaccacattaacccgtttgatctaacgaaggtgtggcctcacagcgactttccattaattgaagtagggcagttggagttaaaccgtaatgttgataactactttgcagaaactgagcaagcagcgttcgcgccgagcaatttggtaccgggtattggtgcgtcgccagacaggatgcttcaagcgcgactaattggatatcaagatgcgcacagataccgcattggtgcaaactacaaccaaataccggtaaacgcgcctcgttgcccagtgcacaattatcaacgagatggagcctttgcgggaattaacccagcacttgcaggaagtggagccaacttctatccaaaca

SEQ ID NO: 210994 - DNA, 2143 bp, Unknown
  Bacterial polypeptide expressing nucleotide sequence isolated from the Sargasso Sea
tatgactgataaagttgaaagtaagtgtcctgtaatgcatggggcgatgacaactcatagttcaagcggaacatcaaataaagactggtggccaaatcaattaaatttaaacatcttgcatcagcatgacgtgaagtcgaatccaatggatgacgattatgactacagaaaagaatttgaaaaaattgattacgatgctttaaaaaaggacttaaatgacttaatgactgactcgcaagattggtggccagctgattacggacattatggtcctttctttataagaatgacatggcatgcagcaggaacatatagaaatacagacggacgaggtggaggtggaacaggtgcacaacgtttcgctcctttaaatagttggcctgataatggcaatttagataaagctagaagacttctttggccaataaaacaaaagtatggtaagaaaattagctgggcagacttattaattctggctggtaatgttgctatagagtctatgggtggtacaacttttggatatagtggaggtcgaccagatatttgggggcctgaagaagatatacattggggtgttgagtcagagtggcttgaaaataaaagatataaaggcgaaagggaattagataatcctcttgctgcagttcaaatgggtctaatatatgtgaatccacaaggtccagacggcaatcctgatcctttagctagtgctcatgatatacgagaaacatttggaagaatggcaatgaatgatgaagaaacagtggcattagttgcaggaggtcatactttcggtaaagctcatggtgcaggtgcagaaactcatgttcaatctgagcctgaaggtgcgcctctagaagaaatgggttttggctggacaagcacatacggctctggagttggtagcgatactatcacaagcggtattgagggtgcatggactgcgaatccaacacaatgggacaatgggtactttgatttactatttggttatgattgggagctaacaaaaagccctgctggtgcacatatttggcacgcagttggtcaaaaagaggaggatatggcacctgatgcagaagactcatcaaaaaaagtacctactatgatgacaactgcagatatggccttaagagaagatccgagttataacaaaatctcaaaaagatttcatgaaaatcctgaagagtttgctgatgcttttgcacgagcatggtttaaacttcttcacagagatatgggtccgataactaggtatatgggcccagaagtgcctgaagaagaattaatttggcaagatcctgtcccagcaggaaattctgattatgatattaaaaatgtaaaaaaattaattaccgaatcaggtttatcaattcaggaaatggttgaaaccgcatgggcaagtgcatctacatttagaggttcagatatgcgaggtggtgcaaatggtgcacgaattcgtttagcacctcaaaaagactgggaagctaataacccaagtcgactgagtaaaatccttgaaatatacgaatcaatttccaatacaactggtgcttcaattgcagatgtaattgttttagctggtaacgtaggcatagaaatggcaactggtgaggaagttgcatttattccaggaagaggagatgcctctcaagaacaaacagatattgaatcatttgaggtgcttgaaccaaaatcagatgcctttagaaattttcatgcaaaaggtgtaaatactgctcctgaggaaattatgctagataaggctcaattactaggtcttacagctcccgagatgaccgttttggttggaggaatgagatcacttggaataagttctaatggatatggcttattctcagaagatacaaataagttaagtaatgattattttaagactttgcttgatatgtctgttcaatggaaacctaatggaactggaaattcatatgaggcatttgatcgaaagtctggcgaaaaaattagaactgcatcaagatctgatttagtttttggttctaactctcaacttagagcaattgttgaagtttatgccgaagacgattcaagtgagaaatttactaaagatttcattaaagcttggaataaggtaatgaacgctgacaggtttgatgtacagtaa

SEQ ID NO: 210995 - DNA, 1258 bp, Unknown
  Bacterial polypeptide expressing nucleotide sequence isolated from the Sargasso Sea
aatccgactcaatgggatatgggttatttagattgcctttatgatcatgaatgggagcttacaaaaagtccagctggtgctcatcagtggacaccaaagaaaaatggacaaaaaataaaaatggttcctgatgcacatgataaaaatgttcttcatcctccaatgatgcaaacaacagatatttcaatgaaagttgatccaagttatgggcctattacaaaacattttcatagaaatccaaaagaattccatgatgcatttgctagggcgtggtttaaactaacccatagagacatgggaccaagagtttgttatcttggcagcgatgttccaaaagaacaattaatttggcaagatccaattgataaaccaaaatataaattaaaatcaaaagatattaatgacttaaaatcaaaaatatcaaaatctaaactatcagtttctgatttagtttctactgcttgggcttcagcttcaacttttaggggttctgacaaaagaggtggtgctaatggtgcaagagtaatgttagagccacaaaaaaattggaaagtaaataacccttctaagctctcaaaagttatctcaatgttaagcaaaattaagaaacaatttgataataaaaagaaaacagtttcaatggctgatttaattgtcttagctggaggagtgggagttgaaatggctgctaaaaaagctggacataaagtaaaagttccattttctccaggtagaggagatgcgagacaagatcaaacagatgtgaattcatttgggttattagaacctcaagcagatggttttagaaattatctaaatggtggtaaatcaattgtatcagctgaagaaaagctaattgataaagcacaattaatgggtcttactgctccagaaatgacagtattaattggcggaatgcgagttttaaatactaattttgataattcaacatatggggttttcacaaaaaaacctggtgtattaacgaacgattatttcacaaatttattagacatgaatacaacatggaaagaaactgataaatctgagcaaacatttgctggagcagatagaaagacaaaaaaaacaaaatggaaaggaacaagagttgatcttatttttggatcaaattcacaattaagagctttagctgaagtttatgcatgtgaggactcacaagaaaaatttgtaaatgattttatctcggcatgggtaaaagtaatgaatgctgatagatttgatttaagacttaattaaa

SEQ ID NO: 210996 - DNA, 2239 bp, Unknown
  Bacterial polypeptide expressing nucleotide sequence isolated from the Sargasso Sea
aatgagtactgaaaatttcaaaaataaaacttttaaatcaaatgagttaagcaaatgtccttttacaggagcaggcacacctgcaaagttttctgcaggaagaggtcaaacagtaagagacttctggccaaatagtttaaatttaaaaattcttagtcagcattctaatttatcaaaccctatggataaaaaatttaattatgcaaaagaatttaaaaaacttaattacaaggcgttaaaaaaagatttaaaaaaattaatgacagaatcacaagaatggtggcctgcagattacggtcattatggccctctatttatccgactagcttggcacgctgcaggaacttacaggactggagatggtagaggtggtgccggtactggtaatcaaagatttgctccactcaattcttggccagataacgtgaatttagataaagcaaggttacttttatggccaatcaaaaaaaagtatggaagaaaaatttcatgggcagatctatttatattagttggaaatgtagcattagactccatgggttttaaaacttttggttttggtgcaggtagaacagacatctgggaaccagaggatgatatttattggggttcagaaaaagaaatgctaggtgttgagaggtacagtggaaaaagagatctagagcagccgttaggtgcttctcacatgggtttgatttatgtaaatccacaaggtccagatgcaaatccagatccgctactagcagcacacgacatcagagaaacatttggaagaatggctatgaacgattatgaaacagcagctttagttgctggaggacatacatttggaaaatctcacggagcagcgtcagaatcttacaaaggtccagatccagaagcttcaaaacttcaagaccaatctactggatggaatagtggatataaatctggaaaaggcgttgatacgataagtagtggtattgaaggcgcttggacacaaaaccctacaaaatgggatatgggttatttagattgtttatatggtcatgattgggagctaacaaaaagcccagctggagctcatcaatggactccaaagaaaaatggtcaaaaaattaaaatggttcctgatgcgcaccaaaaaggtgtgcttcatccaccaatgatgcaaacaacagatatatcaatgaaagttgatccgagttatggaccaattacaaaacattttcatcaaaaccctaaagagtttcatgatgcatttgctcgggcatggtttaaattaactcatagagatatgggtccaagagtttgttacttgggtaatgaagttccaaaagagcaattaatttggcaagatccaattgataaaccaaagtacaaacttaaatcgaaagatataaaagatttaaaaaacaaaatttctaaatcaaaaatatcaatttcagatttagtttctactgcatgggcgtcagcttcaacttttagaggatcagataaaagaggtggtgctaacggtgcaagaataatgctagaaccacaaaaaagctggtctgtgaacaatcctaagaaattatcaactgtggttaaagctctaaataaaattaaagatcaatttgataataaaaagaaaagtgtatcaatggcagacttaattgtcttagcaggcggtgttggtattgagatggctgctaaaaaggcagggcataaagttaatgttccattttcagcaggcagaggagatgcaacacaagatcaaactgatatccattcttttggtcttcttgagcctcaggcggatggttttagaaactatctaaatggcggagcttcaaatgtctcagcagaagaaaaattggttgataaagcacaactaatgggtctgactgcaccagaaatgacagcacttataggcggtatgagagttttaaatactaactatgatggctcaaattatggcgtttttacaaataaacctggttctcttactaacgattacttcgtaaatctattagacatgaacactacatggaaagaggaagataaatcagaacaaacttttgttggaaaagatagaaaaactcaaaaaactaaatggaaagcaacaagagttgatttaatttttggttcaaactctcaactaagagcacttgcagaagtttatgcttgtgaggactcaagtgaaaaatttgttaaagattttatagctgcatgggtaaaagttatgaattctgatcgatttgatttgaagttaaattaa

SEQ ID NO: 210997 - DNA, 1044 bp, Unknown
  Bacterial polypeptide expressing nucleotide sequence isolated from the Sargasso Sea
aatgtcaatagaagaagcaagaacacagagtccaaaccttcaaaatggagaaagtaggtgtcctgtggcccatgggtctagcgagcaacatacaaatagcgctaggtcaaatagagattggtggccagaacaaatcaacctaagtatacttcatcaacatgatacaaaatcagacccaatgggcgaggatttcgattatagtcaagaatttaaaaaacttgattatgctgctttaaagcaggacctcaatgaccttatgacagattcacaagattggtggccagctgactatggtcattacggaccattttttattagaatgacatggcatgctgctggcacttatcgaactgcggatggtcgcggtggcggaggaactggatcacaaagatttgcaccaacaaacagctggcctgataatactaacctagataaggcccgtaggcttctctggcccatcaagcagaaatacggaaataagatcagttgggcagacctaattatactgacaggtaatgttgctattgagtccatgggtggaaagacctttggttttggtggtggaagggctgatatatgggcacctgaagatgatattttttggggcaaagaaatagaatggcttggtaatgaacgttatactggagatcgcgttctagatatgccccttggtgcagtccaaatggggttaatatatgttaacccccagggtccagatggtaatccagacccgctagcaagtgctagggatattcgtgagacatttggaagaatggcgatgaatgattatgaaacggttgctttaacagctggagggcatacctttggaaaagcacatggtgcagctagcgaggatttcaaaggagctgaccctgaaggtgcacccttagaagaaatgggttttggctggaaaagtggccatggaaagggacttggccgtgatagtattaccagtggaatcgaaggagcctggacaccaaatccaacacaatgggataatgggtattttgatatgttatttggttatgaatgggagctagtcaa

SEQ ID NO: 210998 - DNA, 1450 bp, Unknown
  Bacterial polypeptide expressing nucleotide sequence isolated from the Sargasso Sea
atgaacgacaagaccctgcacagtgccaatggcgcccccgttgtcgacaacaacaacagcctcaccgccggcccccgcggcccggtgctgatgcaagacatctggttgatggaaaagttggctcacttcgatcgggaacggatcccggagcgggtggttcacgctaaaggctcgggcgcctacggcacctttaccgtgacccatgacatcagtgccttcagcaaggccgacctgttcaatgccgtcggcaagcagaccccggtgttcctgcgcttctccaccgtggccggtgagaagggagccgccgacgccgagcgcgacgtgcgcggcttcgccctcaagttctacaccgagcagggcaactgggacctggtgggcaacaacaccccggtgttcttcattcgcgatccgctgaagttccccgatttcatccacacccagaagcgggatccgcgcaccaacctgcgcagtgccaccgccgcctgggacttctggtcccgccatcccgagtccctgcatcaggtcaccatactgttcagcgatcgcggcatccccaagagcctgcgcgagatgaacggctacggcagccacaccttcagcttcatcaacgatgccaacgagcgcttctgggtcaagttccacttcaagaccgagcagggccacagcttctacaccgatgaagaggctgccaccgccgtcggccaggatcgggagaccagtcaggccgatctgttcaacgccatcgaacggggcgacttcccgcgctggaaggtctatgtgcaggtgatgccggaggccgaagcccagacctacaagatccacccgttcgacctcaccaaggtgtggccacacagcgactacccgctgatcccggtcggcgtgctggagctcaaccagaacccggacaactacttcgcccatgtggagcaagccgccttcaccccggccaacgtggtgcccggcatcggcttctcgccggatcgcatgctgcagggccgcctgttctcctacggtgacacccagcgctatcgcctcggcgtcaaccacggcctgctgccggtcaacgccccgcgctgcccgttccaccacggtgcccaccgcgacggcgccatgcgggccgacagcaacggcggcgccagccccaactaccagcctaaccgcttcggcacccagcagccgagcgagcagcacgagccggcactgagtctggaaggggccgccctgcactacgattttcgcgactacgacagcgactactacagccagccgggcaacctgttccggatcatggacgaggggcagcgctcacgcctcgctgccaacctggcacgttccctgatcaacgtggaggatgacgccatcgtcgcggcccagctcaagcacttcgagcaggccgaccccgagtatgccaagcgggtcgagctggcgctggccgccctgcagcgctaaa

SEQ ID NO: 210999 - DNA, 1714 bp, Unknown
  Bacterial polypeptide expressing nucleotide sequence isolated from the Sargasso Sea
atggatggtgtaagcaaatgtccagttatgcatggggcagttactagtaacaattctgaaagaactaccaataaagagtggtggcctaatcaacttagaataaatattttacatcaacatgataaaaggtctaatcctctaaaaattgatcatgattatagaaaagaatttttaaatttagattattttgctctcaaggatgaccttaaaaaccttatgacagattcgaagacatggtggcctgcagactttgggcactatggtccattcttcataagacttacttggcatgcagctggaacatacagaactggtgacggtcgtgggggagcaggtactggtgcacaaagatttgcacctctaaatagctggcctgataatggaaatttggataaagcacgaagattgctttggccaattaaacaaaaatatggaaaaaaaattagctgggcagatttattggtcttggcaggtaatgttgctattgagtcaatgggtggaaaaacttttggttttagcggtggtcgagcagatatttggtctcctgaagaggatattttttggggagttgaaaaaggatggttagataataatcgatacaaaggtaagcgagagttagatatacctttagctgcagttcaaatgggattaatatatgtcaatcctgaaggtcctgatggcaatccagatccattggcgagtgctcatgatattcgagaaacatttgcgagaatggctatgaatgatgaagaaacagtagccttagttgctggagggcatacttttggtaaagcccatggtgcaggaaaccctgatttagttggagctgagcctgaaggtgcacctatcgagcaaatgggacttggttggaaaaatgatcatggaacaggcgttggtagagatgctactacaagtggcatagagggagcctggaccgcaaacccaacacaatgggataatggttattttgatttgttattaggttatgattggaaacttacaaaaagtccagcaggagcccatatttggcatgctgttaaccaaaaagaagagcatatggcccctgatgcagaaaatgctgatatcaaagtaccaacaatgatgactactgctgatatggctttaaaagaagacccatcatatagaaaaatctcagaaagatatcataaaaatccagatgaactttctgataaatttgcaagagcctggtttaaattactacatagagatatgggaccgaagactagatatttgggtcctgaagctccaagtgaagatttaatttggcaagatccagtaaaaaaaggtaattcaaattatgatttaaataaagccagagaattattaaataaattagatttaaatagttccgaaatgattgaaactgcttgggcatctgcatctacatttaggtcatcagacatgcgtggtggtgcaaatggtgctcgtattaaattagacccacaaataaattggaaagttaataagccagatcagcttaaaaccattattagcaagtatgaagcaatatcaatctcaacaggtgcttcaatagctgacataattgttttgggtggctgtgttggaatagaaaaagcgtctggaaaagatgtttcatttttgccaggtcgtggtgacgcaactgaagataatacagataaagattcttttgaagttttggaacctttagctgacggttttagaaatttttaaa

SEQ ID NO: 211000 - DNA, 1246 bp, Unknown
  Bacterial polypeptide expressing nucleotide sequence isolated from the Sargasso Sea
ccaggacattacccgctacaccagggcgaagctattcgcttcgtcgggcaagcagaccccgctgttcgcgcgttttccactgtggccggcgagcgtggcgctgctgacgccgagcgcgatattcgtggcttcgcggtgaagttctacacagaggagggcaactgggacgtggtgggcaacaacacaccggtgttctttttccgcgacccgatgcgctttcccgacttgaatcacgctatcaagcgcgacccacgcaccgggctgcgttcggccgacagcaactgggatttctggacgctgctgcccgaggccctgcaccaagtgacaatcgtcatgtcagaccgtggcatcccccgcagcttgcgtcacatgcatggcttcggcagccataccttttcgctgatcaacgaagcgaacgagcgagtgtgggtcaaattccatttccgtagtcagcagggtatcgagaacctgaccgacgagcaggctgcggcgttgatcgccacagatcgcgaaagccatggtcgagatctgctcgaagccatcgagcggggggatttcccgcgctggacactgttcatccaggtcatgacgcaggcacaggcacaggcgcacaagcacaacccgttcgacctgaccaaggtgtggccgaagaccgactacccgttgatcgaggtgggggtgatggaactcaaccgctacccggacaactatttcgccgaggtggagcaggtggcgttctcgccagccaacgtggtgcccggtattggcttttcaccggatcgcatgctgcaggggcggctgttctcctatggcgatgcgcagcgctatcgtctgggggtgaatttcaaccacatcccggtcaatgcgccgcgttgcccgttccatagctatcaccgtgacggcgccatgcgcaccgacggtaacctggggcccacggcgagctactggcccaacagcaaaggcacctggattggcgacgacccatcgctgaaggagccgccactggagctcgacggtgcggccgaccattgggatcatcgtcgcgatgacgactactacgagcagcctggcaacctattccgcctgatgactcctgcgcagaggcaggtattgttcgacaacaccgcgcgggccttgggggatgcgcgtctggaagtgaagctgcggcatgttgccaactgcgccaaggccgaccccgcctacggtgcaggtgttgcccaggccctgggcctgccgcctgcctgac

SEQ ID NO: 211001 - DNA, 1469 bp, Unknown
  Bacterial polypeptide expressing nucleotide sequence isolated from the Sargasso Sea
tcaaggtcctgacggaaatccagatcctttggctagtgcaaaagatattagagaaactttttctagaatggcgatgaatgatgaagaaaccgtagccttgacagctgggggtcatacatttggaaaagctcatggagcagctgacccagataaatttgttggaccagagcctgaaggtgcttccatggaagagatgggtttaggatggaaaaattcatatgaatctggaaaaggctctcatgcaattactagtggcattgaaggagcatggactgcaaacccaacaaagtgggataatggatattttgatcttctttttggttacgaatgggagttagttaaaagtcctgcaggtgcatttcaatggcatcctattaatcctaaaaatgaagacatggctcctgatgctcatgacaattcaaagaaagtcacaacaatgatgactactgcagatatggccatgcgcgaagatccggaatataacaaaatttcaaaaagattccatgaaaatcctgatcagtttgctgatgcttttgcaagggcttggttcaaacttcttcatcgtgacatgggtccaaagagtagatacttgggtccagagataccagatgaagatctaatttggcaagacccagttccaaaagggaaatcagattatgatataaatctcataaaagaaaaaatatctaatctaaatttatccatacaggaaatggttgaaactgcatgggcaagtgcctctacatttagatgtactgatatgagaggtggtgcaaacggatcaagaatcaggttggctccgcaaattaattgggaagcaaataaaccagaacaactaacaaaagtattaaatgcatacgaaaaattatctcaagagactaatgtttctattgctgatattattgtattagctggatgtctggctgtagagaaagcttctggtcaatcagttgcattttccccgggaagaggcgacgcaactaatgaacatactgatgaagattccttcactgttctagaaccactttcagatggttttagaaactttctaaaggaagattatggtgtaagtcctgaagaaatgatgcttgacaaatcacatcttttgggactgactgctccagaaatgacagtcttagttggtggattaaggtcattaggtgtgaccaataatggacatgggatttttagtaaagatattaataaactagataatcaattttttgttaaattattggatatgtctattgattggaagtctacaggtcataattcatttgaaggttatgataaaacagatgatatgaagtacacagcttcacgttatgacttagcttttggatcaaattctcaattaagagcattgtctgaagtatatgcatctatagatggaaaagaaaaattcattactgactttatatcagcttgggcaaaagtaatgaataacgatagatttgatatatcttagt

SEQ ID NO: 211002 - DNA, 1462 bp, Unknown
  Bacterial polypeptide expressing nucleotide sequence isolated from the Sargasso Sea
atgagtcaacagtatttaaccagccagagcggttcccctattgcagacgatcaaaactcgttgtcagcgggtgagcgtggccctttactcctacaagattggcatttaattgaaaagcttgctcattttaaccgtgagcgtattcctgagcgtgtagttcatgctaaaggtactggtgtatacgggactttcactctgaccaaagacttgagtgattacaccattgccgaccatttcaatggtgtgggtaagcaaactgaaaccttcgtgcgtttctcaaccgttggcggtgaaatgggctctgccgatgcagagcgtgacccccgtggttttggtctgcgcttctatactgctcgtggtaatcacgacatagtgggtaacaatacgccgaccttctttctgcgtgatggcattaagttcccggattttatccatactcaaaagcgcaacccattgaccaaccttaaagatccacaagcgatgtgggacttctggtcattaaaccctgaagccatgcatcaggtgacgattttgatgtcagaccgtggtattccggcaaactatcgccaaatgcacggctatggctcgcatactttctcgttctggaatgctaaaggcgagcgtttctgggtgaagtttcactttaaatcgcagcaaggcgtagtgaacttaactaacgaacaggctgataagttaaaagggattgaccctgattcatcacaacgcgatatggtggtggcgatcaccgatggcaacttcccgcgttggacggtgaatgtgcagattatgcctgaggctgatgccaacacttaccatatcaacccatttgatttaactaaggtttggccacatggtgattacccattaattgaaatcggtgtgttagagctgaaccgtttaccgcaaaactactttgcggaagtcgagcaagtggccttagcaccgagtaacttagtgcctggtgtaggcgcctcacctgataaaatgttacaggcacgtttgttcgcctatgccgatgcacagcgttatcgtattggcgcgaattacaaccaattgccagtaaactgtccacatgcggctaaagccaatcatcatcaacgtgcaggcgcaatggcaggaactcaatgtccttatcatggcagtcaaacaggtagtgatgcttcagcaaactatggccctaatagcactgcgggcgccttggtagaaccagcaaactttgctgagccaccactgcgtttagagggcgaggcggcgcgttacagccgatacaatcaggatgattacacccaagccggtaatttgtatcgcatcttcagcgaagatgaaaaagcccgcttagtggaaaccatttcaggctcactgcgtcaagcgagtttagatgtacagcaacgtatgctggcacatttccataaggctgatgcggattatggtctacggatccaaaccgcattagggctataag

SEQ ID NO: 211003 - DNA, 1312 bp, Unknown
  Bacterial polypeptide expressing nucleotide sequence isolated from the Sargasso Sea
cctgagtcacataaaggacctgagccagaaggttcaaaaattcaagaacaagccacaggatggaatagtaattataaaagtggtttaggtgctgataccataagcagtggtatagaaggtgcatggacaagcaatccaataaaatgggacatgggatattttgacaatttatttgggtatgactgggagcttactaaaagtccagctggagcacatcaatggaaacctaaaaaaaatggacacgatataaagatgacacctgatgcacatttaaaatcaaaaaataatttacctatgatgcaaacaaccgatttatcattaaaaatggatccgaaatatgaaccaatttcaaggcactttcataacaacccaaaggaatttgaggatgcatttgcaagagcttggtttaaacttactcatcgtgatatgggacctcgtgcctgttatatgggcccggaagttcctaaagaagaattaatttggcaagatcctattccaaaagcaaaatatagacttcaaaaaaaggatattaatattcttagagcaaaaataataaaatcagggttatcagtctcacaattggtatcaactgcctgggcttcagcttcaacttttcgtggctcggataaaagaggtggagcaaatggtgcaagaataagattaacaccacaaaaagattggaaggttaataatccttctcaattatctaaagttattaagactttagaaaaaattaaaaaaaattttgataacaaaaataaaactgtttcactagctgatctaatagttttaggaggttgcgttgggatagaaaaagcagctaagaaagcaggttacaatacaaaagttccatttactcctggaagaggagatgcatctcaggatcaaacagacccctactcttttagtttgcttgaacctaaagcagatggatttagaaattatattataaaaaaatctaatggaacatccacaaaaccaactgtatccgctgaagaaatgttggttgacaaagctcaacttatgaagctaacagcacctgaaatgacagttttagttggagggatgagagtattgaatacaaattttgataaatccaattatggtatttttacaaaaaaaaaagaaacacttacaaatgacttctttgttaatttgctcgatatgagcacaacttggaaagaagttgataaagatgaaaatttattcaaaggaagtgacaggaaatctaataaacataagtggactggtactcgtgttgatctcatatttggatcaaattcacaattaagagcaatagcagaagtatatg

SEQ ID NO: 211004 - DNA, 1173 bp, Unknown
  Bacterial polypeptide expressing nucleotide sequence isolated from the Sargasso Sea
aatgagcactgaaaattttaaaaataaatcttttaaagccgatcaattaagcaaatgtccttttacaggagccggaacacctgcgaaattttctgcaggaagaggtcaatccgtaagagatttttggccaaatagtttaaatcttaaaatacttagtcaacattctaatttatcaaatccgatgaataagaaatttaattattccaaagaatttaaaaaacttgattataaagctctcaaaaaagatttaaaaaaattaatgacggattctcaagagtggtggccagctgattacggtcattatggacctttgtttattagattagcttggcacgcagcaggcacatacagaactggtgatggtagaggtggagctggaacaggaaatcaacgatttgcaccacttaattcttggccagataacgttaatttagataaggcgagattacttctttggccaattaaaaaaaaatatggaaataagatttcttgggcagatttatttatcctagtaggtaatgttgcattagactcaatgggatttaaaacatttggttttggtgctggaagaactgatatttgggaaccagaagatgatatttactggggatcagaaaaagaaatgctaggcgtggaaaggtatactgataaaagagatttagaacaaccacttggtgcttcacatatgggtttgatatatgttaatccacaaggtcctgatgctaatccagatccaaaacttgcagcacatgatattagagaaacattcggaagaatggcaatgaatgactatgaaacagcagctctagtggccggtggacatacatttggaaaatcacatggagcagcgcctgagtcacacaaaggccctgaccctgaagcttcaagaattcaagatcagtcaactggatggaatagtggatatagatctggaaaaggtgctgatacaatcagtagcggtatagaaggtgcttggacacaaaatccaattcaatgggatatgggttatttagactgtctttatgatcacgaatgggagcttacaaagagtcctgctggtgctcatcagtggacaccaaagaaaaatggacagaagataaaaatggttcctgatgcacacgataaaaatgttcttcaccctccaatgatgcaaacaacagatatttctatgaa

SEQ ID NO: 211005 - DNA, 787 bp, Unknown
  Bacterial polypeptide expressing nucleotide sequence isolated from the Sargasso Sea
agctaatagtgatcttacaattcaggaaatgattgaaacagcttgggcaagtgcctctacatttagagggtcggaccttagaggtggtgctaatggtgcgcgtatcagtcttgcgccacagagtggctgggaggccaacaaaccagaacaattatctcgtgtacttaatgttcttgaaggcattgcaaaagatacgggtgcttcactagccgatgttattgtacttgctggaaatgttggtgttgagaaagcttctggtcgtgaagtaccatttaatcctggacgtggtgatgcttcacaagataatacagatgagcattcatttgctgtgcttgaacctgtatctgatggatttagaaattaccatagaaaaggctttgaaattaatgctgagcacatgctaattgataaagcccaacttcttggtcttacagctccagagatgacagctctagtaggtggtttaagatctttaggtattagttacgatggccatggtgttttcacggatgatacaaataagctatctaatgacttttttgttactttacttgatatgaatgtagagtggaacaaaaaggaaaataatctctatgaggctactgatcgtaagacaggagatgttgtaagaacagctacaagtgtagatcttgtatttggttcaaattcacaactacgtgcgttagctgaggtttatgcttctgatgattctcaatcaaaatttttgagtgattttgttaacgcttggaataaagtgatgaatcttgatcgttttgatttagattaa

SEQ ID NO: 211006 - DNA, 1132 bp, Unknown
  Bacterial polypeptide expressing nucleotide sequence isolated from the Sargasso Sea
ccccaaggtcctgatgctaatccagatccaaaacttgcagcacatgatattatagagacatttggcagaatggctatgaatgattatgagacagctgcattagttgctggaggacatacgtttggaaaatcgcatggtgcagcatctgaatcatttaagggtcctgatcctgaggcttcaaaacttcaagaccagtctactggatggaatagtggttacaaatctggaaaaggtgttgatacaataagcagtggtattgagggcgcctggacacaaaatccaattagatgggacatgggctatttagattgtttatatggacatgaatgggagcttacaaaaagccctgctggtgctcaccaatggacgcctaagaaaaatggtcaagaaattaaaatggttcctgatgcacataagaaaggtgtgctacacccaccaatgatgcaaacaactgatatctcaatgaaagttgatccaagttatggccctattacaaaacattttcatcaaaatccaaaagagtttcatgatgcttttgcaagagcttggtttaaattaactcacagagatatgggtcctagagtttgttatcttggtagtgaagttccaaaagaacagttaatttggcaagatccaatagataaaccaaaatataaacttaagtcaaaagatattaaagatttgaaaaataaaatttctaaatcaaaaatatcgatttcagatttagtatcaaccgcttgggcgtcagcgtcaacttttagaggatcagacaaaagaggtggtgctaatggtgcaaggataatgttagagccccaaaaaaattggaaagttaataatcctaagaagttatcaagtgcgattaaagccttgagtaaaatcaaaagtaaatttgacagtaataaaaaaagtgtttcaatggccgatttaattgtactagcaggtggtgttggaatcgaaatggccgcaaaaaaagctggttataaagttaaagttccattttcagcaggaagaggagatgcgagacaagaccaaactgatattaattcatttggccttctagaaccacaagcagatggctttagaaattacttaaatggtggagcttcaaatgtttctgcagaagaaaaattag

SEQ ID NO: 211007 - DNA, 2188 bp, Unknown
  Bacterial polypeptide expressing nucleotide sequence isolated from the Sargasso Sea
atggacaagacgcaaagttcccaaggtaaatgccccgtgatgcatggggcgaattcagcggtcgccagcaacaatatggactggtggcctaaggcacttaatctcgatattttgcaccagcacgataagaagacggatcctatggatcctaagtttaactatcgcgatgctttcaacagcttggatctcgccgcggtgaagcgcgacctcaatgctttaatgaccgacagccaagattggtggcccgccgattggggacactatggcggcctgatgatccgtatggcatggcactcagccgggacctatagagttgccgatggccgtggaggcgcaggaacgggcaatcaacgctttgcaccactcaatagctggcctgataacgccaacctcgacaaagcccgtcgtctactctggccgattaagaaaaaatacggcaacaaactctcatgggcggatttaatgatcctcgcgggcaatgtggcctacgagtctatgggtttaaaaacctatggattcgccggtggccgagaggatatctggcacccagagaaggacatttattggggctctgaaaaacaatggctagcgccgacggaaaatcccaacagccgttattctggcgaacgtgaccttgaaaaccctttggctgccgtgatgatggggctgatctatgtgaatcctgaaggggtcgatggcaaacccgatcccctgcgtaccgcccaagatgtgcgtgtcacctttgcgcgaatggcgatgaatgatgaggaaaccgtggccttaaccgccggcggccacaccgtgggtaaatgccatggtaatggtaaggcgcaggatcttggccccgagcctgagggcgaagaacttgaggcccaaggtttgggctggctcaataaaaaaggtcctggcacgggcgctaatgccgtgaccagtggcctcgaaggcgcttggacaactcaccccacccagtgggataacggttatttttacttactgttaaattacgactgggaattgaaaaaaagcccagcgggcgcctcacagtgggaaccgattaatatcaaagaggaagataaagtcgtctctgtaggcgatccgaatcgcaagtttaatcccatcatgacggatgcggatatggcgatgaagatggatcctgagtatcgcaaaatctccgagaagttttatcaagaccccgcctatttctccgaggtgtttgcccgcgcttggtttaagttaacccaccgcgatctcgggcctaagagtcgctacttggggcctgaggtgccgaatgaggatttgctttggcaagacccgatcccaagcgtcgattaccgtttagatgccagtgagattgtcgagctgaaggcgaaattattagcctcggggctcagcgtatccgagttagtggtaacggcttgggacagtgcgcgcaccttccgtggctcggatttccgtggtggcgccaatggcgcacggatccgcttagcaccgcaaaaggattggcaggccaacgaacccgagcggctgcaaaaagtgcttaaagtattaacggagctgcaggctagcctaagcaaaaaagtcagcatcgccgacttaatcgtattaggcggcgccgcagcgattgaaaaggccgcgcacgctgcgggagtcaaaatcacagtgccctttatccccggccgtggcgatgcgacgcaggcgatgacagatgtggaatcctttgccgtactcgagcctttgcacgatgcgtatcgcaactggcagaaaaaggattatgtggttcagcccgaggagatgatgctcgatcgcactcaattgatgggattaaccgcccatgagatgactgtattgattggggggatgcgggtgttaggcactaactatggcggcacgcgtcacggtgtgtttaccgataaagttggtgtgttaagcaatgatttctttgtgaatctcaccgacatggcctacaactggaagcctgcgggcagcaatctttatgagatagtcgagcgtaaaactggcgcggtgaagtggaccgcgacccgcgtcgatctggtgtttggctctaactcgattttgcgctcttatgccgaggtgtatgcgcaggatgatgccaaagaaaagtttgtgcatgactttgtggcagcttggactaaggtgatgaatgccgataggttcgaccttgcctaat

SEQ ID NO: 211008 - DNA, 934 bp, Unknown
  Bacterial polypeptide expressing nucleotide sequence isolated from the Sargasso Sea
atgagtagtattgaaaaatgccctgtaatgcatggcgctatgactagtaacaaagatacaggaacttcgaatagagactggtggccaaaccagttaaatctatcaattcttcatcagcatgatcaaaaatctaatccaatgaataaagattttgattatagagaagaatttaagagcattgattatactgctttaaaaaaagatcttacaagtctcatgacagattcacaagattggtggccagctgattatggacattatggtcctttttttattcgtatgacatggcatgcggctggaacttatagaactggagatggaagaggaggtggaggaactggagcacagagatttgcccccttgaatagttggcctgataatggaaaccttgacaaagcacgaaggttgctttggcctattaaacaaaaatacggcaataaaattagttgggcagacttattaatattagcaggaaatgttgcaatagaatctatgggtggaaaaacttttggttatagtgggggtcgtccagatatatgggcccctgaagaagatatttattggggcgtcgaaaaagagtggctagaaaataaacgatacaaaggagagcgtgaattggacaatccattagctgcagttcaaatgggtttaatttatgttaatcctgaagggccagatggtaatcctgatccccttgctagtgcaaaagatattcgcgaaacttttgggagaatggctatgaatgatgaagagactgtagcgcttactgcaggtggtcacacctttggtaaagcacatggtgctggagacccttctcttgtcggtcctgaaccagaaggtgcaaaaattgaagaaatgggctttggatggattagtaaacatggttctggcaaaggtagtgattctataacgagtggaattgaaggagcttgga

SEQ ID NO: 211009 - DNA, 1222 bp, Unknown
  Bacterial polypeptide expressing nucleotide sequence isolated from the Sargasso Sea
atgactgataaatcagaaggaaagtgtcctgtaatgcacggggcaatgacaacacatagctcatctggcacatctaataaagattggtggcccaatcagcttaatttaaacatcttgcatcaacatgactctaaatcaaatcctatggatgatggttttgattatagaaaagagtttaaaaatattgattacaatgctttaaaaaaagatttaaacgaattaatgacagactcacaagaatggtggcctgcagactatggccattatggcccgttctttattcgaatgacatggcatgcagccggaacctatcgaaatactgatggaagaggtgggggaggaactggtgctcaacgttttgctccactaaatagctggcctgataatggaaaccttgataaagctagaagattactttggcctataaaacaaaaatatggaaaaaaaataagttgggcagatctactaatacttgcagggaatgttgctattgaatcaatggggggtactacatttggttatagtggtggaagacctgatatttggggtcctgaagaagatatccattggggtgtagaatcagaatggcttgaaaacaaaagatataagggtgaaagagaattagacaatcctcttgcagctgttcaaatgggattaatttatgtaaatcctcaaggacctgatggaaaccctgatcctctagcaagtgctcatgatatcagagaaacatttggaagaatggctatgaacgatgaagaaactgttgcattagttgcaggtggtcatacttttggtaaggcccatggggcaggtggtgaagatcatgttcaatcagagcctgaaggagctccattagaggaaatggggtttggttggacaagtacatttggttcaggagttggaagtgacacaattacaagtggtattgaaggagcatggactgctaacccaactcaatgggataacggctattttgatctactttttggttatgagtgggaacttactaaaagtcctgctggtgctcacatatggcatgctgtaggtcaaactgaagaagatatggcaccagatgccgaagatgcttcaaagaaagtaccaactatgatgactactgcagatatggctttaagagaagacccaagttacaacaaaatctcaaaaagattccatgaaaatcctgaagaatttgctgatgcttttgcgcgagcttggttgtaaa

SEQ ID NO: 211010 - DNA, 703 bp, Unknown
  Bacterial polypeptide expressing nucleotide sequence isolated from the Sargasso Sea
aatgaggtcgacaatgaaaactcaaataaacacaacaaaaactaaattaactttaagcgcattagcccttgcagtggcattacctgcaagtgcggttaccactcttacaaaggacaacggcgcagctgttggcgataatcaaaactcaatgaccgccggtgagcgcggcagtgtattgcttgaagacgtacacctaattcaaaagctgcaacgttttgcacgcgagcgtatccctgaacgtgtagtgcatgcgcgaggaactggcgcacacggcgtgtttgtagcctcaaaagaactagacgatttaacaattgcggcgccatttgcagaagcaggtaaagaaacagacgtatttgttcgtttttcatcagtaattcactcaaaaggtagccctgaaacgctgcgtgatcctcgtggctttgctacaaaattttacacagaccaaggtaattgggatttagtaggtaacaacttacctgtgttctttatccgtgacgcgattaaattcccagatatggttcactcgttaaagccatctccggtagataacattcaagatcctaaccgcttatttgagtttttttcgtacgagccgggctctactcacatgttaacgtgggtatacagcgactacggtacaccagcaagcttacgtaaaatggatggttggggagtacatgcatataaaatgattaataaatca

SEQ ID NO: 211011 - DNA, 1159 bp, Unknown
  Bacterial polypeptide expressing nucleotide sequence isolated from the Sargasso Sea
catgtccgacgatagccagaacacatcaactgccggtaagtgtccttttcatcagggcggtcacgaccagagcgcgggagcaggaacgaacaaccgcgactggtggccaaatcaactgcgcgttgatcttttaaaccaacattccaaccgttctaacccgctgggtgaggacttcgactaccgcaaagagtttagcaaactcgactactctgccctgaaaggggatctcagagcccttctgtccgaatctcaaccgtggtggcccgctgactggggaacctatgctggattgtttatccgcatggcatggcacggtgcagggacctatcgctccatcgatggacgcggtggcgcgggtcgcggacagcagcgttttgcaccactgaactcctggccggacaacgtaagccttgataaagcgcgtcgtctgctgtggccaatcaagcagaaatatggccagaaaatttcctgggccgacctgtttatcctcgcgggtaacgtggcgctggaaaactcaggcttccgcaccttcggctttggtgctggtcgtgaagatgtctgggaaccggatctcgacgtaaactggggtgatgaaaaagcctggctgactcaccgtcacccggaagaactggccaaagcgccgctgggcgcaaccgaaatgggccttatctatgtgaacccggaagggccggaccatagcggcgaaccgctttcagcggcagcggctattcgcgcgaccttcggtaacatgggaatgaacgacgaagaaaccgtagcgctgattggcggcggtcatacgttgggcaaaacccacggcgctgcaccggcttcgcacgtaggcgccgatcctgaatccgcaccgattgaagcacagggcctgggctgggcgagcagctacggcagcggcgcgggcgcggatgccattacatccggtctggaagtggtctggacgcagacgccaacccaatggagcaactatttcttcgagaacctgttcaaatacgagtgggtacaaactcgcagtccggcaggcgctattcagtttgaagcggttgacgcgccagaaattattcctgatccgtttgatccatcgaaaaaacgtaagccgacgatgctggttaccgacctgacactgcgtttcgatcctgagttcgagaaa

SEQ ID NO: 211012 - DNA, 1504 bp, Unknown
  Bacterial polypeptide expressing nucleotide sequence isolated from the Sargasso Sea
aatggctaagaaaccgcaattaaccacgtcggcaggcgcccccgtagtaagtaacgaaaccactaaaacagcaggagagcgcggccccgccctcttacaagattatcaactaatcgaaaagttagcgcatcaaaaccgcgaacgaattccagaacgtgtcgttcacgcgaaaggctggggtgcacagggcacatttacggtcacgcacgacattaccgattacacatgcgctgacttattctcagaagtgggtaaacaaactgaagtattaagccggtggtctacggtagcgggagaatcaggcgcagctgataccgagcgtgacgtgcgaggctttagtttgaagttttacacacaacaaggcaactgggatatggtaggtaataatactcctatcttcttcattcgtgacggatacaagttccctgacttcattcgtacgcaaaaacgtcatccgaaaactaacctgcgctcaccagaagccatgttcgacttttgggctgcacagccagaaagcgtgcatcaagttaccattttaatgtcggaccgtggtattccggtgtcacctatgcacatgaacggctatggcagccacactttcagcatgtggaataaagaaggcaagcgtcattgggtgaagttccatttcaaaactcaacaaggcattaaaaactacaccaatgaaacgtctgaaaaaatcattggaagcactcgggaaaaatatcaagaagagctatataacgccattgaagaaggcaatttcccaaaatggacaatgtacattcaggccatgccagaagaggaagcaggacagcaaagctataacccgttcgacctaaccaaggtgtggccgcacgatgactatccgcttattgaagttggcgaactggaaatgaacagaaatccagaaaactactttcaaatgatagaaaacgcagcattcagtccgtcaaatgttgtccctggtattggctttagccctgacaaaatgcttcaggctcgcatattttcttatgctgatgcccatcgctatcgtttgggcacacactatgaagcactccccgctaacgcgccgaaaaatagcaaggtaaaccactatcacaaagacggcgcgatgcgcttctttaccaatgattttggtaaccctgacgcctactatgagcccaatcaatacgaaggtccggtggctgacttttcagtgaaagagcctccgcttcgcattgatggagacgctgatagatatcatcaaggtgaagcagatgtggattacgtgcagccgcgaaaactgtatgagatgttttctgatgatcaaaaagaacggctatataaaaactacgctgccgctatgggcccgtgctcagataacgtaaaagagcgttggtacgccgtgctagaaaaggtacacccagattacgccgcaggcgtacgaaatgcggtagaaagcttagataccgacgtaaatacggtaccgattactgaaaatacccctatcgaagatagctaa

SEQ ID NO: 211013 - DNA, 2140 bp, Unknown
  Bacterial polypeptide expressing nucleotide sequence isolated from the Sargasso Sea
atgagtaatgcaactgaaaatgaaagtaaatgccctgttatgcacggagctatgaccagtaatagttcaactggtactgccaataaagattggtggcctgatcaattaaatttaggaatacttcatcaacatgataggaaatcaaatccccttggtgaagatttcgattatagagaagaatttaaaaaacttgactatgatgctttgaagaaagatttgaatgatttgatgactgattctcaagaatggtggccagcggattatggtcattacggcccattttttattcgtcttacatggcatgctgcaggcacataccgaagcacagatggacgtggtggtggaggaactggatctatgcgttttgcaccattaaacagttggccagataatggaaacttagataaagcaagacgtttgctatggcctataaaacagaaatatggaaataaaattagttgggctgatcttttaatcttatcgggaaatgttgctattgaatctatgggtggtaaaacatttggattcagcggtggtcgtgaagacatttggggtccagaagaagacattctatggggcgttgaaaaggaatggcttacgaataacagatatcaaggtgaaagagaattagataacccacttgctgctgttcaaatgggattgatttatgttaatcctcagggtcccgatggaaaccctgatccactggctagcgcaaaagatatcagagaaacatttggaagaatggcgatgaatgatgaagaaaccgtggctttaattgctggaggacatacctttggtaaggcacatggtgcatcattagaatcaaatgttggagtagagcccgaaggtgctccaattgaatcaatgggatttggttggaaaaatgaacacggttctggtgttggtggtgatgcaataacaagtggtcttgaaggcgcatggactgcagatcctatcaaatgggataatggatattttgatttgcttttcggatatgattgggaattaggcaaaagccctgcgggagcacaccagtggtttgcaaaagaccagaaagatgaagatatggctccggatgctcatgactcatcaaaaaaagtacctactatgatggctactactgatatagctctaagagaagatccaatttataaagagatttctaaaagatttcatgaaaatcccgatgaatttgccgatgcatttgcaagagcatggttcaagcttttacatagagatatgggcccaataacaaattatattggaccagaagcccctaccgaagaattgatttggcaggatcctgtgcctgttggaaataaagattatgatgtaaaatctgtcaaaagtaaaattgaggaatctagtttaagtattcaagagcttgtcgaaaccgcttgggcaagtgcctcaacatttagaggctcagacctcagaggcggagcaaatggtgctcgcataagacttgaacctcaaaaaaattgggaggttaataaaccagagcaacttgaaaaagttttatcagtttacgaaactatttcttcagaaacaggagcatcaattgcagatattataattcttggcggaaatcttggaattgaaaaagcttctggcaagactttagattttactcctggtcgaggtgattcatctcaagatcaaacagacatagactcttttgcttatctagaaccgctttctgatggttttagaaattatcatcgggatggtcttgatgttaaagcagaagaaatgatgcttgatagagctcaacttcttggattaacagctccagaaatgacagtattgcttggtggattaagatcattaggcataactcataatgggtatggcaatttttcagaaaatccaaatgaattaacaaacgattatttgacaaagttattagacatgtcagtgtcttggcagactaatggaactggtaattcttttgaatctattgatagaacaacaggtgataaagtttcatccgcttcaagagttgatttagtttttggttcaaattctcagttaagagctattgctgaactttatgctcaagaagactcaaaagataaatttgtttctgattttatttctgcatggaataaagttatgaactctgatttatattaat

SEQ ID NO: 211014 - DNA, 2173 bp, Unknown
  Bacterial polypeptide expressing nucleotide sequence isolated from the Sargasso Sea
aatgtctatagaagaagcaagaacacagagcccaaatctttcaaatgagggaagcgggtgtcccgttgctcacggatcaagcgagcaacatacaaatagtgctagatcaaatagggattggtggccagaacaaataaacctgagtatcctacatcagcatgatcaaaagtctgacccaatgaatgaaggctttgattatagagaagagtttaaaaaacttgattatgatgcactaaagaaagatctaaatgacctaatgacagactcacaagattggtggcctgcagactatggtcattatggtccctttttcattcgaatgacatggcatgctgcgggtacatatcgaactgcggatggtcgcgggggtggaggaactggatctcaaagattcgctccaactaacagttggcctgataatactaatttagataaggcacgtagactcttatggccgatcaagcagaaatatggaaataaaataagttgggcagatctgatcatcttgacaggaaatgttgctattgagtctatgggtggcaagacctttggttttggtggcggaagggctgatatatgggcgcctgaagatgatatattttggggtaaggaagtagagtggcttggtaacgaacgctatactggagaacgtgtattagataccccccttggtgcggtccagatggggttgatctatgtcaatcctcaaggtccagatgggaatcctgatcctctcgctagtgcaaaagatatacgcgaaacatttgggcgtatggcaatgaacgattatgaaacagttgctctaacagctggtggacacacatttggaaaagcacatggcgcagcaagtgaggattttaaaggggctgatcctgaaggagcgcctctagaagaaatgggctttggttggaaaagtggtcatggcaaaggaatgggccgggatagtattaccagtggtattgaaggagcctggacaccaaatccgacacagtgggataacggatattttgatatgttgtttgggtatgaatgggagctcgtaaaaagtcctgcaggagcgcatcaatggcaccctgtatctccaaaagatgaagatatggcacctgatgttgaagatagctcaatcaaagtgacaactataatgacaactgcagatatggcaatgagagaggacccagtctacagggaaatctcaaaacattttcatgagaaccctgatgaatttgctgatgcttttgcacgtgcttggttcaaattacttcatagggatatggggcctaaggtcaggtacctaggtccagaagtaccccaagaagaattgatatggcaagaccctgtgtcagctggtagtacgagctatgacgtagaggctgttaaatcaaagatcgctgatagtggtctaactattcaggaaatggtagaaactgcttgggcaagcgcttcaacatttcgaggttcagatcttcgtggtggtgcaaatggggctaggatacgccttgctccacaaaaaaattgggaagcaaataaaccagaacagttatctcgcgttctaagcgtactagaaggtattgcctctgatacaggtgcatcagtagcagatgtgatcgttcttgctggtaatgttggtgtagagaaagcatcaggctctaccgtaccatttacaccaggtcggggtgacgcaactcaagaaaatacagatgaacattcatttgaagtccttgaaccattttctgatgggtttaggaattaccataaaagtgattttgagatcggtgctgagcatatgctacttgataaagcacagcttctaggattaaccgctcctgagatgacagttcttgtgggtgggatgcgatcaatgggtattagtgctaatggacatggactcttaacagattcatctaataaattgacaaatgattggttctccaaattattagatatgtcagtagaatggaaaccaactggtagaaactcttatgaaggaacagatcgagtttcaggtgaaaaagtaagcacagcaactcgtgcagatcttgtttttggatctaactcacagttaagagcccttgcagaggtctatgcatctagtgattcacatgataagtttgttagcgatttcattgcagcatggaccaaggtcatgaacctcgaccgtttcgatctttcttga

SEQ ID NO: 211015 - DNA, 2143 bp, Unknown
  Bacterial polypeptide expressing nucleotide sequence isolated from the Sargasso Sea
tatggctgaaaagaccgaaggaaaatgtcccgtaatgcatggggcaatgacaacaaacagctcttctggaacatcaactaaagattggtggccaaatcagctaaatctcaatatattgcatcaacatgatagaaaatctaatccaatggataatgattttgactatagggaagaattcaaaaaaattgattatgaagctttaaaacaagatctttatgatcttatgactgattctcaggaatggtggccagcagattacggccactatggtccattctttatcaggatgacatggcatgctgctggaacatacagaaacactgatggaagaggtggcggtggaactggtgctcaacgttttgcaccacttaatagctggcctgacaatggtaatttagataaagctagaaggttgctctggccaatcaaacaaaaatatggaaaacaaattagctgggctgatcttttaattttagctggaaatgccgcaattgaatctatgggtggtacaacctttggattcagtggaggaagaccagatatctggggacctgaggaagatattcattggggtgttgagtctgaatggcttgataataaaagatataaaggtgaaagagagttagataatcccttggcagcagtacaaatgggattaatttatgtgaatccacaaggtccagatggaaatcctgatcctctagccagtgctcatgatattagagagacatttggaagaatggcaatgaacgatgaagaaacagttgccttagttgcaggtggacataccttcggtaagtctcacggtgccggtgctgaaacaaatgttcaaactgaacctgaaggagcacctttagaagaaatgggatttggatggtctagtacttttggatctggtgttggtagtgacactattacaagtggtattgaaggcgcgtggactgctaatccaacaaaatgggacaacggatactttgatttattgtttggctatgaatgggagttaacaaaaagcccagctggtgctcatatttggcatgctattgggcaaactgaagaagatatggctccagatgctgaagatgcatcaaaaaaagttccaactatgatgacaactgctgatatggcaatgcgtgttgatcctagttataacaaaatttcaaaaaggtttcatgaaaatcctgatgaatttgcagatgcttttgcaagggcttggtttaagctacttcatagagatatgggacctaaaactagatatatgggtcctgaagttcctgatgaagagctaatttggcaagatcctgttcctgaaggaaatagtaactatgatattgagaatgttaaaaaactaatttcagactctggattatctatacaagaaatggttgaaactgcatgggctagtgcttctacctataggggttcagacatgagaggtggtgcaaatggttccagaataagattggctcctcaaaaagattgggaggtaaacaaaccaaatcaactatcaaaaattcttgaaatatatggaaatatatcaaaagaaacaggcgcttctgttgcagatattattatacttgctggtaacttaggaattgaaatggcatctggtgtcgaagttccatttgttcctggaagaggcgatgcatcacaagagcaaactgatgttgaatcctttgctgtcttggagccaaagtcagacgcatttagaaattttcatgctagtggtgtaaatacacctcctgaggaaattcttcttgataaagctcaattactaggacttactgcacctgaaatgacagttcttgttggtggaatgagatcattaggtataagctcaaatggatatggtttatttagtgaagatgagaataatcttagcaatgattattttaaaactctgcttgatatgtccgtcaaatggaaaccaaatggtactggaaattcttatgaagcttttgacagagtatctggagagaaagttagaacagcttcaagatctgatcttgtattcggttcaaattctcaattgagagctatagttgaagtttatgcagaggatgattcaaatagcaaattcattaatgattttgtttttgcatggaacaaagttatgaatgcagacagatttgatgttcagtaa

SEQ ID NO: 211016 - DNA, 550 bp, Unknown
  Bacterial polypeptide expressing nucleotide sequence isolated from the Sargasso Sea
atgagtaaagccccccctttaacgaatgccacaggcgccccggttccggacaacaccaataccatgacagcaggcccccgcggtccagccttactacaggatatctggcttttagagaagctggcccattttgaccgcgaagtgataccagagcggcgtatgcatgccaaaggcgctggtgcttatggcaccttcacagttactcacgacatcagccgttacaccagagccaaattgttttctcaggttggcaaaaaaaccgatgtatttttacgtttctccactgtagctggtgaacgtggagcagccgatgcagaacgcgacattcgtggttttgccgtgaagttttataccgaagaaggaaactgggatattgtcggcaataatacgccggtgtttttctttcgggatcctatgcgcttccctgacttaaaccacgcagtaaaacgtgatccgcgcacaggcttacgcagtgccgaaaataactgggatttctgggacttgtacagaagctctgcacagatcactatagtaatgagcgacagaggta

SEQ ID NO: 211017 - DNA, 2188 bp, Unknown
  Bacterial polypeptide expressing nucleotide sequence isolated from the Sargasso Sea
catgtcgaacgaaacgaagtgcccgttcaaccacaccgctggtggcggcacgacgaacaaggactggtggccgaatcagctgaacctgaacgtcctgcatcggcattcggcgctgtccgatccgatggacccggatttcgactacgccgaagcattcaagaagctggatctcgaggcggtgaagaaggacctgcacgcgctgatgacggcgtcgcaggactggtggccggccgacttcggccactacggcggcctgttcgtccgcatggcctggcacagcgccggcacgtaccgcacggccgacggccgcggcggcgcgggcggcgggcagcagcgcttcgcgccgctcaacagctggcctgacaacgtcagtctcgacaaggcgcgccgcctgctgtggccgatcaagcagaagtacggccgcaacatctcgtgggccgacctgctgatcctgaccggcaacgtcgcgctcgaatcgatgggcttcaagaccttcggttacgccggcggccgcgtcgatacgtgggaaccggacgacgtgtactggggttcggaaaagatctggctggaactgagcggcggcccgaacagccgctactcgggcaagcgcgagctcgaaagcccgctcgccgcggtgcagatgggcctcatctacgtgaacccggaaggcccggacggcaaccccgacccggttgccgccgcgcacgacatccgcgagacgttcgcgcgcatggcgatgaacgacgaggaaacggtcgcgctgatcgcgggtggccacacgttcggcaagacgcacggcgccggtccggcctcgaacgtcggccccgagccggaagccgcgggcctcgaagagcaggggctcggctggaagagcacgttcggcacgggcaagggcaaggatgccatcacgagcggcctcgaagtcacgtggacctcgacgccgacgcagtggagcaacgacttcttcaagcacctgttcagctacgagtgggagctcacgaagagcccggccggcgcgcaccagtgggtcgcgaaggacgcaggcgaagtgattccggatgcattcgacgcgtcgaagaagcatcgcccgacgatgctgacgaccgacctgtcgctgcgtttcgacccggcctacgaaaagatctcgcgccgcttctacgagaacccggccgagttcgccgacgcgttcgcacgcgcgtggttcaagctcacgcaccgcgacatgggcccgcgttcccgctatctcggcccggacgtgccggcggaacacctgctgtggcaggacccgatcccggcggtcgatcacccgctgatcgacgccgccgacgtcgccgcgctgaaggcgaaggtgcttgcatccggtctgtcggtgtcgcagctcgtgtcgaccgcatgggcgtcggctgcgacgttccgcgggtcggacaagcgcggcggtgcaaacggtgcgcgtatccgcctggcgccgcagaaggactgggaagtgaaccgtccggctgaactcgcgaaggtgctcgagacgctcgagggcgtgcagaaggcgttcaacgatgggcagacgggcggcaagaaggtgtcgctggccgacctgatcgtgctggccggtgcggccggtgtcgagcaggccgcgaagaatgcgggtatcgcagtgacggtgccgttcgcaccgggccgtgcggatgcgtcgcaggaagagaccgatatcgaagcgatggccgtgctcgagccggtcgcggacggtttccgcaactacctgaagcacgcatacaagacgccggccgaggcgctgctggtcgacaaggcgcaactgctgacgctgaccgcgcccgagatgacggtgctcgtcggtggcctgcgcgtgctgggtgcgaacgccggcgatgcgaagcatggcgtgttcaccgagcgtccggaagcgctgacgaacgacttcttcgtgaacctgctcgacatgggcacggaatggaagccggtgtcggccgcgaacgacgtgttcgaagggcgcgaccgcgcgacgggtgcagtcaagtggacgggcacgcgcgtcgacctgatcttcggctcgcactcgcaactgcgcgcgctggccgaggtgtacggcagcgccgatgcgaaggagaagttcgcgcacgacttcgttgcggcctggaacaaggtgatgaacctggaccgcttcgaccttgcgtaa

SEQ ID NO: 211018 - DNA, 1279 bp, Unknown
  Bacterial polypeptide expressing nucleotide sequence isolated from the Sargasso Sea
agaatgggatttggatggattagcaagcatgcaagtggaaaaggaagtgatactatcacatctggtatcgaaggtgcttggacgactaatccaactaagtgggataatggttattttgatttgctgctgggttacgattggaagttaactaagagtcctgctggtgcaaatatttggcatgcagtagatcaaaaagaagaacatatggcaccagatgcagaagatgcatccaaaaaagttccgaccatgatgacaactgcagatatggcaatgcgagaagatcctgagtatagaaaaatatctgagcgttttcacaaaaatcctgatcagtttcaagatgcttttgcgcgtgcttggtttaaattactacaccgtgatatggggccaaagacacgttacatggggcctgaagccccaatggaagatttgatttggcaagatcctattccagcaggaaaatctgattatgatgtcaatgtggttaaaagtaaaattgagaatagtggattatctattcaagaaatggtggaaacagcttgggctagtgcctctacttatcgtcacacggatatgcgtggcggtgcaaatggtgctcgtataagattagagcctcaacgaagttggggagtaaacaaaccagaccaattaaataaagttcttggcgtcttggaaggtatagcttcggagactgggtcaagtgttgctgatataattgttcttgcaggtaatgttggtatcgaaaaagcttctggcaaaactgttccgtttactcctggaagaggagatgcaacacaagaacatactgatgttgagtcttttgctgtcatagagcctgaagctgatggttttagaaactatcttaagaaaaatttctcagtaacgccggaggaatttttgttagacagatcacatcttctcgggctaacagcacctgaaatgacagtattggttggaggaatgagagcacttggtattagtttcgatgaccgaggtgttttctctaattctggaaaactcgataatagtttctttactacccttcttgatatgtctgtaaaatgggaagctacaggaagtaattcttatcaagcttcagatcgtaaatcaggtgaaaaagttagaagagcatcaagagcagatcttgtatttggatcaaactctcaattgagagctttagcagaagtttatgcacaatcagataatcatgataagtttgtgaatgactttatcagcgcatggaacaaagtcatgaatgctgatcgttttgatataaattaat

SEQ ID NO: 211019 - DNA, 2131 bp, Unknown
  Bacterial polypeptide expressing nucleotide sequence isolated from the Sargasso Sea
atggaagaaagtaaatgtccagtatctcatggatcaaatagtcagcatacgcttggttcaatgtcaaataatcaatggtggccagatgcattagatttaagtatcctgcaccaacatgataaaaaatcaaatccgatggatgaggattttaattatagagaagaatttaaaaaaattgattatgatgcactaaagcaggatctcaatgatcttatgacagattcacaagattggtggcctgcggattacggacactatggtcctttctttattcgaatgacttggcatgctgcaggaacatataggactgcggatggccgtggtggcggtggtacgggaaatcagcgttttgcgccacttaatagttggccagataatggaaacttagataaggctcgccgccttctttggccagtaaaacaaaaatatggtaatcaaatcagttgggcagatctactaattttagctggaaatgttgctattgaatctatgggcggtaaaacttttggattcagtggtggccgtccagatatatgggcaccagaagaggatattttttggggtaaagaaaatgaatggcttgcgaataatcgttatactggtgataggaaacttgataaaccgcttggtgcagttcaaatgggtttgatttatgttaatcctcagggtcctgatgggaaccctgatccacttgccagtgcaaaagatattcgtgaaacatttagtcgaatggcgatgaatgatgaagaaacggtagcactcactgcaggtggacatacgtttggcaaagcacatggcgctggatcggaagatcttgtgggtgttgaaccagaaggtgctccattagagcaaatgggttttggttggaaaagtgatcatggatctggtcaaggtcgagatagtataactagtgggattgaaggtccgtggacagcaaatccaactcaatgggataatggatattttgatttattatttggttatgagtgggaacttgtaaaaagtcctgcaggagcaaaccaatggcatccaataaatcctaaagaggaagatcttgcgccagacccagaagattcttctgttaaggtaacaacaatgatgacaactgctgatatggcaatgagggaagatcctatttataataaaatatcaaagcgttttcatgaaaaccccgatgagtttgctgatgcatttgcaagggcatggtttaaactgcttcatcgtgatatggggcccaaaacacgttatatgggaccagaatctccagatgaagaactaatatggcaagatcctgttccggctggtaattctgattacgatattgaaactgtgaaaactaaaatttctgaaagcggcttaagtattcaagagttagttgaaacagcatggtctagtgcttcaacatttcgtggttctgatttaaggggtggtgctaatggtgcgcgaatttgtttagaacctcagaaaaattgggaggccaataaaccagaacaattatctcgagtacttactgttcttgaagatattgcaaaagatactggagcatctgtagctgatgttattgtattagctggcaatgtaggcattgagaaagcgtcaggtgttaatgtttcatttaatcctggtagaggggatactactcaagaaaaaactgatgtggattcttttgctgtgttggaacctttttcagatggtttccgcaattatcataatagtgatttagaagttacacctgaacaaatgttgcttgataaagctcaattacttggtctaacagcaccagaaatgacagttttggtaggaggtttgcgatcgttaggagtaagccatgatggccatggagtttttactgatgatccaaacaaattatccaatgacttttttgtcacgctacttgatatgagtgttgaatggaaacctaaaggtaaaaacctatatgaagcgacggatagatcctctggtgaggttgtaagaactgcaactagagctgatctggtatttggatctaattctcaattacgagcattggcagaagtatatgcatgtgatgattcgcaatcaaagtttgtaaatgattttgttagtgcatggaataaagtaatgaatcttgatcgatttgatttagattaat

SEQ ID NO: 211020 - DNA, 2107 bp, Unknown
  Bacterial polypeptide expressing nucleotide sequence isolated from the Sargasso Sea
gatgacccattccccctcatccggaacgacgccgcccgtccagccgcaggacagcgcgaaatcgcgccagctcgacgagcaccgttcgcggcccgaccacgaggcactgcgcaccaaccagggcgtgcggatcgccgacaaccagaacacgttgcgtggcggcacgcgcggcccgtcgctgctcgaagacttcatcatgcgcgagaagatcacgcatttcgatcacgagcgcattccggagcgcgtggtgcacgcgcgcggctcggccgcgcacggcgtgttccgcgtgtacgagccgatggccgactacacgaaggccgcgttcctgcaggatccggccgcggaaacaccggtgtacgtgcgcttctcgacggtccaggggccgcgcggctcgtccgacaccgtgcgcgacgtgcggggcttcgcggtgaagttctataccgaagagggcaactacgacctcgtcggcaacaacatgccggtgttcttcatccaggatgcgatcaagtttcccgatttcgtgcacgcagtgaagcccgaggcgccgaacgagatgccgaccggcgcgtccgcgcacgacacgttctgggatttcgtgtcgctggtgccggaaaccacccacacggtgctgtggctgatgtccgaccgcgcgctgcccgcgagctaccgcgcgatggacggcttcggcgtgcacacgttccgcttcgtgaacgccgccggcgccgtgcgtttcgtgaagttccactggcggcccgtgagcggcgcgtattcgctgctgtgggacgaggcgcagcggattgccggccatgacccggatttcaaccggcgcgacctgtggatggcgatcgagcgcggcgactatccggagttcgaactcggcgtgcagatgatcgatccggccgatgccgacaagttcgacttcgacctgctcgacgcgaccaagctggtgccggaagaactcgtgccggtgcgtcccatcggccggatgacgttgaaccgcaatcccgacaacttcttcgcggaaaccgagcaggtcgcgtttcatccggggcacgtggtgcccggcatcgacttcacgaacgatccgctgctgcaggggcgcctgttctcgtacaccgacacgcaattgagccggctcggcggcccgaacttccacgagatcccgatcaaccggccggtgtgcccgttcgcgaacaaccagcgcgacgcgatgcaccggcagacgatcaacgtcgggcaagcgtcgtacgaaccgaattcgacgagtggcggctggccgcgcgagacgccgcccgcgccggccggcggcggcttcgagaccgtgcacgagccgctcgaaggcgacaaggtgcgcgtgcgcagcgaatcgttcgccgatcatttctcgcagcccgcgctgttctaccagagcatgaccgacatcgagcagcggcatatccgcgacgcatactgcttcgagctcggcaaggtgacgcagccgcacattcgcgagcgggtggtcaacgacatgatcgcccgcttcgacgcggggctggccgcgcaggtggccgaacggctcgggctgccggcaccacacggaggcgcgacgccggcggtcgcgcagcgttcgcccgcgctgagcctgatcggccgctcgaagcccggcatccggtcgcgcaagatcgcgctgatcgcgaccgccgggacgagcgagacgctcgtccagcaagtgcgcgatgcgctgcaggccgcgcacgcggtgccgacgatcgtcgcgccgacgctggcgccgatcggcagcatcgtgccgcaggcgacgctggccggcatgccgtcggtgatgttcgacgcggtgttcgtgtgcggcggcgacggcgacggccgcgaccttgcgcacagcgccgacgcgcggcatttcgtgcgcgaagcgttcaagcacctgaagccgatcgcggccgtcggggcggggcggcaattgctgagcgccgcgcacctgccggatccggccgaaggcgtgtgcgtcggggaggccgtcgatctcgacgcagtcctgaacgacctgtccgaccacctcggccgtcatcgcgtctgggcacgcgagcagcaggccgccgagttgccggcctag

SEQ ID NO: 211021 - DNA, 1305 bp, Unknown
  Bacterial polypeptide expressing nucleotide sequence isolated from the Sargasso Sea
aatgggtttaatttatgttaatccgcaagccccagatggcgaaccagaccctatagccagtggtaaagatgtcagagaaacattcagtcgaatggccatgaacgacgaggaaactgttgccctggttgctggaggtcatactttcggtaagggacatggtgctggaccggaggagcatgtgagtgcagaaccagagggcgcttcacttgaaaacatgggatttggttggatgagcgaccacaaatctggaatgggtagcgataccattaccagtggttttgaaggcgcttggactgctaaaccgacaacatgggacaatggctactttgatcttttatttggttatgagtgggagaaggtagaaacaccatccggcaagattgtctggcatgccatagatcagaaagaagaagacatggctccagatgcagaggatccatcagttagagttcctacgatgatgacaactgctgacatgtcaatgagagaggatccaatctatagagaaatctcaaaacgttttcatgaaaatcctgatgaatttgcagatgcttttgccagagcatggtttaagcttttgcatcgtgatatggggccgcgttctcgttatctaggacctgaagtacctgatgaagagttaatttggcaagatcctgttcctcaaggaaataatgattatgatgtggatgcgatcaaagctaaactctcagactgtggtctgagcattcaagaaatggtcgaaactgcctgggctagtgcatcgacatttagaggttctgacttaagagggggggcaaatggatctcgaattcgtcttgctccacaaaaagattgggaagccaataaaccagaacagcttgcaagagttcttggtgtatatgaatcaattgcttcagagtctaatgcctccttggcagatgttattgtacttggtggaaacgttggtattgagaaagcctctggtgctcaagttccattcacgccaggccgaggtgatgccagcgaggagcaaactgatgctgactcatttgatgctcttgagccaattgctgatggttttcgtaatttccaaaaagaaggctccagccttccatctgaggaaatgatgcttgataaagctcaactgcttgggttaactgcacctgaaatgacagtgctcataggaggtatgagagctctgggtataagttcaaataatcatggagtctttacagaaacacctggaaaattaaccaatgatttctttgttaatcttctagatatgggtgttgagtggaaatcaacaggtgagaactcttatgaggc

SEQ ID NO: 211022 - DNA, 1497 bp, Unknown
  Bacterial polypeptide expressing nucleotide sequence isolated from the Sargasso Sea
tatgagtaataaaaataaatgtccagtatcttctggtcctaataaaaaaacatcggttggggctgcatctaatcaagattggtggccaaatcaactaaatctcaacatattacatcagcatgataagaaatctgatccaatggatgaaggttttgattatagagaagaatttaaaaagctagattatcaagctcttaaaaaagacttaaatgcattaatgactgattctcaagattggtggccagcagattatggtcattatggtcctttttttataagaatgacatggcatgcagctggcacttatagaactggagatggtcgtggaggtggaggcactggagctcaacgctttgctcctcttaacagttggcctgataatggaaatctcgataaagctagaagattgctttggcctattaaacagaagtatggcaacaaaattagctgggcagacttactaatcctagcaggtaatgtagctatagaatcaatgggaggtaagacatttggttttggaggtggaagacctgacatatgggctccagaagaagatatttattggggaattgaagaagaatggttaggtaatgaacgttacactggggaaagagatctagaaaatccacttgcagctgtacaaatgggtttaatctatgtaaaccctgaaggccctgatggaaatcctgatccattagcaagcgccaaagatattcgtgaaacttttggcagaatggcaatggatgatgcagagactgttgctctaactgctggcggccatacgtttggtaaagctcatggggctggagatgcaaatttagttggagtagagcccgaaggagctgaaattgaggaaatggggtttggatggaagaatgctcacggctctggaaaaggtagtgacacaataacaagtggaatcgaaggagcttggacaacaaatcctactaaatgggataacggttattttgatttacttttaaacaatgagtgggaactagtaaaaagtcctgcaggagcaaatcagtggcatattgtaaatccaaaagatgaagatcttgcaccagatgctggagatgatacaaaacgcgttccaacaatgatgacaactgcggatatggctatgagagaagatccagattacagaaaagtatcagaaagatttcataagaatccagatgaatttgccgatgcttttgcaagagcatggtttaaattacttcatcgtgatatgggtccaaaagtcagatatcttggtcctgaggtacctgaagaagatcttatttggcaagatccagttccagtaggtaatagtgactttgatgttaaagaagtcaaagaaaaaattcttgcaagtgatctgagtatccaagaaatgattgaaacagcttggtctagtgcttcaacttttagaggttctgatatgagaggtggagcaaatggagcaagagtaagacttgcaccgcagaaagattgggatgctaacaaaccagaaca

SEQ ID NO: 211023 - DNA, 935 bp, Unknown
  Bacterial polypeptide expressing nucleotide sequence isolated from the Sargasso Sea
catgagtagtattgaaaaatgccccgtaatgcatggtggtatgactagtaataaagataaaggaacatcaaatagagactggtggcctagtcaattaaatttatcaattctccaccaacatgatcaaaaatctaatccaatgaataaagattttgattatagagaagaatttaagaaacttgattatactgctttaaaaaaagatcttacaaatcttatgacagattcacaagattggtggccagctgattacggtcattatggtcctttttttattcgtatgacatggcatgctgctggaacttatagaacaggagacggtagagggggcggaggaactggagcacagagatttgctcctctaaatagctggcctgataatggtaaccttgataaagcacgaagattgctttggcctattaaacaaaaatacggtaataaaataagttgggcagacttactaatattagcaggaaatgttgcaatagaatcaatgggtgggaaaacctttggttatagtgggggccgtccggatatatgggctcctgaagaagatatttattggggcgttgaaaaagaatggttagaaaataaacgatacaaaggagagcgtgagttagacaatcctttagctgcagttcaaatgggtttaatttatgttaatcctgaagggccagacggcaatcctgatcctcttgctagtgcaaaagatattcgtgaaacttttggaagaatggctatgaatgatgaagagacagtagcacttactgctggcggtcatacttttggtaaagcacatggtgccggagacccttcccttgttggtcctgaaccagaaggtgctaatattgaagaaatgggttttggatggatcagcaaacatggctctggcaaaggtagtgatgccataactagtggaattgaaggagcttgga

SEQ ID NO: 211024 - DNA, 1900 bp, Unknown
  Bacterial polypeptide expressing nucleotide sequence isolated from the Sargasso Sea
aatgagcgaagccaaatgtcccgttgctcacggagctaattcaaatatggagaagtcatcaactgattggtggcctaaaaatttaaatctagatattctccatcaacatgatcaaaaaacaaaaccgtttaatggtacttataattacagagaagaagtaaaaaaattagattttaaagcattagaagctgatatgcataaattaatgaaagaaagtcaggattggtggccagctgattgggggacatacgcaggattaatggttaggcttgcttggcactctgctggtacttatagaactgctgatgggagaggtggcggtggaaccggtgatcatcgatttgctcctttaaattcttggcctgataatactaacttagataaagctagaagacttttatggccgattaagaaaaaatatggaaacaagattagctgggctgatcttatgatcttagctggaaacattggctatgaatcaacaggatttaaaacatttggtttttcatatgggcgtgaggatatttggcacccaaacaaggatatatactggggaccagaaacagaagcattagcatctgatagacactcagataaagaagatgcctcttcgttagaaagtccacttgctgcaaatcacatggccttaatctatgtgaacccagagggatttgaaggtaaccctgacccattaaaaacagctcagcatattagagagacatttgcaagaatggctatgaacgatgaagagactgttgctcttactgcaggaggtcatactattggtaaaacgcatggtaatggtaatgctgataatcttgaagcagaacctgaaggggcagcaattaacgaacaaggccttggttggatgaataatacttccagaggagttggaagagatacggtgacatctggaattgaaggtgcatggactactgagccaacaaaatttgataatggatattttgacatgctctttaaatatgagtgggaacttaaaaaaagccctgccggagcttggcaatatgaacctgtcaacattaaagaagaagataagcctgtagacgtagaagatccatcaattagatataacccaattatgacagatgctgatatggcaatgatcaaagatccaatttatttagaaatatccaaaaagtttcataatgatcatgagtatttttgtgatgcttttgctagagcttggttcaaactcacccatagagatatgggtccaagatctagatacataggacacgaccttccaaacgaggatttgatctggcaagatccagttcctgctggaacacctagttttgatgtggaacaactcaaagaaaaaatcagaaactctgaattaactgttcaagaactagtctcaactgcatgggatagtgcgaggacatttagagggtcggatttaagagggggagctaatggagcgagaattagattttcacctcaaaaagattggaaaggtaatgagcctcaaaaattatcaaaagtattagatatattagaaccccttgcaaaagaagcaggcgctagcattgcagacacaattgtcttagctggaaatgttggtatagaaaaagcaattgaagctgcgggctttaaagtacctgttcctttcaatccaggaagaggtgatgcctctgaggatatgactgactctgagtcattttctcaattagaacccatacatgacggttttagaaattggcaaaaagataattatgaagtaagaggagaagagttgttgcttgatagagctcatttacttggtcttactgcagttgaaatgactgtacttgttggaggtatgagggctctgggcgcaaactatggtgagaataaacatggtgtttttactgaccaaagtaggtgctctaacaactga

SEQ ID NO: 211025 - DNA, 961 bp, Unknown
  Bacterial polypeptide expressing nucleotide sequence isolated from the Sargasso Sea
tatgagtcaacagtatttaacaagccaaagcggttctccaattgctgacgatcaaaactcattgtcagcgggcgagcgtggtccattactactgcaagattggcatttaattgaaaagcttgcccactttaaccgtgagcgtattcctgagcgtgttgtgcatgccaaaggcactggcgtatacggtactttcaccctaaccaaagacttaagcgaatacaccatcgccgaccactttaacggtgttggtaagcaaactgaaaccttcgtgcgcttctctaccgtaggtggggaaatgggctctgccgatgccgaacgcgacccccgtggttttggtctgcgcttttataccgctcgtggtaatcacgatatcgtgggtaacaacacgccgaccttcttcctgcgtgacgggattaagtttccagactttatccatacccaaaagcgtaacccattgacgaatttgaaagatccacaagctatgtgggacttctggtcattaaaccctgaagccatgcaccaagtgacgattctgatgtctgaccgcggtattccggcaaactaccgccaaatgcatggttatggttcgcatactttctcgttctggaatgctaaaggtgagcgtttctgggtgaagttccacttcaaatcgcagcaaggcgtggtgaacttaaccaacgagcaagccgataagttaaagggtatcgaccctgactcatcccagcgcgatatggtggtagcagtgactgacggtaacttccctcgttggactgtgaacgtacagattatgcctgagagcgacgccaacacttaccatatcaacccattcgatttaactaaggtgtggccacatggcgattacccgttaattgagattggtgtgttagagctgaatcgtttaccgcaaaactactttgccgaagtcgagcaagtggcattagcaccgagcaacttagagcca

SEQ ID NO: 211026 - DNA, 1108 bp, Unknown
  Bacterial polypeptide expressing nucleotide sequence isolated from the Sargasso Sea
aatgagtactgaaaattttaaaaataaatcttttaaagccaatgaattaagtaagtgtccatttacaggagctggaacacccgcaaagttttctgcaggaagaggccaaacagtaagagatttttggccgaatagtttaaatcttaaaattctgagtcaacactctaatctttcaaatcctatggataagaaatttagttacgaaaaagaatttaaaaaacttaattacaaagctttaaaaaaagatttaaaaaaattaatgactgattcacaggaatggtggccagcagattatggtcattacggtccattatttattcgattggcttggcacgcagcaggaacttataggacgggtgatggtagaggtggtgcaggtacaggtaatcaaagatttgctccacttaattcttggcctgataacgtgaatttagataaagcaagattacttttgtggccaatcaagaaaaagtatggaaaaaaaatttcatgggctgatttatttatattagttggaaatgttgcattagactctatgggattcaaaacttttggttttggtgcaggtcgaactgatatctgggaaccagaagatgatatttattggggttcagaaaaggaaatgctaggtgtggagagatacagtggaaatagagatttagagcagccgttaggagcttctcacatgggtttaatttatgtgaatccacaaggtccagacgcaaaccctgatccattattagcagcgcacgacattagagagacatttggcagaatggctatgaacgattacgagacagcagctttagtagctggaggacatacatttggaaaatctcatggagcagcatcagagtcttacaaaggtccagatccagaagcttcaaaacttcaagatcagtcaactggatggaatagtggatataaaactggaaagggtgtcgatgcgataagcagtggtatcgaaggtgcttggacacaaaatcctactaaatgggatatgggttatttagactgtttgtatggtcatgattgggaattaacaaaaagtccagctggagctcatcaatggactccaaaaaaaaatggtcaaaaaattaaaatggtt

SEQ ID NO: 211027 - DNA, 1126 bp, Unknown
  Bacterial polypeptide expressing nucleotide sequence isolated from the Sargasso Sea
atgagcactgaaaattttaaaaataaatcctttaaagctgatcaattaagcaaatgtccttttacaggagccggaacacctgcaaaattttctgcaggaagaggtcaatccgtaagggatttttggccaaatagtctaaatcttaaaatacttagtcaacattctaatttatcaaatccgatgaataagaaatttaattactctaaagaatttaaaaaacttaattataaagctcttaaaaaagatttaaaaaaattaatgacagattctcaagaatggtggccagcagattacggtcattatggacctttgttcatcagattagcttggcacgcagctggtacatatagaacgggagatggtagaggtggagctggaacaggaaaccaaagatttgcaccacttaattcttggccagataacgttaatttagataaggcaagattacttctttggccaattaaaaaaaaatatggaaataagatttcttgggcagatttatttatcctagtaggtaatgttgcgttagattcaatgggatttaaaacatttggttttggcgctggaagaactgatatttgggaaccagaggatgatatttactggggatcagaaaaagaaatgctaggtgtggaaagatatactgaaaaaagagatttagaacaaccacttggcgcttcacatatgggtttgatatatgttaatccgcaaggtcctgatgctaatccagatccaaaacttgcagcacatgatattagagaaacattcggtagaatggcaatgaatgattatgaaacagcagcactcgtggctggtggacatacatttggaaaatcacacggagctgcatctgagtcacacaaaggtcctgacccagaagcttcaagaattcaagatcagtcaactggatggaatagtggatacaaatctggaaaaggtgttgatacaatcagtagcggtatagaaggtgcttggacacaaaacccaattcaatgggatatgggttatttagactgtctttatgaacacgaatgggagcttacaaaaagtcctgctggtgctcatcaatggacaccaaagaaaaatggacaaaagataaaaatggttcctgatgcacatgataaga

SEQ ID NO: 211028 - DNA, 1138 bp, Unknown
  Bacterial polypeptide expressing nucleotide sequence isolated from the Sargasso Sea
atggatgatatcggcaaatgtccagtaatgcatggttccgtcacaacaaacagtggtataagcacaactaatcgtgactggtggcctaaccaattaaacctaagtatacttcatcaaaatgataaaaggtcaaatccaatgagtttggattttgattatagagaagaattcaaaaaacttgattataaggctttaaaaaaagatttacatgatttgatgacagactctcaggaatggtggccagctgattatggtcattatggccctttttttattagaatgacatggcatgctgctggaacatatagaactagtgacggccgtggaggtggaggaactggtgatcaaagatttgctccacttaatagctggcctgacaatggtaaccttgataaggcaagaaggttattgtggccaatcaagcaaaaatatggaaataaaattagttgggcggatctttttattttaaccggaaatgttgccattgagtctatgggcggaaaaacatttggtttcagtggagggcgagcagatatctggtctccacccgaggatatttattggggacaagaaaacgaatggttagaaaacaaaagatacacaggtgatcgtgaattagaaatgcctcttggtgcggttcagatgggattaatttatgttaatcctcaaggcccagatggaaaccctgatcccttagctagtgcaagggatattcgtgagacatttgcaagaatggccatgaatgacgaagaaacagttgctctgactgctggtggtcatacatttggaaaggcacatggcgcatctgatccagataaatatgttggtgctgagccagaaggtgcaccaatagaacaaatgggttttggctggcagaactcttatggcacaggatttggtagtgacactataacaagtggaattgaaggtgcttggactgctaaccctacaaaatgggataatggttattttgacttgttatttggatacgagtgggaattagtaaaaagtcctgcaggagcatttcaatggcatccaataaatccaaaagaagaagacatggcgccagatgctcatgatggctcaaaaaaagttacaacaatgatgacaactgctgacatggctatgaagggaagat

SEQ ID NO: 211029 - DNA, 1162 bp, Unknown
  Bacterial polypeptide expressing nucleotide sequence isolated from the Sargasso Sea
cgcagtcgacctagccgagaaagatcacgcccctgaagtcgatggctcggaagcaaaagtccctgttatgatgactacagcggatatggctatgcgaatggatccagagtatgaaaaaatatctcgtagatttcattcaaaccctgatgaatttgctgatacgtttgcccgtgcttggtttaagcttactcatagagatatgggaccaaaaattcggtatttgggggaagaggttcctgctgaagatttaatttggcaagatccaattccagctgttaatcatgttctaatcaataatgctgaagtgaacagtctaaaagctaagattttagactctggacttacaatttctgaatgtgtccagacggcatgggcttctgcatctacttttcgaggttctgatatgcggggcggagcaaatggtgctagaattgcgctttctccacaaaaagattgggaagtcaaccagccaaaacaactttcaaaagttttggaaactcttcgatcaatccaatcagagttcaacaaaaagtccaatagaacaaaagtttccttggctgacttgatagttctagcagggaacgcaggtattgaggaggctgcaaaagcaggaggaaaccctgtttcggtaccttttcttcctggaagaatggacgctgcgcaggagcaaacagatgtggagtcttttgatctgctcgaaccaatcgcagatggatttagaaattatcaaaaaaaacagtattcgttatctgcggaagagcttttaattgataaggcgcatttactgacactaacagctccagaaatgactgcgctcattggcggcttgcgcgttcttggctcaaattatgataactcattattaggagttttaacggaccgaccagggcaacttacaaatgattttttcgtcaatctattggatatgcaatactcttggaatgcaaccaactctgaggaaactgaatttgaaggaaaaaaccgcgcgtctgataaagtcgtttggtctgccagcagagtagatttagcatttggttctaattcacaacttcgggctcttgctgaagtttacgcgcagtcagacaatcaagagaaattcattgccgattttgtaagcgcttggtcgaaagtgatgaatgctgatcgctttgatataaactaa

SEQ ID NO: 211030 - DNA, 1486 bp, Unknown
  Bacterial polypeptide expressing nucleotide sequence isolated from the Sargasso Sea
atgagcaagctaacgacggcttttggcgcaccggttcccgacaatcaaaacattcagacagctgggcctcgtggtcccgcactcctgcaagatgtttggtttctcgaaaagctggctcatttcgaccgcgaggtgatccctgagcgtcgcatgcacgcgaaggggtcgggtgcgttcggtacctttaccgttacacacgacgtcacacgatacacccgggcaaaaatattctcgcgcattggtaagacgacggagatgtttgctcggttctcgacggttgcaggagagcgaggggcagcagacgccgagagagatattcgcggcttcgctctgaagttttatacggaagaggggaattgggatctggtcggaaacaacacaccggtcttctttttgagagatcctctgaagttccctgacctcaaccatgcaatcaagcgcgacccgcggaccggcctgcgaaatgccgaaagcaactgggacttctggacgcaactaccggaggctttgcaccaggtcacaatcgtgatgagcgaccgcggtattccgcgctcgtaccgccacatgcatggctttggtagccatacgttcagcctcatcaatgcgagcaacgaacggttctgggtgaagttccatatgcgcagcgagcagggaatcgaaaacctgaccgacgaggaagctacgcggatcatgggttccgaccgcgaaagtcaccaccgcgacctctacgagagcatcgaggcgagacagtttccgaggtggaacctgtacttccaggtaatgccggagagtgaggcttccgcgtacaaggtgaatccgttcgacctgacgaaggtctggtcgaagaaggactacccacttatcgaggtagggtacttcgaactgaaccgtaacgcggagaactggttcgcagacgtagagcaggctgccttcaatcctgcaaatgtcgttcctggaatcagcttttctccggacaagatgctgcagggccgtcttttctcttatggcgacgcgcagcgataccgactgacggtcaaccatttccagattcccgtgaacgctccgcgtgcgtcgacgcacaccaacagctatcaccgtgacggtgttctgcgtgtcgacggcaatcaggggggcacgacttcgtacaatccgaacacgaagggagcatggcttgaccaaccggatttcagcgagccgccgctgtcgatcgagtgggcagccgaccactggaaccatcgagtcgacgatgactattactcacagcccggcgacctgtttcgtttgatgacggcggcgcagcagcagatgctgtttgataacacggctcgggcgatgtacggcgtatccaggcctgtccgcgacctgcacgtcgagcactgtacgaaggccgacccggcatatggtgctggtgtttcggcggcactcgcagcgctcgatgcgtacgtctccagcgcagtgcggtcggagcctgaagtcaccaagtaag

SEQ ID NO: 211031 - DNA, 1765 bp, Unknown
  Bacterial polypeptide expressing nucleotide sequence isolated from the Sargasso Sea
aatggatagtgattttgactacagagaggagtttaaaacattagattatgacgctctaaaaaatgatcttcacgctttgatgactgactctcaggactggtggccagcagattatgggcactacggtggactatttattagaatgacatggcacgccgctggaacatacagaattatggacggtagaggtggaggaaacacaggtaatcagaggttcgcacctcttaacagctggccagataatggaaatttggataaagcgagaagacttttatggccaataaaaaagaaatatgggaaaaaaattagctgggccgatttaatgatactcgcagggaatgtggctatagaatcgatgggtggaaagacagctggttttggtggtggaaggccagacatatggtcacctgaagaggaaattgattgggggacagaaaaggaatggcttgataacaagaggtacactggtaaaagagatctcgcaaatcctctaggagctgttcaaatggggcttatatatgtaaatccacaaggaccagacggtaatccagatcctttggctagcgctcatgatataagagaaacattcggtagaatggctatgaacgatgaagagacagtggcactcgttgcgggtggccatacttttggaaaggcccatggcgctggtcctgaagagagtgttggagctgaacccgaaggagcgtctatccaaaatcaaggacttggttggataagctcgcatggttcgggtaagggcagtgacacaataacaagtggtgttgaaggagcatggacctctaatccaacgcagtgggacaacggatacttcgaccttttattcggctatgaatgggagctcacaaagagtcctgcaggcgcgcatatatggcatgcaattgatcaaaaacaagaggatcttgcaccggatgcagaggactcatcaaaaaaagtaccaaccatgatgacaactgcagatatggctctcagagaagatcctgaatatcataaaatttcaaaacgttttcatgaaaatccagaagaatttgccgatgcgtttgcaaatgcttggtttaaactcctgcatagggatatgggcccaaaatcaagatacttaggtcctgaagtaccaagcgaagattttatctggcaagaccctgttccaaagggaaacgctaattatgatatagatagcgcaaaacaaaaaatatccgcgagtggcttgagtattcaggaaatgattgaaacggcatgggccagtgcatctacatatcgtggttcagatatgcgaggtggagcaaatggtgcgagaattagattggagccacaaaaaaattgggaggtaaataaacccgaacagttgagtggagttctgagcactatagagggcattgctaatgaggttggtgcctctgtagcagatatgattgttttggctgggtgtgttgctattgaaaaagcttcgggatcatctgttccttttacaccaggaagaggtgatgcctcacaagaagaaacagatatagagtcatttgccgttttagagccaattgctgacgcattccgaaattataaaaaagaatctgttgatgtaaatatagaggaaatgatgctggataaatcccaattaatgggtttaactgctccagaaatgactgttttaatcgggggtcttagatcactcggcttaagcacagacaatcaaggagtatttacagataatcaagataaactgtctaatgacttcttcaataattttacttga

SEQ ID NO: 211032 - DNA, 1258 bp, Unknown
  Bacterial polypeptide expressing nucleotide sequence isolated from the Sargasso Sea
aatgttaaaagaattatcaaaatgtccatttactggtgttggtacacctcctaaacactcaactggcaaagggacatcaaacagagattggtggccaaacagcctaaatctaaaaattttaagccaacattctagactagtaaatccaatggataaaaagtttaattatgcaaaagaatttaaaaaattaaattttaaatctttaaaaaaagatcttaaaaaattaatgacagactcacaagattggtggcctgctgactatggccattatggaggactttttattcgcttggcatggcacgctgctggaacttatagaactggcgatggacgtggaggagctggaactggcaaccaaagatttgctccattaaatagctggccagataatgttaacttagataaagcaagattacttctttggccaataaagaaaaaatatggaaagaaaatctcatgggcagatttgtttattctagttggaaatgttgctttagagtcaatgggttttaaaacttttggctttggtggtggaagagaagatatttgggaaccagaggaagatatttattggggatcagaaaaagagtggttgggagttaatcgttacagtggaaaaagagaacttgaaaatccacttggtgcttctcatatgggtttgatttatgtaaatccacaaggtcctgatgcaaatccagatccaattttagcagctaatgatattcgtgaaacattcggtcgtatggcaatgaatgattatgaaacagtagcacttgtagcaggtggacatacttttggaaaatcgcacggtgctgctgcagagtctcataaaggaccagaaccagaaggttcaagaatacaagagcaggctactggctggaatagtagttataaaagtggcataggagtagatactataagtagtggactagaaggtgcttggacgcaaaatccaaaaaaatgggacatgggttattttgataacctttttggataccaatgggaattaacaaaaagtccagctggtgctcaccaatggacacctaaaaaaaatggccatgctataaaaatggttccagatgcacatgataaaaataaaaaacatgcacctatgatgttaactactgatctttcaatgagaatggattcgaaatatggcccaatatcaaagcattttcataaaaatccaaaagaatttgcagatgcttttgcaagggcttggtttaaacttacacatagagatatggggcctcgtgct

SEQ ID NO: 211033 - DNA, 1477 bp, Unknown
  Bacterial polypeptide expressing nucleotide sequence isolated from the Sargasso Sea
gatgttaaaagaacaaactaaatgtccatttaccggctctggaacaccctctaaatatccaaccggtaaaggcacttcgaatagagattggtggccaaatagcttaaatctcaaaattttaagccaacattcatcattggtaaatccaatgggagaaaaatttaattataaaaaagaatttaaaaaacttaactttaaagcattaaaaaaagatcttcataagttgatgactgatacgcaagattggtggccggcagattatggtcattatggtccattttttattcgtcttgcttggcatgctgccggaacttatcggacaggagacggaagaggtggtgccggaactggcaatcaaagatttgctccattaaatagttggccagataatgtaaatttagataaagcaagacttttactttggcctattaaaaagaaatatggaaaaaaaatatcttgggcagatttatttatacttgttggaaatatatctctagagtcaatgggttttaaaacttttggttttggggccggaagagaagatatatgggagccagaagaggatatttattggggatctgaaaaagaatggcttggagtaaataggtatagtggaaaaagagaactagaaaatcccctaggagcatcacatatgggtttaatttatgttaatcctcaaggacctgatgctaatccagatccttatttagctgctcatgatattagagaaacttttgggcgtatggcaatgaacgattatgagacggtagcactagttgcaggcggacatacatttggaaaatctcatggtgccgcaccagagtcacacaaaggtcctgagccagaaggttcaaagattcaagatcaagcaactggctggaatagtaactacaaaagtggtttaggagtagatactattagcagtggtattgagggcgcatggacctcaaacccgattcaatgggatatgggatattttgataatttatttggctatgattgggaattaactaaaagccctgcaggagcacatcaatggaaacctaaaaggaatggacatgatattgaaatgacaccagatgctcatgatagatctaaaaaaaatcttccaatgatgcaaactactgacctttcattaaagttagatcctaaatatggaccaatttcaaaacattttcatcaaaatccgaatgaatttgctgaagcttttgcaagagcttggtttaaacttactcaccgtgatatgggtccaaaagcaaattatcttggttctgatgttccaaaagagaatttaatttggcaagatccaataccaaaaaataaatataaacttaaaaataaagatattgagttattaaagaaaaaaatatctaaatctggtttatctgtttctcagctagtgacaactgcttgggcttctgcatccacttttagaggatcagataaaagaggaggtgctaatggagccagaatagct

SEQ ID NO: 211034 - DNA, 1629 bp, Unknown
  Bacterial polypeptide expressing nucleotide sequence isolated from the Sargasso Sea
gacgtgcgcggtttcgcggtgaagttctacaccgaggagggcaacttcgacctggtcggtaacaacatgccggtgttcttcatccaggatgcgatcaagttccccgacttcgtccatgcggtcaaacccgagccgcacaacgagattcccaccggcgcgtcagcccacgacaccttctgggacttcgtctcgctgaccccggaatcggcgcacatggtgctgtggaccatgtccgaccgcgccattcccatcgcctatcgctcgatgcagggctttggtgtacacagctttcgcctggtcaacggcgagggtcagagcaagctggtgaagtttcactggcgacccaaggccggggtttgctcgctggtatgggacgaggcgcagaaactcgccggcaaggacccggactttcaccgacgcggcctgtgggaagacatcgagcgcggcctctacccggaatgggagctgggcctgcaggtgatggacgaggaggacgcactgagctttggtttcgacctgctcgacccgaccaagctggtacccgaagagctggtgccggtgcgcgtggtcgggcgcatggtgctcaatcgcaatccggacaacttcttcgccgagaccgagcaggcggcctttcacgtcgggcatgtggtgccgggcatcgacttcagcaatgacccactgctgcaggggcgtctgttttcctacaccgacacccagctgctgcgtctgggcggccccaatttcaacgaaatcccgatcaatcggccgctatgtccgttccacaacaatcagcgtgacgcgccgcatcgtcagcagatcaatcgcggccgcgcctcttacgagcccaactcgatcgacggcaactggccgcgcgagacaccgccagcacccagcgggggtggctacagctcttatcccgagccactgcaggggcacaaggtgcgggttcgctcggccagcttcgccgatcacttctctcaggccacgctgttctggcgcagcatgagcgaggccgagcagcagcatatcgtcgatgcctacagcttcgagctgtcgaaagtcgagcgtctgtacattcgcgagcgccaggtcaaggaaatcctcgcccacatcgacccgctgctggcgttgcgcgtggcagagaacctgggtatcgatctggacagcacctcgacctcgcctatggagggcaagctccaggattccccggcgctgagccagatgaatctgctgcctggcgatattcgcggacgacgcgtggctatcctgcttacccccggctgcaaggctgacgaggtcggtagtctgaagaagatgctcgaagcagccggtgccgtggccaagctcctggcaccttccgcggcggcgttgaaggactccgacggtcagcccatgcagcccgatggcagcttcgcttcggagccatcgattaccgtcgacgcggtgttcgtgccgggtggtgagtacgtgctcaagaccctgcaggacgatggcgttgccaagcattacctgctggaggcctacaagcacctcaaacctgtggcgctcagcggtgatgccgctcagcttgcggcgatgctggggctggaggaggacgatggcatgctgtgcggcgatagcttcgatccg

SEQ ID NO: 211035 - DNA, 425 bp, Unknown
  Bacterial polypeptide expressing nucleotide sequence isolated from the Sargasso Sea
aatgtttcaaaaatcagccttagtcgtagctttaggtttgtctttagctgtgcaagcaaacactttaaccagagacaatggtgccccggttggggataatcagaattctactacagcaggtgcgaacggcagtgtgttactgcaggacgtacacctgatccagaaattacaacgttttgcccgtgagcgtattcctgaacgtgttgtgcatgctcgtggtactggtgctcatggcgagtttgttgcgactgacgatttatccgatttaaccatagctgcgcctttcgctgaccaggggaaaaagacaccggtttttgtgcgtttctccaccgttattcatggtaatcacagccctgagacgttgcgtgatccccgtggtttcgccgtcaagttttattctgatcagggcaactgggacttagtgg

SEQ ID NO: 211036 - DNA, 1486 bp, Unknown
  Bacterial polypeptide expressing nucleotide sequence isolated from the Sargasso Sea
ttttttatcaggatggcgtggcatagtgcaggaacatatcgcactggagatggcagaggtggtgcaggcactggaatgcaaaggtttgcgccattaaatagctggccagataacggtaatttagataaagcaagaagacttctttggccagtcaaacaaaaatatggcaacaaaatttcctgggctgaccttatgattttagccggcaactgcgcgatggaatccatggggtttaaaacttttggttttgctggtggtcgtgcagacgtctgggagcctgaagaagatgtatactggggcactgaaacggagtggcttggagacagtagatacactggtgatcgcgaattagaaaatccattagcagcagtccaaatgggcttgatttacgtgaaccctgaaggcccaaacgggacacctgatccagtggcgtcgggtcgcgatatacgtgaaactttcgccagaatggcgatgaatgacgaagaaactgtggctttagttgcgggcggtcacacatttggtaaggcccatggtgctggagacaccgaacttgttgggccagagcctgaaggctcaagcgtgcaggatatggggtttggttggattaataaatataaatctgggaaaggaattcatacaactaccagtggcatagaaggcccatggacatcaaatccaactcaatgggatatgggctattttgatgtattatttggttacgactggaagctcacaaaaagtccttctggagcaaatatttggcacgctgttgatctagctgataaagatcacgctccagaagtcgatggctcgggtgcaaaagttcctgtcatgatgactacggctgatatggctatgcgtatggatccagagtatgaaaaaatatcgcgtagatttcactcaaaccctgatgaatttgcagacgcgtttgcacgtgcttggtttaaacttactcatagagatatgggaccaaaaattcggtatttaggagatgaggttcctgttgaagatttaatttggcaagatccaattccagctgtgaaccatgatctaattaacagttccgaggaagaaagtttaaaagccaagattttaaattcaggactttcaatatctgaatgtattcagacggcatgggcttctgcatctacatatcgaggatctgatatgcgaggcggagctaatggtgctaggattgcgctttctccacaaaaagactggacagtcaaccagccaaaacagcttgtaaaggttctagatattcttcgaacaatacaatcagagttcaacgaaaagtcggaaaaaacaaaagtttctttggctgacttgatagttctcgcagggaacgcaggtattgaggcggctgcaaaagcaggaggcaactctgtatcggtaccttttcttgctggaagaatggacgcttctcaggaacacacagatgtagagtcctttgatctactagagccgattgcagatggttttagaa

SEQ ID NO: 211037 - DNA, 1982 bp, Unknown
  Bacterial polypeptide expressing nucleotide sequence isolated from the Sargasso Sea
aatgagtagagaaattaatcctgaaatttctaagtgtccttttaccggcgcaggaacacctccaaagtttccaactggaagaggtacttcaaatagagactggtggccaaataatctaaatttaaaaattttaagtcaacactcttctttagttgatcctatggacaagaacttcaactacgccaaagaattcaaaaaattaaattataaaaaacttaaaaaagatttaataaaacttatgactgactctcagagttggtggccagcagattatggacattatggtccattttttatacgtttggcatggcacgctgcaggtacttacagaacaggtgatggtagaggaggcgctggaacaggaaatcaaagatttgcacctttaaatagttggcctgataatgttaatttagataaagcaagactgttgctttggcctataaaaaaaaaatatggaaaaaaaatttcctgggctgacttatttattcttgtaggtaatgtctctcttgaaagtatgggttttaaaacatttggatttggcgctggtagagaggatatatgggagccagaagaagatatatattggggatctgaaaaagaatggctgggagtaaatagatatagcggaaatagagaattagaaaatcctttaggtgcgtctcatatgggtctaatttatgttaatcctcaaggccctgatgcaaacccagatccgcttttagcagctcatgacattagagaaacctttggaagaatggctatgaacgattacgaaacagtcgctttagttgcgggcggtcatacatttgggaaatcacatggagcagcgccagagtctcataaaggacctgagccagaaggatctaaaattcaagaacaggcaacaggttggaatagtaattataaaagtggtttgggagttgacactataagtagtggaattgagggagcatggacaagcaacccaataaaatgggacatgggttactttgataatttatttggatacgattgggaacttacgaaaagtccagcaggagcacatcaatggaaaccaagaaaaaacggtcatgctataaatacgacccctgatgctcatctaaagtcgcaaaaaaacatgccgatgatgcaaactacagacttatcattaaaattggatccatcttatggacctatttcaaaacattttcataataatcctaaagagtttgctgacgcatttgcaagagcttggtttaagttgactcatcgtgatatgggtcctcgttcatgctatttgggccctgaagttccaaaagaagaattaatttggcaagacccaatatcaaaaccaaaatataagcttaaaaaaaaagatatagatactcttaagaaaaatttatcaaagtctggattatcagtatctgaacttgtatctacagcttgggcttcggcatcttctttcaggggttctgataaaagagggggtgcaaatggggcaagggttgctctggaacctcaaaaaaactgggaagtaaataatccttcaagactatctaaagttcttaataaattggaaaaaataaaaaagaattttgatacaaaaaaaagaatagtttcacttgcagatcttatagttctaggtggaaatgttggtatagaaaaagctgcgaaaaaagctggttacaaaattaatgttccatttatatcgggtcgtggtgatgcttcacaagctcaaacagatgaattctcctttggacttcttgaaccaaaagcagatggttttagaaattatactttaaaaaaaacaaatggatctagtaaaaattcaatttccgacgaagaaatgttaattgataaagctcaattaatgaaacttactgcacctgaaatgaccgttttagttggtggtatgaggatgcttaatacaaattttgatggctctaactatggagtatttacaaaaaaaacagaaactttaacaaatgacttctttgtcaacc

SEQ ID NO: 211038 - DNA, 1783 bp, Unknown
  Bacterial polypeptide expressing nucleotide sequence isolated from the Sargasso Sea
aacccggccgagcagaccccggtctacgtgcgcttttccaccgtacaggggccgcgtggctcggcggataccgtgcgcgacgtgcgcggtttcgcggtgaagttttacacgcaggagggtaattacgatctggtcggcaacaacatgccggtgttctttattcaggacgcgatcaagtttccggatttcgtacacgctgtcaaaccggaagcgcccaacgagatgccgaccggcgcttccgcgcacgatacgttctgggatttcgtgtcactggtgccggaatccgcgcacatggtgctgtggaccatgtcggatcgcgcgattccacgcagcttgcgcaccatggagggctttggcgttcacactttccgcttcgtgaatgcgcaaggcaaggcgcgcttcgtcaagtttcactggcgccccgtgctgggctcctattcgctgttgtgggacgaagcgcagaagctcgccggcaaggaccccgacttccatcggcgcgatctgtgggaagcaatcgagcgaggcgatttccctgaatacgaactcggcgtgcagatcgtcgaggaagaggatgaacacagcttcggtttcgatctgctcgatccgaccaagttgataccggaagagcgcgtcccggtaaaaatcatcggcaagatgacgctcaaccgtaatccggataatttcttcgccgaaaccgaacaggtcgcgtttcaccccggccatatcgtgccgggtatcgacttcagcaacgatccgttgctgcaaggccggctcttttcgtacaccgatacgcagattagccggctcggcggcccgaacttccacgagattccgatcaaccggccggtgtgcccgtttcataacaaccagcgcgacgcgatgcatcgccagacgatcaatgtcggacaggcatcgtatgagccgaactcggtgagcggcggctggccgaaggagactgatccggcgccgtccgatggcggcttcgagagctatcaggagcgtgtcgacggcgtgaagatccgcgtgcgcagcgagtctttcgccgatcacttctcgcaagccgcgctgttctaccggagcatgtccgaggtcgagcaggagcacatcagcgctgcgtatcagttcgaactcggcaaggtgacgaagccggagattcgcgagcgcgtggtgaacgagattcttgccaacttcgacgcggggctcgccgcgaaggtcgcggaaggcttgggtttgccagcgccgaaaaagggtaaggcgccgcccgtgtcggacccgcaaacttcgccggcgctgagcctcctcaatcgcggcaagccgggcatcaagactcgcaagatcgcgctgctggccgcacccggtgccgacggcgcgtcgatcaggaagcttcagcaggcgctgcgcggcgagggcgcgacgccgttgctgatcgcgccgagcctggctgcgatcgacggtttgcagccggacgcaacgatcgccggaatgccgtcgatcatgttcgacgcggtgatcgtctgcggcggcgaggctggtgcgaaaacactggcgcaatccggcgacgcgcggcatttcgtgctggaggcgttcaagcatctgaaagcgattgcggcgctcggggcggggcgcgacgtgctggcggcggctcaactgccggatcaggccgatggcgtggaaaccggcgatgacagccagagcgccgaggtgctcaaggcattcgttgcggcggcggagcagcaccgagtgtggtcgcgcgcggcgctggcgcaaacggtaccggcataac

SEQ ID NO: 211039 - DNA, 1208 bp, Unknown
  Bacterial polypeptide expressing nucleotide sequence isolated from the Sargasso Sea
ggttttggcgcaggaagagaagatatatgggaacctgaagaagatatatattgggggtcagaaaaagattggcttggagtaaaccgttacagcggtaaaagagaattagagaatccgttaggagcttctcacatgggtttaatttatgttaacccacaaggtcctgatgcaaatccagaccctttactagctgcacatgatattcgtgaaacatttggtagaatggctatgaacgactatgagaccgtagcattagttgcaggaggacatacttttggtaaatctcatggagcagctccagagtcacataaaggtccagaaccggagggatcaaaaattcaggagcaagctactggttggaatagtaattacaaaagtggtttaggtgcggatacaataagtagtggtattgaaggagcttggaccagtaatcctattaagtgggatatgggttattttgataatctttttggatatgagtgggagctttcgaaaagcccagctggcgctcaccaatggaacccaattaaaaacggcaaagctataaaaatgacaccagacgctcacatcaagtcaaaagaaaatttaccaatgatgcaaacaactgatttatccttaaaattagatccatcttatgcgccaatttcaagacatttccataataatcctgaagagtttgctgacgcttttgccagagcatggtttaagcttacacatcgtgatatgggtcctcgtgcatgctatttaggacctgaagttccgaaagaaaaattaatttggcaagatcctatatcaaaacctaattataaaattaaaaataaagacataaaatttttaaagacaaagattttaaaatcaggactttctgtttctcagcttgtttcaacagcttgggcctcagcctctacttttcgtggatcagataaaagaggtggagctaatggtgcaagaataatactagaaccacaaaaaagctggtcagtaaataatccatctcaactatcgaaggttattaaaattttagaaaaaattaaaaagagatttgataataaaaagaaaaatgtttcaatggctgacttaattgttttaggaggatctgttggaattgaaaaagcggctaagaacgcaggctacaaaataaatgttccatttacacctggtagaggtgatgcgacgcaagatcaaacagactcacattcttttggttt

SEQ ID NO: 211040 - DNA, 2236 bp, Unknown
  Bacterial polypeptide expressing nucleotide sequence isolated from the Sargasso Sea
tatgagcaacgagttaattaaagaacaatcaaaatgtccttttacaggtgcaggaacaccaccaaagcatccaacaggcaaaggacaaacaaataaagattggtggcccaatagcctaaatttgaaaattttaagtcaacattcatcattggtaaatccaatgggtgaaaaatttaattacaaaaaagaatttaaaaaacttaactttaaagcattaaaaaaagatcttcataaattgatgactgatacacaagattggtggccagcagattatggtcattatggtccattttttattcgtctagcttggcatgctgctggaacttatcgaacaggagacggaagaggtggtgctggcactggaaatcaaagatttgctccgttaaatagttggccagataatgtaaatttagataaagcaaggcttttactttggcctattaaaaagaaatatggaaaaaaaatatcttgggctgatttatttatacttgttggaaatatatctctagaatcaatgggtttcaaaacttttggttttggagctgggagagaagacatatgggagccagaagaggatatttattggggatctgaaaaagaatggcttggagtaaatcggtatagtggaaaaagagaactagaaaatcccttaggagcatcacacatgggtttaatttatgttaaccctcaaggacctgatgctaatccagacccttatttagctgctcatgatattagagagacttttggacgtatggcaatgaatgattatgagacagtagcactcgttgcaggcggacacacatttggaaaatctcatggtgcagcaccggagtcacataaaggtcctgaaccagaaggttcaaagattcaagatcaagcaactggatggaatagtaactacaaaagtggtttaggtgtagatactattagcagcggtattgagggcgcatggacttcaaacccgattaaatgggatatgggatattttgataatttatttggctatgattgggaattaaccaaaagccctgcaggagctcatcaatggaaacctaaaaggaatggtcatgatatagaaatgactccagacgctcatgatagatctaaaaaaaatcttccaatgatgcaaactaccgacctttcattaaaattagatcctaaatatgggccaatttctaaacattttcataaaaatccaaatgaatttgctgacgcctttgcaagagcttggttcaaacttactcatcgtgatatgggtccaaaagcaaattatcttggttctgacgttccaaaagagaatttaatctggcaagacccaataccaaaaaataaatataaacttaaaaataaagatattgagttattaaagaaaaaaatatcaaaatctggtttatccatttcccaattagttacgactgcatgggcatcagcatcaacttttagaggatcagataaaagaggaggtgctaatggagctagaatagctcttgaacctcaaaaagactgggaaattaataatccttcaaagttgtctgctgtaatcaaaattttaaataaaattaaaaaaggatttgattcaaaaaataaatcggtttcattagcagacttaatagttttaggaggatcagttggtattgaaaatgctgctaaaaagagtggtaaaaaaattaaagttccattcaaagcaggaagaagtgatgcaaaacaagatcaaacagacaaaaattcatttaatcttcttgaacccatagcagacggttttagaaactatattaagctgcatgctaaaggatataccaatggaaaaggtatccctactaattcagctgaagaaatgttgatagataaagctcaacttcttggattaactggtccagaaatgacagttttaattggaggaatgagagtattaaatactaactatgatggttcagattatggtgtgtttacaaaaaaacctggatcattaactaatgatttctttgttaatctgttagacatgaaaactacttggagagaagtagataaagaagaacagttttttgagggaatagatagaaaaacaaaaagagtaaaatggagagcgacacgtgcagatttaatatttggatctaattctcaattaagagcactatctgaagtttatgctacagatgattcaaacgaaaaattcttaaatgattttatatctgcttggacaaaagtaatgaatttagatcgttttgatatttaa

SEQ ID NO: 211041 - DNA, 1132 bp, Unknown
  Bacterial polypeptide expressing nucleotide sequence isolated from the Sargasso Sea
aatggctatgaatgactatgagacagcagcattagtcgctggaggacatacgtttggaaaatctcatggtgcagcatcagagtcgtataaaggaccggatcctgaagcttcaagacttcaagaccagtcaacaggatggaatagtggatataaatctggaaaaggtgttgatacaataagtagtggtattgagggcgcttggactcaaaatccaattcaatgggatatgggttatttggattgtttatatgggcatgagtgggagcttacaaaaagcccagctggtgctcatcaatggactccgaagaaaaatgggcaagagattaaaatggttcccgatgcgcatcaaaaaggtgtgcttcatccaccaatgatgcaaacaaccgacatatcgatgaaagttgaccctagctatggacctatcactaaacattttcatcaaaatccaaaagagtttcacgatgctttcgcgagagcatggtttaaattaactcacagggatatgggaccaagagtttgctatcttggtagtgaggttccaaaagaacaacttatttggcaggatccaattgataaacctaaatataaacttaaatcaaacgatattaaagatttaaaaaacaaaatctctaaatcaaaaatatcaatttcagatttagtttctactgcatgggcttcagcatctacgtttagaggctctgataaaagaggtggtgctaatggtgcgagaataatgttggaaccacaaaaaaattggaaagtgaacaatccaaaaaaattatcgtctgtaattaaagctttagaaaaaattaaaagcaaattcgatagtaaaaagaaaagtgtttcaatggcagacttaattgtactagctggtggtgttggtatcgaaatggctgcaaaaaaagctggctataaagtccaagttccatttttagcaggaagaggagatgcaagacaagatcagactgatattaactcatttggtcttctagaaccacaagcagatggttttagaaactacctaaatggtggagcttcaaatgtttctgcagaggaaaaactagttgataaggctcaattgatgggtttaacagctccagaaatgactgcacttgtgggtggaatgagagtg

SEQ ID NO: 211042 - DNA, 1303 bp, Unknown
  Bacterial polypeptide expressing nucleotide sequence isolated from the Sargasso Sea
atccatgggtggaaaaacttttggttatagcggtggaagacctgatatttggggtccagaagaagatattcattggggagtcgaaactggttggttagaaaataacagatataaaggagatagagagcttgataatcctttagcagcagtccagatgggattaatttatgtaaatccacaaggccctgatggaaatcctgatcctcttgctagcgcaagagatattagagaaacctttggaagaatggctatgaatgatgaagaaacagttgcactagttgctggtggacacacatttggtaaagctcatggagcaggaactgaagatcatgttcagtcagagcctgaaggtgctccacttgaacaaatgggttttggttggaccagcagttatggttcaggtcttggcagagatgcaattacgagtggtattgaaggagcatggacagcaaatccaactcagtgggacaatggatactttgatcttctatttggttatgaatgggagctaacgaaaagtccagctggtgctcacatatggcatgctgtcgatcagaaagaagaagatatggctccagatgctgaagatgggtcaaaaaaagttcctacaatgatgacaactgcagacatggcaatgcgcgaagatccaagctacaaagagatttctaagcgtttccatgaaaatccagatgaatttgcagatgcatttgccagagcttggtttaaattactgcacagagatatggggccgaaaacaagatatatggggcctgaagttcctgaggaggaacttatttggcaagatcctgttcctgctggagactcaagttatgacgtcgaattagttaaagaaaaaatccttgctagcggactctccattcaagaaatggttgaaaccgcttggtcaagcgcatcgacatacagaggctctgatatgcgaggtggcgcaaatggatctagaatcagacttgagccgcaaagaagctgggaagcaaataatccagatcaacttaataaagtgcttgatatttatgaagctatctcctctgaaacaggagtatctgttgcagacataattgtccttgctggaaatgttgctatcgaaaaagcatctggtgttgaagtacccttctcacctggtcgaggagatgcaagtcaagaaaatacagatattgaatccttcgctgtgcttgaacctcagtctgatggttttaaaaactttcataaatcaggtctaaatgttaatcctgaagaaattatgcttgataaagctcaactccttggtcttactgcacctgaaatg

SEQ ID NO: 211043 - DNA, 700 bp, Unknown
  Bacterial polypeptide expressing nucleotide sequence isolated from the Sargasso Sea
atgagcaaactgacgaccgcgtttggagcccctgtacctgacaatcagaacacgcaaacggctggaccacgggggccggcgctacttcaggatgtgtggtttctcgagaaactagcccactttgaccgcgaggtgattccggagcgtcgtatgcatgccaagggatcgggcgcatttggcacgttcacggtcacacacgatgtaactcagtacactcgcgcaaaaattttttccgacatcggaaaatcgaccgagatgtttgcacggttctccacggttgcgggggagcggggcgctgcggatgcggagcgggacatccgcggtttcgcgctcaagttttataccgaagaaggtaattgggatctcgtggggaacaacacgcccgttttctttttgcgagacccgctgaaatttccggacctcaaccatgcaatcaagcgcgatccgaggacgggactccgcagcgcggagagcaactgggatttctggacgcaattgccggaggcacttcatcaggtcaccatcgtgatgagtgatcgcggcattcctcgcacgttcagaaacatgcacggattcggcagccacactttcagtctcatcaacgctgccggcgagcgcttctgggtgaagtttcatatgcgcacgcagcaaggcatcgagaacatgagcgacgtggaagcggtagagctggttggctccg

SEQ ID NO: 211044 - DNA, 1210 bp, Unknown
  Bacterial polypeptide expressing nucleotide sequence isolated from the Sargasso Sea
atgagtactgaaaattttaaagacaagtcttttaaaactgaacaattaagcaaatgtccatttaccggcaaaggtacccccgctaagttttctgctggaagaggtcaaacaaacagagatttttggccaaacagtttaaatcttaagatccttagtcagcactcaaatctatccaaccctatgggtaaaaaattcagctatgctaaagaatttaaaaaacttaattacaaagcattaaaaaaagatttaaaaaagttgatgacagactctcaggaatggtggcctgctgattatggtcattatggtcctttgtttattagattagcttggcatgctgcgggcacttatagaactggtgatggcagaggcggtgctggaacaggtaatcaaagatttgcaccacttaactcttggccagataatgttaacttagataaagctagattacttttatggcctatcaaaaaaaagtatggaagaaaaatttcatgggcagacttatttatacttgttggaaatgtagctttagactcaatgggttttaaaacttttggttttggagctggtagaactgatatctgggaaccagaggatgatatttattggggctcagaaaaagaaatgttaggtgtggaaagatatagtggaaaaagagatttagaacagcctttaggagcttcacatatgggtttaatatatgtaaatccgcaaggccctgacgctaatccagatccaaaacttgcagcacatgatatcagagagacgtttggaagaatggctatgaatgattatgaaactgcagcattggtagctggaggacatacattcggaaaatcacatggagcagcttctgagtcatttaaaggtcctgatcccgaggcatcaaaacttcaagatcaatcaactggatggaatagtggatacaaatctggaaaaggtgttgatacaataagcagtggtattgagggtgcctggactcaaaatccaattaaatgggatatgggttatttagattgtttatatggacatgaatgggagctaacaaaaagcccagctggtgctcatcaatggacgcctaagaaaaatggtcaagaaatcaaaatggttccagatgcacataaaaaaggtgttatgcatccaccaatgatgcaaacgaccgatatctcaatgaaaattgatccaagttacggacctataacaaaacattttc

SEQ ID NO: 211045 - DNA, 1644 bp, Unknown
  Bacterial polypeptide expressing nucleotide sequence isolated from the Sargasso Sea
tgggtggaaagacctttggtttcagtggtggaagacctgatatctggggtccagaagaagatattcattggggtgttgaaactggatggctagagaataatagatataaaggtgatagagagcttgataacccccttgctgctgtccagatgggattgatttatgttaatcctcagggtccagatggaaatcctgatccgcttgcaagtgcaagagatattagggagacctttggcagaatggctatgaatgatgaagaaacagttgcacttgttgctggtggacatacttttggtaaagctcatggagcaagcactgaagatcatgttcaagcagagccagaaggagctcctcttgaagagatgggatttggatggacaagtagttatggttcaggtgttggaagtgacactattactagtggtatcgaaggcgcatggactgcaaatccaacacaatgggataacggatactttgacttgctctttggatatgagtgggagctaaccaagagtcctgcaggtgctcatatttggcatgctgttgggcaaaaagaagaagatatggctccggatgcggaagatgcttcagtgaaagttccaaccatgatgacaactgctgatatggcgatgagagaagatccaagctacaaagaaatatcaaaacgttttcatgagaatccagacgagtttgcagatgcttttgcaagagcttggttcaagttactacacagagatatgggacccaaaacaagatatatggggccagaaattcctgaagaggaattgatttggcaagatcctgtccctgctggaaattcaacttatgatgtagatgctgttaaagagaaaattctcaattgcggtctatcaatccaagaaatgattgaaactgcatggtcaagtgcgtctacttatagaggctctgacatgcgaggcggagcaaatggcgcaagaataagattagagcctcaaaagaattgggaagctaataatcctgatcaattaagaaaagtgttagaaatctatgaagcaatagcagaagagactggtgcttcagttgctgatgttattgttttagcaggtaatgttgctattgagaaagcttctggtattgaagttccttttactccagggcgaggcgatgcaacacaagaaaatactgatgtagaatcttttgaagttcttgaaccacaatctgatggcttcaaaaactttcataaagccgggctaaacgttaatcctgaggaaataatgctagataaagcgcaattacttgggcttacagctccagagatgacggttttagttggcggtcttagatctttaggaataagttcaagcggatacggtcttttcaccgaaaataaagatgaattatctaatgactatttcagaactctgttagatatgtcagttaaatggagacctaacggaactggaaattcttatgaagcaatcgatagagtttctggtgagaaagttagaacagcttcaaggactgatttagtttttggctcaaactcgcagctaagagctctcgtagaagtttatgcaagtgatgattcgcttgataaatttaaaggtgactttgttcatgcatggaataaagttatgaatgctgacagatttgatctaaattaat

SEQ ID NO: 211046 - DNA, 1030 bp, Unknown
  Bacterial polypeptide expressing nucleotide sequence isolated from the Sargasso Sea
aatgttaaaagaacaatcaaaatgtccatttactggttcgggaaccccctctaagcaccctaccggtaaagggacaatgaatagagattggtggccaaatagcttaaatctaaaaattttaagtcaacattcttcactggtaaatccaatggataaaaaatttgattactcaaaagaatttaagaaattgaattttaaggctctaaaaaaagatcttaaaaaattaatgacagactcacaagattggtggcctgctgattatggtcattatggaggcctttttatcagattagcatggcacgctgcaggaacttatagaactggcgatggacgtggtggtgctggaactggaaaccaaagatttgctcctttaaacagttggccagataacgtaaacttagataaagcaagattactcctttggccaataaagaaaaaatatggaaaaaaaatttcatgggcagatctatttatactagttggaaatgtagctcttgagacaatgggatttaaaacttttggttttggagctggaagagaagatatttgggaaccagaagaagatatttattggggatccgagaaagaatggttaggagttaatcgttacagtggaaaaagagatctagaaaatccattgggagcttctcatatgggattaatttacgtaaatccacagggtccagatgcaaatccagatccaattttggcagcccatgatattcgagaaacttttggacgtatggctatgaacgattatgaaacggtagcacttgtagcaggaggacatacttttggaaaatcacatggagctgcttctgaatctcataaagggccagagccagaaggatcaaaaatacaagaacaagcaacgggatggaatagtaattatagaagtggaaaaggtgtagatacaataagtagcggactagaaggagcctggacacaaaatccaaaaaaatgggacatgggttatttcgataatttatttggatatgattgggaattaacaaagagtccagcaggagcc

SEQ ID NO: 211047 - DNA, 1241 bp, Unknown
  Bacterial polypeptide expressing nucleotide sequence isolated from the Sargasso Sea
actactttggccaatcaaacaaaaatatggcaagaaaataagttgggctgatctattaatattagccggcaatgtagcaattgagtccatgggtggaaagacctttggtttcagtggtggaagacctgatatctggggtccagaagaagatattcattggggtgttgaaactggatggctagagaataatagatataaaggtgatagagagcttgataatccccttgctgctgtccagatgggattgatttatgttaatcctcagggtccagatggaaatcctgatccgcttgcaagtgcaagagatattagggagacctttggcagaatggctatgaatgatgaagaaacagttgcacttgttgctggtggacatacttttggtaaagctcatggagcaagcactgaagatcatgttcaagcagagccagaagcagctcctcttgaagagatgggatttggatggacaagtagttatggttcaggtgttggaagtgacactattactagtggtatcgaaggcgcatggactgcaaatccaacacaatgggataacggatactttgacttgctctttggatatgagtgggagctaaccaagagtcctgcaggtgctcatatttggcatgctgttgggcaaaaagaagaagatatggctccagatgcggaagatgcttcagtgaaagttccaacaatgatgacaactgctgatatggcgatgagagaggatccaagctacaaagaaatatcaaaacgttttcatgagaacccagacgagtttgcagatgcttttgcaagagcttggttcaagttattgcatagagatatgggacccaaaacaagatatatggggccagaagttcctgaagaggaattgatttggcaagatcctgtgcctgctggagattcaacttatgatgtaagtgccgtaaaagagaaaattctcaattgtggtctatcaatccaagaaatgattgaaacagcttggtcaagtgcatctacttataggggttctgacatgcgaggcggagcaaatggcgcaagaattagattagagcctcaaaagaattgggaagcgaataatcctgatcaattaagtaaagtgttagagatttatgaagcaatagcagaagaaaccggcgcctcagttgctgatgttattgttttagcaggtaatgttgctattgagaaagcttctggtattgaaagttcttttactccagggcgaggcgatgcaacac

SEQ ID NO: 211048 - DNA, 2084 bp, Unknown
  Bacterial polypeptide expressing nucleotide sequence isolated from the Sargasso Sea
ctcaagcggtacatcaaataaagattggtggcctaatcaattaaatttaaacatacttcatcaacatgataataaatccaatcctatggatgaagattttgactatagagaagagtttaaaaaaattgattatgaagcattaaagaaagacctcaatgatttaatgacagattcacaagattggtggccagcagattatggccattatggaccgttctttataagaatgacttggcatgcagcaggtacatatagaaatacagatggaagaggcggaggaggaactggcgcccagcgttttgctccattaaatagttggcctgataatggtaacttagataaagctagaaggttactatggcctatcaaacaaaaatatggcaagaaaattagttgggctgatttgttaattcttgctggaaatgttgcaattgaatctatgggaggcactacttttggatatagtggaggaagaccagatatatggggtcctgaagaagatattcactggggtgtagaatctgaatggctagaaaataaaagatataaaggagaaagagaattagataatcctttagcagctgttcaaatggggcttatatatgttaatcctcaaggcccagacggcaatccagatcctttagcaagtgctcacgatattagagaaacatttggaagaatggcaatgaatgatgaggaaactgttgccttagttgctggaggtcatacctttggtaaatctcatggcgcaggagctgaagaaaatgtccaatctgagccagaggcagcacctttagaggaaatgggttttggatggtcaagcacttttgggtctggaatgggtagcgacactataacaagcggcattgaaggtgcttggacagcaaatccaaccaaatgggataatggctattttgatcttttgcttggatatgaatgggaattaacaaaaagcccagccggtgctcatatttggcatgctgttggtcagaaagaagaggatatggcaccagatgcagaagactcatcaaagaaagttccaactatgatgactactgcagatatggctttaagagaagatcctagttataaagaaatttcaaaaagatttcatgaaaatccagacgaatttgcagatgcttttgctagagcatggtttaaacttcttcatagagacatgggcccaaaaacaagatatatgggtccagaagttcctgaagaagaattgatttggcaagatccagttccatctggtaattctgaatatgatgaagattctgtaaagaaaatgattactgattcaggactatcaatacaagaaatgatcgaaacagcttgggcaagtgcatcaacctatagaggctctgatatgcgaggtggtgcaaatggttcaaggattagattagctcctcaaaaagattgggaagcaaacaatccttctcaattaaaaaaggttcttgatatatacgaaaatatttcaaatgaatcaggggcttcaatagcagatattatagtcttagctggtaatgttggaattgaaatagcttctggagttgaagttccttttacatcaggaaggggtgatgcttctcaagagcaaactgatatagagtcatttgaagtcttagaaccaaagtcagatgcattcagaaactttcatgctaaaggtgtaaataccgctcctgaagaaattatgcttgataaagcacaattacttggcctcacagctcctgaaatgacagtacttgttggtggcatgagatctttaggaataagctcaaatggatatggtgtatttacagaggattccaataagttaagtaatgattattttaaaacattactagatatgtctgtccaatggaaacctaatggaacaggaaactcatatgaagcctttgatagatcaagtggtgaaaagctgagaacagcatcaagatccgacctagtttttggatctaattctcaactaagagctattgtagaagtatatgctgaggatgattcatcagaaaaatttgttaatgactttatattcgcatggaataaagttatgaatgctgatagatttgacgttcagtaga

SEQ ID NO: 211049 - DNA, 1252 bp, Unknown
  Bacterial polypeptide expressing nucleotide sequence isolated from the Sargasso Sea
tctaaaaatacttagtcaacattcatcaatggttaatcctatggatgaaaaatttaattataaaaaagaatttaaaaaacttaactttaaggcacttaaaaaggatttacacaaattaatgaccgaatcccaaagttggtggccagcagattatgggcattatggtcccttatttattcgtctagcttggcatgcagctggaacttatagaactggtgatggtagaggaggtgcagggactggcaaccaaagatttgcacctatcaatagttggccagataatgttaacctagataaagcaagacttcttctatggccgatcaaaaaaaaatatggaaagagaatttcttgggcagacttatttatattagttggaaacgtagctttagagtccatgggtttcaaaacatttggttttggaggaggaagagaagacatatgggaacctgaggaagatatatactgggggtccgaaaaagaatggcttgctaatgagagatacgactccaaaagggagctagaaaaccctcttggtgcagttcaaatgggtttaatttatgtaaatcctcaaggccctgatggtaatccagaccctttattagcggcaagggatataagagagacatttggtagaatggcaatgaatgactatgaaatagttgctcttgttgctggaggtcatacgtttggaaaatcacatggtgcagctccagagtctcataaaggacctgaaccagaaggatctaaaatacaagatcaatcaactggatggaacagtaattataaaagtggacttggtgcagatacgataagtagtggaattgaaggcgcttggacatcaaatccaataaaatgggatatgggctattttgataatctttttggttatgaatgggaactaacaaaaagtcctgcaggagctcatcaatggaaacctgttaaaaatggtcatgctcctaatatgacaccagatgcacatataaaaggtaagaaaaacctaccaatgatgcaaacaactgatttgtcgatgagatttgatcctgagtttggcagaatttcaaaacattttcacaataatccagatgagtttgctgatgcatttgctcgtgcatggtttaaacttactcacagagatatgggacctaaagtaaattatttaggaaatgaagttccaaaagaagagctgatttggcaagacccagttcctaaaaataaattcaaactaaaaaacaaagatattgaaactttaaaa

SEQ ID NO: 211050 - DNA, 1537 bp, Unknown
  Bacterial polypeptide expressing nucleotide sequence isolated from the Sargasso Sea
catgtcctcatcctcccatcgcgtgctgagacacgcaatcgctgcgatctgcgttgcactttccgcgtccccccatgccgccgaactcacgcgagacacgggtgcccccgtcggcgacaacgagaattcgcagacggcgggccctgccggccccgtactcctgcaagactccgcactcatcgagaaactgcagcgcttcgatcgcgagcgcattcctgaacgtgtcgtgcatgcacgcggcaccggcgcattcggcgagttcgtgcccaccgccgacatctcgaacctgacaaaagcgaaggtcttcacgcccggtacccgcacacccgtgttcgtgcgcttctccaccgtgatgggctatcgcggctcacctgaacaggcgcgcgatccgcgcggtttcgcggtgaagttctatacgcaacagggcaactgggacatggtcggcatcaactggcccgtgttcttcattcgcgacggcatcaagttccccgacttcgttcacgcgaacaagccgagcgccgtgaccggcgtgcaggatccaaacctcgcattcgacttcttcgcgcatacacccgaagcgacgcacatgctgacgatgctgtacacgaatgcgggcatgcccgattcgtatcgtcacatggacggcttcgcggtgcatgcgttcaagttcgtcaatgcgcgcggcgacgtgcactacgtgaagttccactggaaaagccagcaaggcgtgcacggactgcgtccgcaagagatcgacgcatcgatcgggcgcgactggaacatgatgacgaacgacctgtacggcgcactcaagcaaggcgacttcccgaagtgggatctgtacgtgcaggtgctcacgccgcaggacctgaaccgtttcgacttcgatgcgctggacgacacgaaggtgtgggccggtgtgcccgagcgcaagatcggcacgatgacgctgaaccgcgtgcccgacaactacttccagtcgaccgaggaatcggcgttcgcgccgtcgcggctcgtgcccggcatcgaaccgtccgaagaccggatgctgcaggaccggctgttcgcgtacgccgacacgcagatgtaccggctcggcgcgaactacatggacctgccgatcaaccggcccgtcgtgccggtggccaacaacaaccaggacggcaagatgaacgccggcgaccgcaagggcgaggtgaactacgaaccgtccacgctgcatgaactcgcaccggatccgcagtacaaatccgttcgcacggcgctcaacggcacgacgcagcaggaagcgatccacaagaagctgaggttccgccaggcaggcgagtactaccgcggcctgtcgcagcaggacaaggacgacctgatcactgcgctgtccggtgatctcggcaaggtgacgaacgcgcacaaccagtacgcgatgctgtcgtacttctacaaggccgatgccgactacggcacgcgtctcgcgcaggccgttcacgccgacgtcgggcaagtgcaagcgctcgccgcaaagctgagcgagaactga

SEQ ID NO: 211051 - DNA, 2224 bp, Unknown
  Bacterial polypeptide expressing nucleotide sequence isolated from the Sargasso Sea
atgaaaataaacacccttcctacgctatcggcgttaactttggctatgtctctcgcattgggggcgggaacggccacagcgcaagagcaagtcacaggtaatcaattttggtggcctgaaaaattaaatctcagtccattacgtcaaaatgcgattgaatccaatccctatggcagtgattatcactatgccgaagcctttaaaaccttagatctcgatgcggtaaaaaaagatatcaaagccttgatgacagagtctcaggactggtggcccgccgattatggtcactatgggcctttctttatccgtatggcgtggcatagcgcgggcgtataccggatttttgatggccgcggtggtgctgcgggtggccaacaacgttttgaacccttaaatagctggccggataacgtgagtttagataaagcgcgccgtctgttgtggcctatcaagcaaaaatacggcagcaagctgtcttggggcgacttgatggtgctaacgggtaacgtggcattagagtcgatgggctttaaaacctttggttttgcgggtggtcgtgaagacgactgggaagccgaaatggtcaattggggctcagaaaaagcgtggctcgatagtaaaagacgcaacgaaaagggcgaattggctaaacctatgggcgcgacccaaatgggcttaatttacgttaacccagaaggcccgaacggagtgcccgatcccttagcttcggcaaaagaaatccgcgatacctttggccgtatggcgatgaatgacgaagaaaccgttgccttaatcgctggtggtcacacctttggtaaggcgcacggcgcacacgatcccgcaaaatgcgtgggtgccgatccggccgcagcaggcattgaagagcaaggtctaggctggaaaaacaaatgtggtaaaggccactctgaagacactgttaccagtggtctggaaggggcttggtcatccaacccaaccaaatggaccatggaatatttaacttggctgtatacctttgactgggtacaaaccaagagtccagcgggccatatccaatggacgccagccgatgataaggcggcaaatctagtacccgatgcccacttaccggataagcgccacgcgccgattatgttcactagtgatatcgcgttgaaggaagatcctatttatcgcgaaatcaccacgcgtttcctgaaaaatcctaaggagtttgagctagccttcgctaaggcgtggtttaagttaactcaccgcgatatggggccaaaagcgagatatttaggtgccgatgtgccagcagaaacgctgatttggcaagatcctattcctgcccttgaccatccgcttatcgataacgccgatattaaagccttaggcaataagatcttagcatctgggttaacagtgcctgagttggtgagaaccgcatgggcgtcggcaagtagcttccgtgataccgatatgcgtggcggggcaaatggcgcgcgcattcgtttagagcctatgatgaactggcaggccaacaatccaaaagagttagctaaggtgttggctaagcttgagaaagtccaaaaagactttaacggttcgctcaagggcggcaaaaaagtctctttggctgatgtgattgtgcttggcggtagcgtcgcggttgagaaagccgccaaagaggcgggagtgatgatttcggtgccatttaccccaggtcgaatggacgccacacaggcgcaaactgatgtgaactcctttgcggtgcttgaacctgcggctgatggtttccgtaactattactcaaaagacaacagcttgtctcccgctgagatgctgattgagcgggccaatatgctcaacctgaccgtgcccgaaatgacggtgctggtgggtggtttgcgtgcgttggatgccaatagtgctggcgttaagcacggtgtatttaccgataagccaggtgtgctgagcaatgacttcttcgttaacttactcgatatgtcgactaagtggagcaagtcggccaagcaagagggcatctacgaggggcaagaccgtaagagcggtaagcttaagtggacagcaaccccagtcgatcttatcttcggctctcactctgaattgcgcgccgtggctgaagtgtatggcgcacaggatggtcaagacagattcgtgcaagactttgttaaagcgtggaataaagtcatgaatgccgatcgcttcgacatctaaa

SEQ ID NO: 211052 - DNA, 1150 bp, Unknown
  Bacterial polypeptide expressing nucleotide sequence isolated from the Sargasso Sea
aatgaatggtgaatcaaaatgccctgtatctcatggagcaagtgatcaacatactaatcgtgcacaaacaaacaaggagtggtggccagatcaagtcaacttaagtatcctacatcagcacgacaaaaaaacaaatccgatggatgagaattttgattacaaagaagagtttcaaaacctagactatgatgctcttaaaaaagatctaaatgatttaatgacagactcgcaggactggtggccagctgattacggacactatggtcctttttttataagaatgacctggcatgcagctggaacataccgaaccgcagatggccgtggaggtgggggcacaggatctcagagatttgcaccaacaaatagttggcccgataacaccaatttagataaggcacggaggcttctctggcccatcaaacaaaaatatgggaataaaattagctgggcagacctcatcatactgacaggtaatgttgctatcgaatcaatgggaggaaaaacctttggatttggaggtggccgtgttgatatatggggcccagaagatgatattttttggggaaaagaaacagaatggttggcaaacgaacgttacactggtgaccgagtccttgaccaaccccttggtgcagtgcaaatgggtttgatctatgtcaacccgcagggacctgacggtaatcctgacccagttgcaagtgcaagagatatcagagaaacatttggcagaatggcaatgaatgattacgagacagttgctcttacagctggtggtcatacgtttggaaaagcccatggtgctgcaagtgaggaccacaaggcagtagaacctgagggcgctgatgtagataaaatgggctttggctggcacagtgatcatggtaaaggtatgggccgtgacaccattacaagtggaattgaaggagcatggacaccaaatcctactcagtgggataatgggtattttgatatgctttttggttatgaatgggagcttgttaagagtcctgctggagcacaccagtggcacccgatcgatccaaaagatgaggatatggcacctgatgttgagaatagctcacaaaaagtaactacaatcatgacaacggctgatatggcaatgcgggaggatccagaatacagaaaa

SEQ ID NO: 211053 - DNA, 1552 bp, Unknown
  Bacterial polypeptide expressing nucleotide sequence isolated from the Sargasso Sea
caaaacaaaagatacacaggtgatagaattttagataacccacttgctgcagtacaaatgggattaatttatgttaaccctgaaggaccagatggaaaagcagatccgcttgcaagtgcaaaagacattagagaaacttttgcaagaatggcaatgaacgatactgaaactgtggccttaactgcaggaggacatacttttggaaaagcacatggtgcaggtgatccagctttagttggagctgaaccggaaggtgctccgttagaacaaatgggtttaggatggaataacttacacggttctggtgttggaagagatgcaacaacaagtggtattgaaggtccttggacagcaaatcctacacagtgggataatggatattttgatttacttcttggttatgaatggaagttagtaaaaagtcctgcaggagctcaaatctggcatgcaattgatcaaaaggaagagcatatggcgccacaagttgatgatccatcaataaaagttccaacaatgatgacgactgctgatatggcaatgcgtgaagatccagaatatagaaaggtttctgaaaagtttcacaaagacccagaatattttgcggatcaatttgcaagagcttggtttaaacttcttcatagagatatggggccaaagacaagatacataggaccagaagttccagaagaagaattaatttggcaagaccctgttccgaaaggccactcaaattatgatgttgaagctgttaaagctaaaattataaacagtggattaacaactcaggagatggttgaaactgcttgggcaagtgcttctacatttagaggatcagacatgagaggtggagcaaatggtgcaagaattagacttgctcctcaaaaagattgggaggttaataaacctgaacaattaaaaaaagttcttggtattcttgaaccaattgcaaaagacacaggagcttcaatagctgatgtgattgtgcttgcaggtaatgtgggagtcgaacaagcttcaggaatggaagttcctttcacacctggtagaggtgataccactcaggacaaaactgatattgattcttttggtgttcttgaacctgaggcagatgcatttcgtaattatttaaaaatgaactacgatgtaacagctgaagaactaatgttagataaagctcaacttcttgggctaacagctcctgaaatgacagtacttgttggtggcatgagatctatgggtatcagttcagatcagcgaggtttatttacagaaactggtggtaaacttactaacgatttctttgataagcttttagatatgggtgtaagctggaaacctactggaagtaattcatatgaagcaactgataaaattacaggtgaaaaggtaagaacggcatctagagtagatcttgtttttggatctaattctcaattaagagctatagcagaactttatgcaagtgatgatagtgaagaaaaaatgaaaaaggacttcataaaagcttggaataaagtgatgaatgctgatcgtttcgatctagagcaataaa

SEQ ID NO: 211054 - DNA, 1439 bp, Unknown
  Bacterial polypeptide expressing nucleotide sequence isolated from the Sargasso Sea
gacatttgcaagaatggctatgaacgatgaagagactgttgctcttactgcaggaggtcatactattggtaaaacgcatggtaatggtaatgctgataatcttgaagcagaacctgaaggggcagcaattaacgaacaaggccttggttggatgaataatacttccagaggagttggaagagatacggtgacatctggaattgaaggtgcatggactactgagccaacaaaatttgataatggatattttgacatgctctttaaatatgagtgggaacttaaaaaaagccctgcaggagcttggcaatatgaacctatcaatattaaagaagaagataagcctttagacgtagaagatccatcaattagatataacccaatcatgacagatgctgatatggcaatgatcaaagatccaatttatttagaaatatccaaaaagtttcataatgatcatgagtatttttgtgatgcttttgcaagagcttggttcaaacttacccatagagatatgggtccaagatctagatacataggacacgaccttccaaacgaggatttgatctggcaagatccagttcccgctggaacacctagttttgatgtggaacaactcaaagaaaaaatcagaaattctgaattaactgttcaagaactagtctcaactgcatgggatagttcaaggacatttagagggtcggatttaagagggggagctaatggagcgagaattagattttcaccacaaaaaaattggaaaggcaatgagcctcaaagattatcaaaagtgctagatatattagaacctcttgcaaaagaagcaggcgctagcattgcagacacaattgtcttagctggaaatgttggtctagaaaaagctattgaatctgctggttttaacgttcctgttcctttcaacccaggaagaggagatgcctctgaggatatgactgactctgagtcattttctcaattagaacccatacatgacggttttagaaattggcaaaaagataattatgaagtaagaggagaagagttgttgcttgatagagctcatttacttggtcttactgcagttgaaatgactgtacttgttggaggtatgagggctctgggtgctaactatggtgagaataagcatggtgtttttactgaccaggtaggtgctcttacaactgacttttttgttaacttgcttgatatgagtaataaatggaaagcgtctaatggacattatgagattattgatcgaaaaacaaataatgttaaatggacggcaacctcaacggaccttgtatttggatcgaactctatacttagatcttatgctgaagtgtatgcacaagatgataacaaggaaaagtttgtaattgattttgttaaagcttggaacaaagtaatgaatgccgatagatttgaattgaacaataattaat

SEQ ID NO: 211055 - DNA, 2302 bp, Unknown
  Bacterial polypeptide expressing nucleotide sequence isolated from the Sargasso Sea
atgactataaacaggtttaaaaaaaccacagtatcagtacttgttgccctatcgcttagtgcaacaggggctattgccaacgatcaaattagtaagcctgcgggtgctaaaggcacgggcactgctaaagcttttcaagcgaaaaataatcaattttggtggcctgatcagctcgatctctctccgttaagagatcacgataatcgctcaaacccactaggtgatgatttcagttatgcaaaggcattcgctaagctagatctcgacgaagtaaaaaaagatgttaatgagctactcactacttctcaagattggtggccggctgacttcggaaattatggtcctttcttcattcgactttcatggcacagtgcaggtacctatcgtacgctagatggtcgtggcggcggtgacggtggtcaaatgcgttttgatccgctgaacagctggccagacaacggaaaccttgataaagcgcgtcgcttactttggcctattaagcaaaagtacggtgaaagtttgtcttggggcgacttaatgatccttgcgggtaccgtaggcatggaaaacatgggctttgacacctatggatttgcgggtggtcgtaccgacgactgggaacctgacatggtttattggggcccagaagtggaaatgcttgcgagcgatcgtgaagagcgcgacggtaagcttcagcgcccgttgggggcaacgcacatgggcttgatctatgttaaccctgaaggccctaaaggtgtgcctgatccgatgggatctgcgaaaaatattcgcactgcatttggccgtatggcgatgaatgacgaagagaccgttgcgctaatagcgggtggtcatacatttggaaaaatgcacggcgcacacaagcctgctgattgtttagaagctgagccaggcggtgcaggcttagaagagcagggactaggttggaagaacaattgcggtaaaggcaatgcagaagacacagtaacgagcggtttggaaggtgcttggacacagctacctactaaatggacgagcctatatctccaaaacttattgggctttgagtggaagcaaactcgcagtcctgccggcgctatccagtggatccctaccgatgagtcgctacataaatcagtaccagatgcgcacgtagaaggtaagaaaaatcctcctgtgatgactacagctgacttagcgcttaagtacgatccagagtatcgaaaaattgccgagcgcttcttagcggatcccaaagagtatcaaacggcatttgctaaagcgtggttcaagctaactcaccgcgatatgggtcctaaggcacgttacttgggtaacgatatcccagaagagaacttcatctggcaagatccagtgcctaaagctgactataagatgatctctgataaagacgttaagaagcttaaagctgacatcttagacagtggcttaaccgttcagcaacttgtgaaaacggcgtgggcggcggcatctagcttccgagcatctgacttacgcggtggagcgaacggtgctcgtatcgcgcttgagccacaaatgagctgggaagctaacgagcctgaaacggttaaagccgttgtttcgaagcttaaagagatgcaagaagactacaattcacgcatgttttctaagaagaaagtgtctcttgctgacctcattgtgattggcggtgccgcagcaattgaaaaagcagcggcagatgctggcgtcaaggttactgttccagtggttccgggtcgaactgatgctacgcaagagcaaacagacgttaattcgttttcattgttagagccaacagccgatgcgtttagaaactattacaacgcagaagctagctatcgttcgccaaccgacatgctggtagataaagccgatcagcttaacctaacggtaccagaaatgactgttttgcttggtggtttgcgttcattgggagctaacacaggtggcactagccatggtgtatttactgacaacgtaggcacgctgaacaacgacttcttcgtaacgcttcttgatatgggcgttaagtggagaaaaacagataacccgtcggtatatgaaggtgtaaacagaagtactggtgaagttatgtatacaggtacgcctgtagacctggtctttggatcaaacagtgagctgcgtgcagtggccgaagtttatgcctatgacaacgcgaaaagccgttttgttaaagacttcgttgacgcttggaccaaagtgatgacgctagaccgtttcgatttacgtcacgatctaaacgccagcttgggtaaataga

SEQ ID NO: 211056 - DNA, 1171 bp, Unknown
  Bacterial polypeptide expressing nucleotide sequence isolated from the Sargasso Sea
cacttcaaccgcgagcgaattccagagcgtgtagttcacgcaaggggcagtgctgcatatggcacctttacgctaactaagagcttatctgactacactattgcagactttctgcaaaaagaggggcaaaaaaccgacgtgtttttgcgcttttctaccgtaggtggtggtcaggattcaagtgactatgcccgtgaccctcgtggtttttcggtgaagttttacactgaacagggaaactgggacatggtaggaaataatactccggtattcttcttacgagatggcatcaagtttcctgacttcattcacagtcaaaagaaaaacccgcgtacgaatttgccggatccgcaggccgtgtatgagttttgggcgaacaaccctcagtcattacaccaatcgacaatcttgatgtctgatcgcggtattccactttcatatcgccatgtgaatggctatagctctcatacgttgagtttctggaataacgcaggcgaacgctattgggtgaaatggcactttaaaactaaccaaggtattaaaacgctaactagcgaagaggcggcaaagatgcctgcttatggcgctcagcaagacttggtcgaaagcattgataacggcgaatttccatcgtggaccgtgaatgtgcagattatgaatgaagaggaagcgcgtaattaccacattaatccgtttgacctaacgaaggtgtggccgcacagcgactttccattaattgaagtaggtcagttggagttaaaccgtaatgttgataactactttgcagaaactgagcaagcagcgttcgcgccgagcaatttggtaccgggtattggtgcgtcgccagacagaatgcttcaagcgcgactaattggatatcaagatgcgcacagataccgtattggtgcaaactacaaccaaataccggtaaacgcgccgcgttgtccagtgcacaattatcaacgagatggagcctttgcgggaattaacccagcacttgcaggaagtggagccaacttctatccaaataatcgcgcgcgagttggtgagccggctgaagcaccagaggttcaagagccgcctatgccgcttgagcaagacgcatggttagatatttacgataaccgtgacgaagataactactcacaggccggtgaccttttccgcatta

SEQ ID NO: 211057 - DNA, 1296 bp, Unknown
  Bacterial polypeptide expressing nucleotide sequence isolated from the Sargasso Sea
tcctcttttgctgctctgatattcgtgaaacttttggacgtatggctatgaatgattatgagacggttgctcttgtagcaggtggacacacttttggaaaatctcatggtgcagcccctgaatctcataaaggtccagaaccagaaggttcaagaattcaagaacaagcaacaggatggaatagtaattataaaagcggtttaggtgttgacactattagtagtgggatagaaggtgcttggacttctaatcctataaaatgggatatgggatactttgataatttgtttaattatgattgggaacttacaaaaagtcccgctggagcacatcaatggaagccgaaacaaaatggccatgatattgaaatgactcccgatgcgcatttaagagaaaagagaaatttaccaatgatgcaaactacagatttatctttgaaaatggaccctaaatatggcccaatttctagacattttcataataacccaaaagagttcgctgatgcatttgcaaaagcgtggtttaaacttactcatcgtgatatgggtcctcgaacatgctatcttggaaaagaagtacctaaagaggaattaatttggcaagatcccattccaaaagctaaatacaaacttaaaaataaagatattaaatttctaaaaacgagaatactaaaatcagaactatctatttcccagttagtttcaactgcttgggcatcagcttctacttttcgtggttcagataagagaggtggagctaatggagccagaataagactggaaccacaaaaaaattgggaagtaaataatccaatacaactatcaaaagttattaaaaatttagaaaaaattaagaaagattttgataaaaaaaataaaacagtttcaatatctgatttaatagttttaggaggttgtgttggaatagaaaaagctgcaaaaaaaggtggttataaagttaatgttccatttacctccggtagaggcgatgcaactcaagatcagacagacatatattcttttggtttattagagccaaaagctgatggatttagaaattacattataaataagactaacggatcttcaaaaaaattaactgtatcgtctgaagaaatgttggttgatcgggcacaattaatgaaacttactgccccagaaatgacagttttagttggtggtatgcgtgttctcaatactaactttgatagatctaattatggaattttcacaaaaagaccagaaactctttcgaacgatttttttgtcaatttacttgatatggaaactacatgaa

SEQ ID NO: 211058 - DNA, 2131 bp, Unknown
  Bacterial polypeptide expressing nucleotide sequence isolated from the Sargasso Sea
atgtccaaagacaatgaaagcaaatgtcctgtgatgcacggtgcattgacaacaaacagtgcttcaggcacttcaaacaaagattggtggccaaatcagttggatttgtccattcttcatcaacatgaccagaagtctgatccaatggatgatggatttgattacagggaagaatttaaaaaactagactttgatgctctaaagaaagatctaaatgatctaatgacagattcccaagattggtggccagcagattacggacattatggtcctttcttcattaggatgacttggcatgctgctggtacatacagaatcggagatggtcgaggcggaggcggtactggaaatcagcgttttgctccactgaacagttggccagacaatggaaacttagacaaagctagacgccttctttggccagtcaagaaaaaatatggtaacaaaatcagctgggcagacttattgatacttgctggtaatgtggccattgaatctatgggcggaaaaacttttggatttggtggtggtcggccagatatatgggcaccagaagaagatattgattggggtgctgagagagagtggcttgcaaatgagcgatactctggagagagagacttagcaaatccactcggagctgtgcaaatgggtttaatttatgttaatccgcaaggccccgatggtgaaccagaccctatagccagtggtaaagatgtcagagaaacattcagtcgaatggctatgaacgacgaggaaactgttgccctggttgctggaggtcatactttcggtaagggacatggtgctggaccggaggagcatgtgagtgcagagccagagggcgcatcacttgaaaacatgggatttggttggatgagcgaccacaaatctggaatgggtagcgataccattaccagtggttttgaaggcgcttggacggctaaaccgacaacatgggataatggctactttgatcttttatttggttatgagtgggagaaggtagaaacaccatccggcaaaattgtctggcatgccatagatcagaaagatgaagacatggctccagatgctgaggacccttcagttaaagttcctacgatgatgactactgctgatatgtcaatgagagaagatccaatttatagagagatctcaaagcgttttcatgaaaaccctgatgaatttgcagatgcttttgccagagcatggtttaagcttttgcatcgtgatatggggccacgttctcgttatctaggacctgaagtacctgatgaagagttaatttggcaagaccctgttcctcaaggcaataatgattatgatgtggatgcgatcaaagctaaactctcaaactgtggtctgagcattcaagaaatggtcgaaactgcctgggctagtgcatcgacatttagaggttctgacttaagagggggagcaaatggatctcgaattcgtcttgctccacaaaaagattgggaagccaataagccggaacagcttgcaagagttcttggtgtatatgaatcaattgcttcagagtctaatgcctccttggcagatgtaattgtacttggaggaaacgttggtattgagaaagcctctggcgctcaagttcctttcacaccaggccgaggtgacgccagcgaggagcaaactgatgctgactcatttgatgctcttgagccaattgctgatggttttcgtaatttccaaaaagaaggctccagccttccatctgaggaaatgatgcttgataaagctcaactgcttggtttaactgcacctgaaatgacagtgctcataggaggtatgagagctctgggtataagttcaaataatcatggagtctttacagaaacacctggcaaattaacaaatgatttctttgttaatcttctagatatgggtgttgagtggaaatcaacaggtgagaactcttatgaggccattgaccgtcagtcaggagacaaagtaagaacagcaactagggtagacttggtctttggatctaattcacaacttagagcaattgctgaagtttatgcttctgatgactcaaaagagaagtttgtttcagatttcgtctctgcttggactaaggtgatgaacgcagatctgacctaaa

SEQ ID NO: 211059 - DNA, 2140 bp, Unknown
  Bacterial polypeptide expressing nucleotide sequence isolated from the Sargasso Sea
atgagtaacgcaactgaaaacgaaaataaatgccctgtaatgcatggggctatgactagcaatagttcaactggcacagccaataaagattggtggccagatcaattaaatttaggaatacttcatcaacatgacagaaaatcaaatccacttggtgaggattttgattatagagaagaattcaaaaaacttgattatgattctcttaagaaagatttaaatgatttaatgacagattctcaagagtggtggccagctgattatggtcattatggaccattctttattcgtttaacatggcatgctgcaggtacatatagaagcactgatgggcgcggcggcggcggaaccggatctatgcgttttgctccgttgaatagctggccagataatggaaatttagataaggcaagacgtttgctttggccgattaaacaaaaatatggaaataaaattagttgggctgatctattaattttatctggaaatgtggctattgaatctatgggaggaaaaacatttggtttcagtggtggccgagaagatatatggggtcctgaggaagatatattatggggtgctgaaaaagaatggcttactaatagcagatacaaaggtgaaagagaattagataatcctcttgctgctgttcaaatgggattgatttatgtgaatccacaaggccctgacggaaaccctgatccgctagccagcgctaaggatataagagaaacattcggaagaatggccatgaatgatgaggaaacagtagctttaattgccggtgggcatacttttggtaaggctcatggcgcatcccttgaatcaaatgttggcgtagagccagaaggtgctccattagagtcaatgggttttggttggaaaaatgagcatggttctggagtaggtggtgatgcaataacaagcggtctagaaggcgcatggactgcagaccctattaagtgggataatggctattttgatctgctttttggatatgaatgggaactaggtaaaagtcctgcaggcgcacatcaatggttcgcaaaagatcaaaaagaggaagatatggctcctgaagcccatgattcatcaaaaaaagttcccactatgatggcaactactgatatagcattaagggaagatccaatttataaagaaatttctaaaaggttccatgaaaaccctgatgaatttgctgatgcatttgcaagagcatggtttaagcttcttcacagagatatggggcctattacaaattacattgggcctgaagctccaaccgaggaattgatttggcaagatcctgtacctgttggaaataaagattatgatatcaattcagttaaaagtaaaattgatgaggctggattaagcatccaagaacttgttgaaactgcttgggcaagcgcatctactttcagaggttctgatcttaggggcggagcaaatggtgctcgtattagacttgagccacaaaaaaattgggaagtaaataagccagaacaacttgaaaaagtattatctgcttatgaaaatatctcttcagaaacaggggtatcagttgctgacattataattcttggaggaaatttaggaattgaaaaagcttctggtaaaagtgtcgattttactcctggtagaggcgattcatcacaagatcaaacagatatagattctttttcttatctagaaccactttccgacggatttaggaattatcatcgagatggtcttgatgtcagagcagaagagatgatgcttgatagagctcaattactcggattaacagctccagaaatgacagtattacttggtggattaagatcattaggcataacacataatggatatggcaattttacagaagatccaaatgaattaactaatgaccatttagtaaagttgttggatatgtcagtatcttggcaacctaatggaactggcaattcttttgagtcagttgatcgagaatctggagaaaaagtatcttctgcctcaagagttgatctagtttttggatcaaattctcaattaagggcaattactgaactttatgctcaagaggattctaaagaaaaatttgtctctgactttatttcggcttggaataaagttatgaattctgatttgtactaat

SEQ ID NO: 211060 - DNA, 1803 bp, Unknown
  Bacterial polypeptide expressing nucleotide sequence isolated from the Sargasso Sea
tatgagtgcggaatcaaaatgtccatttacaggagttggaactcctccgaagtttccaacaggaagaggaacatcaaatagagattggtggccaaatagtttaaatctaaaaattttaagtcaacattcgtctttagttaatcctatggataaaaaatttaattatcaaaaagaatttaagaaacttaattacaaagcgttaaaaaaagatttacataaactaatgattgattctcaagattggtggccagcagattatggccattatggacctttgtttataagattatcatggcatgcagctggaacttatagaactggagatggtagaggcggcgcaggtacagggaaccaacgttttgctccattaaatagttggccagataatgttaatttagataaagcaagacttttactttggccaatcaaaaaaaaatatggaaacaaaatttcatgggctgatctatttatattagttggaaacgtagcattagaatcaatgggttttaaaacttttggttttggagctggaagagaagacatatgggaacccgaagatgatatatattggggatctgaaaaagaatggttaggtgtaaatcgttacagtggtaaaagagaactagaaaatcctttgggtgcatcacacatggggttaatttatgtcaatccacaaggtcctgatgccaatccagatcctcttttagctgctcatgatattcgagaaacttttggacgtatggcaatgaatgattatgaaacagttgctcttgttgcgggaggacatacatttggtaaatcacatggtgctgctccagagtcacataaagggcctgagccagaaggttcaaaaattcaagatcaagcaacaggatggaatagtaattataaaagtggcttaggagctgatactattagtagtgggattgagggtgcttggacaagcaatccaataaaatgggacatggggtattttgataatttatttggttacgattgggaactaacaaaaagcccagctggcgcacatcaatggaaaccaaaacaaaatggtcacgatgttaatatgacacctgatgctcatataaaatcaaaaaaaaatcttcctatgatgcaaactacagatttatctttaaaaatggatccaagttatggtccaatttcaaaaaaatttcataataatcctaaagaatttgcagatgcattcgcaagagcgtggtttaaacttacgcatcgtgatatgggacctaaagcttgttacttaggtcctgaagttccgaaagaacaattaatttggcaagatcctattccaaaagctaaatataaaattaaaaataatgatattaaaggtcttaaagcaaaaatattaaaatcaggattatctatttctgacctagtatcaacagcttgggcatcggcctctactttccgtggttctgataagagaggtggatctaatggtgcaagaataagattagaaccacaaaaaaattgggaggtcaataatcctattcaattatctaaggtaattaaaactttagaaaaaattaaaaataaattcgatactaaaaagaaaaatgtttcattagcagatctaatagttttaggcggatgcgctgctatagaaaaagctgctaaaaagtctggaaacaatataaatgttccatttactccgggcagaggagatgctttacaagatcaaacagatacatactcattcggcttgcttgaaccaaaagcagatggatttagaaattatattgtaaataaatcaaatggatcttctacaaaacaaacagtatc

SEQ ID NO: 211061 - DNA, 1003 bp, Unknown
  Bacterial polypeptide expressing nucleotide sequence isolated from the Sargasso Sea
atgagtaatgagttaattaaagaacaatcaaaatgtccttttacaggtgtaggaacaccaccaaagcatccaaccggtaaaggacaaacaaataaagattggtggcctaatagtctaaatttgaaaattttaagtcaacattcatcattggtaaatccaatgggagaaaaatttaattacaaaaaagaatttaaaaaacttaactttaaagcattaaaaaaagatcttcataaattaatgactgatacacaagcttggtggccagcagattatggtcattatggtccattttttattcgtcttgcttggcatgctgctggaacctatcggacaggagacggaagaggtggcgctggaactggcaatcaaagatttgctccattaaatagttggccagataatgtaaatttagataaagcaagacttttattatggcctattaaaaagaaatatggaaaaaaaatatcttgggcagatttatttatacttgttggaaatatatctctagaatcaatgggtttcaaaacttttggttttggggcaggaagagaagatatatgggaaccagaagaggatatttattggggatctgaaaaggaatggcttggagtaaataggtatagcggaaaaagagaactagaaaatcctttaggagcatcacacatgggtttgatttatgttaatccccaaggacctgatgctaatccagatccatatttagctgcttatgatattagagaaacttttggacgtatggcaatgaatgattatgagacagtagcgctcgttgcaggtggacatacatttggaaaatctcatggtgctgcagcagaatcacataaaggtcctgaaccagaaggttcaaagatacaagatcaggcaactgggtggaatagtaactacaaaagtggtttaggagtagatactattagcagcggcattgagggtgcatggacttcaaaccctattaaatgggacatgggatattttgataatttattgg

SEQ ID NO: 211062 - DNA, 926 bp, Unknown
  Bacterial polypeptide expressing nucleotide sequence isolated from the Sargasso Sea
aatttggcaggatcctattccaaaagctaaatataaaattaaaaataaagatattaaagctcttaaagcaaaaatactaaaatcaggattatcgatttctgagctggtatcaacagcttgggcatcagcctctactttccgaggctcagataaaagaggtggggccaatggtgcaagaataagattagaaccacaaaaaaattgggaggttaataatcccactcaattatctaaggtcattaaaactttagagaaaattaaaaataaatttgacaataaaaagaaaaatgtttcattagcagatttaatagtcttaggtggatgtgctgctattgaaaaagctgctaaaaaatctggtagcaatataaatgttccatttgttccaggtagaggagatgcatcgcaagcacaaacagatatttattcatttagcttgcttgaaccaaaagcagatggatttaggaactatattgtaaataaatcaaatggatcttctacaaaaccaacagtatcagcagaggaaatgttagttgataaggcacaactaatgaaacttactgcaccagaaatggttgttttattaggtggaatgagagtactaaatacaaattttgataaatcaaataatggaatttttacaaaaaaacctgaaactcttacaaatgacttttttcttaacttactagatatgaatacaacttggaaagaaacagataaaaatgaatctttatttgaaggaaaagatcgtaaaacaaacaaagttaagtggaatggtacaagagttgatctgatatttggttcaaattctcaactaagagctatagctgaagtttatgcaaccgaggactccaagtctaaatttatcaatgattttgttgctgcatggtctaaagttatgaatttggatcgttttgatttaaaataat

SEQ ID NO: 211063 - DNA, 1175 bp, Unknown
  Bacterial polypeptide expressing nucleotide sequence isolated from the Sargasso Sea
aaaaaaaaatggtcatactatagaaatggttccagatgcacatgataaaaataaaaaacatttacccatgatgttgacgactgatctttcaatgagaatggatccaaaatatggaccaatttcaaaacacttttataataatccaaaggaatttgcagatgcttttgcaagagcttggtttaaacttacacatagagatatgggtcctcgtgcttgttacttaggaccagaagttcctaaagaaaaattaatttggcaagatccaatttcaaaacctaaatacaaacttaaaaataaagatattaaaatcttaaagatgaaaattttgaaatcaggtctttcaatttcacagttagtatcaactgcatgggcatcagcttcaacctttaggggttcggataaaagaggcggagctaatggtgccagaataagattagaaccacaaaaaaattgggaagttaataatcctcctcagattttaaaagtaattaaaactttacaaaagataaagaaaaaatttgataataaaattaaatctgtttctctagcagatttaattgttttaggtggaaatactgcaattgaaaaagctgcaaaaaaagctggacataatataaaagtaccgtttagagctggacgtggagatgcttcacaagatcaaacagatataaattcatttggtctgcttgagccaaaagctgatggttttagaaattatatgacaacaaagactaatggatcttcaataaaaccaacagtttcagctgaagaaatgttagtagataaagcacaattacttagactaactgcacctgaaatgactgttttggttggtggaatgcgtgtattgaatactaattttgataaatcaaatcatggagttttaaccaaaaaaacagaaattcttacaaacgatttctttgttaatttgcttgatatgggaacaacttggaaagaagttgatagtagcgaacagctatttaaaggtagagaccgtaaatcaaacaaggttaaatggttagcttctagagttgatctaatttttggttcaaattctcaacttagagcaatttcagaagtttatgcacaggaagactctaaatccaaatttgttaatgattttgcttctgcttggacaaaagtaatgaatttagatcgctttgattttaattgat

SEQ ID NO: 211064 - DNA, 1114 bp, Unknown
  Bacterial polypeptide expressing nucleotide sequence isolated from the Sargasso Sea
gaaggaactactaatagagattggtggcctaatcagctagacataagtattcttcatcaacatgatgaaaaatctaacccaatggaaaaagattttaattatcgtgagcactttaaaaaaattgattacgatgggttaaaaaaagatcttaatgagttaatgactaattcacaagattggtggcctgcagactatggtcactacggacctttttttattaggatgacttggcatgcagcaggaacttaccgaaccgctgatggtcgcggtggtggtggaactggcgcacaaagatttgctcctttaaatagttggccagataatgggaatttagataaagcaagaagactcttatggccaattaagcagaaatatggaaaccaaattagttgggcagacttaattatactagctggtaacatagcaattgaatcaatgggtggaaaaacttttggttttagtggtggtcgacctgatatctgggctcctgagcaagatatatattggggacttgaaacagaatggttaacaaataaaagatattctggtgaccgtgtattagaaaaccctttagcagccgtacaaatgggattaatttatgtaaacccagaaggcccagatggtaaccctgatccacttgcaagcgcaagggatattcgagaaacattcggtcgtatggcaatgaatgatgaagagacagttgctcttacagcaggtggtcatacttttggtaaggcgcacggagcaggagatgctggtcttgttgggccagaacctgaaggagcaccattagaagaaatgggatttggttggattagcaaacatgcttcaggcaaaggcagtgattctattacaagtggaattgaaggtgcttggacaactaatccaactaaatgggataatggttattttgacttactgcttggctatgattggaaattaaccaaaagtccagcaggtgctaatatttggcacgcagtagatcaaaaggaagagcatatggctcctgatgcagaggatgcatcaaaaaaagtgccaactatgatgacaacagctgatatggcaatgcgtgaagatccagagtatagaaaaatctctgagcattttcataaaa

SEQ ID NO: 211065 - DNA, 1617 bp, Unknown
  Bacterial polypeptide expressing nucleotide sequence isolated from the Sargasso Sea
tatgaccagcaacaactcaacgggtcaatccaataaagattggtggcctgatcaattaaatttaaatattcttcatcaacacgatagaaaatcaaatcctcttggagaagattttgattacaaagaggaattcaaaaagcttgattacttcgcgctcaaacaggatctgaatgatcttatgacggactctcaagattggtggcctgctgactacggtcactatggtccttttttcgtcagattaacttggcacgcagcgggaacctacagaagcacagatggtcgcggtggcggaggtaccggagcaatgcgtttcgcacctttaaatagctggcctgataatggaaatttggacaaagctcgaaggttgttatggcctataaagcaaaaattcggtaataaaatcagttgggcagaccttttaattttagccggaaacgtagctatagagtccatgggtggaaagacctacggattcagcggaggtagagacgatatttggggtcctgaggaagatatcctatggggagttgaagaagaatggctcgaaaatcaaagatataaaggagaaagggaattagataatcctcttgctgctgttcaaatgggtttaatttatgtgaatccacaaggaccagatgcaaatccagatcctttggctagtgctcacgatattagagaaacatttggccgaatggctatgaatgattacgagacagttgctcttgtcgctggaggccatacttttggtaaatgtcatggtgctggtgatgctgaattagtcgaagctgagccagaaggagcaccaatcgaacagatgggtctcggttggaccaataaacatggatcaggtcttggagctgactctattaccagtggtcttgagggagcgtggacaacaaatccaattaagtgggataacggctacttcgatttactttttaaatacgaatggaagctcggcaaaagtcctgctggtgcgcatcaatggtacgcagtagaccaagcagaagaagacatggcgccaagtgctcatgacccttcaataaaagaacccacaattatggcaacaactgatattgctttaagagaagatcctgagtacaacaagatctcaaagcattttcatgaaaatcctgatgagtttgcagatgctttcgcaaaagcatggttcaagttgctccacagagatatgggtccgaaggcaaattacataggccctgaagtgcctgaggaagacctcatatggcaagatccagttcctgctggaaattctgattacgatgtatctgctgtgaaaagtaagatagacgatcttggtttaagtattcaggaaatggctgaaactgcttgggcaagtgcctttacctacagaggatcagatcttagaggtggagctaatggtgcgagattgagattagctcctcaaaaagattgggaagttaataaaccagatcaactttcaaaagttctttcagcttacgaaggagtctccaaagatactggagtatccatggcagatatcattgtccttggtggaaacttagcaattgaaaaagcttctggttcagaagtccctttttcacccggaagaggtgatgcttctcaagatcaaac

SEQ ID NO: 211066 - DNA, 1189 bp, Unknown
  Bacterial polypeptide expressing nucleotide sequence isolated from the Sargasso Sea
caaggtaactgggatctcgtcggtaacaatttccccgtcttctttattcgcgatgcaattaagttcccagacatggtgcatgcatttaaaccatcgccggtaacgaacaagcaagagcctaaacgtatttttgatttcttctcgcacgtaccagagtcaacgcacacgttaactatgcttttctctgactacggcacaccggcaagctatctaaatatggatggttcaggtgtacatgctttcaagtttgttgatgacgaaggtaattacaagtatgtgaagttcacgtggaagtcgaaccagccaataaagaactttaccaatgaagaagccatgaaagtgcagggaatggatatgcagccgcatactaccgacatctacacgcgaattggtgaaaaaggtgaaacagcgtcttgggatctttatttacaagagctagagccagagcaattggatgactttgagtttaacccacttgataccactaagatttggcctgaatcgctagtgccggctaaaaagattggtcgcctagtgcttaatcgtgtaccagataacttctttgaagaaactgaacaagcggcatttgcaccgagcaatctaattcctggtattgagccgtcagaagacagaatgcttcaaggtcgtttgttctcgtatgctgatacacagcgctatcgcctaggtgtaaacgcgtaccgcattccggttaattcacctaaaaatgcggttattaataaccacgaacagcatggtcagcttcgaacgactagcactgcgcgcgacgtgaattatcagccaagtcgacgtcttgatcttaacgaagatccagcgttccgttactcaagcaaaccgcttgcaggtatgacgcaacaaattccgttctacaaagagcagaactttaaacaagcaggggagtttttcagaaagctaaccaaagaaggccagcaaaacctgattaataacttaggtggagcactggcatcggtgcctgaagaagaaatccgcgtcattattagtgcttatatgtacaacgcagataaagactacggcaaaggcgtagctaaactagcaaaagcaccaatagctaaagttcgtcaaacggcgaaagacttgatggaacagcaggctgcacgtgcagctaaagcgaaacaagttgcagaaagcctgacggcgctaatgcaataaa

SEQ ID NO: 211067 - DNA, 2134 bp, Unknown
  Bacterial polypeptide expressing nucleotide sequence isolated from the Sargasso Sea
tatgagtgatgacaacaagtgtccagtatcatctggtcctaataaaaaaacttcggttggcgctgcttctaatcaagattggtggccaaatcaattaaatctcagcatgctacatcagcatgatacaaaatctgatccaatgaatgaggattttgattatagagaggaatttaaaaagctagattatgaagctcttaaaaaggacttaaatatattaatgactgattctcaggcttggtggcctgctgattatggtcattatggtcccttttttattaggatgacatggcatgctgcaggaacttatagaaccggagatggtcgaggtggtggtggcactggcgctcagcgttttgctcctttaaatagctggcctgataatgggaatcttgataaagctagaagattactttggcctgttaaacaaaaatatggcaataaaataagttgggctgatctattgatccttgcaggtaatgttgccattgaatcaatgggtggaaaaacctttggtttcggcggtggaagaccagatatatgggcaccagaagaagatatatattggggtatagagaaagagtggttaggtaatgaacgttatacaggtgaaagagatttagagaatccactagcagcagttcaaatgggtttaatctatgtaaatcctgaaggtcctgatggtaaccctgatccattagctagtgctaaagatattcgagaaacttttggaaggatggcaatggacgatgctgaaactgtagcactcactgctggcggccatacatttggtaaggctcatggagctggagatgcaaatttagttggtgtagagccagagggcgctgagattgaggaaatgggtttcggttggaagagcactcatggctctggaaaaggtagcgatacaataacaagtggcatcgaaggggcatggacaacaaatcctactaaatgggataacggttattttgatttacttcttaataatgagtgggaattagttaaaagtcctgcaggagcaaatcagtggcatattgtaaatccaaaagatgaagatcttgctccagacgctggagatgataaaaaacgcgtacctactatgatgacaacagcagatatggccatgagagaagatcctaattatagaaaagtatcagaaagatttcataaaaatccagatgaatttgctgatgcttttgcacgtgcatggtttaaattacttcatcgtgatatgggtccaaaagttagatacctaggtcctgaagttcctgaagaagatcttatttggcaagatccaattccaacaggtaatagtgactttgatgttgaattagtcaaagaaaaaattcttgcaagtgatttgagtatccaagaaatgattgaaactgcttgggctagtgcgtcaacttttagaggttcagatatgagaggtggagcaaatggagcaagattaaggcttgcaccacaaaaagactgggaagcaaataaaccagaacaattagcaaatgttttaggtgtgttagaaaatatagcaagcgaagcaggagcatctgttgctgatgtcatagtgttggcaggtaatgttgctatagaaaaggcatctggagtagaagtaccatttatgggtggtagaggagatgcaataaatgaacatacagacgctgaatcatttgaagtcctcgaacctcatgcagatggatttagaaattatcaaaaaacagaattttctgtaactcccgaagagatgcttatcgataaagcccaattgcttggtttgactgctcctgaaatgacggtgttagttggtggcttaagatcacttggtgtcagtgcaaatggtcatggtatttttacagatgatataaatactttatctaatgatttctttacaacactcttagacatgaatgttgaatggaaaccttctggtaaaaactcttatgaagcaaaagatagagtaagtggtgaaaaagtaagaacagcatcaagagtagatcttgtatttggatcgaactcacaattaagagcaattgcagaagtatatgctgaagataattctaaagataaatttgtaaacgactttattagtgcttggaataaagtaatgaatgcggatagatttgatctagattaa

SEQ ID NO: 211068 - DNA, 580 bp, Unknown
  Bacterial polypeptide expressing nucleotide sequence isolated from the Sargasso Sea
atgaaagatttgacaggtaaatgtcccgtaatgcatggcgcagcaacaactggaattacgggaactactaatagcgattggtggccaaatcaattaaatttaaatattttgcgtcagcatgatcgaaaatcaaatccacttggtgatgatttcgattatcgtgacgaatttttaaaactagattataagtctctcaaaaatgatttgaacgcgttgatgactgatagtcaaagttggtggcctgcagactatggtcattatggcccatttttcatccgcatgacttggcatgcagctggcacttacagaacgggtgatggacgcggaggtggcgggacaggcgctcagcgttttgctcctctaaattcgtggccagataatggtaacctggataaagcaagacgcttgttgtggccaattaaacaaaaatatggaaatcaaatttcttgggctgacttgctaattttggcgggtaatgtcgcaattgagtccatgggcggaaaaacttttggttttgcaggtggtcgaccagatatatggcatccagaagaagatatttattggggtgctgaaaatgagt

SEQ ID NO: 211069 - DNA, 1032 bp, Unknown
  Bacterial polypeptide expressing nucleotide sequence isolated from the Sargasso Sea
aatggatgtcgagagtaaatgcccagtaatgcacggtgcgaatacaaaaaataccggagaaggaactactaatagagattggtggcctaatcaactagacataagtattcttcatcaacatgatgaaaaatctaacccaatggaaaaagattttaattatcgtgagcactttaaaaaaattgattatgatgggttaaaaaaagatcttaatgagttaatgactaactcacaagattggtggcctgcagactatggtcattatggaccttttttcattaggatgacttggcatgcagcaggaacttaccgaaccgctgatggtcgaggtggtggtggaactggtgcgcagagatttgctcctttaaatagttggccagataatgggaatttagataaagcaagaagactcttatggccaattaagcagaaatatggaaaccaaattagttgggcagacttaataatactagctggtaacatagcaattgaatcaatgggtggaaaaacttttggctttagtggtggtcgacccgatatttgggctcctgagcaagatatatattggggacttgaaacagaatggttaacaaataaaagatattctggtgaccgtgtattagaaaaccctttagcagccgtacaaatgggattaatttatgtaaacccagaaggtcctgatggaaaccctgatccacttgcaagcgcaagggatattcgagaaacatttggtcgtatggcaatgaatgatgaagagacagttgctcttacagcaggtggtcatacttttggtaaggcgcacggcgcaggagatgctggtcttgttgggccagaacctgagggagcaccattagaagaaatgggatttggttggattagcaaacatgcttcaggcaaaggcagtgattctattacaagtggaattgaaggtgcttggacaactaatccaactaaatgggataatggttattttgacttactacttggctatgattggaaattaaccaaaagtccagcaggtgctaatatttggca

SEQ ID NO: 211070 - DNA, 1453 bp, Unknown
  Bacterial polypeptide expressing nucleotide sequence isolated from the Sargasso Sea
ctgctggacttatagaacgggtgatggaagaggtggagctggaacaggaaatcaaaggtttgcgccacttaatagttggccagacaatgttaatttagataaagctagacttctactttggccaataaaaaagaaatatggaaaaaaaatttcttgggctgatttattcgttttgattggaaatgttgcgcttgaatcaatgggatttaaaacctttggatttggtgcaggaagagaagatatatgggaaccagaagaagacatatattgggggtcagaaaaagagtggcttggagtaaaccgttacagtggtaaaagagaattagagaatccattaggagcttctcatatgggtttaatttatgttaacccacaaggtcctgatgcaaatccaaaccctttactagccgcacatgatattcgtgaaacatttggtagaatggcaatgaacgactatgagaccgtagcattagttgcaggaggacatacttttgggaaatctcatggagcagctccagagtcacataaaggtcccgaaccggagggatcaaaaattcaagagcaagctactggttggaatagtaattacaaaagtggtttaggtgcagatacaataagcagcggtattgaaggagcatggactagtaatcctattaaatgggatatgggttattttgataatctttttggatatgagtgggagctttcgaaaagcccagctggtgctcaccaatggaagccaattaaaaatggcaaagctataaatatgacacctgatgctcacatcaagtcaaaacaaaatttaccaatgatgcaaacaaccgatttatccttaaaattagatccatcttatggaccaatttctagacatttccataataatccaaaagagtttgctgatgcttttgctagagcgtggtttaagcttacacatcgtgatatgggtcctcgtgcatgctatttaggacctgaagttcctaaggaaaaattaatttggcaagatcctatatcaaaacctaattataaaattaaaaataaagatataaaatttttaaagaaaaaaattttaaaatcaagactttctgtttctcagcttatctcaacagcttgggcttcagcttctacttttcgtggatcagataaaagaggtggagctaatggtgcaagaataagactagagccgcaaaaaagttggtcagtaaataatccatctcaactatccaaagttattaaaattttggaaaaaattaaaaagagttttgataataaaaacaaaaatgtttcaatggctgacttaattgttttaggaggatctgttggaattgaaaaagcagttaagaatgcaggctataaaataaacgttccatttacacctggtcgaggtgatgctacgcaagatcaaactgatacccattcttttgatttacttgaaccaaaagctgatggatttaga

SEQ ID NO: 211071 - DNA, 1486 bp, Unknown
  Bacterial polypeptide expressing nucleotide sequence isolated from the Sargasso Sea
atgctggctcaacccgcgtacgctgtggatatgacccaggatagcgggtcaccggtcggcgacaaccagaactcccagactgctggccccgaaggtccggttcttttgcaggactcccatcttattgagaagttgcagcgcttcgaccgcgagcgcatacccgagcgcgtcgtgcatgcgcggggcacgggcatctttggcgaattcgtgcccaccacgaacatcagcgccctgaccactgcccaggtgttcaagcctggatcgaagaccccggtgttcgttcgattctcgacagtgatgggctatcgcggctcgcccgagcaggcacgagacccgcgtggtttcgctatcaagttctacacgcagcaagggaactgggacatggtcggcatcaactggccgatcttcttcattcgcgacgccatcaagtttcctgactttgtgcatgcgaacaaaccatcggcagtgaccggcgtccaggatccgaatctggcgttcgactttttcgcccatacgcccgaagcaaccaacatgctcacgcacctctacacagacgagggcatgccggattcgtatcgccacatggacggctacggcgtgcacgccttcaagttcgtcaacgcgaaaggtgaagttcactacgtcaagtttcactggaagagccgccagggtatccagggcattcgcccccaggatatcccgcattcgatcggcgcggactggaatctgatgaccaatgacctctacaactcggtcaaggcacattcatacccgcagtgggacctttacatccaggtcctctcgccgaaggatctggacaagttcgatttcgatccgctggatgacacgaaggtatggcccacttccatccccgaacagaaggtgggcacaatgacgctcaaccgcgttccggataactatttcgagtccacggaagaatcggcattcgcgccgtcgcggctcgtgcccgggatcgagccttcagaggaccggatgctgcagggccgcctgttcgcctatgccgacacgcagatgtatcgcctcggcccgaactacaaccagttgccgatcaaccgccccatcgtcccggtctacaacaacaaccaggacggtctcatgaacgagggagatcgaaaaggcgaggtgaactacgagccatccggaatcgccgaaatcgcacagcaggataagtacaagtccgtgcagacgccgctgcagggaacgacccagcaaaaagcgattcacaaaacgctcgacttccgtcaggccggcgagtactaccgcacgctgtccgaggctgataaggcggacctgatcacgtcgctctcgggcgaccttggccgcgtgaccaacgacgcgaacaagtacgcgatgctctcgtacttctataaggccgacaccgactatggcacccgcctcgcgcgggcgacacacgcggatgtcgcgcgcgtgcaggatgcggcggcacacctcagcgacaactaac

SEQ ID NO: 211072 - DNA, 2188 bp, Unknown
  Bacterial polypeptide expressing nucleotide sequence isolated from the Sargasso Sea
atggacaagactcaacactctcaaggtaaatgccccgtgatgcatggggcaaattcagccgttgccagcaacaatatggattggtggcctaaggcacttaatctcgatattttgcatcagcatgataagaagacggatcccatggatcccaactttaattaccgtgaagcctttaagacccttgacctcgctgccgtgaagcaggacttgcattcccttatgaccgatagccaagattggtggccagccgattgggggcattatggcggcttgatgatccgcatggcatggcactctgcgggaacctatcgcattgccgatggccgtggcggtgcggggacgggtaatcaacgctttgccccactcaatagctggcccgataacgccaaccttgataaagcccgccgtttactctggccgattaagaaaaaatatggcaacaaactctcatgggcagatttgatgatcctcgcgggtaatgtggcctacgagtctatgggcttaaaaacctatggatttgccggcggtcgagaggatatttggcacccagagaaggacatttattggggctctgaaaaacaatggctcgcgccaagtgataatcctaacagccgttattcgggcgcgcgtgaccttgaaaatcccttagccgccgtaatgatggggctgatttatgtgaatcctgaaggggttgatggtaaacccgatccactgcgcaccgctcaagatgtgcgtgtcacttttgcacggatggcgatgaatgatgaagaaaccgtggccttaaccgccggtggccatacggtgggcaaatgccatggcaatggtaaggcacaggatcttggccctgaacccgagggcgaagaacttgaggcccaaggtttgggctggctcaacaaaaaaggcccaggcacgggtgcaaatgccgtgactagtggtctcgaaggcgcttggacgactcatcccactcaatgggataacggttattttcacctactgttaaattacgattgggaattgaaaaaaagccccgcgggcgcctctcagtgggaacctattaatattaaagaggaagataaagtcgtctcagtgggcgacccgaatcgcaagtttaaccccatcatgaccgatgcggatatggcgatgaaaatggaccccgagtatcgcaagatctccgagaagttttatcaagatcccgcctatttctccgaggtatttgcccgtgcttggtttaagttaactcaccgcgatctggggcctaagagccgttatttagggccagaagtgccgaatgaggatttgctttggcaagacccgatcccaagcgtcgattaccgtttagacgccagtgagattgtcgacctgaaggcgaaattattagcctcgggactcagtgtttccgaattggtcgcaaccgcgtgggacagcgcgcgcaccttccgaggctcggatttccgcggtggcgccaatggcgcacggatccgtttagcaccacaaaaagattggcaggccaacgaacccgagcgtttgcaaaaagtattgcaggtgttgagcgcgttgcaggcaagcttaagcaaaaaggtcagtattgccgacttgattgtcctcggtggcgctgcggcgattgaaaaggccgcccacgctgcgggagtcaatatcacagttcctttcatgcctggccgtggtgatgccacgcaggaaatgaccgatgtggaatcctttgccgtacttgagcctttgcacgatgcgtatcgtaactggcagaaaaaggattatgtagttcagcccgaggagatgatgctcgatcgcactcaacttatggggttaaccgcccatgagatgacagtgttggttgggggtatgcgggtgttgggcactaactatggcggtacacgccacggcgtgtttaccgacaaagtgggtgtgttaactaatgatttctttgtgaatcttaccgacatggccaacaactggaagcctgcgggtactaatttgtatgagatagtcgagcgtaaaactggcgcagtgaagtggaccgctacccgcgtcgatctggtgtttggctctaactcgattttgcgctcctatgctgaggtgtatgcgcaggatgatgccaaggagaagtttgtgcatgactttgtggcggcttggactaaggtaatgaatgccgacaggttcgatctggcttagt

SEQ ID NO: 211073 - DNA, 844 bp, Unknown
  Bacterial polypeptide expressing nucleotide sequence isolated from the Sargasso Sea
aatgaccggcaaatgcccggtaatgcacggtgctttgactaagtcagccgctggtggtacttcaaaccgcgattggtggcctaaccaactgaatttaaacattttacatcaacattcttctttatctgatcctatggatcaaccctttaattacgctgaagctttccagaaactggatctggccgcggtgaagcaggacttatatgcgctaattactgactcacaggactggtggccagcggattatggccactatggcccattatttattcgtatggcatggcacagtgctggtacttaccgcacctctgacggccgtggtggtgcatcctctggctcacaacgttttgctccactgaacagctggcccgataacggcaatctggataaagcccgccgtctattgtggccagtgaaacagaaatatggcaaccagttgtcctgggccgatttaatgatactggccggtaactgtgcgcttgaatctatgggctttaaaacctttggttttgcgggtggccgtgaagatatatgggctccggaagaagatatttactggggtgtggaaacagagtggctgggcgataaacgctacgctggcgaccgtcaattagaaaacccattagctgcagtgcaaatgggcctgatttatgtcaaccctgaaggcccgaatggtaacccagacccagtcgcttcagcccgtgatattcgtgaaaccttcgcccgtatggcaatggatgatgaagaaacagtcgctttagttgcgggtggtcatacttttggtaaatgccatggcgcgggagatccaactttagttggcgctgaaccagaagccgctccactg

SEQ ID NO: 211074 - DNA, 1060 bp, Unknown
  Bacterial polypeptide expressing nucleotide sequence isolated from the Sargasso Sea
cttgctgctgtccaaatgggattgatttatgttaatcctcagggtccagatggaaatcctgatccgcttgcaagtgcgagagatattagggagacatttggcagaatggctatgaacgatgaagaaacagttgcacttgttgctggtggacatacttttggtaaggctcatggagcaagtactgaagatcatgttcaatcagagccagaaggagctcctcttgaagagatgggatttggatggacaagtagttatggttcaggggtcggaagtgacactattactagtggtatcgaaggcgcatggactgcaaatccaacacaatgggataatggatactttgacttgctctttggatatgaatgggagttaaccaagagtcctgcaggtgcacacatttggcatgctgtcgggcaaaaagaggaagatatggctccggatgcggaagatgcttcagcaaaagttccaaccatgatgacaactgctgatatggcaatgagagaagatccaagctacaaagaaatatcaaaacgttttcatgagaacccagacgagtttgcagatgcttttgcaagggcttggttcaagttattgcatagagatatgggacccaaaacaagatatatggggccagaagttcctgaagaggaattgatttggcaagatcctgtgcctgctggagattcaacttatgatgtaagtgccgtaaaagagaaaattctcaattgtggtctatcaatccaagaaatgattgaaacagcttggtcaagtgcatctacttatagaggttctgatatgcgaggtggagcaaatggcgcaagaattagattagagcctcaaaagaattgggaagcgaataatcctgatcaattaagtaaagtgttagagatttatgaagcaatagcagaagaaactggcgcctcagttgctgatgttattgttttagcaggtaatgttgctattgagaaagcttctggtattgaagttccttttactccagggcgaggcgatgctacacaagaaaatactgatatagaatcttttgaagttcttgaaccac

SEQ ID NO: 211075 - DNA, 2143 bp, Unknown
  Bacterial polypeptide expressing nucleotide sequence isolated from the Sargasso Sea
tatgactgataaagttgaaggaaagtgtcctgttatgcatggggcaatgacaactcatagttcaagcggtacatcaaataaagattggtggcctaatcaattaaatttaaatattctgcatcaacatgatgtgaagtctaatccaatggatgatgactacgattatagaaaagaatttgaaaaaattgattatgatgcattaaagaaagatctaactgatttaatgactgattctcaagattggtggcctgctgattatggacattatggaccttttttcataaggatgacttggcacgcggcggggacatacagaaatactgatggaagaggcggtggcggaactggagcacagcgttttgccccccttaatagctggcctgataacggaaatctagataaagcaagaagacttttgtggccaataaaacaaaaatatggaaaaaaaatcagttgggcagatctactaatcctcgctggaaatgttgccattgaatcaatgggaggaactacatttggttatagtggtggaagaccagatatatggggcccagaagaagatattcattggggaatagaatcagagtggttagaaaataaaagatataagggagaaagggagttagataatccattagcagctgttcaaatggggctgatatatgttaatcctcaaggtccagatggaaatcctgatcctttagcaagtgcacatgacatcagagagacctttggaagaatggcaatgaatgatgaagaaactgtagcattagttgcaggaggtcatacttttggcaaggctcatggtgctggcgcagaagatcacgttcaatctgagccagaaggtgctccattagaagaaatgggttttggatggtcaagtacttatgcatctggtgtaggtagcgatacaattacaagtggtattgaaggtgcttggacagcaaatccaactcaatgggataacggatatttcgatttgttatttggttatgattgggaactaactaaaagcccagcaggcgctcatatttggcatgctgttggtcaaaccgaggaggatatggcacctgatgctgaagactcctcaaagaaagtaccaacaatgatgaccactgctgatatggctttaagagaagatccgatttacaacaaaatttcaaaaagattccatgaaaatcctgatgaatttgcggacgcttttgctagagcttggtttaaacttttacatagagatatgggacctaaaactaggtatatgggtccagaagttcctcaagaagaactaatttggcaggatccgataccagtaggtagttcagaatatgacatagaggcagtaaaacaattaattgttgactcaggattgtctatacaagaaatggtcgaaactgcttgggctagcgcatcaacttttagaggttcagatatgcgaggaggtgcaaatggcgcaagaattagattagctcctcaaaaggattgggaagtaaataatcctagtcaattaaataaagttcttgaggtttaccaagaaatctcaaataaatctggcgcttcaattgcagacattatagttttggctggaaatgttggaattgaaatagcttcaggagttaatgttcctttcactccaggaagaggcgacgcttctcaagatcaaacagatgtagagtcatttgaggtcttagagtcaaaatcagacgcctttagaaattttcatgctaagggtattaatacacctccagaagaaattatgcttgataaagcacaattattaggtcttacagcaccagaaatgacagtcttagtaggtggaatgaggtctcttggaattagttctaatggttatggattatttacagaggactctaacaaactcagtaatgattactttaaaactttactcgatatgtccgttcagtggaaaccaaatggtactggaaactcatacgaagcatttgataggagttctggcgaaaaagtgagaacagcttcaagatcagatttagtttttggttcaaattctcaattaagagctattgtagaggtttatgctgaggatgactcaagtgaaaagtttgttaaagactttgttcatgcgtggaataaggttatgaacgctgataggtttgatgttcagtaa

SEQ ID NO: 211076 - DNA, 1462 bp, Unknown
  Bacterial polypeptide expressing nucleotide sequence isolated from the Sargasso Sea
atgagtcaacagtatttaacaagccaaagcggttctccaattgctgacgatcaaaactcattgtcagcgggcgagcgtggtcctttactactgcaagattggcatttaattgaaaagcttgcccactttaaccgtgagcgtattcctgagcgtgttgtgcatgccaaaggcactggcgtatacggtactttcaccctgaccaaagacttaagtgaatacaccattgccgatcactttaacggtgttggtaagcaaactgaaaccttcgtgcgcttctctaccgtgggcggtgaaatgggttctgccgatgccgagcgcgacccccgtggttttggtctgcgcttttataccgctcgtggtaatcacgacatagtgggtaataacacgccgaccttcttcctgcgtgatgggattaagtttccagactttatccatacccaaaagcgtaacccattgacgaatttgaaagatccacaagctatgtgggacttctggtcattaaaccctgaagccatgcaccaagtgacgattctgatgtctgaccgtggtattccggcaaactaccgccaaatgcatggttatggttcgcatactttctcgttctggaatgctaaaggtgagcgtttctgggtgaagttccacttcaaatcgcagcaaggcgtggtgaacttaaccaacgagcaagccgataagttaaagggtatcgaccctgactcatcccagcgcgatatggtggtggctgtgactgacggtaacttcccacgttggacggtgaacgtacagattatgcctgagagcgacgccaacacttaccatatcaacccattcgatttaactaaggtgtggccacatggcgattacccgttaattgaaattggtgtgttagagctgaatcgtttaccgcaaaactactttgccgaagtcgagcaagtggcattagcaccgagcaacttagtaccaggtgtaggcgcatcgcccgataagatgttacaggcacgtttattcgcctatgccgatgcgcagcgttaccgtattggggcgaactacaaccagttaccagtaaactgcccacatgcgactaaagcgaatcatcaccaacgtgctggcgctatggcgggaacgcaatgcccgtaccacggtagccaaactggtggtgatgccgcggctaactatggtccaaacagcactgcgggggctttagttgaaccggctaactttgccgagccaccattgcgtttagatggtgaagcggcgcgttacagccgttacaatcaggatgattacacgcaagcgggtaacctgtatcgtatcttcagcgaagcagagaaagcgcgcttagtggaaacgatttctggctcactgcgtcaggcgagtttggatgtacagcaacgtatgctggcacacttccacaaggccgatgcggattacggtcaacggatccaaactgcactcgggttataag

SEQ ID NO: 211077 - DNA, 1306 bp, Unknown
  Bacterial polypeptide expressing nucleotide sequence isolated from the Sargasso Sea
aacttatagaactggtgatggtagaggaggcgcaggtacaggtaatcagcgttttgcaccaataggaagttggccagacaatgtcaatttagacaaagcaagattattgctttggccagttaaaaagaaatatggaaaaagaatctcatgggcagacttatttattcttgtaggtaacgttgctcttgaatctatggggtttaaaacttttggttttggtgctggaagagaggatatttgggaaccagaggaagatatttattggggttcggaaaaggaatggcttggcaataatagatataattcaaaaagagaattagaaaatccacttggtgcagttcaaatgggtctgatttatgtcaatccgcaagggccagatggaaatccagatcctttattagctgcaagagatataagagaaacttttggtagaatggcaatgaatgattatgaaatagtagctttggttgctgggggacatacttttggcaaatctcatggagcagcacctgagtcacataaaggtcctgaaccagaagggtcaaaaattcaggagcaagcaacaggatggaatagtaattataaaagtggtctaggagctgataccattagtagtggaatcgagggagcttggacgtcaaatccaatcaagtgggatctgggttattttgataatttgtttggatatgaatgggagttatcaaaaagcccggccggggcacatcaatggaaaccaaaacaaaatggccaagcaataaatatgacaccagacgctcacattaaagggaagaaaaatcttcctatgatgcaaacaacagatttatcaatgagattcgatccagaatttggaagaatttctaaacattttcatgaaaatccagatgaattcgcagacgcttttgcaagggcttggtttaagcttacgcatagagatatggggccaaaagtaaattatttggggggagaagtaccaaaggaagacttaatttggcaagatcctgttccaaaaaataaaattaaattaaaaaataaagatatagaatctttaaagtcaaaaatatctaaatctggcttgtcaacttctcaattagtttctacggcttgggcttcggcatctacatttagaggctcagataaaagaggtggagcaaatggttcacgtattagacttgctcctcaaaaaaattggaaagtaaataatccatctcaattatctaaatcaataaaagtttatgaaaaaattcaaaaaggatttaattctaaaaagaaatatgtttctttagcggatcttatagttttaggaggt

SEQ ID NO: 211078 - DNA, 2083 bp, Unknown
  Bacterial polypeptide expressing nucleotide sequence isolated from the Sargasso Sea
tatgagtgataatgacaacaaatgtccagttatacatggttctttaactagtaacagtagttctggaacttctaatagagattggtggccagatcaattggaccttaatattttgcatcagcatgataaaaagtctgacccaatggatcaagactttgactattcagaagaatttaaaaaacttgactatgattcactaaaaaaagatctaaatgatctcatgaccgattcacaagattggtggcctgctgattatggacattatggacccttctttataaggatgacttggcatgcagcaggtacctatagaattggagatggtagaggtggtggaggaacaggcgcacaacgctttgcacccctaaatagttggcctgataatggaaatttggataaagcaagaagacttctttggccaataaaacaaaagtatggaaaacaaataagttgggctgatctgctgattctagctggtaatgtcgcaattgaatcaatgggtggaaaaacttttggatttgggggaggacgtcccgatatttgggctccagaagaagatatccattggggtgctgaaacagaatggctcacaaatgagcgctatagtggagaaagagatttagccaaccccttaggtgctgttcagatgggtttaatttacgtaaacccgcaaggaccagatggtaatccggacccaaaagcgagtgctgttgatatcagagaaacttttggaagaatggctatgaatgacgaagaaacggttgccttagttgctggaggtcatacttttggtaaaggacatggtgcagggccagatgataatgtaggacctgaacctgaaggagcctcaatggaggaaatgggttttggttggaccagttcttatggatcaggtaaaggaagcgataccattacaagtggccatgaaggagcttggactgccaatcctacgcaatgggataatggctattttgacctcttattcaaatatgaatgggaacaagttacaactccagcaggtgctattgtttggcatgcgatagatcctgcagaagaagatcttgctccagatgctgaagatcctagtaaaaaagttcctactatgatgacgactgccgacatggctctacgagaggatccagattacaacaaaatatccaaaaggtttcatgaaaatccagatgagtttgccgatgcttttgctcgagcttggtttaaacttcttcatagagatatgggacctaaatcaagatatttaggacctgaggtacctcaagaagaattaatctggcaagatccagttccggcaggtaactctgactatgatattagtgctgttaaagcaaaaatctctgaatcggatttaactatccaagaaatggtggaaacagcttgggcaagtgcttctactttcagaggctctgatataagaggcggcgcaaatggtgctcgcatcagactctctcctcaaaaagattgggaggtaaataaaccagaacagctatctaaggtgcttggagtgcttgagaatatagcgtctgaaactggagcttcgatagccgatactataatactggcaggtaatgttggccttgagaaagctacaggagcagaagttccatttactcctggaagaggagatgcttcacaagatcaaacagatgttgagtcttttgctgtattagagcctatttcagatgcgtttaggaattttcataaatctgactgcccagtgaattctgaacaaatgatgctagataaagcacaattattgggcttaacagctccagaattaactgtgctggttggcggaatgagatcattaggcattagttcaagcggagatggtgtatttacatcaaactcggatgaattaggtaatgatttctttatgaacctacttgatatgaacactgaatggaaaccttctggagataattcctacgaaggatccaatcgttcaacaggagacaaagtaaatactgcatctagggctgatcttgtttttggatcaaattctcaactaagagcaattgctgaggtctatgcaagcgatgactctaaagaaaaaatttgtatctga

SEQ ID NO: 211079 - DNA, 1163 bp, Unknown
  Bacterial polypeptide expressing nucleotide sequence isolated from the Sargasso Sea
tatggatgacataggcaaatgcccagtaatgcacggttcagccactacaaacagtggtgtaagtacatcaaatcgtgattggtggcccaatcaattaaatctaagtatacttcaccaaaatgataaaagatcaaatcctatgagtttggattttgattatagagaagagtttaaaaaacttgactatcaagcgttgaaaaaagatttaaacgatttaatgactgactcacaagaatggtggccagcagactacggtcattatggtcctttttttattcgtatgacttggcatgctgctggaacataccgaacaagtgatggtcgtggcggtggtggtaccggagatcagcgttttgcgccactaaacagctggccagataatggtaacttagataaagcaagacgattattatggccaattaaacagaaatatggaaataaaattagctgggctgacttgtttattttgactggaaatgtcgcaattgagtctatgggcggaaagacatttggttttagtggtggacgtgccgatatttggtctccacctgaagatatatattggggccaagaaaatgagtggttagaaaataaacgatattcaggtgatcgagaattagaaatgcctcttggtgctgttcaaatgggattaatttatgtgaaccctcaaggtcctgacggtaatcctgacccattaaaaagtgctagagatattcgcgaaacttttgcaagaatggctatgaatgatgaagagacagttgctcttacagcaggtggtcatacttttggtaaagctcatggagcatctgatcctgacaaatatgttggtgcagaaccagagggagctccaatagagcaaatgggatttggatggcaaaactcatttggttcaggtgttggaagagatactattacaagtggtattgaaggtgcgtggactgctaatccaacacagtgggacaatggatattttgatcttcttttgggttacgaatgggaattagttaagagccctgcaggcgcttatcaatggcatcctattaaccctaaacaagaagacttagcgccagatgctcaagatggttctataaaagtaactactatgatgacgactgctgatatggcgatgagagaagatccttcttacaaagttatttctaaaa

SEQ ID NO: 211080 - DNA, 1337 bp, Unknown
  Bacterial polypeptide expressing nucleotide sequence isolated from the Sargasso Sea
gatgactgataaatcagaaggtaaatgtcctgtaatgcatggggcgatgacaacaaatagttcaagtggaacttcgacaagagactggtggccaaatcagcttaacctcaatattttgcatcagcacgataaaaaatcgaatcctatggatgaagattttgattatagagaagagtttaaaaaaatagattatgaagctctcaagaaggatttaaatgagttaatgacagattcacaagattggtggcctgcagactatggtcactatggaccatttttcattagaatgacctggcatgctgctggtacctatagaaacacagatggacgaggtggtggtggtactggcgctcaacgttttgctccactaaatagttggcctgataatggtaatttagataaagctagaaggttgttgtggccaattaaacaaaaatatgggaaacaaatcagctgggcagacttattaatactagctggaaacgtagcgattgaatccatgggtggaactacttttggatttagtggtggaagagcagatatttggggtccagaagaggatattcattggggcgttgaatcagaatggcttgaaaataaaagatacaagggtgaaagagaattagataacccccttgcggctgttcaaatggggctaatatatgttaatccacaaggaccagatggaaatccagatcctttagcaagtgctcatgacattagagaaacatttggaagaatggcaatgaatgatgaagaaactgttgctcttgttgcaggaggccatacttttggaaaagcacatggagctggagcagaagatcatgttcaatcagaaccagagggagctccattagaggaaatgggatttggttggacaagcacatacgcatctggagtaggtagcgacacaataactagtggtattgaaggagcgtggactgcaaatcctactcagtgggacaatggatattttgatttattgtttggttatgaatgggaattaactaaaagtcctgcaggagctcatatttggcatgctgttggtcaaactgaagaagatatggctccggatgctgaagatgcttccaaaaaagttccaacaatgatgacaactgctgatatggctttaagagaagatccaagttataagaaaatttcaaaaagatttcacgaaaatcctgatgaatttgcagatgcttttgcaagagcatggttcaaacttcttcacagagatatgggtccaaagtcaagatacatgggtccagaaattcctgttgaggaattaatatggcaggatccagttcctttaggcaactctgattacaatattgaaa

SEQ ID NO: 211081 - DNA, 1279 bp, Unknown
  Bacterial polypeptide expressing nucleotide sequence isolated from the Sargasso Sea
gatgaatggtgatgcaaagtgtccggtttcacatgggtctagtgatcagcataccaatagcgcaagaaccaacaaggaatggtggcccgagcaggtgaacttaaatattttgcatcaacatgatacaaaaactaatccaatgaatgaggattttgattatagtaaagaattcaaacagttggattatgaagcacttaaaaatgatttgaacaatttaatgactgactcccaagaatggtggcctgctgactatgggcattatggccctttctttattcgtatgacctggcatgctgctggaacatatagaattacagatggccgtggaggtggaggtactggttcacagcgctttgcgccaacaaacagctggccagataatactaatcttgataaagcaagaaggcttttgtggccaattaagcaaaaatatggcaataaaattagttgggcagacctaattattcttacaggcaatgtggctattgaatctatgggaggaagaacttttggttttggtggtggtcgagttgacatttgggggccagaagaagatattttttggggtaaagaaactgaatggttggcaaatgaacgttataccggtgatcgagtcctcgatcagcctttaggagcagttcaaatggggttaatttatgttaatccgcaagggcccgatggaaatcccgatcctcttgcgagtgcaaaagatattcgtgaaacatttggtcgtatggcaatgaatgattacgagacagttgcattaacggctggtggacacacttttggaaaagcgcatggagctgctagtgaagacttcaaagggcctgagccggagggtgcatcagttgatgaaatgggttttggttggaaaagtggacatggaaaaggtatgggaagagacagcattaccagtggaatagagggaccttggactccaaatccaactaaatgggataatggttattttgatatgcttttaaactatgaatgggagttagttaagagtccagctggtgcacatcaatggcaccctgttaatccaaaagatgaagacctagcgccagatgttgaagatagtactcaaaaagtgacaactataatgacaacagctgatatggcaatgcgcgaagatcctagttacaaagaaatatcaaaacattttcatgcaaaccctgatgaatttgcagatgcttttgcaaaagcttggttcaaattattacatcgtgatatggggccaaaagttcgctacttaggaccagaagtcccaaatgaagat

SEQ ID NO: 211082 - DNA, 1297 bp, Unknown
  Bacterial polypeptide expressing nucleotide sequence isolated from the Sargasso Sea
atgagtggagaattaattaaagaacaatcaaaatgtccgtttacaggcgctggaacaccgccgaaacatccgactggtaaaggtacctcaaatagagattggtggccaaatagtttaaatttaaaaattttaagtcaacactcttctttagttaatcctatggataaaaaatttgactatgcaagagagtttaaaaaactgaatttcaaggctttaaaaaaagatttatacaagttaatgacagactctcaagattggtggcctgcggattatggccattatggaccactttttataagactagcatggcacgcagctggtacatacagaactggtgatggtcgaggtggagctggaactggaaatcaaagatttgcacctcttaacagttggccagataatgtaaacttagataaagcaagacttttactttggccgattaagaaaaaatatggaaaaaaaatttcatgggcggacttatttattttggttggaaatatttctttagagtcaatgggattcaaaacttttggtttcggagcaggaagagaagatatatgggaaccagaagaagatatatattggggatcagaaaaagaatggcttggtgtaaaccggtatagcggcaaaagagatctagagcagccattaggtgcatctcatatgggtctaatttatgtaaaccctcaaggtccagacgctaaccctgatcctttacttgcagcacatgatattagggaaacttttggtagaatggcaatgaatgactatgaaacagttgcacttgttgcaggaggacatacatttggtaagtctcatggagcagcaccagaatcacacaagggaccagagccagaaggatcaaagattcaggaacaagcaactggttggaatagtaattacaaaagtggtttaggagttgatactataagcagtggtatagaaggtgcttggacaagtaacccaacaaaatgggatatgggttattttgataatttatttggttatgattgggaacttacaaaaagtccagctggtgcacatcaatggaaacctaaaagaaacggccacgatattgaaatgacacctgacgcacatgaaaaatctaaaaaaaatcttcctatgatgcagacgacagacttatcattaaaaatggatccaaattatggaccaatttcaagacatttccacaataatcctaaagaatttgcagatgcgtttggaagggcttggtttaaacttactcaccgtgatatgggaccacgagcttgctacttaggcccagacgttccaaaag

SEQ ID NO: 211083 - DNA, 2161 bp, Unknown
  Bacterial polypeptide expressing nucleotide sequence isolated from the Sargasso Sea
cctgcaaagttttctgcaggaagaggtcaaacagtaagagacttttggccaaatagtttaaatcttaaaattcttagtcagcattcaaatttatctaaccctatggataaaaaatttaattatgcaaaagaatttaaaaaacttaattataaagcattaaaaaaagatttaaaaaaattaatgacagactcccaagagtggtggccagcagattatggtcattatggtccattatttattagattagcttggcatgccgcaggaacttatagaactggtgatggtagaggtggagcaggaacaggtaatcaaagatttgcgccacttaattcttggccagataacgtaaacttagataaagccagattacttttatggcctattaaaaagaaatatggaagaaaaatttcatgggcagatttattcatacttgttggaaacgtggctttagactcaatgggttttaaaacttttggtttcggagctggtagaactgatatttgggaaccagaagatgatatttattggggttcagaaaaagaaatgttaggtgtggaaagatatagtggaaaaagagatttagaacagccattaggagcttcacatatgggtttaatctatgtaaatccgcaaggtcctgatgctaatccagatccaaaactagcagcacatgatattagagagacatttggcagaatggctatgaatgactatgagacagcagcattagttgctggagggcatacgtttggaaaatctcatggtgcagcatctgagtcatataaaggaccggatcctgaggcttcaagacttcaagaccagtcaactggatggaatagtggatataaatctggaaaaggtgttgatacaataagtagtggtattgagggcgcttggactcaaaatccaattcaatgggatatgggttatttggattgtttatatggacatgagtgggaacttacaaaaagcccagctggtgctcatcaatggactccgaagaaaaatgggcaagagattaaaatggttcccgatgcacatcaaaaaggtgtgcttcatccaccaatgatgcaaacaaccgacatatcgatgaaagttgaccctagttatggacctatcactaaacattttcaccaaaatccaaaagaatttcacgatgctttcgcgagagcatggtttaaattaactcacagagatatggggccaagagtttgctatcttggtagcgaggttccaaaagaacaactaatttggcaggatccaattgataagcctaaatacaaacttaaatcaaaggatgttaaagatttaaaaagtaaaatctctaaatcaaaaatatcaatttcagatttagtttctactgcatgggcttcagcatctacgttcagaggctctgataaaagaggtggtgctaatggtgcgagaataatgttggaaccacaaaaaaattggaaagtgaacaatccaaaaaaattatcggctgtaattaaagctttagaaaaaattaaaagcaaattcgatagtaaaaagaaaagtgttacaatggcagacttaattgtactagctggtggtgttggtatcgaaatggctgcaaaaaaagctggctataaagttcaagttccattttcagcaggaagaggagatgcaagacaagatcagaccgatattaactcatttggtcttttagaaccacaagcagatggttttagaaattaccaaaatggtggagcctcaaatgtttctgcagaggaaaaactggttgataaggctcaattgatgggtttaacagctccagaaatgactgcacttgtaggtggaatgagagtgttaaacacaaactttgatggctcgaaacatggtgtttttactaacagacctggttctcttactaacgattatttcataaatcttttagacatgaatacgacttggaaagaggaagataaatctgaacaaacatttattggtaaagatagaaaaactcaaaaaactaaatggaaggcgacaagagttgatttaatttttggttcaaattctcaactaagagctctagcagaagtttatgcatgtgaagattcaggtgataaatttgttaaagattttatcgcagcatgggtaaaagttatgaattctgatcgatttgatttgaaattaaactaat

SEQ ID NO: 211084 - DNA, 2134 bp, Unknown
  Bacterial polypeptide expressing nucleotide sequence isolated from the Sargasso Sea
atgacagaagaaagtaaatgtccagtatcacacggctcaaacagtcagcatacgctcggctcaatgtcaaacaatcaatggtggccagatgcgctaaacttaaatattcttcatcaacatgatagaaaatctaatcctatgggcgaagatttcaattatagagaagaattcaagaaaattgattatgatgctttaaaaaatgatctaaataatgttatgacagattctcaagattggtggcctgcggattatggacattacgggccattctttattcgaatgacctggcatgctgcaggaacatatagaatagcagatggtcgtggtggaggaggcacaggaaatcaacgctttgctcctttaaatagttggccagataatggaaatcttgataaagcacggagactgctttggcctataaaacaaaaatatggtaatcaaattagctgggcagatttattgattctagcaggaaacgtagctattgaatcaatgggcggtaagacttttggttttagtggtggtcgtcctgatatttgggcaccagaagaagatattttctggggtaaagaaaatgagtggctcggtaataatcgatataccggtgatcgcgaacttgataaaccactaggtgcagtccagatgggattgatttatgttaatcctcaaggaccagatgggaacccagaccctcttgctagcgcaaaagatatacgtgaaacttttagtcggatggctatgaatgatgaggaaactgtagcgcttactgcaggaggacatacttttggtaaagcacatggagcaggatctgaagatcttgttggggttgaaccagagggtgctcctattgaacaaatgggttttggatggaaaagtgatcatggatcaggtcaaggaagagatagtataacaagtggaattgaaggtccatggactgcaaaccctactcaatgggataatggttattttgatctgttgtttggatatgagtgggaactagtaaagagtcccgctggtgcacatcaatggcatcctaaaaatcctaaggatgaagatcttgcgccagaccctgaagattcatcagttaaagttactacgatgatgactacggctgatatggcaatgcgtgaggatccagcgtatcgagaaatatcaaaacggtttcatgaaaatccagatcaatttgctgatgcgtttgctagagcttggtttaagctgcttcaccgtgatatgggacctcgtacacgctacatggggcctgaatcaccaaatgaagaacttatctggcaagaccctgtacctgatggtaattctaattatgatgttgaagcagtaaaatccaaaatttccgaaactgatttaagtattcaggagatggttgaaacagcatgggctagtgcatcaacattccgtggatctgatcttagaggtggtgccaatggtgcacgtatcagtctagagcctcagaatagttgggaagctaataaaccagaacagttatcccgggtacttgatgtcctcgaagatattgcaaaagatacaggcgcttcactagctgatgttattgtactagctggtaatgtaggagtcgagaaagcatcaggtgtaaatgtcccatttaatcctggtcgtggtgatactacacaagaaaaaacagatgtggattcatttgctgtattggaacctttttctgatggtttccgtaattatcataataatgatcttgaagttacaccagaacaaatgatgcttgataaagcacaattacttggattaaccgcacctgaaatgactgtacttgttggaggaatgagatcattaggtataagctttgatggacatggtatttttactgatgatacaagcaagctatcgaatgatttctttgtaacattacttgatatgaatgttgagtggaaaccaaagggtagcaacttgtatgaagcagcagatcgatcatcaggtgaagtacttagaacagccacaagagcagatcttgtatttggttctaattcacagctaagagctttggctgaagtttattcatgtgatgactcaaaatcaaaatttgttaatgattttgtcaaagcatggaataaagtaatgaatcttgatcgttttgatttagattgat

SEQ ID NO: 211085 - DNA, 1501 bp, Unknown
  Bacterial polypeptide expressing nucleotide sequence isolated from the Sargasso Sea
atggaaaatgaaggtaagtgtcctgttatgcatggcgctatgacaagtaatagttcaagcggcacatccaacaaagattggtggcctgagcaactaaatttaaatattctgcatcagcatgacaaaaaatctgatccaatggatgaaggttttaactatagaaaagaatttgaagatatcgactatgatgctctgaaacaagatctaaatgatctcatgactgattcacaggaatggtggcctgcagattatggtcactatggtccatttttcataagaatgacttggcatgctgctggaacatatagaagtacagatggccgaggtggaggcggaactggtgcacaaagattcgctcctttgaatagttggcctgataatggaaacttagataaagctagacgactactttggccaatcaaacaaaaatatggcaagaaaataagttgggctgatctattaatattagctggcaatgtagcaattgagtccatgggtggaaagacctttggtttcagtggtggaagacctgatatttggggtccagaagaagatattcattggggtgttgaaactggatggttagagaataatagatataagggtgatagagagcttgataatcctcttgctgctgtacagatgggattgatttatgtaaatcctcagggtccagatggaaatcctgatccacttgcaagtgcaagagatattagggagacatttggcagaatggctatgaacgatgaagaaacagttgcacttgttgctggtggacatacttttggtaaagctcatggagcaagcactgaagatcatgttcaagcagagccagaaggagctcctcttgaagagatgggatttggatggacaagtagttatggttcaggggttggaagcgacactattaccagtggtatcgaaggtgcatggactgcaaatccaacacagtgggataatggatactttgacttgctctttggatatgagtgggagctaaccaagagtcctgcaggtgcgcatatttggcatgctgttggacaaaaagaagaagatatggctccggatgcggaagatgcttcagtaaaagttccaacaatgatgactactgcagatatggcaatgagagaagatccaagctacaaagaaatatcaaaacgtttccatgaaaacccggatgaatttgcagatgcttttgcaagagcttggttcaagttattacacagagatatgggacccaaaacaagatatatggggccagaagttcctgaagaggaattgatttggcaagatcctgtgcctgctggagattcaacatatgatgtaagtgccgcaaaagagaaaattctcaattgtggtctatcaattcaagaaatgattgaaacagcttggtcaagtgcatcttcttatagaggttctgacatgcgcggtggagcaaatggagcaagaataagattagagcctcaaaaaattgggaagctaataatcctgatcaattaag

SEQ ID NO: 211086 - DNA, 1335 bp, Unknown
  Bacterial polypeptide expressing nucleotide sequence isolated from the Sargasso Sea
cctttaaatagttggcctgataatggaaacttagacaaagcgagaagattattgtggccaataaagcaaaaatatggaaatcaaattagctgggctgatttacttattttaactggcaacgttgcaattgaatcaatgggtggaaaaacatttggtttcagtggaggcagacctgatatatgggcgcctgaagaagatatttactggggtctagaaacagaatggttaacaaacaaaagatattctggggaccgtgtattagaaaatcctctagccgcagttcagatgggactaatatatgtaaaccctgagggacctgacggaaatcctgatccactagcaagcgcaagagacattcgtgaaacttttgggcgtatggcgatgaatgatgaagagacagttgcactgactgcgggtggtcatacttttggtaaagcacatggagcaggtgatgcctctcttgttgggccagagccagaaggtgcgccaatcgaagaaatgggttttggatggattagcaaacatgcttcaggaaaaggaagtgataccatcacatctggcattgagggtgcttggacgactaatccgactaaatgggataatggttattttgatttactccttggttacgattggaaattaactaagagtcctgctggggcaaatatttggcatgcagtaggtcaaaaagaagaacatatggcacctgatgcagaagactcttcaaaaaaagttcctacaatgatgacaactgctgatatggcaatgcgcgaagatccagagtatcgaaaaatatctgagcattttcataaaaatcctgatcaatttcaagatgcatttgcacgtgcttggttcaaattacttcaccgtgatatgggaccaaagacacgctatatgggacctgaagcgccagaagaagatctgatttggcaggaccctatcccagctggaaacgctaattatgatgtagatgctgttaaaagtaaaattgagaatagcgaactatctattcaggaaatggtggaaactgcttgggcaagtgcttcaacttaccgacataccgatatgcgtggtggtgcaaatggtgcgcgcataagattagagccacaacgaagttgggaagtaaataaaccagaacaattaaataaagttcttggagtcttagagggtatcgcttcggagactgaggcaagtgttgctgatgttattgttctcgcaggtaatgttggtatagaaaaagcttctggcataactgttccatttactcctggacgaggggatgcaacacaagaacatactgatgtggagtcttttgctgtcatagaacctgaagca

SEQ ID NO: 211087 - DNA, 1099 bp, Unknown
  Bacterial polypeptide expressing nucleotide sequence isolated from the Sargasso Sea
aacaacagacctatctttaaaaatggatccaaaatatggaccaatctcaaaacattttcataaaaatcctaaagaatttgcagatgcatttgctagagcatggtttaaattaactcatcgcgatatgggaccgaaggcgtgttatttaggaccagaggttccaaaagaaaatctaatttggcaggatccaattccaaaagctaaatataaaatcaataaaaaagacattaaaaatctaaaatcaagaattttgaaatcagggctttctatttcacaactagtatcaactgcatgggcctctgcctcaacatttcgtggttcagataaaagaggtggtgctaatggtggaagaataagattatctccacaaaaggactggaaagttaacaatccaaatcaactatctaaggttattaaagttttagaaaaaattaaaaaaagttttgatacgaaaaagaaaaatgtttcaatagcggatttgattgtattaggtggttgtgctgcaattgaaaaagctgcaaaaaaaggtggttataaaataaatgttccttttacaggtggaagaggagatgcatcgcaagatcaaacagatgagtattcatttggcttgcttgaaccaaaggctgatggatttagaaattacattataaaaagatcaaatggtaaatcggaaaaagctacagtgtctgctgaggaaatgttagttgataaagctcagcttatgaaacttactgcacctgaaatgacagttttaattggaggtatgcgtgttctaaatacaaattttgataattcaaacactggagtctttacaaaaaaacttgaaacacttacaaacgatttttttatcaatttacttgatatggggataacttggaaagaaattgatgaaagtgaggagatgtttaacggaagagatcgtaaaacaaataaaattaagtggacagcaagcagagtagatcttatttttggatccaactcacaacttagagctttagcggaagtttatgcttgtgaagactcaaaaactaagtttattgatgatttcgtttctgcatggacaaaagtaatgaatgctgatcgttttgatttaaaataa

SEQ ID NO: 211088 - DNA, 2131 bp, Unknown
  Bacterial polypeptide expressing nucleotide sequence isolated from the Sargasso Sea
atgtctaaaggcaatgaaagcaaatgtcccgtgatgcatggcgcattgacaacaaacagtgcatcgggaacttcaaacaaagattggtggccaaatcagttggatttatccatccttcaccaacatgaccagaagtctgatccaatggatgatggatttgattacagagaagagtttaaaaaattagatttcgatgctttgaaaaaagatctaaatgatctaatgactgattcacaagattggtggcctgcggattatggacattatggtcctttctttatcagaatgacttggcatgctgctggcacatacagaattggagatggtcgaggcggaggcggtactggaaaccaacgctttgcgccactcaacagttggccagataatggaaatctagataaagccagacgacttctttggccaattaagaaaaaatatggcaataaaatcagctgggcagacttattgatattagccggcaatgtagctatcgaatcaatgggcggaagaacttttggatttggaggcggacgaccggacatatgggctccagaagaggacatcgattggggtgccgaaagagagtggcttgcaaatgagcgatattccggtgagcgagatctagccaatccacttggagctgttcagatgggattaatttatgttaatccacaaggtccagatggtgaaccagatcctattgccagcggtaaagatgttagagaaacattcagcaggatggcaatgaatgatgaggaaacagttgctctagttgctggcggccatacttttgggaaaggacacggcgctggacctgaagaggatgttgcagttgaaccagaaggagcatctcttgaaaacatgggttttggctggatgagcagtcataaatcaggcatgggcagtgacacaatcacaagtggatttgagggagcttggactgctaaaccaacaacatgggataacggctacttcgatctactttttggctatgagtgggaaaaagttgaaacaccttcaggcaagattgtttggcatgccatagatcagaaggaggaagacatggctcctgatgccgaagatccttcagtgagagtgcctacgatgatgaccacagctgatatgtcaatgagagaggatcctatttataaaaagatctcaaaacgttttcatgaaaatcctgaggaatttgccgacgcatttgctcgagcatggtttaagcttttacaccgtgatatgggccctcgctctcgctatttaggacccgaagtacctgaagaagagttgatttggcaagaccctgttcctaaaggcaataatgattatgatgtcactgcagttaaagccatgctctccgattgcggattaagcattcaagaaatggttgaaacagcatgggctagtgcatcaactttcagaggttctgacttgcgaggaggagcgaacggatctcgcatacgtctctctccacaaaaagattgggaagctaataagccggaacagcttgcaaaagttttaggaatatatgaatccatcgcctcagagtcaaacgcctctttggcagatgtgattgttcttggcggaaatgttggcattgaaaaagcctctggtgttgaggttccattcacagcaggtcgaggcgatgcaaccgaggagcaaaccgatgctgagtcatttgatgcacttgagccgattgccgatggttttcgaaatttccaaaaagacgattctacgcttccctctgaggaaatgttgcttgataaagctcaattgcttggtttgactgctcctgaaatgacagtgttaacaggaggcatgagagccctaggaataagctcaaatgatcatggagtcttcacggagtcacctggcaaattaaccaatgatttctttgtcaatcttcttgatatgggtgttgaatggaagtcaacagggaaaaatacctatgaggcaattgatcgtcagtcaggcgataaagtaagaactgcaaccagggttgatttggcgtttggatccaattcacagctgagagcaattgctgaagtttatgcttctgatgactcaaaagataagtttgtttcagattttattgccgcatggaataaggtgatgaatgctgatctgacttaat

SEQ ID NO: 211089 - DNA, 1342 bp, Unknown
  Bacterial polypeptide expressing nucleotide sequence isolated from the Sargasso Sea
atgactgataaatcagaaggtaaatgtcctgtaatgcatggggcaatgacaacaaatagttcaagtggaacttcaacacgtgactggtggccaaatcagctgaacctcaatattttgcatcagcatgataaaaaatcgaatcctatggatgaagattttgattatagagaagagtttaaaaaaatagattatgaagctctcaagaaggatttaaatgaattaatgacagattcacaagattggtggcctgcggactatggtcactatggaccatttttcattagaatgacctggcatgctgctggtacctatagaaatacagatggccgaggtggtggtggtactggcgctcaacgttttgctccactaaatagttggcctgataatggtaatctagataaagctagaaggttgttgtggccaatcaaacaaaaatatgggaaacaaattagttgggcagatttattaattctagctggaaatgtagcgattgaatccatgggtggaactacttttggattcagcggtggaagagcagatatttggggtccagaagaggatattcattggggcgttgaatcagaatggcttgaaaataaaagatataagggtgaaagagaattagataacccacttgcagctgttcaaatgggattaatatatgttaacccgcaaggaccagatggaaatccagaccctcttgcaagtgctcatgatatcagagagacatttggaagaatggcaatgaatgatgaagaaactgttgcgcttgtggctggaggtcatactttcggaaaagcacatggagctggagcagaagatcatgttcaatcggaaccagaaggagctccattagaggagatgggatttggttggacaagcacatacgcatctggagtaggaagcgacaccataactagtggtattgaaggagcgtggactgcaaatcctactcagtgggacaatggatattttgatttattgtttggttatgaatgggaattaactaaaagtcctgcaggagctcatatttggcatgctgttggtcaaactgaagaagatatggctccggatgctgaagatgcttccaaaaaagttccaacaatgatgacaactgctgatatggctttaagagaagatccaagttataagaaaatctcaaaaagatttcatgagaatcctgatgaatttgcagatgcttttgcaagagcatggttcaaacttcttcacagagatatgggtccaaagtcgcgatacatgggtccagaagttcctggtgaggaattaatatggcaggatccagttcctttaggcaactctgattacgatatgaaaaagtaaa

SEQ ID NO: 211090 - DNA, 1030 bp, Unknown
  Bacterial polypeptide expressing nucleotide sequence isolated from the Sargasso Sea
aatgagtaatgagttaattaaagaacaatcaaaatgtccttttacaggtgtgggaacaccaccaaagcacccaacaggcaaaggacaaacaaataaagattggtggcccaatagcctaaatttgaaaattttaagtcaacattcatcattggtaaatccaatgggagaaaaatttaattataaaaaagaatttaaaaaacttaagtttaaagcattaaaaaaagatcttcataaattgatgactgatacacaagattggtggcctgcagattatggtcattatggtccattttttattcgtcttgcttggcatgctgctggaacttatcggacaggagatggaagaggtggtgctggaactggaaatcaaagatttgctccattaaatagttggccagataatgtaaatttagataaagcaagacttttactatggcctattaaaaagaaatatggaaaaaaaatatcttgggcagatttatttatacttgttggaaatatatctctagagtcaatgggtttcaaaacttttggttttggggctggaagagaagatatatgggagccagaagaggatatttattggggatctgaaaaagaatggcttgcagtaaatcggtatagtggaaaaagagaactagaaaaccctttaggagcatcacatatgggtttaatttatgtaaatcctcaaggacctgatgctaatccagatccttatttagctgctcatgatattagagaaacttttggacgtatggcaatgaatgattatgagacggtagcactcgttgcaggtggacatacatttggaaaatctcatggtgctgcaccagagtcacataaaggtcctgaaccagaaggttcaaagattcaagaacaagcaactgggtggaatagtaactacaaaactggcttaggtgtagatactattagtagtggtatagagggcgcatggacttcaaacccgattaaatgggatatgggatattttgataatttattcggctataattgggaattaactaaaagc

SEQ ID NO: 211091 - DNA, 2137 bp, Unknown
  Bacterial polypeptide expressing nucleotide sequence isolated from the Sargasso Sea
aatggatgcagagagtaaatgccctgtaatgcacggagcaattacaaaaaatatgggtgaaggtacatcaaaccgcgagtggtggcccaatcaacttaacttaaacatacttcatcaacatgatcgcaaatcagatccaatggaagctggatttaactatcgagaagaatttaaaaaattagattatgctgcattaaaaaaagacctccataacctgatgactgactctcaagattggtggcccgctgattatggtcactatggtggtttctttattcgtatgacatggcatgctgctggtacttatagaactggtgatggccgtggtggtggtggaacaggggctcagcgttttgctccattaaacagttggccagataatggtaacttagataaagccagaagacttctttggccgataaagaaaaagtatggaaataaaattagttgggctgatttatttattttaacaggcaatgttgcaattgaatctatgggcggtaaaacctttggattcagtggtggtcgaccagacatttgggcgccagaagaagatatttactggggtgtcgaagaagaatggcttcaaaataaaagatatactggtgatagaattttagacaatccactagcagcagtgcagatgggattaatttatgtaaaccctgaaggaccagatggaaaagctgatccacttgctagtgcaaaagatattagagaaacttttgcaagaatggcaatgaacgacactgaaactgtagcactaacagctggtggacatacttttggtaaagcacatggtgcaggtgatccatctctagttggagctgaaccagaaggtgctcctttagaacaaatgggtttaggatggaacaacttgcatggctcaggtgttggccgggatacaactacaagcggtatagaaggtccatggacttctaatcctacccagtgggataatggatactttgatttgcttcttggttatgagtggaagctcgttaaaagtccagcaggtgcacaaatctggcatgccattgatcaaaaagaagaacacatggcaccacaggttgatgatccatcaataaaggttccgacaatgatgacaacagcagatatggcaatgcgtgaagatcctgaatacagaaaagtatcagaaaaatttcacaaagatccagaatattttgctgatcagtttgctagagcttggtttaaacttcttcatagagatatgggaccaaaaacaagatatatggggccagaagttcctgaagaagaattaatctgccaagatcccgtacctcaaggtcattcaaactatgatgttgaggcagtaaaagctaagatcttaaaaagtggtttgactactcaagaaatggttgaaaccgcttgggctagcgcttcaacttttagaggatcagatatgagaggtggagcaaatggcgcaagaattagacttgctcctcaaaaagattgggaagttaacaaaccaaaacaattaaaaaaagttcttggtattcttgagcctattgcaaaagagacaggagcttcagtagctgatgtaattgttcttgcaggcaatgtaggcgtagaacaagcaactggaatggaagttccttttacacctggtagaggtgataccactcaggagaaaactgatattgattcttttggtgttcttgaacctgaagcagacgcatttcgtaattatttaaaaatgaattacgatgttacagctgaagaactaatgctggataaagcacagcttcttgggttaacagctcctgagatgactgtacttgttggcggtatgagatcgatgggtattagctcagatcaaagaggattatttgttgatacaaaaggaaagttaacaaatagtttttttgataagctattagatatgggggttagttggaaaccgactggtagcaattcatatgaagctacggataaaattacaggtgaaaaagtaagaactgcatctagagtagatcttgtttttggatctaattcccaactaagagcaatagctgaactttatgcaagtgatgatagtgaagaaaaaatgaaaaaagacttcattacagcttggaacaaagtgatgaatgctgatcgtttcgatttagaacaataa

SEQ ID NO: 211092 - DNA, 1750 bp, Unknown
  Bacterial polypeptide expressing nucleotide sequence isolated from the Sargasso Sea
aagcaaatgtccttttacaggagcaggcacacctgcaaagttttctgcaggaagaggtcaaacagtaagggacttctggccaaatagtttaaatttaaagattcttagtcagcattctaatttatcaaaccctatggataaaaaatttaattatgcaaaagagtttaaaaaacttaactacaaatcattaaaaaaagatttaaaaaaattaatgacagactcacaagaatggtggcctgcagattatggtcattatggtcctttatttatccgattagcttggcacgctgcaggaacttacagaactggtgatggtagaggtggtgctggcactggcaatcaaagatttgctccgctcaattcttggccagataacgtgaatttagataaagcaagattacttttatggccaatcaaaaaaaagtatggaagaaaaatttcatgggcagatttatttatattagttggaaacgtagcattagactcaatgggttttaaaacttttggttttggtgcaggtagaacagacatctgggaaccagaggatgatatttattggggttcagaaaaagaaatgctaggtgttgaaagatacagtggaaaaagagatttagagcaacctttaggcgcttctcacatgggattgatttatgtaaatccacaaggtccggatgcaaatccagatccactactagcagcacacgacatcagagagacatttggaagaatggctatgaacgattatgaaacagcagctttagttgccggaggacatacatttggaaaatctcacggagcagcatcagagtcttataaaggtccagatccagaagcttcaaaacttcaagatcagtctactggatggaatagtggatataaatctggaaaaggtgtcgacacaataagcagtggtatcgaaggtgcttggactcaaaatcctactaagtgggatatgggttatttagattgtttatacggtcatgattgggaattaacaaaaagtccagctggagctcatcaatggactccaaagaaaaatggtcaaaaaattaagatggttcctgacgcgcatcaaaaaggtgtgcttcatccaccaatgatgcaaacaacagatatatcaatgaaagttgatccgagttatggaccaattacaaagcattttcatcaaaaccctaaagagttccatgatgcatttgctcgggcatggtttaaattaactcatagagatatgggtccaagagtttgttacttaggtagcgaagttccaaaagagcatttaatttggcaagatccaattgataaaccaaagtacaaacttaaatcaaaagatataaaagatttaaaaaagaaaatctctaaatcaaaaatatcaatttcagatttagtttcaactgcatgggcatcagcttcaacttttagaggatcagataaaagaggtggtgcaaacggcgcaagaataatgctagaaccacaaaaaagctgggctgtaaataatcctaagaaattatcaactgtggttaaagctttaaataaaattaaagatcaatttgataataaaaagaaaagtgtatcaatggcagacttaattgtcttagcaggtggtgttggtattgagatggctgctaaaaaggcaggacataaagttaatgttccattttcagctggcagaggagatgcaagacaagatcaaactgatattcattcttttggtcttcttgagcctcaggcagatggttttagaaactatcta

SEQ ID NO: 211093 - DNA, 967 bp, Unknown
  Bacterial polypeptide expressing nucleotide sequence isolated from the Sargasso Sea
agcttggactagtaatcctattaaatgggatatgggttattttgataatctttttggatatgaatgggagctttctaagagcccagccggtgcttatcaatggaaaccaattaaaaatggtaaagctgtaaatatgacaccagacgcacatataaagtcaaaacaaaatttaccaatgatgcaaacaactgatttatccttaaaattagatccatcttatgggccaatttctaggcattttcataataatccaatagagtttgctgatgcttttgctagagcatggtttaagcttacacaccgtgatatgggtcctcgtgcatgctacttaggacctgaagttccaaaagaaaaattaatttggcaagatcctataccaaaacctaattataaaattaaaaataaagatataaaatttttaaaatcaaaaattttaaaatcaggactttctgtttctcagcttgtatcaactgcttgggcatcagcttcaacttttcgtggatcagataaaagaggtggggctaatggtgcaagaataagactagagccacaaaaaagttggtcagtaaataatccatctcaactgtcaaaggttattaaaatttttgaaaaaattaaaaagagttttgataataaaaagaaaaatgtttcaatggctgacttgattgttttaggaggatctgttggaattgaaaaggcagctaagaacgcgggctacaatataaacgttccatttacacctggtagaggtgatgcgtcacaagatcaaacagatattcattcttttggtttacttgaaccaaaagctgatgggtttagaaattatattacaaaaatcacaaatggttctacaaaaaaacctactatttcagctgaagagatgttggttgataaagctcaacttatgaaactatcagcacctgaaatgacagttttaataggggggaatgagggttttaaatactaa

SEQ ID NO: 211094 - DNA, 1212 bp, Unknown
  Bacterial polypeptide expressing nucleotide sequence isolated from the Sargasso Sea
agctaaccctcttggcgcagttcagatgggattgatttatgttaatcctcaaggacctgatggagagcccgacccaattgcgagcggtaaagatgttagagaaacttttagcagaatggctatgaacgatgaagaaactgttgctcttgttgctggtgggcatacttttggtaaaggacatggtgcaggtccagaagaaaatgttcaggtagaaccggaaggcgcttctttagaaaatatgggttttggttggatgagtaatcatgcgtcaggtcagggtagtgacacgatcacaagtggctttgaaggagcttggacagcagatcccattaaatgggataacggctattttgatctcttatttggttatgaatgggaaaaagtagaaacgcctgcaggaaaaattgtttggcacgccatagatcagaaagaagaagatatggcacctgatgccgaagattcttctgttcgtgttcccactatgatgacaactgcggatatgtctatgagagaagatcctgcttataaaaaaatctcaaaacgttttcatgaaaaccctgatgaatttgctgatgcgtttgcaagagcatggtttaaattgttacatcgagatatgggtccacgatctcgttacctaggcccagaagttcctcaagaggaattaatttggcaagatccaatccctgaaggtaatgctgattatgatgttggaagtgtcaaatctaaaataaatgagagcggactaacaattcaacaaatggtagaaactgcttgggccagtgcatccactttcagaggctcagatctccgaggtggtgcaaatggtgccaggatacgtcttgccccacaaaaagattgggaagcaaataagccaaaagaactatcggaagttctaaatgttcttgagggtatagcaaatgacacaggagcttcaatagctgatgtaatagttcttgctggtaatgttggtattgaaaaggcgtctggagtagaagtgccttttactccgggtagaggagacgctagcatagagcagacggatgaagaatcatttgcagtattagaacctgtttcagacgctttcagaaattatcatcaatctggaataaatatgccttctgaagaattgatgttagataaagctcaattacttggtttaacagctccagaaatgacagttctcgttggaggaatgaggactttaggagtaag

SEQ ID NO: 211095 - DNA, 1756 bp, Unknown
  Bacterial polypeptide expressing nucleotide sequence isolated from the Sargasso Sea
atgcgaaattttttaaccgaagaacaatcaaaatgtccgtttacaggagctggaactccacctaaacatggaacgggaaagggtacgacaaatcgtgattggtggcccaatggtttaaatctgaaaatattaagccagcattcttcattagttgatcccatggataaaaaatttaattacgcaaaagaatttaaaaaattaaacttcaaggctttaaaaaaagatttacataaactaatgacgcagtctcaaagttggtggccagctgactatggtcactatggtccgttatttattagattagcatggcatgctgctggaacatacaggacaggagatggtagaggcggtgcgggaacaggaaatcaaagattcgcacctttaaatagctggccggataatgttaatttggacaaagcgagattactattatggccaataaaaaagaaatacggaaaaagaatttcatgggctgatttatttattttagttggtaatatttctcttgagtctatgggctttaaaacttttggttttggtgctggtagagaagatatttgggaacccgaggaagatatttattggggttctgagaaggaatggttgggagtaaatcgctatagtgggaagagagatttagaacagcctttaggtgcttcacatatgggattaatatacgtaaatccacaaggtcctgatgcaaatccagatcctttattagccgctcacgatattagagaaacttttggaagaatggctatgaatgattatgaaacagttgcactagtcgctggtggacatacttttggaaagtctcatggagctgcgccagaatctcataaaggacctgaaccagaaggatcaaaaattcaagatcaagcaactggttggaatagtaattttaaaagtggaaagggtgtggatacaataagtagcggaattgaaggggcgtggacctctaacccaattaaatgggatatgggttattttgataatttgtttgggtatgactgggaacttacaaaaagccctgctggagctcatcaatggaaacctaaaagaaatggtcatgatatagagatgacgcctgatgctcatgagaaaaataaaaaaaatcttcccatgatgcaaacaactgatttatcactaaaaatggatccaaaatatggtccaatatcaaagaattttcataataatccaaaggaattcgcagatgctttcgctagagcctggtttaagcttactcatagagatatgggtcctaagtcttgctatttaggtcccgatgttccaaaagaaaatctaatttggcaggatccaatacctaaacaaaagtataagttaaaaaataaagatattaaattcctaaagtctaaaattttaaaatctggtctttcggtttccgaactcgtttttactgcatgggcttcggcatcaacttttagaggttctgataaaagaggtggagcaaacggcgctagaataagactggaaccacaaagaaactgggaagttaacaatccaaaaaaactatcaaaagttcttcataaacttgaaaaaatcaaaaaaaattttgacaaaaagaataaaactgtatcgctagctgatataatagtattaggtggaagtgtaggaatagaaaaggctgcaaagaaagccggttataaagtaaatgtaccttttacacaaggaagaggtgatgctttgcaaaacgaaactgatgaattctcttttggtttattagagcctaaagctg

SEQ ID NO: 211096 - DNA, 1062 bp, Unknown
  Bacterial polypeptide expressing nucleotide sequence isolated from the Sargasso Sea
aaaaacttttggttttggtggaggacgtcctgatatttgggctccagaagaagatattgattggggtgcagaaaaagaatggctagcaaatgaaagatattcaggtgaaagagatttagctaatccgttgggcgctgttcaaatgggattgatttacgttaatccgcaaggtcctgatggagatcctgatccaatcgcgagcgggaaagatgttagagaaacttttggcagaatggctatgaatgacgaagagacagtcgcacttgtagctggaggacatacttttggtaaaggccatggggctggtccagaagaaaatgtacaagttgaaccagaaggggcttctctcgagaatatgggctttggttggatgagcaatcatgcttctggtaagggtactgatactataacaagtggcttcgaaggtgcctggactgcagatccaactaaatgggataacggatattttgatctcttatttggttatgagtgggaaaaagtagaaacacccgctggaaaaattgtttggcatgcaaaagatcaaaaagaagaggacatggctcctgatgctggagatccctctgttcgagttccaactatgatgactaccgcagacatgtccatgagagaagacccagcttacaataaaatttctaagcgctttcatgaaaacccagacgaatttgcagacgcgttcgcaagagcatggtttaagttattgcatcgtgatatgggccctaagtctcgttatcttggtccagaagttcctgatgaagaattaatatggcaagatcctataccagaaggaaacgccaactatgatgttgaaagcgttaaatcaaaaattagtgaaagtggcttaactattcaacaaatggttgaaacggcctgggcaagtgcttctactttcagaggttcggatctccgaggtggtgcaaatggcgcaagaattcgacttgcacctcaaaaggattgggaagctaacaagccaaaagaactatcagaaattctaaatgtttatcagggcatagcgaccgatactggagcttctatagcagatgt

SEQ ID NO: 211097 - DNA, 2029 bp, Unknown
  Bacterial polypeptide expressing nucleotide sequence isolated from the Sargasso Sea
tctgcatcagcatgatagaaaatctgatccaatggatgagggttttgactatagaaaagaatttgaagatatcgactatgatgctctgaaaaaagatctaaatgatctcatgactgattcacaggaatggtggcctgcagactatggtcactatggtccatttttcataagaatgacatggcatgctgctggaacatatagaagtacagacggacgaggtggaggtggaactggtgcacagagatttgctcccttgaatagttggcctgataatggaaaccttgataaagctagacgactactttggccaatcaagcaaaaatatggaaagaaaatcagttgggctgatctattaatattagccggcaatgtggcaattgagtccatgggtggaaagacctttggtttcagtggtggaagacctgacatctggggtccagaagaagatattcattggggtgttgaaactggatggctagagaataatagatataaaggtgatagagagcttgataatccccttgctgctgtccagatgggattaatttatgtaaatcctcagggaccagatggaaatcctgatccacttgcaagtgcaagagatattagggaaacatttggcagaatggctatgaacgatgaagaaacagttgcacttgttgctggtggacatacttttggtaaagctcatggagcaagcactgaagatcatgttcaagcagagccagaaggagctcctcttgaagaaatgggatttggatggacaagtagttatggttcaggggttggaagtgacactattactagtggtatcgaaggcgcatggactgcaaatccaacacaatgggataatgggtactttgacttgctctttggatatgaatgggagctaactaagagtcctgcaggtgctcatatttggcatgctgttgggcaaaaagaagaagatatggctccggatgcggaagatgcttcagtgaaagttccaacaatgatgacaactgctgatatggcgatgagagaggatccaagctacaaagaaatatcaaaacgttttcatgagaacccagacgagtttgcagatgcttttgcaagggcttggttcaagttattgcatagagatatgggacccaaaacaagatatatggggccagaagttcctgaagaggaattgatttggcaagatcccgtgcctgctggagattcaacttatgatgtaagtgccgtaaaagagaaaattcttaattgtggtctatcaatccaagaaatgattgaaacagcttggtcaagtgcatctacttatagaggttctgacatgcgaggtggagcaaatggcgcaagaattagattagagcctcaaaagaattgggaagctaataatcctgatcaattaagtaaagtgttagagatttatgaagcaatagcagaagaaactggcgcctcggttgctgatgttattgttttagcaggtaatgttgctattgagaaagcttctggtattgaagttccttttactccagggcgaggcgatgcaacacaagaaaatactgatgtagaatcttttgaagttcttgaaccacaatctgacggctttaaaaactttcataaatctggactaaatgttaatcctgaggaaattatgcttgataaagctcaattacttgggctcacagctccagagatgacggttttagttggcggtcttagatctttaggaataagctcaagtggatatggtctttttactgaaaataaagatgaattatctaatgactatttcagaacgctcttagatatgtcagttaaatggaggcctaacggaactggaaattcttatgaagcaatcgatagagtttctggtgagaaagttagaacagcttcaaggactgatttagtttttggctcaaactcgcagctaagagctctcgtagaagtttatgcaagtgatgattcacttgataaattcaaaggtgattttgttcatgcatggaataaagtcatgaatgctgacagatttgatctaaattaa

SEQ ID NO: 211098 - DNA, 2143 bp, Unknown
  Bacterial polypeptide expressing nucleotide sequence isolated from the Sargasso Sea
tatgactgataaagttgaaggtaagtgtcctgtgatgcacggggcgatgacaactcatagttcaagcggaacatcaaataaagactggtggccaaatcaattaaatttaaatatcttgcatcagcatgatgtgaagtcgaatccaatggatgacgattatgattacagaaaagaatttgaaaaaattgattatgatgctttaaaaaaggacttaaatgttttaatgaccgactctcaagattggtggcctgctgattatggacattatggtcctttctttataagaatgacatggcatgcagcaggaacatatagaaatacagatggacgaggtggtggtgggacaggtgcacagcgtttcgctcctttaaatagttggcctgataatggtaatttagataaagctagaagacttctttggccaataaaacaaaaatacggtaagaaaattagttgggcagacttattaattctggctggtaatgttgccattgaatctatgggtggtacaacttttggatatagtggagggcgaccagatatttgggggcctgaagaagatatacattggggtgtagagtctgaatggcttgaaaataaaagatataaaggtgaaagggaattagataatcctcttgctgcagttcaaatgggcctaatatatgtgaatccacaaggtccagacggtaatcctgatcctttagctagtgctcatgatataagagaaacatttggaagaatggcaatgaacgatgaagaaactgtggcattagttgcaggaggtcacacattcggtaaagctcatggtgcaggtgcagaaactcatgttcaatctgagcctgaaggtgcgcctttagaagaaatgggctttggctggacaagcacatacggctctggagttggtagcgatactatcacaagcggtattgagggtgcatggaccgcaaatccaactcaatgggataatggatattttgatttactatttggttatgaatgggagttaacaaaaagtcctgctggtgcatatatctggcatgcagttggtcaaaaagaggaagatatggcacctgatgcagaagattcatcaaagaaagtacctactatgatgacaactgcagatatcgcgttaaaagaagacccaagttataacgaaatctcaaaaagatttcatgaaaatcctgaagaatttgctgatgcttttgcacgagcatggtttaaacttctacatagagatatgggcccaaaaactaggtatatgggtccagaagtgcctgaagaagaattaatttggcaagatcctgtcccagcaggaaatgctgattatgatattcaaaatgtaaaaaaattaattactgagtcaggtttatcaattcaggaaatggttgaaactgcatgggcaagtgcatctacatttagaggctcagatatgcgaggtggtgcaaatggtgcacgaattcgtttagcacctcaaaaagactgggaagctaataatccaagcaaactgagtaaaatccttgaaatatacgaatcaatttctaacacaaccggcgcatcaattgcagatataattgttttagctggtaacgtaggcattgaaatggcaactggtgaggaggtttcattcattccaggaagaggagatgcctctcaagaacaaacagatatcgaatcatttgaggtgcttgaaccaaaatcagatgcctttagaaattttcatgcaaagggtgtaaatactgcacctgaggaaattatgctagacaaggctcaattattaggtcttacagctcctgagatgacagttttggttggaggaatgagatcacttggaataagttctaatggatacggtttattctcagaagattcaaataagttaagtaatgattattttaagactttgcttgatatgtctgttcaatggaaacctaatggaactggaaattcatatgaggcatttgatcgaaactctggtgaaaaaataagaactgcatcaagatctgatttagtttttggttctaactctcaacttagagcaattgttgaagtttatgctgaagacgattcaagtgaaaaatttactaaagatttcattagagcttggaataaggtaatgaacgctgacaggtttgatgttcagtaa

SEQ ID NO: 211099 - DNA, 2221 bp, Unknown
  Bacterial polypeptide expressing nucleotide sequence isolated from the Sargasso Sea
atgaagaaaagcactattccaagcttgtcagcgctgactttggcgatgtcgttggcatttggtggcaccgctatcgcacaagagcaagtcacgggtaatcaattttggtggcctgaacagctaaatttaagcccgctacgtcaaaatgcagttgaatcaaatccttatggtagtgactaccactacgccgaagcttttaaatccttagacctcgacgccgttaaaaaagacatcaaagccctgatgactgaatctcaggattggtggccatcggactatggtcattatggtcctttctttattcgtatggcgtggcacagcgcgggtgtttatcggatttttgatggccgcggtggtgccgccggtggtcagcaacgtttcgagccattaaatagctggccagataacgtgaacttagataaggcgcgtcgcctactgtggcccatcaaacaaaaatacggtagcaagatttcgtggggcgacttaatggtgcttacgggtaacgtggcgctggagtctatgggctttaaaacctttggttttgccggtggtcgtgtcgacgactgggaagcggaacaggtgaactggggttcagagaaagcctggctcgatagcaaacgccgcaatgaaaagggcgaactggctaagcctatgggcgcgacccaaatgggcttaatttatgtaaaccctgaaggcccgaatggtgtgccagatccattagcctcggcgaaggaaatccgtgacacctttggccgtatggcgatgaatgatgaagaaaccgtggcgctgatcgcgggtggtcacacctttggtaaggcacacggcgcgcatgatccctctaaatgtgtcggtgccgatcccgccgcttccggtgttgaggcacaaggtttaggttggaaaaacaagtgcggtaaaggccactcggaagatacagttaccagcggtttagaaggcgcttggtctgttaatccaacggcgtggaccatgcagtatttagaaaacctctatggtttcgattgggtacaaactaagagcccagcaggccatattcagtggatccctaaagatggcaaaggggctaacttagtaccggatgcccacgataaatccaagcgccatgcgccaattatgttcactagcgatatcgcgctgaaggaagatccaagctatcgcgaaatcactacccgtttccttaaaaatccaaaagagtttgagcttgcctttgctaaggcgtggtttaagcttactcaccgcgatatgggacccaaggcaagatacttaggtgccgatgtaccagcagaaatgttgatttggcaggatccgatcccagcccttgatcacccagtaatcgataacgccgatattaaagccttaggtaacaaaatcttggcttctggcttaacggtccccgaattagtgagaaccgcatgggcgtcggccagcagcttccgcggtaccgatatgcgtggtggcgcaaacggcgcgcgcattcgtttagagcctatgatgaactggcaggcgaacaatcctaaagagttagctaaggtgctggctaaattggagaaagttcaaaaggacttcaacggttcactgaaaggtggcaagaaggtttctttggccgatgtgattgttctcggtggtagcgtggcggtcgaaaaggctgcgaaagaggcgggtgtgactgtttctgtgccatttactccaggacgtatggatgcgactcaggcgcaaaccgatgtgtcatccttcgcggtacttgagccaacggccgatggtttccgtaactattattcgaaggacagcagccattctcccgccgagatgctgattgaacgtgcgaacatgctcaatctgaccgtgccggaaatgactgtgctggtgggtggtctgcgtgccttagacgccaacagcgcaggcgtgaaacacggggtgtttaccgacaaacctggcaccttaagcaatgacttcttcgttaacttgctcgatatgtcgaccaagtggagcaagtcagagaagcaagaaggcatctacgaagggcaagatcgtaagagcggtaaactgaaatggaccgcgacccccgtagatttagtctttggttcgcactcagagctgcgcgccgtgtctgaagtgtacggcgcccaagatggacaagacagattcgtgcaagactttatcaaagcctggaataaggtgatgaacgccgatcgcttcgatatctaag

SEQ ID NO: 211100 - DNA, 1430 bp, Unknown
  Bacterial polypeptide expressing nucleotide sequence isolated from the Sargasso Sea
cgcccatgatataagagaaacttttggaagaatggctatgaatgattatgagactgtagcattgatagctggaggacatacatttggtaaatgtcacggtgccggagatgatggtcttgtcggtgtaggcccagaagatgctccaatggaacaacaacaatttggttggaagagtggttttggaaaagggatgggaagagatgcaataactagtggacttgaaggaccttggacaaaaaatcctgcacaatgggataatggctatttcgaaaatctttttaaatatgagtatgaattagttaaaagtcctgctggagcttatcaatggcatcccattgaccttgaagaagaaaatcatgccccagatgtagaagatccaaatctaaaagtaacgaccataatgttaacctcagacttggcacttagagaagatccagaatacagaaaagtctcacttcattttaaagataatccagatgaatttgctgatgcttttgccagagcttggttcaaattacttcacagagatatgggtccaaaaaatagatacctagggcctgaagtacccaaagaagatttgatctggcaagatccagtgcctgctgggaatgctgattatgatattgcgaaagcaaaagaattaatcagtggttgtgatctttcaattcaagaaatggttgaagtagcatgggcaagtgcatctacatttagaaattcagatctaagaggtggtgctaacggtgctcgaataagatttgagccaatgaaaagctggcagtcaaacgacaaagatttgttagataaagcattagatttatacacaaatatcgctgaacaagttaatgcatctgttgcagatataattgttcttgctggaaatgtagctatagaaaatgcatcaggcgttgaagtgccattcttagctggaagaggagacgcaacggaagaacaaactgatgctgagtcctttaaagtgcttgagcctctggcagatggttttagaaattatcaaaaaactgaatattctgttagtccagaagaaatgttggtcgataaatcacaacttcttggattaactgcgcctgaaatgacagtgcttgtaggtggtatgaggtcactaggaataactaaagataacttgggaaatttttctgaggataacagtaaattagataatgagtttttcaaaaaacttctagatatgaatgtttcttggagaccaaatggtaacaatgcctatgagggagtagataaaacttctggagaagtagtaagaactgcttcacgtgttgatttagtgtttggttcaaattcacaattaagatcattagcagaagtctatgcttcagatgacgcaaataacaaatttgttaaagactttattgctgcgtggaataaagttatgaatgcagatagatttgatgtctaaa

SEQ ID NO: 211101 - DNA, 1705 bp, Unknown
  Bacterial polypeptide expressing nucleotide sequence isolated from the Sargasso Sea
tatggaaaccaaaattagttgggcagacttaataatactagctggtaacatagcaattgaatcaatgggtggaaaaacttttggctttagtggtggtcgacctgatatttgggctcctgagcaagatatatattggggacttgaaacagaatggttaacaaataaaagatattctggtgaccgtgtattagaaaaccctttagcggccgtacaaatgggattaatttatgtaaacccagaaggtcctgatggaaaccctgatccacttgcaagcgcaagggatattcgagaaacattcggtcgtatggcaatgaatgatgaagagacagttgctcttacagcaggtggtcatacttttggtaaggcgcacggcgcaggagatgctggtcttgttgggccagaacctgagggagcaccattagaagaaatgggatttggttggattagcaaacatgcttcaggcaaaggcagtgattctattacaagtggaattgaaggtgcttggacaactaatccaactaaatgggacaatggttattttgacttactgcttggctatgattggaaattaaccaaaagtccagcaggtgctaatatttggcacgcagtagatcaaaaggaagagcatatggctcctgatgcagaagatgcatcaaaaaaagtgccaactatgatgacaactgctgatatggcaatgcgtgaagatccagagtatagaaaaatctctgagcattttcataaaaatcctgatcagtttcaagatgcttttgcgcgtgcttggtttaaattacttcaccgtgatatgggacctaagactcgttacatggggccagaagctcctgcggaagatcttatttggcaagaccccattccagcaggaagtagtaattatgatgtagatggtgctaaaagcaaaattgcaaatagtggattgactattcaagaaatggttgaaacagcttgggcaagtgcttcaacataccgacacaccgatatgcgaggtggcgcaaatggtgctcgcattagattagagccacaaagaagttgggaagtaaacaagccagatcaattaaataaagttctaagcattttagaaggtatagcttctgaaactggcgcaagtatagctgatataattgttcttgcaggtaatgtaggtattgaaaaagcttctgggaaaaatgttccttttacacctggaagaggtgatgcaactcaagaacatacagatgttgagtcgtttgctgttctagaacctgaagcagatggatttagaaactatctgaaaaaaaacttcactgtaacaccagaagagtttttattagatagagcacatcttcttgaactaactgcacctgaaatgaccgtacttataggtggaatgagagctcttggtatcagttcagatgaccgtggtattttctcagaaaatcaagaaaggctcgataataacttttttaccactcttcttgatatgtcagtcaaatgggaagcaactggaagtaattcttatcaagctaccgatcgtaaatctggtaaaaaagtaagaagagcatcaagagcagatcttgtttttgggtcaaactcgcaattaagagcattagcagaagtctacgcacaatctgataatcatgataaatttgtaaacgactttatcagcgcatggaacaaagttatgaacgctgatcgttttgatgtaaattaa

SEQ ID NO: 211102 - DNA, 859 bp, Unknown
  Bacterial polypeptide expressing nucleotide sequence isolated from the Sargasso Sea
agatataaaaaatttaaaatctaaagttctaaaatctaaaataactgtttcgggtctagtttctacagcttgggcatctgcctcaacatatagaggttccgataaaagaggtggtgcaaatggtgcaagaatattattagagccacaaaagagctggaaagttaataatccaaaacaacttagaaaagttattaaatctcttcaaaaaattaagaaatcatttgatacaaaaaataaatcagtatcaatggcagaccttattgtattaggtggaaatgttggaatagaaattgctgcaaaaagagcaggtcataaagttaatgttccatttttacctggtagaggagatgcaagacaaaaccaaactgatattcactcatttggattattagaaccacaagccgatggtttcagaaattatcaaaaaaatgtaaaatcaaatgtttctgcagaggagaaattagtcgataaagctcaattaatgcaactaacagcacctgaaatgacagttcttattggtggaatgagagttttagatactaattatgataaatctaaaaatggagtttttacaaaaaatccaggtactctgtcgactgattattttgttaatttgcttgatatgaatactacttggaaagaaaccgacaaatctgagcaatattttattggtaaagatagaaaatccaataaaaatatatggaagggatcaagagtagatctgatttttggttcaaattcccaattgagagctctagcagaagtttatgcttgtaaagattcttctcaaaaatttgtaaaagattttgtttctgcttggacaaaagttatgaatttagatcgttttgatcttaattaa

SEQ ID NO: 211103 - DNA, 1669 bp, Unknown
  Bacterial polypeptide expressing nucleotide sequence isolated from the Sargasso Sea
gaaaatttcatgggcagatttatttattttagttggaaatgttgcgctcgagtctatgggtttcaaaacttttggatttggtgcaggtagagacgatatttgggaacccgaagaagatatttattggggttccgagaaagagtggctaggagtaaatcgttatagtggtaatagagaattagaaaatccattaggagcttctcatatgggtttaatttacgtgaatccacaaggtcctgatgcaaaccctgatccattgcttgcggctcatgacattagagaaacttttggcagaatggctatgaatgattatgagacagtagctttagttgcaggaggtcatacatttggaaaatcacatggtgctgcaccagaatctcataaaggtccagagccagaaggttctaaaattcaatatcaatctacaggatggaatagtgactacggaagtggaaaagctgaagatacaataagtagcggtatcgaaggagcttggacatctaatccaattaaatgggatatgggttattttgaaaatctatttaattatgattgggaattaacaaaaagtccagcaggcgctcatcaatggaagccaaagcaaaatggtcatgctatatcaactactccagatgcgcatgtaaaatctaaaaaaaatcttccaatgatgcaaactacagatctgtctttaaaactagatccaaaatatggtcctatatctagacatttccataataatcctaaagagtttgcagatgcctttgctagagcatggtttaaacttacacatagagatatgggtcctaaagttaactacttaggaagcgaagtgccaaaagaagatctgatttggcaagaccctatacctaaaaataaatttaaaattaagaacaaagatattgatttacttaaaaataaaattgctaaatctggtctatctgtttcgcagttagtaacaacagcatgggcttcagcagcctcatttagaggatcagacaaaagaggtggagcaaatggtgcaagaatacgtctagcacctcaaaaagattggaaagtaaacaatccttcgcagctttcaaaagtaattaaagttttagaaaaaataaaaaaatcttttgatagcaagaaaaagcaagtgtcattggctgatttgattgttttagcgggtggtgttggaattgagaaagcagcaaaagatgtagggaaaaaaatcaaagtcccattctcacaaggacgtggtgatgcttctcaagatcaaacggatattcattcatttggattattagaaccaaaagcagatgctttcagaaactatacggatgcagatcattctgaaattgctgaggaaatgttaattgacaaagcacaattaatgaatcttactggccctgaaatgaccgtcttgattggtggtatgagagttttgggtgccaattatgataattcaaaacacggagtatttacaaaaaaagtaggaaaattgtccaacgacttttttgtaaatcttcttgatatggatactgaatggaaagaggtctcaccaaaagaagaccttttcgaaggtaaagacagaaaaacaggaaaagttaagtggacagctactagatctgacttaatttttggatcaaattctcaattaagagcttttgccgaagtttatgctgcgaag

SEQ ID NO: 211104 - DNA, 1892 bp, Unknown
  Bacterial polypeptide expressing nucleotide sequence isolated from the Sargasso Sea
cagaacaggtgatggtagagggggagctggaacaggtaatcaaaggtttgcaccgttaaatgcttggcctgataatgttaatctagataaagctagattacttttgtggccaataaaacagaaatatggaaaaagaatttcttgggcagatttatttatactagttggaaatgtagcattagagtcaatgggctttaaaacgttcggttttggagcgggaagaactgatatctgggaaccagaagatgatatttactggggttcagaaaaagaaatgttaggtgttaagagatacagcggaaaaagagatcttgaacaacctttgggggcttctcacatgggattaatttatgtaaatccacaaggtccagattttaatccagacccattgaaagcagcacatgatattagagaaacatttggacgaatggcaatgaatgattatgaaacagttgcactagttgctggtggtcatacttttggaaaatctcatggtgctgcacctgaatcacataaaggacctgatccagaagcatcaagaattcaagatcaagcaactggttggaatagtaactacaaatcaggaaaaggtgtacacgcaataagtagtggtattgaaggggcatggacacaaacaccaacacaatgggatatgggttactttgattgtttatttaaccatgaatgggaattgacaaaaggacctgctggagcatttcaatggactccaaaaaagaatggtcagagaattaaaatggttcctgatgctcatgataaaagtaaaatgcatcctccaatgatgcaaacaactgatttatctttgagaatggataaaagttatggaccaatttcaaaacatttttatcaaaatccagatgaatttgctgatgcatttgcaagagcttggtttaagcttactcatagagacatgggaccaagagcatgttatttgggtagcgaagtaccaaaagaacaattaatttggcaagatcctatagataaaccaaaatataaacttaaatcaaaagatataagagatttaaaatcaaagctttcaaaatcaaaaatctctgtttctgatttagtttctacggcttgggcttctgcttctacatacagaggttctgacaaaagaggtggagcaaacggagcaagaattatgcttgaacctcaaagaagttggaaagtcaataaccctaaaaaactttcaaaggttattaaagctttacaaaaaattaagaaaaaatttgataaaaataaaaaatcagtctcaatggcggatcttatagtattaggtggaaatgtaggaatagagatggcagcaaaaaaagctggtcataaaattcaggttccatttactcctggaagaggagatgcaagacaagaccaaacagatgtaaattcatttggattacttgagccgcaagcggatggttttagaaactacatgaaaaaaggtaaatctaatgtttcagctgaggaaaaattaattgataaggcacaattaatgggattaacggcaccagagatgacagttcttgtaggaggaatgagagttttagatacaaactatgatagttctaaaaatggagttttcacaaaaaaacctggaactctatcaacagattattttgtaaatcttcttgatatgagtaccacttggaaagaaactgacaaatctgaacaatattttgttggtaaggatagaaagtctaaaaaaactaagtggaaaggttcaagagttgaccttatttttggttcaaattctcaattaagagcattagccgaagtatatgcttgcaaagactcatcagacaaatttatcaaagactttgtatccacatgggtcaaagtgatgaatgcagatagatttgatttaagattaaattagt

SEQ ID NO: 211105 - DNA, 1578 bp, Unknown
  Bacterial polypeptide expressing nucleotide sequence isolated from the Sargasso Sea
ggcagaggtacttcgaatagagactggtggcctaatagtttaaatttaaaaattttaagccaacattcaaaccttgtaaaccctatgggtgaaaaatttaattattcaaaagaatttaaaaaacttaattttaaagcattaaaaaaagatctacttaaacttatgacagactctcaagattggtggcctgcagattatggtcattatgggccattatttataagattagcatggcatgcagcaggaacatacagaactggagatggaagaggaggagcaggaactggcaaccagagatttgcacctttaaatagttggccggacaatgttaatttagataaagcaagattattactttggcctataaaaaagaaatatggaaaaagaatatcttgggccgacctatttattttagttggaaatgttgctttagagtccatgggtttcaaaacttttggatttggtggaggaagagaagatatttgggaacctgaggaagatatttattggggatcagaaaaagagtggttaggagtaaatagatatagtgggaaaagagaacttgagaatcctttaggagcatctcatatgggattaatttatgtaaaccctcaaggtccagacgcgaacccagaccctcttttagcagcacacgatattagagaaacttttggtcgaatggctatgaacgattatgagactgttgctcttgtagcaggaggccacacttttggtaaatctcatggtgctgcaccagaatcacacaagggtcctgaaccagagggatcaaaaatacaagaacaagcgacaggttggaatagcaaatataaaagtggattgggcgttgacactatcagcagtggtattgaaggtgcctggactactaatccaataaagtgggatatgggatattttgaaaatttatttggttatgaatgggagttatcaaaaagtccagccggagctcatcagtggaagcctaaacaaaatggacatgatattgaaatgacacctgatgctcacgataaatcaaagaaaaatctgcctatgatgcaaacaacagatttatcattaaaattagacccaaaatatggtcctatttctagacattttcataaaaatccaaaagaatttgcagatgcatttgcaagagcttggtttaagcttactcatcgtgatatgggtccaagagcttgttatctaggtcccgatgttccaaaagaaaaattaatttggcaagatccaattacaaaacctaaatataaaattaagaaaaaagatataaaatctctaaaagcaaaaatattgaattcaggtttaacaatatctcaacttgttgcaacagcatgggcatctgcctcaactttccgagcgtcagataaaagaggtggagcaaatggagcaagaataagactagagccacaaaaaaactgggaagtaaatagcccaactaatttatcaaaagtattaaaaattttagaaaaaaataaaaaagaatttgataataagaaaaaaattgtttcacttgctgatttgatagttttaggtggtaatgcagctatagaaaagctgcaaaaa

SEQ ID NO: 211106 - DNA, 1303 bp, Unknown
  Bacterial polypeptide expressing nucleotide sequence isolated from the Sargasso Sea
agactggtggcctgcagactatggtcattatggtccattctttattagaatgacttggcatgctgcaggtacttacaggaataccgatggaaggggcggcggtggaactggtgcgcaacgttttgcaccattaaatagttggcctgataatggtaatcttgataaagcaagaaggcttttatggccaatcaagcagaaatatggaaagcagattagttgggccgatttaattattcttgcaggaaatgttgcaattgaatcaatgggcggaacaacttttggatatagtggtggaagaccagatatatggggccctgaagaagatattcattggggtgttgagtctgaatggctagaaaataaaagatataaaggtgaaagagaattagataaccctcttgcagcagttcaaatgggattaatttatgttaatccgcaaggaccagatggaaacccagatccattagcaagcgctcatgatattagagaaacatttggaagaatggcaatgaatgacgaagaaactgtagctttagttgctggtggtcatacttttggtaaatctcatggcgcaggggcagaagataatgttcaatctgaaccagaaggtgcaccaattgaagaaatgggttttggatggtcaagtaattatggttctggcatgggtagcgatactattactagtggtattgaaggtgcttggacggcaaatccaactcaatgggataatggatattttgatttattattaggctatgagtgggagcttacaaagagtcctgcaggggcacatatatggcatgcaattggtcaaacagaagaagatatggctcctgatgctgaggatgcatcaaagaaggtacctacaatgatgaccactgcggatatggctttaagagaagacccaagttataaggaaatttcaaaaagattccatgaaaatcctgatgaatttgctgatgcgtttgctagagcatggtttaaacttcttcatagagatatgggcccaaaaactagatatataggtccagaaattcctgaggaagaattaatttggcaggatccagtgccagcaggtaattctgaatacaatgttgaagaagtgaagaaaatgattgctgaatctggcttatcaattcaagaaatggttgaaacagcatgggcaagtgcatctacttttagagcttctgatatgcgaggtggtgcaaatggcgcaaggattagattagctccacaaaaagattgggaagcaaataatccaactaaattaagtaagattcttgatgtatatcagactattcaa

SEQ ID NO: 211107 - DNA, 961 bp, Unknown
  Bacterial polypeptide expressing nucleotide sequence isolated from the Sargasso Sea
agccattattcgaatgatgggtcagatacctctgacttcaaaacagattcataacagactaatagacttgggctttgatatatctgagagaactgttttaagggatatgcaaagcttgccagaacaatttcctgaaaggatatatgtcattgatcggatgaagccatatggctataaacttcctaaaggagtagcaaaagattcagcgatgagtccgacggaggcagtctgcttgcagcttgcaaaagactacctcaatccaattctcccgcccggtgcgcttgatccaattgcgccgtatttaaaggaagctgaaattattctgcaacaaaaacaaaccgatgcaaggttgaaaaactggaaaaagaaggttctgacgctcaatgaaggatttaaccttgagccagcaaatataagggaaggaatacttgagaaaatacaagcatcactttggcagggaaaagtgataaaggccttatacaaatctaaaactaaaacagaagcgagcagttatgttttgcatccttgcggtcttgtgtatcgtggcagggtctcatacttaatctgttctttcgaaaatagaacagaaaaattcacatatcttcctctgcatagatttgaatctgtcgaactcacaaccgagaagagcattcataaagacactgatgtcaaagaagttgcaggaaatataatgggctttgcaatgagtgatgaaaaaatttctattacattgaagttcagtagctttgcgggaggtcatttgattgaaacaccgatttctaagagccaaaaaattaaaaagacaaaagataattattatcttgtttccgatgaggtaattgatgattcagaactcagatggtggataagagcctttggtgatgaggtagaggtgattaaaccaaagtcactcagagatgagttcaaattgatggctaaacgaatggagaagaaatatgaa

SEQ ID NO: 211108 - DNA, 766 bp, Unknown
  Bacterial polypeptide expressing nucleotide sequence isolated from the Sargasso Sea
tgaaaaacagggttttgatattggccttggttttaaatattatgattatcgtaatagatttggttatagatttactagtagtaaaacaactactgatgaaagttttacaggaacttctatttctggagaagagggaattgaagtagaaacatcgttactcaattattcaatttcttctaatgacactgatagctttttaaatccaacagaaggtgtaaaaaaatctttaaaaatgtctgtggcaggtataggaggagactctaagtttctaaaaacagaagcttcttttaaagagtatattccatttaattatggtgattatgtatttagttatggtactaaacttggcactatatcttctttagatgatgaaaaagtcacgagttctaatagattttattttaattctaattctgtaagaggttttgatacaaatggaattggtcctagagacaatggaaatgataatggtgttggaggaaataatttttattcaggccaagttgaagttaaatcaacaaaacttattccaggagacttaggaattgatatatctattttttctgacattggatcgctctgggatacagattatcctattaatgtcaaaggtgtaaatgactctagtccaagagcatcagctggagtagcggtttattggaacactgctgtagggcctttaacctttatttggggttggccaattactgaagaaaattacgataaggataataattttaagttttcgatagggacctcattttag

SEQ ID NO: 211109 - DNA, 733 bp, Unknown
  Bacterial polypeptide expressing nucleotide sequence isolated from the Sargasso Sea
agtcccccagtgattatcggcaaaagtgcagacgtgcagcaggccgctcgcagcatcatggccggaaaaacactgaacgcagggcagatctgtctcgcacctgactacgtgttcgttccagaaggccaaaccgacgttttcgtcgaggcagcgagggactccgtcactaggatgtatgcgaatcttaaagacaatccggactacacatcgattgtgaatgagcgccactatgatcgacttgcagactatatagacgaagccagatcatcaggtgcagaggtggtggagcttaatcctgcagacgacgattttagtcagcagcaacatcatcgcattccaccgaccctgatacttaatccagaggatgacctacaagtcatgcaggaagaaatctttggtccgatcctaccagtaaagacctatagtgacgttgaggacccgataagattcattaatgagcgcgatcgcccactcgggctttactactttggtaaggattccaacgaggaggaaaccgtgctaaacaatacgacctcaggaggcgttaccgtaaacgacgtcattatgcacattgcccaggaagagctcccattcggcggtgtcggttcgagcggcatgggagcctaccatggccatgacggattcaagacatttagtcacggtaaggcagtctaccgacagtctaagctgatcgcgcgcctcgcggccttgatcgggccgccatataggtagt

SEQ ID NO: 211110 - DNA, 682 bp, Unknown
  Bacterial polypeptide expressing nucleotide sequence isolated from the Sargasso Sea
attgatcatcgaagacgacaccgccatcgcgaccaacctgtacgactatctggagagcggcggctatgaggtggacctcgcgtcagatggcgtgatgggactgcatctcgctgtcacccagcactgggatgcgatcctgctcgatctgtcgttaccggggatggacggcctgacgatctgccgcaagctgcgcgaagaggcgcgtcgcgatacgccgatcctgatgctgaccgcgagagatacgctggatgacaagctccagggttttggacaaggcgcggacgactacctcatcaaaccattctcactcaaggaagtaggcgcacggctcggcgcactgatcaagcgctataaaggcaatgtgacgcaggcgaccgtgtcctgtgcagacatccgcttcgatccagcgacgctcgccgtcgaccgtggcggccggccggtgaagctgccaccaaaatgcctgcatctgttgcgcatcctgatgcaggcgccgaatcgcgtattcggtcgcgcggaactcgaaaccgaagtctggggcgagcagttgccggacagcgatacccttcgcgcgcacatctatacgctacgccgcgcgctgaccgccaatggcgaggacgatctgatcgaaacggtccatggtctcggctaccggctggtggtgagcgatgcaaccacgccgtag

SEQ ID NO: 211111 - DNA, 212 bp, Unknown
  Bacterial polypeptide expressing nucleotide sequence isolated from the Sargasso Sea
aatgtctgattacatacaaacggctcttgttacgggcgctggaaacggaattggccgtgctacagcaatagctttggctaagtcgggtcgaaaagtaagctgtgccgatattaaaatggatgacgcgcaacgaactgctgatgcgataatgcagcaagggggaactgcgcatgcggtaagtgcagatgtggggtcaatctctgaaattgagg

SEQ ID NO: 211112 - DNA, 487 bp, Unknown
  Bacterial polypeptide expressing nucleotide sequence isolated from the Sargasso Sea
gatgacatcgactatctatagccatagcgcaaacgacattcaaggcaatccaacggcactagcgcagtatcaaggcaaagtgatcttaattgtgaataccgccagtgaatgcggttttacaccacagtacaagggcttagaagcgctctatcaaaaatataaagcgcagggattggtggttttaggcttcccatgcaatcagtttggcgcccaagaaaaagccgatgagaaaggcatccaaagtttttgtgaactcaactttggcgtgagttttccgctgttttcgaaaatcgaggtaaacggtgagcacactcaccctttataccagtacctcaaaaaagccgcgccaggcgtattaggcacagaacgcattaagtggaatttcactaaattcttaatcaatcgtcagggcgaagtggtcgctcgctttgcaccaaccacaaaaccagaggccattagtgacaagatagaagcgcttttaaaataa

SEQ ID NO: 211113 - DNA, 490 bp, Unknown
  Bacterial polypeptide expressing nucleotide sequence isolated from the Sargasso Sea
atgtccaccagcatctacgactttgaagccctgcagatgaacggccaggccgtgcctctgtcgcaataccgcggcaaggtattgctcatcgtgaacaccgccagcgcctgcggcttcacgccccagttcggcgggctggaagaactgcacaaggaatacgcagaccaaggcctcgtcgtgctgggtttcccctgcaaccagttcggcgcccaggaccccggcagcaacgacgagatcgccagcttctgccagctcaactacggcgtgagctttccgatgatggccaagatcgacgtgaacggcgccaacgcatcgcccctgtaccaatggctcaccgccgaggccccgggcctgctgggcagcaaggccatcaagtggaacttcaccaagttcctcgtcggcaaggacggccaggtgatccgtcgctatgcgccgcaggatgcaccgaagaagctggcgggggatattgaggcggcgctggccacctgaa

SEQ ID NO: 211114 - DNA, 487 bp, Unknown
  Bacterial polypeptide expressing nucleotide sequence isolated from the Sargasso Sea
atgagcaatgcgcttttcgatattccggtcaccaccatcaagggcgagcagaaaaccctggcggacttcggcggcaaagccgtgctggtggtcaacaccgccagcaagtgtggcttcactccccagtacaagggcctggaaagcatctggcagcagtacaaggacaagggcctggtggtgcttggcttcccctgcaaccagttcggcaagcaggagccgggtgacgaaggggcgatctccgagttctgcgagctgaacttcggtgtcagcttcccgctgttcaagaaggtcgacgtcaatggcagtgatgcgcatccgctgttcgtgcagttgaagaagcgtgcgccgggcctgctcggcagccagggcatcaaatggaacttcaccaagttcctgattggtgaggatggccaggtggtcaagcgtttcgccccgaccaccaagccggaagagctgggcagcgagatcgaagcgctgttgcaatgag

SEQ ID NO: 211115 - DNA, 484 bp, Unknown
  Bacterial polypeptide expressing nucleotide sequence isolated from the Sargasso Sea
aatgagcacctttcatcaacttaccgccaccagcctgaatggtcagcttatttcaatggccgactatgcaggcaaactggtactggtggttaataccgccagccattgtggctttacgccacaatatgcgggccttgaagcactgtataagaaatacgacacacagggcctggtggtgcttggtttcccctgcaaccagtttggtaagcaggaacccggtggggcggacgaaatcgcgcagacctgctacgtcaactacggcgtgagttttccaatgtttgagaaagtggaggttaacggtgccgctacacacccggtatttcgttacctgaaagatgaattacccggcatactgggtgggaggatcaagtggaacttcactaaatttctggtcggacgcgacggaaaaccgcttaagcgttttgcccccttcaccactccagaaaaaatagaaaccgtcatccttgatgcactaaaaatctaa

SEQ ID NO: 211116 - DNA, 496 bp, Unknown
  Bacterial polypeptide expressing nucleotide sequence isolated from the Sargasso Sea
aggcggttgcccaccaagtgaaaagaacattgtcggtactttgatgtacttcatcatgttcggcaaattacctgcactggatatgttcaatcgtccaaaatgggcttatggcgcacgggtacatgataactgtgaacgtcgtggccgttttgatgccggtgaattcgttgaagaatttggcgatcacggtgcaaaagaaggctactgcctctataaagtgggctgtaaaggaccttatacctataacaactgccccactgaacgcttcaatcaccataccagttggcctgtgttagctggtcatggttgtatgggctgctcagaacctaatttctgggatgatatggctgactttgagaaaccccttggtcgtcaactgctccatggattggatgcaaccgcagacaccgtcggtgcggtgattttaggcgcgacagtcgttggcattggagcccacgctgttgccagtatttttgccaagccgctggaggaataa

SEQ ID NO: 211117 - DNA, 493 bp, Unknown
  Bacterial polypeptide expressing nucleotide sequence isolated from the Sargasso Sea
ggttgcccaccaagtgaaaagaacattgtcggtactttgatgtacttcatcatgttcggcaaattacctgcactggatatgttcaatcgtccaaaatgggcttatggcgcacgggtacatgataactgtgaacgtcgtggccgttttgatgccggtgaattcgttgaagaatttggcgatcacggtgcaaaagaaggctactgcctctataaagtgggctgtaaaggaccttatacctataacaactgccccactgaacgcttcaatcaccataccagttggcctgtgttagctggtcatggttgtatgggctgctcagaacctaatttctgggatgatatggctgactttgagaaaccccttggtcgtcaactgctccatggattggatgcaaccgcagacaccgtcggtgcggtgattttaggcgcgacagtcgttggcattggagcccacgctgttgccagtatttttgccaagccgctggaggaataac

SEQ ID NO: 211118 - DNA, 1138 bp, Unknown
  Bacterial polypeptide expressing nucleotide sequence isolated from the Sargasso Sea
catggacacacatgcagccctctatgaacagggaaaggcgcgcttagatgcgttgcgccaactcgctccccgtcaacagctctctcttgtcgaaaaaatgcaacaacatggcatcacccgtcgtgatttcatgaaatggagcgccatggtgacgggcatgcttgccctgccattgccatttagtaatttagtcgccgaagccgccgagctggccgaccgtgtacccttaatctggttacatatggccgagtgtactggctgctccgagtccttagtccgcgccgatacgccgaacttagattcgctgatcttcgatcatatctcgttggaatatcacgaaaccttaatggccgccgcgggttggcaagcagaggaaaacctcgagcatgccctcgaaacctacaaaggccgttatctactggccgttgaaggtgcggttccgaccgccaataacggcagcttcttaaccgtaggctgtaaaggccatacgggcttagaaatcatcaagcatgccgccgatggcgctgccgcgattatttctgtcggtacctgcgcctccttcggtggtgtgcaagccgcctaccccaaccctacaggggcaaaaggtgtacacgaagtggtgagcaagccggtgatcaacttaggcggctgtccaccgagtgagaaaaacatcgtcggcactctgatgtatttcattatgttcggcaaattgccagcgctggatatgttcaatcgtcctaaatgggcctacggcgcacgggtacacgataactgtgaacgtcgcggccgcttcgatgccggtgaattcgttgaagagtttggcgatcacggcgcaaaagagggctactgcctctacaaagtgggttgtaaaggaccttatacctataacaactgccccaccgaacgctttaaccatcacaccagctggccagtgttagcaggccacggttgtatgggctgctcagaacctaacttctgggatgacatggccgattttgagaaaccccttggtcgtcaactcctccatggattggatgcgaccgcagacaccgtcggtgcggtgattttaggcgcgactgtcgtcggcattggagcccacgccgttgccagtatttttgccaagccgctggaggaataa

SEQ ID NO: 211119 - DNA, 589 bp, Unknown
  Bacterial polypeptide expressing nucleotide sequence isolated from the Sargasso Sea
aaaggccatgcgatggaggtgggaccgctggctcgcgtgctaatgatgtatgctaaaaaagatgccgctgcgcaagacatcgttaatcgatctctttctatcttggatttagagacctctgcacttttctccacactcggtaggacgctcgccagagcagtggaaacaaaaattgtggttaaccagctacagtcttggtatgaccaactattggataatatcgcaaagggcgataccgatacgtttaaccctctgtattttgaccctaccaattggccaattaaaggccagggggtaggcgtgatggaagcgcctcgtggcgcgttggggcattggttggtcatgcaaaatggcaaaattgagaattaccaatgtgtcgtgcctacgacatggaacgctggacctcgagatcccaactcacaggcaggtgcttatgaagccgctctgcaagataaacatacgctacatgatcctgaccaacctttagagattttgcgaacacttcatagttttgacccctgcttagcatgtgccgtgcacgtaatggacgaaacaggggaagagcgtttgcgtctaaaagttcgttaac

SEQ ID NO: 211120 - DNA, 649 bp, Unknown
  Bacterial polypeptide expressing nucleotide sequence isolated from the Sargasso Sea
atggctatccctcaaaatgcacaagtgataagaaacatcatgattgcaacccaatatgtgcatgatcacgtgatgcatttttatcacttgcatgccctagattgggttgacgttgtttctgcactagatgcagatccaacgagaaccgctacgctcgccggtcaattgagtgattatcctcgttcatcgccgggatatttcaaagatgtgaagcaaaaagtcaaaacgctggttgagtctgggcagctagggatattcagtaacgcgtattgggggcatcctggctataaactgccacctgaagttaacttgatggcattagcacattatttagatgcgctaacgtggcagcgtgaagttgtaaaagttcacaccatatttggagggaaaaaccctcatcctaattttgtcgttggcggcgtgccttcaccgattaatctcaatgcgtcaacgggtattaacacgagtcgattagtgcaactacaagatgctatcacgcaaatgaagagctttgtcgatcaggtgtattaccccgatattgtggcgattgcgggttattacaaagagtgggggacacgaggggaagggctgggtaactttcttacctatggagacttacctatgacatcaatggatgaccctgattctt

SEQ ID NO: 211121 - DNA, 903 bp, Unknown
  Bacterial polypeptide expressing nucleotide sequence isolated from the Sargasso Sea
cattcgcaatattatgctggcgacgctgtggtgccacgaccatctggtgcacttttaccagttagccggaatggattggattgacgtgctgaatgccctgaaagcagacccgcgcgccacatcacagctggcgcaaagcctttctgcctggccgaagtcctcccctggctacttttttgacgtccaaaatcgcctgaaaaaatttgtcgacggcggtcaactggggattttccgcaacggttattggggtcatccgcagtacaaactgtcgcctgaggctaacctgatgggctttgcccattatctggaagcactcgattttcagcgcgagatcatcaaaatccatacggtgtttggcggtaagaacccgcaccctaactggattgtcggcggtatgccgtgcgcgattaatatcgatcagcgcggcgcggttggcgcagtcgatatggaacgcctgaacctggtgcagtcgatcatcacccgcaccgctgatttcatcaacaacgtcatggtgcctgacgcgctggctatcggccagttcaacaagtcctggagccagattggcaccgggctttctgataagtgcgtcttgagctacggcgcgttcccggatatcgccaatgacttcagcgcgaagagcctgttgatgccaggcggcgcggtgattaacggtgattttaaaaacgtgctgccagtggatctggccgatcagcagcaaattcaggagtttgtcgatcatgcctggtaccgttatccggacgatcaattaggtcgtcacccgttcgaagggattactgaaccctggtataacccgggcgatgtcaaaggcagcgatattgatatcaaacagctcaacgaacaggaacgctattcgtggattaaagccccgcgctggcgcggaca

SEQ ID NO: 211122 - DNA, 1135 bp, Unknown
  Bacterial polypeptide expressing nucleotide sequence isolated from the Sargasso Sea
atggtcgaggatacttttttatcggctcatggaattaatcgccgtgacttcatgaaactgtgcgccgggatggccgcaacccttggattaagccagcatgccgtggccaagatggctactgcgctcaccagccccgagcggccaccggtgatctggataggggcgcaggagtgtaccggttgcaccgaatcgctgctgcgcgccacccaccccaccatcgagaacctgatcctcaacaccatttcgctggagtaccacgaggtgctctcggcggccttcggccatcaggccgaagagaacaagcacaatgccatcgaacgctacaagggtaagtatgtgctggtggtggatggttccatcccgcttaaagatggcggcatctactgcatggtggccggtgaacccatcgtcgaccatattcgccgcgcggctgccgatgcggctgccgtcatcgccatcggctcctgcgccgcctggggcggggtgcccgccagcggtggcaacccgaccggcgccgtcagcctggaggaggccctcggcaatatcggcacccccatcatcaatattccgggttgcccgcccaacccccacaacttcctcaccacggtcgcttactacatcacctacggcaagctgccggcactggatgccaagaagcggccgctgtttgcctatgagcggctcatccacgaaaactgcgagcgccgtccgcacttcgatgccggccgcttcgccaaggagtttggcgacgagggccaccggcagggctggtgtctctaccatcttggctgcaaggggccggagacctacggcaactgctcgaccctggagttctgcgacgtgggtggcggcatctggccggtgggtatcggccatccctgctacggctgcaacgaacagggagtgggtttcagcaaggggattttccagctcgccaaggtggagaatcccaccccgcgggtgaacaagcccgatgtggccatccaggagggaggacacatgtcgcccaccgccaccggccttatcggtggggcgctcggggtgctggtcggggtgagtctgatgacggtgcgcgagctcggtcgccagcagaagcgccatgaagccgggcagcactcatcacgggaggagtgac

SEQ ID NO: 211123 - DNA, 727 bp, Unknown
  Bacterial polypeptide expressing nucleotide sequence isolated from the Sargasso Sea
tatgaatacgaataacgaggagaccttttatcaggcgatgcgccgcaagggcgtgagcaggcgcagttttcttaaatattgtagcctcgcggcaacatcgctagggttgggagccggaatgacgcccagaatcgcctgggcgctggaaaacaaaccccggatcccggtcgtctggatccacggtctggaatgcacctgctgtaccgaatcatttatccgctcctctcacccactcgccaaagacgtcatcctctctctgatttcccttgattacgacgacacactgatggccgccgccggaacacaggccgaagaggtctttgaagacattctaagccgctaccacggccgatacattctggccgtcgaaggtaatcctccgctgggagaacaagggatgttctgcattagtggcgggcgaccgtttattgaaaagcttaaaagagccgccgccggtgccagcgcgattatcgcctggggcacctgcgcctcctggggctgcgtgcaggctgcccggcctaacccaactcaggcaacaccgatcgataaagtgattaccgataagcctatcgtgaaagtgcccggttgcccgccgattccagacgtcatgagcgccatcattacctacatggtgacctttggaaggctgccggaactcgatcgtctggggcgtccgctgatgttttatggtcagcgtattcatgacaaatgctaccgccgcgcccac

SEQ ID NO: 211124 - DNA, 928 bp, Unknown
  Bacterial polypeptide expressing nucleotide sequence isolated from the Sargasso Sea
actgcctattattaccgcaccacaatgtgggtttcagcctgtcgcttttcgtggtttggaaacaggtaacagagaaagtgtcagttatgtattgaaccaagataggatcaatttggtaataacatcaccattagaaaaaaatactgaaattggtgcccacattgaccgtcatggtgacgggatgaaggatgtggcgtttactgttaatgatgctgaatcagcctggaagacatctatccagcgtggtgcagaaagcgcctttgaaccacaagagattaaagatgataatggcgaagctgttatttctgccatccacacatttggtgatacgatacattcttttgtagaaagagaaaactataaaggggctttccttccgggatttgaaacaaacgattttggggttataacacaatctacagggttagttcatatagatcatattgttggtaatcagccggatggtgagatgaagtcggtttgcgatttttatgaaaaagtattcggttggcaccgtttctggagcgtggatgataaagatatcaataccgagtattctgcattaagatcaatcgtcatggctaatgataatgaaattgtaaaaatgccgattaatgaacctgcagatggtttgaaaaaatcccagattcaggaattcattgattattatgaaacgggcggcatacagcacatcgcactctctacaaaagacattattgctacagtacgtatgatgaggaacaacggtgttgattttttacccacacccaaatcttactatgaaaatctcacaaatcgcataggcaagatcgaagaagatatttctgtcttagcagaattaggcattctggtggataaggatgaaaatggatatatgcttcaaatttttacacagccactgcaagatagacccaccatgtttttttga

SEQ ID NO: 211125 - DNA, 811 bp, Unknown
  Bacterial polypeptide expressing nucleotide sequence isolated from the Sargasso Sea
atgaataactataaaatcaaagcctttgaccactgcgagctctatgtagggaatgcaaaacaatcggcacattattatgagcacgctcttggttttgaacctattagttataaagggcttgaaacaggcagccgcgaaaaagtcagttatgtaatgagacaaaatcaggtctattttgtattaagctcccccttgattccaggaacagaaatagggcagcacattgacaagcacggtgatggggtaaaagatgtttctttcttagttgacaatgcagaaaaggcatgggaagaaacaaccaatcgaggtgcagagagtgttagcaagcctaagttggttgaagatgataaaggaggggctgttattgcaaccataaaaacatatggggacactactcatacctttgttcaaagaaatgattacaatggtaattttctccctgggttcgaagatttaaaaataaaaaattcaggtaaaaacactggcctagttcatattgatcatgtagtgggaaaccagccagatggcattatgcaacctgtatgtgatttttatgaaaaggtttttggctggcatcgattttggtctatagatgataatgacctctctacaaaatacagttctctaagatctatagttatggccaacgataatgaaaaaataaagatgcccattaacgaaccagctaaaggactaaaaaaatcccaaattcaagaatttgttgattactataatggtgcagggattcagcatgtcgcaatgtccacaaaagatataatcaaaacagttaaaaaattgagatctaatggtg

SEQ ID NO: 211126 - DNA, 646 bp, Unknown
  Bacterial polypeptide expressing nucleotide sequence isolated from the Sargasso Sea
gttcgaagatataaaattaaaaaactcaggtaaaaacaccggcctagttcatattgatcatgtagtgggaaaccagccagatggcattatgcaacctgtatgtgatttttatgaaaaggtttttggctggcaccgattttggtctgtagatgataatgatctctcaacaaaatacagctctctaagatctatagttatggccaacgataatgaaaaaataaagatgcccattaacgaaccagctaaaggactaaaaaaatcccaaattcaagaatttgttgattactataatggtgcagggattcagcatgtcgcaatgtccacaaaagatataatcaaaacagttaaaaaattaagatctaatggtgtcgaattcttgccaacaccccaatcatattatgatacactattagatagggttggggatttaaaagaagatataaatctactttctgagcttggcattctagtggattcagatgagaatggatatatgctccagatttttactaagccaatacaagataggcctacccttttttatgaaattatacagcgaaaaggttctaacagctttgggaaaggtaactttaaagcattgtttgaatcaattgagcgggagcagatgcttcgaggtaacctttaa

SEQ ID NO: 211127 - DNA, 751 bp, Unknown
  Bacterial polypeptide expressing nucleotide sequence isolated from the Sargasso Sea
ggtgcagaaagtattaaaaaacctgaattattgtcagatgataaaggggaaacaataatttccacaataaaagcctttggtgatacaaatcatacatttgtacaaagaaataattataatggtgtttttcttccagaatttattgtatttgaaaataatttaaatgctgatcccacaggacttgttcatattgatcatgtagttggaaaccaaccaaatggagagatgaaatctgtatgtgatttttatgaaaaagtatttggctggcatcgattttggacggttgatgataaagatatatctacgaaattttcagctttaagatccatagttatggcaaatgataatgaaaaaataaaaatacctataaatgaacctgctgatggattaagaaaatcacaaatacaggagtttattgattactataatagttcaggaattcaacatattgcaatgtcaactaaagatataatcaatactgtttcaaaactacgagataagggtgtagaatttttagaaacacccaaatcctattacgaatctttaactgatcgtattggtgaaatagatgaagatttagatcgaattaaagatttaggaattttggtagataaagatgaaaatggatatatgctccaaattttcacaaaaccaatacaagataggcctacattattttatgaaataattcagagaaaaggttcgaatagttttgggaaaggaaattttaaagctctttttgaatctatag

SEQ ID NO: 211128 - DNA, 688 bp, Unknown
  Bacterial polypeptide expressing nucleotide sequence isolated from the Sargasso Sea
tatgaaaacaaattcatattcaattgaagggtttaaccacgtcgaattatatgtcagtaatgcaaaacaaactgcctatttttatcaaaaaactatgggatttaaaccaatagcttatcgaggactagaaacaggaagtagagatcgagttagttatgttttgaatcaaaatcatataactttagttattacatcgccacttactcaatctacagaaattggagctcacattgatcttcatggggatggtgtaaaagatgttgctttcacagttgataattcagaatctgcctgggaaacatccgtagaaagaggtgcaattagcgtattagaacctcaaaaaattgaagattctcatggtgaagcaataatatcaagtatagaaacttttggagatactgtacattcttttattgagaaaaaagactataatggattatttttaccggggtttaaatcttatgtgggaaacttaaattcaacatccacaggattaattcacattgatcatattgttggaaatcaaccagatggagaaatgaatacagtttgtgagttctacaaaaacatttttggatggcatcgtttttggagtgttgatgataaagatataaatacaaaatattcggctttgcgatcaatcgtgatggcaaatcaaaatgaagttgtaaaaatgccaataacgagc

SEQ ID NO: 211129 - DNA, 622 bp, Unknown
  Bacterial polypeptide expressing nucleotide sequence isolated from the Sargasso Sea
attggctgatccaacaggcatcgtacacattgatcatgttgtaggtaaccaaccagaaggtgaaatgaatagcgtttgtaatttttatgaaaaggtctttgggtggcatcgattttggtcagtagatgataaagacgtgtcaacaaagtacagcgcattaaaatcaatagttatggcaaatgataatgaaaaaataaaaatgcctattaatgaaccagctaaaggtttaaaaaagtctcaaattcaagagtttattgaattttatgatggtcccggtattcaacatattgctatgtctacgaaaaatataatagaaacagtaaaaaaactgaaagcaaatggggtagaatttttaccaacacctaaatcttattatgatgatcttaaaaagagaataaaaggtttagatgaagatattgacacattatcagaactcgggattttaatggattcagacgataatggttacatgctgcaaatttttactcgtcccattcaagacaggccaacccttttttatgaaatcattcagaggaaaggctcacaaagttttggtaaaggaaatttcaaagcattgtttgagtccatagaaagagatcaacttaaaaggggtaacttataa

SEQ ID NO: 211130 - DNA, 679 bp, Unknown
  Bacterial polypeptide expressing nucleotide sequence isolated from the Sargasso Sea
atgagtgaagatccagttccacttaaagccgtacatcacgttgagttttatgtgggtaatgcaaagcaggctgcctactattacagaaaggcatttgggtatgatcaaattgcttactctggtttagagactggagatagagaaaaagctagctatgttctaggacagggaagaattagaatggttttttctacaccgctaaatggaaataatgaattagctgagcacattcgaaagcatggtgatggagtaaaagatatcgcatttcatgtagacgatgctaaagcatgctacgaagcttgtgtagcccgtggagctaaaagtgcaagaacgcctgaaacatttagcgataaaaatggtagtataacaaaagcttcaattttcacttatggagaaactgtacactcttttatctcatacgatgattacgacgggccttttctgcctggatttatagatagtaaaattgaaggtgacaatgttggactaaaattcatagatcacattgttggaaatgtagaattaggtaaaatggaacattgggttaatttttatgccgatatcatgggtttctcgcaaattcaagaatttagtgacgatgatatttccactgaatattctgcactcatgtcaaaagtgatggaaagtgataacggtagaattaaatttcctataaatg

SEQ ID NO: 211131 - DNA, 811 bp, Unknown
  Bacterial polypeptide expressing nucleotide sequence isolated from the Sargasso Sea
tatgaaaaatataccatattctattaagggctttgaccactgcgagctttacgtagggaatgcaaaacagacagcttattactatcagagcactatgggttttaaaccggttgcataccggggcctcgaaactggtattcgtgacaaagtaagttatgttcttaatcaaggccatattaatctagtgatcacatcaccattagaaaaaaacactgagatcggtcaacatattgaccgtcatggagatggtattaaggacgtggcatttactgttaatgattctgataaagcttggaagacatcaattgagcggggagcagaaagtgctatggaacccaaagagattaaggatgaaaatggcgaaacagtcctttcagcaattaagacctttggtgatacaatacatacattcgttgaacgaaaaaattataacggttcttttttaccagggtttaaggccattgattataaagaaaatttaaacaaaatcggattagtacacattgatcatatcgttggaaatcaaccagatggtgaaatgaacagtgtttgtgatttctatgaaaaggtttttggatggcataggttttggaccgttgatgataaagatatttctacagaatattctgctcttcgttctattgtaatggcaaatgataatgagatagtaaagatgcctataaatgagccagctgaaggactgaaaaaatcacaaattcaggagttcattgattactatgaaactgctggtgttcagcatatagctctatctacgaaagatatcattagcacagtcaaggataatgcgtaa

SEQ ID NO: 211132 - DNA, 688 bp, Unknown
  Bacterial polypeptide expressing nucleotide sequence isolated from the Sargasso Sea
cctttgttcaagaaatgattacaatggtaattttctccctgggttcgaagattttaaaataaaaaattcaggtaaaaacactggcctagttcatattgatcatgtagtgggaaaccagccagatggcattatgcaacctgtatgtgatttttatgaaaaggtttttggctggcatcgattttggtctatagatgataatgacctctctacaaaatacagttctctaagatctatagttatggccaacgataatgaaaaaataaagatgcccattaacgaaccagctaaaggactaaaaaaatcccaaattcaagaatttgttgattactataatggtgcagggattcagcatgtcgcaatgtccacaaaagatataatcaaaacagttaaaaaattgagatctaatggtgtcgaattcttgccaacacccccatcatattatgatacactattagatagggttggggatttaaaagaagatataaatctactttctgagcttggcattctagtagattcagatgagaatggatatatgctccagatttttactaagccaatacaagataggcctacccttttttatgaaattatacagcgaaaaggctctaacagctttgggaaaggtaactttaaagcattgtttgaatcaattgagcgggagcaaatgcttcgaggcaacctttaa

SEQ ID NO: 211133 - DNA, 840 bp, Unknown
  Bacterial polypeptide expressing nucleotide sequence isolated from the Sargasso Sea
acgtagcatttactgtaaatgattctgacaaagcttggaagacctcactcgaacgtggagcagaaagtgctatgaaccccaaagaggtcaaggatgaaaatggcgaaacggtcctttcagctattaagacctttggtgatacaatacatacattcgtggaacgaaaaaattatagcggttcttttttacctgggtttaaggccattgattataaagaaaatttaaacaagaccggattagtacacattgatcatatagttggaaatcaaccagatggtgaaatgaacagtgtttgtgatttctatgaaaaggtttttggatggcataggttttggaccgttgatgataaagatatttctacagaatattctgctcttcgttctattgtaatggcaaatgataatgagatagtaaagatgcctattaatgagccagctgaaggactgaaaaaatcacaaattcaggagttcattgattactatgaaactgctggtattcagcatatagctctatctacgaaagatatcattagcacagtcaaggaaatgcgtaaaaagggtgttgactttcttccaacgcctcggtcttattatgaaaatctttctgaccgaatcggtaatattgatgaaaatattgaaattttagcggatcttggaatacttgttgatgctgatgaaaatggctacatgcttcaaattttcacaaaaccacttcaagataggcccactcttttctttgaaataatacaaagaaaaggatcaagtagctttggtaagggtaacttcaaagcgctatttcaatcaatcgaaagtgaacaacaaaaaagaggaaatctttaaa

SEQ ID NO: 211134 - DNA, 1087 bp, Unknown
  Bacterial polypeptide expressing nucleotide sequence isolated from the Sargasso Sea
atgacatactctatcaaaggttttgaccattgtgaactttacgtaggcaatgcaaaacagactgcgtattattatcaaaatactatggggtttaagccagtagcttaccgagggcttgaaacaggtgatcgagatagggtgagttatgtacttaatcaagaccatattaatctagtaattacttcaccattgggaaaaaacacagacattgggcagcacattgatcgccatggtgatggtataagagatgtagcattcactgtagatgattctgaaaaagcttggaaagaatcgctagagcgtggtgcaaaaagcgctatggagccaaaagagatcaaagatagtaatggtgaatctattatttcagcgataaaaacgtttggagatactattcatacatttgttgagagacataattattctggttctttcctgccaggatatgaaaatattgattcggaatgggattcaaagagtactggactggttcacattgaccatattgttgggaatcaaccagatggtgaaatgaatagtgtctgtgatttttatgagaaagtgtttggatggcatagattctggactgtggatgataaagatatttctacagagtattctgctcttcgttccattgttatggcaaatgataatgaaatagtaaagatgcctatcaatgaaccagctgaaggattaaaaaaatcacaaatacaggaatttattgattattatgaaaccgctggtgtacagcatttagctctttcaacaagagatattattcatactgtaaaacagatgcgtaataatggtgttgattttcttccaacaccattatcctattatgaaaaccttcatgaacgtatcggtgaaattgatgaagatattgaaactctagcagagctgggcatactagttgataccgatgagaatggatacatgcttcagatctttacaaaaccacttcaggataggcctactcttttctttgaaatcatacaaaggaaggggtcaaatagttttggtaagggtaattttagagcattatttgaatccatagaaagtgaacagaataaaagaggaaatctataaa

SEQ ID NO: 211135 - DNA, 1090 bp, Unknown
  Bacterial polypeptide expressing nucleotide sequence isolated from the Sargasso Sea
atgaatacgtataatataaatgggtttgattattgtgaattatatgttagtaatgcaaaacaggccgctcatttttatcgtactgctttagggttctttccaattgcatattgtggtttagagactgggtctagagatcgtgtaagctatgtattaaagcaaaatcaaattaggtttgttcttacatcgcctttaaaaaataattcagaaataagcgaacatatttcaaatcatggagatggcgttaaagatgtatcatttacagtaaatgatgctgaagcagcatggaaagaaagtactgagcgtggggctaaaagtattagaaaacctcagttattgtcagatgatagaggtgaaactataattgctacaattaaagcttttggagatacaaaccatacatttgtacaaagagataattataaaggggttttcttaccgggttatgttgtatttgaaaataatttaatcgctgaccccacaggacttattcatattgatcatgttgtaggtaatcagccaaatggtgaaatgcagactgtctgcaatttttatgaaaaagtttttggttggcatcgattttggtcagcagatgacaaagatatatcgaccgattattcagctctgcgttcaatagtaatggcaaatgaaaatgaaaaaattaaaatgcctataaatgaacctgctaaagggctaagaaaatctcaaatacaagaatttatagattattataatagtccaggtattcaacatattgctatgtcaacaaaagatataattgaaactgttacaaaactaagagataaaggtgttcagtttttaaatacaccaaattcatattatgaaaatttatcagagcgagtaggtgatatagatgagaatttagatgtaattaaagacttgggtatcttaatagataaagatgaaaatggatatatgctccaaatttttacccaacctttacaagataggccaacccttttttatgaaattattcaaagaaaaggctcaaatagttttggtaaaggaaactttaaagctctttttgaatctatagaaaatgaacagaaaaaacgtggtaatttataac

SEQ ID NO: 211136 - DNA, 1117 bp, Unknown
  Bacterial polypeptide expressing nucleotide sequence isolated from the Sargasso Sea
atgagtaaagaagtaaaatcagtaaactacggtttagaaaaaatatttgaaggagcacaagatttccttccacttttaggaacggattatgtagaattttatgtaggaaatgcaaaacaagcagctcacttctacaaaacagcttttggatttcagtctcatgcatacgcaggattagaaacaggagtaaaggacagagcttcatacgtattaaagcaagataaaattagaattgttttaacaactgctttaaaaagtgattctccaattggagagcatgtcaaaaaacacggtgatggtgtaaaaatagtagctctttgggtagaagatgcacgttctgcctacgaagaaacgatgaagagaggagcaaaatcttacatggaaccaactgttgaaaaggatgaaaatggagaagttgttagagcaggaatttatacttatggagaaactgttcatatgtttgtagaacgtaaaaactacaaaggggaatttttaccaggttatgaaaaatgggtttcagactataatccaaaaccaacaggattaaaatatattgatcatatggtaggaaatgttggctggaatgaaatgaatacatgggtaaaatggtatgaagatgtaatgggatttgtaaatttcctttcttttgatgacaaacaaattaccacagaatactctgctttaatgtctaaagtaatgtcaaatggtaatggaagaattaaatttcctatcaacgaaccagctgaaggaaagaaaaaatctcaaattgaagaatatttagatttctatgaaggaccaggagttcaacatattgctgttgccactgatgacatattaacaacagttgctgaaatgcgatcaagaggaatagaatttttaagcacaccacctcaagcctactatgatgctgttcctatgaggcttcaagctcataatcacgaactacaagaagatattaatcaattaatgagtcttggtatcatgattgatgctgacgaagaagggtatttattgcaaatttttacaaaaccaattgaggatagaccaacgttgttttttgaaataattcaacgaatgggagctcgtggatttggagcgggtaactttaaagctcttt

SEQ ID NO: 211137 - DNA, 103 bp, Unknown
  Bacterial polypeptide expressing nucleotide sequence isolated from the Sargasso Sea
gaacgaattcgcgaccgaggcattgcccggtgcgttgccgcacggccgcaactcgccgcagcgcgcgccgtacgggctgtacgcggagcagctgtcgggcacg

SEQ ID NO: 211138 - DNA, 606 bp, Unknown
  Bacterial polypeptide expressing nucleotide sequence isolated from the Sargasso Sea
agaggggtaattggctcagatggtcttgttaacgcgcgagacttcaaaatacccaccgccgctttcgaagattctcaaaagaaaacggaactcatttgcaaattcggtggtgcattttttacggcagaaattgagcatcaccctttggacgtagtcgcgtgggcgggtaattctgtaccggctagctacgacctgactcttttcaataccctaggttctgttagctatgatcatcccgatccttctatcaacacagtactaacatcaccgtctaatactagaggtgtagccaacatggacttcgtcgtattcggttcgcgatggctagttagtgatcacacctttcggcctccgtggttccaccgaaacgtgatggcagaatttatggggctcatttttggtcaatatgatggaaaaaagaacggtttcaccccgggaggaatgagtctacataatagcctggtaccacacggtcctgacggagaggtgacggcgcaagcctcctcccaagaactccatccgcaaagactagaacaaacgctagcgttcatgttcgaaacgcgattcccattggcagtgaccgactgggcgttaaagtccccgttc

SEQ ID NO: 211139 - DNA, 753 bp, Unknown
  Bacterial polypeptide expressing nucleotide sequence isolated from the Sargasso Sea
tattacttcaagacgagatctgccgtggttttgtttgcgaaaactatggccaaaagtttatccttccaaacagaggccctattggggctaactgtctcgcaaattctagagattttaaagttccacaagcttatttcgaggataaagaagaaaacagtaaccttacagttaaatggtgtggttcgtttcactcgtgtcgtttattaagatcaccattggacattgttgcctggcatggaaattacgcaccatggaaatatgatcttagaaatttctctcctgtaagtgccgtattattcgaccatcccgatccatcaatttatacagttctaacatcaccttcaggaattgaaggaacagcaaatatagacttcattttatttagggacagatggaatgttgctgaaaatacgtttagaccaccttggtatcataaaaatgttatgtccgaattgatgggaaatattgtgggtaaatatgatgcaaaacctactgggtttatacctggggggattagtcttcacaatatgatgctacctcatggtccagataaagatgcttttgaaggggcttcaaatgctgatttaaaaccccaaaaattagaaaacactatgactttcatgttcgagtcacggtttcctcaacatcttactgaattcgcagcaaaagaagcgccactgcaagaagactatgcagaatgttggactggacttgagaaaaagtttaatggaaccccagaaggcaactggtagt

SEQ ID NO: 211140 - DNA, 538 bp, Unknown
  Bacterial polypeptide expressing nucleotide sequence isolated from the Sargasso Sea
tatggatattgtagcatggcacggaaattatgcaccatgtaaatatgacctaagaaatttctctcctgtgagtgccgtactgtttgaccatcccgatccgtctatttacacggttctaacatccccttcgggaattgaaggaacagcgaatatagacttcattttatttagagatagatggaacgttgcagaaaatacgtttagaccaccttggtatcacaaaaatgttatgtcagaattgatgggaaatattgtgggtaaatatgatgcaaaacctactggatttatgccaggagggataagtcttcacaatatgatgctgccccatggtccagataaagatgcttttgagggtgctgcaaaatccgatttaaagccacaaaaactggaaaatactatgaccttcatgtttgagtctcggtttccacaacaccttacggaatttgctgctaaagaggctccgttgcagagtgattacacggagtgctggaaaggacttgagaagaagtttgatggaactccagaaggcaactggtaa

SEQ ID NO: 211141 - DNA, 878 bp, Unknown
  Bacterial polypeptide expressing nucleotide sequence isolated from the Sargasso Sea
ttcagcagacagtgagttattagttgttccacaattaggaggtttagtatttaagacggagcttggcttaattgacatagcaccaggcgaagtagcattaatccctcgcgggcttgttttttcagtattactccaagatgagatatgccgtggttttgtttgcgaaaactatggtcaaaagtttatcctcccaaacagaggccctataggggctaactgtcttgcaaattctagagatttcaaggttccacacgcttattttgaagataaagaagaggaaggcaatcttatagtaaaatggtgcgggtcatttcactcgtgtcgtttatttagatcaccattggacattgttgcctggcatggaaattacgcaccatggaaatatgatcttagaaatttctctcctgtaagtgccgtattattcgaccatccggatccatctatttacacagttctaacatcaccttcaggaattgaagggacagcaaatatagactttattttatttagggatagatggaatgttgctgaaaatacgtttagaccaccttggtatcataaaaatgttatgtccgaattgatgggaaatattgtgggtaaatatgatgcaaaaccttccgggtttatgcctggggggataagtcttcataatatgatgctaccccatggtccagataaagatgcttttgaaggggcttcaaatgctagtttgaaaccacaaaaattagaaaacactatgactttcatgttcgagtcacgattcccccaacatcttactgaattcgctgcaaaagaagcaccgctgcaggatgactatgcagaatgttgggctggacttgagaaaaatttcaatggaactcctgaaggcaactggtagt

SEQ ID NO: 211142 - DNA, 895 bp, Unknown
  Bacterial polypeptide expressing nucleotide sequence isolated from the Sargasso Sea
ctttaataagtcgtttgataatattgtttttacaaatgctgacgcagaaatgctttttatacccgaaaaagaaagcatattactttttactgagatgggcaaaatgtttgtaagccctggtgaaattgcagtcttgccaagaggaatgatggttaaagtctcttgtgaaaaaccatcacgtggttatatttgtgaaaattatggagcaaaatttaccttaccagatagagggccaataggtgcaaattgccttgcaaatccaagagactttaaaactcctgtagccagttttgaagacattgataaaaagcatatatcaattattaaatggtgtggttcattttataaaaccgaacttgatcacagtccccttgatgttgttgcatggcatggtaattacattccatattgttacaatcttaaatatttttcacctgttggagcaataagttttgaccatccagacccatctatatatacagttcttactgcaccaaccgaaactgatggcactgctaatgtagatttagttattttccctgaaaggtgggcagttgccgagaatacttttagacctccatggtatcatagaaatatcatgtcagaatttatgggcttggtttatggacagtatgatgcaaaacctgaaggatttgttcctggaggaattagtttacataatatgatgctacctcacggtccagatgcagaagcatttgaaaaagcaagtaatgctaaactagagcctgtaaaaattactaatacacttgcatttatgtttgaaacgaaatatccgcaacacttaactaattttgcatcagaagcaaaagagctttcagatgattatattgagtgctggagtgatataaagaaaaaatttacaggaaaaatataa

SEQ ID NO: 211143 - DNA, 910 bp, Unknown
  Bacterial polypeptide expressing nucleotide sequence isolated from the Sargasso Sea
aatgactttccccttggacaatatcgttgggacccttttccaattccctcagaaaagacaaacttcttagatggagtaagaacaatcactacctcaggagatgtcaatacgcatactgggatgggagcatctatttatgcttttaatgaagcaatgggaaatatagtgtttacaaatgcagatgctgaaatgttatttgttcctgaagatgaaagcattcttttatttacagaaatgggtaaaattttagttagccctggtgagatagcgatcgtccctagaggaatgatggttaaaatatcaaacgagaaaccttgcagaggctacctctgcgaaaactatggtgctaagtttacattgcctgacaggggaccaataggagctaactgtcttgcaaacccaagagatttcaaaacaccagtagcttgttttgaagattcgaatgaacgacatctatcggttataaaatggtgtggatctttttataagactgaaattaatcatagtcctttagatgttgttgcatggcatggtaattatattccttattgttatgatttaaggcatttcgcaccagtaggcgcaattagctttgaccacccagatccatctatttatacagttctgacagctccaactgaaactacaggaacagctaatgttgatctagtaatatttccagaaagatgggcagttactgaaaatacatttagacctccatggtatcatagaaatattatgtcagaatttatggggttaatttatggtctgtatgatgcaaaaccagaaggttttgttccaggaggaattagtttgcataatatgatgctaccacatggacctgatgctgaagcttttgaaaagctagcaatgcaaaccttaaaccttttaaaatcacaaatacactagc

SEQ ID NO: 211144 - DNA, 307 bp, Unknown
  Bacterial polypeptide expressing nucleotide sequence isolated from the Sargasso Sea
ttgatcgtcagccgcttccgtctccaggtcgagtttacggtagtggccaagtttcagggcgcgctgttcgaggccaagcagccgcactcaccgtttgacgtggtcgcttggcacggaaactacgcaccgtacaagtacgacctcgcccggttcatggtgatcaacgcggtggcgttcgaccacgccgacccctcgatcttcactgtgcttacctcgcagtcgaacgagcctggcaccgcgttggttgacttcgtgattttccccccgcggtggggtgtggccgagaagacgtttcgaccgccgtgag

SEQ ID NO: 211145 - DNA, 767 bp, Unknown
  Bacterial polypeptide expressing nucleotide sequence isolated from the Sargasso Sea
tagatgggatccattcccattaccaaagaatgaaactggttttattgatggcattcgaactataacaacatcaggtgacgtaaacacacatgcaggcatggctgcatcaatttatgcctttaataagtctattgataacattgtttttacaaatgctgacgcagaaatgctttttgtacctgaaaaagaaagcatattactttttactgagatgggcaaaatgtttgttagccctggtgaaattgcagtcttgccaagaggaatgatggttaaagtctcctgtgaaaaaccatcacgtggttatatttgtgaaaattatggagcaaaatttaccttaccagatagagggccaataggtgcaaattgccttgcaaatccaagagactttaaaactcctgtagccagttttgaggacattgataaaaagcatgtatcaattattaaatggtgtggttcattttataaaaccgaacttgatcacagtccgcttgatgttgttgcatggcatggtaattacattccatattgttacaatcttaaatatttttcacctgttggagcaataagttttgaccatccagacccatctatatatacagttctcactgcaccaaccgaaactgatggcactgctaatgtagatttagttatttttcctgaaagatgggcagttgccgagaatacttttagacctccatggtatcatagaaatatcatgtcggaatttatgggcttggtttatggacagtatgacgcaaaacctgaag

SEQ ID NO: 211146 - DNA, 627 bp, Unknown
  Bacterial polypeptide expressing nucleotide sequence isolated from the Sargasso Sea
ttaaaacaccagtagcttgttttgaagatacgaatgaacaacatctatcaataataaaatggtgtggatctttttataagacagagattgatcatagccctttagatgttgtagcatggcatggtaattatattccttattgttatgatttaagacatttttcaccagtaggcgcaattagtttcgatcatccagatccatctatttatacagttctgacagcaccaactgagagtgcaggaacagctaatgttgacctagtaatatttccagaaagatgggcagttactgaaaatacttttagaccaccatggtatcatagaaatattatgtcagagtttatgggccttatttatggtcaatatgatgcaaaacccgaaggtttcattcctggtggaatcagtttgcataatatgatgctacctcatggtccagatgctgacgcattcgaaaaagctagtaatgcaaacctagaacctattaagattactaatacacttgcatttatgtttgagacaaagtacccacagcatttaactgaatttgcctctcaggcaagtcaacttcaagacgattatatcgattgctggaaagatattagaaaaaattttaatggaaaaaaataga

SEQ ID NO: 211147 - DNA, 337 bp, Unknown
  Bacterial polypeptide expressing nucleotide sequence isolated from the Sargasso Sea
cttgtcgacaccggcgcccgccggctaccagagcggtttcgcgaacgaattcgcgaccgaggcattgcccggtgcgttgccgcacggccgcaactcgccgcagcgcgcgccgtacgggctgtacgcggagcagctgtcgggcacggcgttcaccgcgccgcgcggccacaaccgccgctcgtggctgtaccgtatccgcccggcggccgtgcaccggccgttcgagccgtacgcgggcgcgcagcggctcgtgtcggagttcggcgactcggccgacgtgccgccgacaccgccgaaccagctgcgctgggatccgctgccgatgccggtcgagccg

SEQ ID NO: 211148 - DNA, 373 bp, Unknown
  Bacterial polypeptide expressing nucleotide sequence isolated from the Sargasso Sea
ttgtcgacaccggcgcccgccggctaccagagcggtttcgcgaacgaattcgcgaccgaggcattgcccggtgcgttgccgcacggccgcaactcgccgcagcgcgcgccgtacgggctgtacgcggagcagctgtcgggcacggcgttcaccgcgccgcgcggccacaaccgccgctcgtggctgtaccgtatccgcccggcggccgtgcaccggccgttcgagccgtacgcgggcgcgcagcggctcgtgtcggagttcggcgactcggccgacgtgccgccgacaccgccgaaccagctgcgctgggatccgctgccgatgccggtcgagccgaccgatttcgtcgacgggctcgtgacgatggccggta

SEQ ID NO: 211149 - DNA, 292 bp, Unknown
  Bacterial polypeptide expressing nucleotide sequence isolated from the Sargasso Sea
atgacgcttgacttgtcgacaccggcgcccgccggctaccagagcggtttcgcgaacgaattcgcgaccgaggcattgcccggtgcgttgccgcacggccgcaactcgccgcagcgcgcgccgtacgggctgtacgcggagcagctgtcgggcacggcgttcaccgcgccgcgcggccacaaccgccgctcgtggctgtaccgtatccgcccggcggccgtgcaccggccgttcgagccgtacgcgggcgcgcagcggctcgtgtcggagttcggcgactcggccgacgtgc

SEQ ID NO: 211150 - DNA, 334 bp, Unknown
  Bacterial polypeptide expressing nucleotide sequence isolated from the Sargasso Sea
ttgtcgacaccggcgcccgccggctaccagagcggtttcgcgaacgaattcgcgaccgaggcattgcccggtgcgttgccgcacggccgcaactcgccgcagcgcgcgccgtacgggctgtacgcggagcagctgtcgggcacggcgttcaccgcgccgcgcggccacaaccgccgctcgtggctgtaccgtatccgcccggcggccgtgcaccggccgttcgagccgtacgcgggcgcgcagcggctcgtgtcggagttcggcgactcggccgacgtgccgccgacaccgccgaaccagctgcgctgggatccgctgccgatgccggtcgagc

SEQ ID NO: 211151 - DNA, 284 bp, Unknown
  Bacterial polypeptide expressing nucleotide sequence isolated from the Sargasso Sea
cttgtcgacaccggcgcccgccggctaccagagcggtttcgcgaacgaattcgcgaccgaggcattgcccggtgcgttgccgcacggccgcaactcgccgcagcgcgcgccgtacgggctgtacgcggagcagctgtcgggcacggcgttcaccgcgccgcgcggccacaaccgccgctcgtggctgtaccgtatccgcccggcggccgtgcaccggccgttcgagccgtacgcgggcgcgcagcggctcgtgtcggagttcggcgactcggccgacgtgccgc

SEQ ID NO: 211152 - DNA, 952 bp, Unknown
  Bacterial polypeptide expressing nucleotide sequence isolated from the Sargasso Sea
ggcgcttcccggcgccgtgccgcaaggtcagattcgccgcagaaatgtgcttacgggctctatgccgaacagttgagcgggtcgccattcaccgcgccccggtcgacaaacgagcggtcctggctctatcgcatccgtccgtcggtacgccatggcgggcgctatgcgaaaatcgatgtgccgctgtggaagactgcgcccgacggcgatccgaacgacctgccgcttggccagtaccggtggaacccgcttcctgtcccctccgcgccgaccgacttcattgacggcatgcgcaccatgaccagtaccggcgacgcgcgccagcatgtcggcatggcgacccatatctacgctgtcacctccagcatgaccaaccgcgtgctggtcaatgccgatgccgaaatgctgatcgtgccgcaggacggcgagatcgagatcttcaccgaaatgggccggatgcgggtggcgccgggccatatcgccgtggtgccgcgcggcatgatggcgaaatacagcctcgccggcgatcacgctcgcggatatgtctgcgagaattacggggcgaaattcacccttcccgaccgcggcccgatcggcgccaactgcctcgccaacccgcgcgattttaagacccccgtcgccgccttcgaggatagcgacaccccgcatgacctggtgatcaaatggtgcggcggcttccatgtcacccgcatcggccactcaccgctcgacgtggtcgcctggcacggcaactacacgccctattgctacgacctgtcgaccttctcgccggtgggcgccatcgcgttcgaccatccggacccgtcgatcttcaccgtgctgaccgccccgtccgagaccgccggcactgcgaatatagatttcgtcatcttcccaccgcgctggatggtggctgaaaacaccttccggccgccctggtaccaccgcaaca

SEQ ID NO: 211153 - DNA, 274 bp, Unknown
  Bacterial polypeptide expressing nucleotide sequence isolated from the Sargasso Sea
ttgtcgacaccggcgcccgccggctaccagagcggtttcgcgaacgaattcgcgaccgaggcattgcccggtgcgttgccgcacggccgcaactcgccgcagcgcgcgccgtacgggctgtacgcggagcagctgtcgggcacggcgttcaccgcgccgcgcggccacaaccgccgctcgtggctgtaccgtatccgcccggcggccgtgcaccggccgttcgagccgaacgcgggcgcgcagcggctcgtgtcggagttcggcgactcggccg

SEQ ID NO: 211154 - DNA, 403 bp, Unknown
  Bacterial polypeptide expressing nucleotide sequence isolated from the Sargasso Sea
cttgtcgacaccggcgcccgccggctaccagagcggtttcgcgaacgaattcgcgaccgaggcattgcccggtgcgttgccgcacggccgcaactcgccgcagcgcgcgccgtacgggctgtacgcggagcagctgtcgggcacggcgttcaccgcgccgcgcggccacaaccgccgctcgtggctgtaccgtatccgcccggcggccgtgcaccggccgttcgagccgtacgcgggcgcgcagcggctcgtgtcggagttcggcgactcggccgacgtgccgccgacaccgccgaaccagctgcgctgggatccgctgccgatgccggtcgagccgaccgatttcgtcgacgggctcgtgacgatggccggtaacggttcggccgccgcgatgaacggctgc

SEQ ID NO: 211155 - DNA, 286 bp, Unknown
  Bacterial polypeptide expressing nucleotide sequence isolated from the Sargasso Sea
atgacgcttgacttgtcgacaccggcgcccgccggctaccagagcggtttcgcgaacgaattcgcgaccgaggcattgcccggtgcgttgccgcacggccgcaactcgccgcagcgcgcgccgtacgggctgtacgcggagcagctgtcgggcacggcgttcaccgcgccgcgcggccacaaccgccgctcgtggctgtaccgtatccgcccggcggccgtgcaccggccgttcgagccgtacgcgggcgcgcagcggctcgtgtcggagttcggcgactcggccg

SEQ ID NO: 211156 - DNA, 546 bp, Unknown
  Bacterial polypeptide expressing nucleotide sequence isolated from the Sargasso Sea
catgacaggttttggaaatgatttccaaactgaagcactacctggagctttgcctcaaggacaaaattctcctcaaatatgcccctacaaattatacgccgaacaactcagtggatcccctttcacagcacctagaaatatcaatgaaagatcttggctctatcgcataagaccatccgtaaagcatactggtaaatatgaaaaagaaagctttcctttttggaaaacagctccaagccatgaccctgaaaatatgtcattgggtcaatttagatgggatccctttccctttcctaaagaacaaactgacttcatttctggagtaagaacattaactactgctggtgacgtaaatactcataacggtatggcagcaagtatttattcgtttaacaagtctatgacttcaacagtttttacgaattctgatgcagaaatgctttttgtcccagaaacaggatcaatagtactttttaccgaaatgggtaaaatgcatatttcacctggagaaatcgcggttttaccaaggggaatgatggtaaaaat

SEQ ID NO: 211157 - DNA, 862 bp, Unknown
  Bacterial polypeptide expressing nucleotide sequence isolated from the Sargasso Sea
aacccgctggatattccgagtgaacccacggactttatcgatggactggtcggcatggttgccaactcggggtcggaaaaaccttcgggcatcagcatttataactaccgcgccaatcgttccatggagcgcgtgttcttcaacgccgacggcgagttgctgatcgtgcccgagcagggccgcttgcgcatcgccaccgaactgggcgtgctggatgtcgagccgctggaaatcgtcgtgctgccccgtggcctcaagttccgtatcgaactgctggacgcgcaagcccgcggctacgtcgctgaaaaccatggcgccccgctgcgcctgcctgacctggggccgattggcagcaacggcctggctaacccgcgcgatttcctcacgcccgtcgcccgttacgaagacctcaagcaaccgaccacgctggtacagaaattcctcggcgaactgtgggcctgcgagctggatcactcaccgctcaacgtggtcgcctggcacggtaataacgtgccgtacaaatacgacctgcgtcgcttcaacaccattggcacggtgagttttgaccatccggatccgtcgatcttcaccgtgctgacctcgcccaccagcgtgcacggcctggccaacctcgacttcgtgatcttcccgccgcgctggatggtggccgagaacaccttccggccgccgtggttccatcgcaacctcatgaacgaatacatgggcctgatccagggcgcctacgatgccaaggccgaaggcttcctgccgggcggcgcgtcgctgcacagttgtatgagcgcccacggcccggatggcgaaacttgcaccaaggccatcaacgtgaccggcgccgcacaag

SEQ ID NO: 211158 - DNA, 2467 bp, Unknown
  Bacterial polypeptide expressing nucleotide sequence isolated from the Sargasso Sea
catggaaacctcaacccgtacaccgaataccgccagttcgcggctcgagatcgagccgggctatcagtcgggattcgctaacgaattcgcttcggaggctttgccgggcgcgttgcctgaaggccgcaattcgccgcagcgtgcggcctatggcttgtacgcggagcagttgtcgggcaccgcgttcacggcgccgcgcggacacaatcgccgttcgtggctgtaccggattcgtccggcggccgttcacaagccgttcacgcaactgccgtcggaacggctcgtcgccaacttcgccgaagtgccgcctacaccgcccaatcagttgcgctgggatgcgttgcccatgcccaccgagccgaccgatttcatcgacggttgggtgacgatggcaggcaacggttcggccgaagcgatgaacggctgcgcgatccacctgtacgccgcgaatcgctcgatgcaggaccgcttcttctacaacgccgacggcgagttgctgatcgtgccgcaggaaggccgcctgcatatcgccaccgaaatgggccaactcgatgtcgagccgttcgagatcgcggtgatcccgcgcggtgtgcgcttcgcggtgagcttgccggatggcgcggcgcgcggctacatttgcgagaactttggcgcattgctgcgtctgccggacctcggcccgatcggttcgaacggccttgccaatccgcgcgatttcctcacgccgcatgccgcgtatgaagaccgcgaaggcgatttcgaactcgtcgccaagatgaacggcaatctgtggcgcgcggacatcggccattcaccgctcgatgtagtggcgtggcatggcaactacgcgccgtacaaatacgacctgcgccgcttcaacacgatcggttcgatcagcttcgaccatccggacccgtcgatctttctggtgctgcagtcgcaaagcgatacgccgggcgtcgatacgatcgacttcgtgattttcccgccgcgctggctcgcggccgaagatacgttccgcccgccctggttccatcgcaacgtggcgagcgaattcatgggcctcgtgcacggcgtgtacgacgcgaaggccgagggtttcgtgccgggcggcgcgagtctgcacaactgcatgtcgggtcatggaccggacgcggacaccttcgagaaagcgtcgcacagcgatacgtccacgccgaagaaggtcggcgacacgatggccttcatgttcgaaacgcgcacccctgatcaagccgacccgtttcgcgctcgaaacggcgcaactgcaggcgcattactacgagtgctggcaaggtctcaagaaacacttcaacccggagcaacgatgaacgcattgagcgatcttcaggcgacgctcgatccgtcgcgcaagagctgggtcgagtcggctaacgacccgaccaacgatttttcgatccagaacctgccgttcggtattttcagcgataaggccaaccccgcgcgccgtgtgggtgtggcgatcggcgaccagatcgtcgatctgagcgtgctcaaatcggccggcttgctcaagcttccgatcacctcggccgatcaattcattgcgctgaaggatcgggcgttcgagcaggacaccctcaacgatttcatctcgcttggccgcgatgcatggcgcaacgtgcgcatccagttgagcagtctgctggcgcgcgacaccgcgaccttgcgcgacgatgccgccttgcgttcgaaagcgctcgtgccccaggccgatgcgcaacttcacctgcccgtgcagattcccggctacaccgatttctattcgtcgaaggagcacgcgaccaatgtgggctcgatgttccgcgatcccaagaatgcgctgttgcctaactggtcggagatgccgatcgcttacaacggacgcgcgtcgtcggtggtggtaagcggcacgccggtgcggcggcccaacggtcagttgaaactgccggatcaggaacgtccggtgttcggcgcgtgccgcaagctggatatcgaactggagactggtttcgtgatcggcagcggcaatacgctgggcgagccgattgcctgcgccgatgccgaagcgcacatcttcggcatggtgctgttgaacgactggagcgcgcgcgatatccagcaatgggaatacgtgccgctcggcccgttcaactcgaagacgttcgcgacgacgatctcgccgtggatcgtgacgctcgacgcgctcgaaccgttccgcgtcgagcagccgctgcaggagccgcagccgttggcgtacttgcgccacgacggcaagcacgcgttcgatatctcactggaagtgacgctgcggccgcaaaccgcaaagcaggccaccacgatctcgcggaccaacttcaagcacatgtactggacgatggcgcaacagctcgcgcatcacacggtgtcgggctgcaacacgcgggtcggcgatctgatgggctccggc

SEQ ID NO: 211159 - DNA, 1324 bp, Unknown
  Bacterial polypeptide expressing nucleotide sequence isolated from the Sargasso Sea
cttgtcgacaccggcgcccgccggctaccagagcggtttcgcgaacgaattcgcgaccgaggcattgcccggtgcgttgccgcacggccgcaactcgccgcagcgcgcgccgtacgggctgtacgcggagcagctgtcgggcacggcgttcaccgcgccgcgcggccacaaccgccgctcgtggctgtaccgtatccgcccggcggccgtgcaccggccgttcgagccgtacgcgggcgcgcagcggctcgtgtcggagttcggcgactcggccgacgtgccgccgacaccgccgaaccagctgcgctgggatccgctgccgatgccggtcgagccgaccgatttcgtcgacgggctcgtgacgatggccggtaacggttcggccgccgcgatgaacggctgcgcgatccacctgtacgcggcgaaccggtcgatgcaggaccgcttcttctacagcgcggacggcgaactgctgatcgtgccgcagcaggggcggctgttcatcgcgaccgaattcggccgggtcgacgtcgagccgttcgagatcgcggtgatcccgcgcggcgtgcgctttaccgtcacgctgccggacggcgacgcgcgcggctacatctgcgaaaacttcggcgcccagctgcgcctgccggatctcggcccgatcggttcgaacggcctcgcgaatccgcgcgacttcctgacgccgcaagccgcgtacgaagaccgcgaaggcgcgttcgagctgatcgcgaagctgaacggccggctgtggcgcgcggacatcggccattcgccgctcgacgtcgtcgcgtggcacggcaactacgcgccctacaagtacgacctgcgcctgttcaacacgatcggctcgatcagctacgaccatcccgatccgtcgatcttcctggtgctgcagtcgcagagcgacacgccgggcgtcgacacgatcgacttcgtgatcttcccgccgcgctggctcgcggccgaggatacgttccgcccgccctggttccaccgcaacgtcgcgagcgaattcatggggctcgtgcacggcgcatacgacgcgaaggccgaaggcttcgtgccgggcggcgcgagcctgcacaactgcatgtcgggccacgggcccgacgcggacacgttcgagaaggcgtcggcgagcgacacgacgaagccgcacaaggtcgacgcgacgatggcgttcatgttcgaaacccgcacgctgatccggccgacgtgctacgcgctcgacaccgcgcagctgcaggccgactacttcgaatgctggcaaggcatcaagaaacacttcaatccggagcaaaaatga

SEQ ID NO: 211160 - DNA, 916 bp, Unknown
  Bacterial polypeptide expressing nucleotide sequence isolated from the Sargasso Sea
atacatatttacgcagcaaatagttctatggaaggtaaatatttttataatgctgatggagaaatgttacttgtccctcaacagggagcacttcagctttacacagagatggggcttcttgaggtgaatccaaacgagatagcagttattcccagaggtgttaaatttcaagtaaaactccctgatggcccatcgcgggggtatgtattagaaaattatggctcggccatgcgcctgccggacttgggaccaataggttccaatgggttagctaaccctcgagattttttgtatccggtggcaaggtatgaagacaaggagggtgactttaagttaatttctaaatttggaggtaacatatggcaggcggaaattaatcatattcctctggacgtagttgcctggcatggaaattttgcaccttacaaatatgacctagcaaattttaatgcggttgggtcaattagtttcgatcatatagacccaagtgtctacaccgtactaacatcccagagtaatacaatgggggtcgccaatgcagatttcgtaatatttccgcctcgttggatagttgctaataatacctatcggcctccttggtatcacagaaatattatgagtgaatttatgggtctaatcaggggtgaatatgatggccgaaaagagggatttgttcccggtggtagcagtcttcacaattgtatgtcccctcatggaaatgatgcggacgtttttgaagctgctagtgtagctgatttagagccagtatatattgatggttcaatggcatttatgtttgagacccgttacgtttatagactaacggaatttgccatgcagacaccctgtctacaggctgactattttgaatgttggcaagggcttaaaaaacactttaacgaaagtagggagtaaa

SEQ ID NO: 211161 - DNA, 1282 bp, Unknown
  Bacterial polypeptide expressing nucleotide sequence isolated from the Sargasso Sea
atgactggatttggtaatgattttcaaaccgaagctttgccaaatgctttgcctgagggcagaaactctcctcaaaaatgtgcttatggtttatatgcagaacaattaagtggttctccatttactgcaccaagaagcataaatgaaagatcatggctttatcgtatcagaccctcagtaaaacacactgggaagtatattaaaactgaatatccattttggaaaactgcaccaaatataaatgcaaatagttttcctttaggacaatatagatgggatccattcccattaccaaagaatgaaactggttttattgatggcattcgaactataacaacatcaggtgacgtaaacacacatgcaggcatggctgcatctatttatgcctttaataagtctattgataacattgtttttacaaatgctgatgcagaaatgctttttgtacctgaaaaagaaagcatattactttttactgagatgggcaaaatgtttgttagccctggtgaaattgcagtcttgccaagaggaatgatggttaaagtcttctgtgaaaaaccatcacgtggttatatttgtgaaaattatggagcaaaatttaccttaccagatagagggccaataggtgcaaattgccttgcaaatccaagagactttaaaactccggtagccagttttgaagacattgataaaaagcatatatcaattatcaaatggtgtggttcattttataaaaccgaacttgatcacagtccccttgatgttgttgcatggcatggtaattacattccatattgttacaatcttaaatatttttcacctgttggagcaataagttttgaccatccagacccatctatatatacagttctcactgcaccaaccgaaactgatggcaccgctaatgtagatttagttatttttcctgaaagatgggcagttgccgagaatacttttagacctccatggtatcatagaaatatcatgtcggaatttatgggcttggtttatggacagtatgacgcaaaacctgaagggtttgtccctggtggaattagtttacacaatatgatgctacctcacggcccagatgcagaagcatttgaaaaagcaagtaatgctgaactagagcctgtaaaaattattaatacacttgcttttatgtttgaaacgaaatatccgcaacacttgactaaatttgcatcagaagcaaaagagcttcaagatgattatattgagtgctggagtgatataaagaaaaattttacaggaaaaatataaa

SEQ ID NO: 211162 - DNA, 1297 bp, Unknown
  Bacterial polypeptide expressing nucleotide sequence isolated from the Sargasso Sea
tatggattatttaacaggatttggtaataattttgaatcagaagctttacctggagctttaccaaaaggcaggaattcgcctcaaaaatgtgcttataagttgtatgcagagcaattgagtgggtcaccttttactgcgcctagaaatctaaatgagagaacatggctttatagaataagaccatcagtaaagcattctggtaagtttaagaaaatagattttcctttttggaaaagtgctcccgacaaaaaagatcataatcttccattaggtcagtatagatgggatccattttctaatgataaaaatacaaatcaaagttttttggatggtataaaaacaattacaactactggagatgttaatactcatttaggaatggcaacaagcatttacatatttaaaaaaccaatgagttactcggtttttgtaaacgctgatgcagagatggtatttgtaccatatttaggtgatattaaaatttttactgaaatgggaacaattaaaattaaacctggagagattgctgtaattcctaggggcgtttcttttaaagtttttactgatggcaacatttcaaagggttatatttgtgaaaattatggctctaaatttgtattgccagaaagaggtcctattggggcaaattgtcttgcaaatccaagagattttaaaacaccaattgcaaattttgaagacttggaagagaagcatgatttaatcgttaaatggtgtggatctttttatataacagaaattggtcacagtcctttagatgttgttgcatggcatggcaattatgtgccgtatatttatgatttaagagatttctcacctgttggagcagtgagctttgatcaccccgatccttcaatttttacggttttaacttctcattcagaaacacctgggacggctaatattgatttagtaatttttcctgaaagatggagtgtagcagaaaatactttcagacctccttggtatcacaaaaatattatgtcagagtttatgggtcttatatatggaaaatatgattctagacccgaggggtttcttcctggtggtataagtttacataatatgatgctacctcatggtccagactacgaaacttttgaaaaatcttctaatgaaaatttaaaaccagtaaagatttccaattcattagcgttcatgtttgagacaaggtttcctcagcatatcacaaaatttgctgcagagtgttcggaattacaagctaattatattgattgttggaaagatatagaaaaaaaatttgatgggaaaaagtaa

SEQ ID NO: 211163 - DNA, 856 bp, Unknown
  Bacterial polypeptide expressing nucleotide sequence isolated from the Sargasso Sea
tatgcgccctcgacgaattgcggttggagggcaggctaaatcgcgtcgaagatggcctctacgccctttccgacggatgaaatcgctagaccacggcggggtcggcgccccggtgcgccggagggaagaccatcggctgttgcgcggggcgggctattacagcgacgatatcgatctgccagaccagttattcgcggtaatggtgcggtccccccacgcgcatgcccggctggatcatatagatatacgaaccgcctcgaagctgcccggcgtgcatgccgtgctgaccggggcggattacgttgccgacgggatcgccgatatcgggcacgtcgcaaatccggctggcgcggtcgactggcagaaacccgctttcgtcaaccgcgacggctcggcgcctttcgacgtaccgcagccgacagtcgtgcgtgaaaaagtgcgtcacgtgggggaggtcgttgccgttgtcgtggcggacaccgatgcgatcgccagagacgcagccgatttagtagtagtagcgtacgacaccttaccggtcgtaaccgatgcgctgaaagcgctggaacacgatgccccctcggtttgggatgattgcccaggcaacgtgccgctggatgcggaactaggtgattccgcggcgacgcaagccgcattttcagatgccgcgcacgtcgtaaacgcccgctttttcaataaccgtgttatcaactgccagatggaaccgcggtctgcggtcggcgactgggatgcggcagcgggccggatgaccctttatgcaggcgggcagggcgtgcatcgccacaagatgatactcggcacgatgttcgggctggagcctgactacgtccgcgtc

SEQ ID NO: 211164 - DNA, 1401 bp, Unknown
  Bacterial polypeptide expressing nucleotide sequence isolated from the Sargasso Sea
tatgtcattaactagtaatgcaattaaaaaccctggtttaagaactttaccacctggggttgaaagataccatatacaaggtggtggaattaatattcttgaaatttttcctgaagacaaaatagaaattattaatgatgaaggaaaacagctttgtgaagttttggtatttaattcaaagggaaaagaggacctgtcaatccttagtttaaaaaaaaactcaagtggtgattatttaaaaaaaaatattaatcaagacgaaaaaatttccaaattattaaaaagaaaaaagcttgaattaaacaaatcaaattcttcaattatatttagtgaagattgtccaatgggtgaaaagataattttgaaatcaaaagataaatgtattgttatgttagcttcaccaggcaatgaaatgaatgttcataatcaaaatccaccaactagtttaactatttttattcatagatctaaatttgatattaaagaagaacaatttattttacctgagcctttatacgatcccatcacagaaacttttgtaaaaagaatgtcgtctgaaacttatgaagtaaaagcaggcgaatatattcaagtaattgatccaggtggaagacaatgttctgattttttggcttttgacaaaaaaaaattagatcaaggaatagaaagtataatagaccctactgctacacgaacttttatgggtggagcttatccaatgcctggtttgttttcaaaattttttgatgcaaatcatgatccagtgattgaagtagtaagagatacagttggtagacacgatacttttaattatgcttgtacttctaaatactatgaagatatggggtatttaggacacataaattgctctgagaattttaataattctttaaaaaaatatgatgttaaacctcgaaaaggatggatagctattaatcttttttttaatactgcaatagatgcaaataacgttgcaacttttgatgaaccttggtcaagacctggggattatgtactttttagagcattaaaagatcttacttgtgcatcttctgcgtgtccttgtgatgtcgatgcagcaaatggatggaatccaacagatatatttgttagaacttatccaaaagataaaaagatctcgaaaggggtagcttttagagtgaatacaaattcagaaccaaaaataactaaagaaacgggctttcacagcaaaacctcaaaacttacaaaaaattttgtaaattataatggttattggttggctaataactatacaaactatggtgctgtaaaggaatatacatcatgtagagaaagcgcaattttaacagatttatcaccattaagaaaatttgaaatactaggtcctgatgcagaaaacttaatgcaatataccttaac

SEQ ID NO: 211165 - DNA, 708 bp, Unknown
  Bacterial polypeptide expressing nucleotide sequence isolated from the Sargasso Sea
aagccgagtccttagaaatagcctcctttgtattaacgcccgtggatggcaaagcggtaaaagactttgttccaggacaatacttaagcattaaggcgcaacatcctaagcttgccttcgatgaaattcgccaatattcactctcagatgctccaaatggccgaagctatcggatcacggtcaagcgtgagcttaatggccaagtatcaaatctactgcacgatgtactgcaagtcggtgacatactttcagtgatgccacctgctggcgatttcactttagcggttcaagctgaaacacctgtcgtattgatttcagctggagttgggcaaacgccgatgaagagcatgttaaatcaactcttaaagcttagacatccaagtacagtgacttggttacatgcctgcgaacacggtggagtacacggatttaaatcggccatcaaaaataaactcggccaacatgcgaatcttgccagccatgtatggtacagagagccgacaaaggctgatgtgttaggccaagattatgattttgaaggcacaatggacttaacctccgtcgccgataaaatcgtggccaacgcacattactatttctgtggtccgattggctttatggcttcgatcaaacagcaattactcgccttcggtgtacctagcgagcaaatgcactatgaagtctttggccctcatgccgagctctaag

SEQ ID NO: 211166 - DNA, 700 bp, Unknown
  Bacterial polypeptide expressing nucleotide sequence isolated from the Sargasso Sea
atgctttgcgctgaacagactgcccttatcaaagccaccgtgccgctgctggaaagcggcggcgaggccttgaccacccatttctacaacctgctgctcagtgaacaccccgaagtgcgcccgctgttcaatcaggcccaccaggccagcggtgaacagccgcgtgcactggccaacggtgtgctgatgtatgccaaacacatcgaccggctcgacgccctcggcccgctggtcgctcagatcatcaacaagcatgtcgcgctgcaggtactgcccgagcattacccgctggttggctcctgcctgctgcgggcgatccgcgaagtgctcggtgacgagatcgctaccgacgccgtgatcgacgcctggggcgccgcctaccagcaactcgccaacatccttatcggtcaggaggagaatctctaccagatcaaggccgaggcggatggtggctggcggggggcgcggcgttttcgcattgcgcgcaagaccgtcgaaagcgcagagatcacctcctttcacctgcagccggaggatggcggcgcgttgatggactttctgcccggccagtacatcggcctgcgcctggaggtcgacggccaggaggtgcgccgcaactactcgctgtccgccgccagcaatggcagcgaataccgcatcagcgtcaagcgcgagcccggcggcgtcgcctcgaacgcgc

SEQ ID NO: 211167 - DNA, 856 bp, Unknown
  Bacterial polypeptide expressing nucleotide sequence isolated from the Sargasso Sea
ccccatcgtcggcacctgcctgctgcgcgccatccgcgaagtgctgggcgccgagatcgccaccgacgaggtcatagccgcctggggcgccgcctaccagcagctggccgacatcctgatcggcgccgaacgccaggcctatgaccgcacggcggcggccgaaggcggctggcgcggcgagcgcgccttcgtggtcgaggacaaggtggcggaaagcgccgagatcacctcgttctacctggtgccggccgatggcagccccgtcatcgcccaccagcccggccagtacatcggcctgcgcctggtggtggatggccaggagcagcggcgcaactactcgctgtccgcgcccgccgatggccgcagcctgcgcatcagcgtcaagcgcgaggcaggtggcaaggtctccaacttcctgcacgaccgggtccgcgtcggcgacacgctgcagctgttcccgcccgcaggccacttcacgctgcagctcggcgagcgtccgctggtgctgatcagcggcggcgtgggcatcacgccgaccctgcccatgctggatgcggccttgcccagcaagcgtcccgtggtcttcatccactgcgcgcgtgagcgcggtgttcatgccttccgtgaacgtgtggatgcgctggccgcggagcatccgcagctcagccggtactactgctatgaccgggtggaggagggcgatgaggccgatgcgcagggactgctgaccgcccggcagttgggtcagtggctgccttcagtggatgccgatgtgtatttcctggggccccggccgttcatgcggtcggtgaaggagtcgttgcgggtgttgggggtgccggaagggcaggtccgc

SEQ ID NO: 211168 - DNA, 361 bp, Unknown
  Bacterial polypeptide expressing nucleotide sequence isolated from the Sargasso Sea
ctgggctcactggcacgacacgaacaccaggcccaggttaactggttccatgctgcggaaaatgggctccggcatgcatttgctgaccatgtaaacaatacagggggacaactgcgccactttacacagcaagtatggtacagcaagccagggccggcagatattaccgggacgggcagcattaaagcaggccatatggacctgactccttacatttccagcctgaatgactcgcaaatgacctggtggttgtgcggcccggttggatttatgcagtttattgcccggcagttagtggataacggtgtgaatgccgaacgcattcgctacgaatgctttggcccgcataaggtgctgtaaa

SEQ ID NO: 211169 - DNA, 682 bp, Unknown
  Bacterial polypeptide expressing nucleotide sequence isolated from the Sargasso Sea
atgaaaaaaaatttacttatagtggatgatgatcaaagattaagaggattattaaaaaattaccttagtaaaaaaaatcttgacgtttatttatgtgatgattttaagaaagcaaaaaatataattaaattttttatttttgatttgattattctagatagaatgatgccgactggagatggaataaacttagttaatgatattaagaaaatatcacatactccagtaataatattaactgcaatgggtgaagattttgacaaaatagatggattaaaaattggagcagatgattatatttctaaaccttttgaaccagaagaattattcttaagaataaaaaatttgtttaatttttataatgataaaagtaatataaatatgcatgtaaaatttggagattatattttcaacatgtcaaatcaagaattaaaaaaaaataatcatttagtatatttaacagaaggtgaaaataatctcttaacaaaacttgtaaaaaaaaagaatgactttgtattaagagaagaattggctgaaaaagaatttgatgagacagaactaagaaaagttgatgttcaaataactagattaagacaaaagatagaaaaaaatccaaaacaacctcagtttatcaaaactataagaggtaaaggttataaattgatttgtagtgaaatatgat

SEQ ID NO: 211170 - DNA, 1207 bp, Unknown
  Bacterial polypeptide expressing nucleotide sequence isolated from the Sargasso Sea
catgctgtccgacaagtccaagccttacatcgatgccagcgttccggtgctgcgcgagcatggcttgaccatcacccagaccttctatcgcaacatgttcgccagccaccccgagctgaccaacgtgttcaacatgggcaaccaggccaatgggtcgcagcagcagtcgctggcttcggcggtgtttgcgtacgccgccaaccatggcaacaacgcggcgctggcgcccgtggtcaaccgcatcgtgcacaagcacgccgctgtgggcatcaagccgagccactacccgatcgtcgcgcgccacctgctgggcgcaattgccgaagtgctgggcgacgccgccacaccagacctgctcgccgcctgggacgaggcctactggctgctcgccgccgagctgatcgcggctgaagcgcgcctgtatcagcacaccggcagcgggcccgaccatcgtcagccggtgcgcattgtcagccgccgccaacaggccgaagatgtagtgtcgctcactctcgaagcggtgggggatgcgccgttggccgatttcctgccgggtcaatacatctcggtgcaggtggagctggcgccgggcgcactgcagcagcgtcagtacagcctgtcggatgcgccgaatggccgcacgtggcgcatctcggtcaagcgtgatgcgggtgacgccgatcgccctgcgggcaccgtgtcgagctggctgcacgccaatgcgcgcgaaggcgacgtcctgctggtcagccaaccctacggtgacttcgtgccgcaactggcgaccagcaacccgatcgtgctgatgtcggctggtgttggcatcacgcccatgatctcggcgctcaacacgctcgcgcagcagaacagcgcgcgcaagatcgtattcagccacgccagtcgcgcggcctcgcatgttgcccacgccgacgatctggagcgtgccgcacaagcgctgcctgcattcgaggcgcacgtattcctggagtccggcgaagacgcggaattcgcgcagcgcccggcccaccccggccgcatgacggtcgacacgttcgtgcgcgaccacggggcggaagcggacttctatctctgcggcccgctgccgttcatgcaggcacagcgtgcggcgctgctcgccagcggcgtgccgtcggagcgcatccaccgcgaagtgttcggccccgatctgctggacgacatcctctga

SEQ ID NO: 211171 - DNA, 937 bp, Unknown
  Bacterial polypeptide expressing nucleotide sequence isolated from the Sargasso Sea
catgaccgttcttaccgccgaccagatcgcccgcgtcaaagccaccgtacctgtgctcgccgaacacggcacaacgatcaccaaacacttctacaagcgcatgttcgcgcatcatcctgagttgaagaatgtgttcaaccagactcaccagcagagcggcaatcagccggaaacactcgcgaaagcagtgtacgcatacgcggctaatatcgataatctcggcgcgctgggcccgaccgtctcgcgaatcgctcataagcacgcgagtctgaatatccggcccgagcagtatccgatcgtggggcggcacctgctgggcgcgttcgtcgatgtgctcggcgatgcggtcgatcaggagacgcttggcgcgtgggaagtcgcgtatgggcaactcgctgatatctttatcggcgcggaagcgaagctctatgaaggtgcggcatggagtggtttccggccgttcaaggttgtgcgcaaggaagtggagagcgatgaaatcacgtcgttctatctgacgcccgccgatggctcgccggcctgcggcttcgagcctggccaatatctgagcgtgaagcgtttcgtggatgaactcggcgtcgatcaaccgcggcagtacagcttgtcggacgccccgaacggaaaatggctgcgtatttcggtgaagcgcgaggccggccgtgcagatcaggcgcccggccatgtatcgaaccttctgcacgatggtgtggaagtgggcgaggtggtgcatgccagcgcgcccatgggcgatttcacgctggcgcgcaagaagacgacgcccgtggtgctgatgagcggcggtgtgggcgtaacgccgatgacctcgatgctctccactttgctcgccgatcacagcgagcgcagcgtgactttcgtgcatgcctgccgcaatggacgcgtgcatgcattccggcagtgg

SEQ ID NO: 211172 - DNA, 760 bp, Unknown
  Bacterial polypeptide expressing nucleotide sequence isolated from the Sargasso Sea
catgctgaccaatgctcaacgcgacctgatcaaagccaccgtgcccctgctggaaagcggcggcgaggcgctgaccacgcacttctatcggatgatgctcagcgaacacccagaagtacgcccgctgttcaaccaggcccaccaggccagcggcgaccagccgcgcgccctggccaatggcgtgctgatgtacgcccgccatatcgaccgcctcgaagccctcggcccgctggtgcgtcaggtggtgaacaaacacgtggccctgcagattctccccgagcactaccccatcgttggcggctgcctgctgcgcgcgatccgcgaggtgctgggcgccgagatcgctaccgacgcggtgatcgaagcctgggccgtggcttaccagcaactggccgatattttcatcggtgccgaagagcagctctataccgagaatgcggcggcgccaggcggctggcgcggcgcacgcagcttccgcgtggcgcgcaaggtggtagagagcgccgagatcacctccttccacctggtgccggtcgacggcggcgccctgctcgaccatcaacccggccagtacatcggcatgcgcctgctactggacggcgaagaagtgcgccgtaactactcgctgtcggccctggccaacggtcgcgagtaccgcatcagcgtcaagcgcgaggttggcggccgtgtctccaatcacctgcacgataaggttcaggtcggcaacgaactcgaactgttcccaccgtctggcgagttc

SEQ ID NO: 211173 - DNA, 874 bp, Unknown
  Bacterial polypeptide expressing nucleotide sequence isolated from the Sargasso Sea
gaggcgctgggtgggctggtggggcagatcgtcaacaagcacgtggcgctgcaggtcttgcccgagcattacccgatcgttggccgctgcctgctgcgtgccatccgcgaggtgctcggcgcggagatcgccacggatgccgtcatcgacgcctgggcggcggcctacgggcaactggccgacctgctgatcggtgccgagcaggcgcgctacgatgccgccgcgctcgcgcagggtggctggcgtggcgcgcggcgcttcgtgatcgcgcgcaaggtgcaggaaagcgccgagatcacctcgctgtacctggagcccgccgacggcggcccggtgatggacttccagccaggccagtacatcggcctgcgcctgcagatcgacggcgaggaagtccgccgcaactactcgctgtcggcgccgagcaatggccgcagctatcgcatcagcgtcaagcgcgaggccggcggcctggtctccaatgcactgcacgccatgagcgaaggcgaggcgctcgagctgttcgcgccggccggtgagttcaccctgcaacctggtgatcgtccgctggtgctgatcagcggcggcgtcggcatcacgccgaccttgccgatgctcgagcaggcgcttgcccagtcgcggccgatccgcttcatccattgcgcgcgcaacgccgaggtgcatgccttccgcgagcatgtcgacagcctcgccgagcagcatggcgccctcgagcgcttctattgctacgaagaggcggcctcgaccacggcaagccccgacgccgtcgggcggctgaccgaggcgcagctggccgactggctgccggagcgcgacgaggatgtgtacttcctcggacccaagccgttcatga

SEQ ID NO: 211174 - DNA, 884 bp, Unknown
  Bacterial polypeptide expressing nucleotide sequence isolated from the Sargasso Sea
agaagtgctggggatcgatgaatcgtcggaaattattgatgcctgttcggcggcttacggtgcactggcggatatttttattgggcgtgaaggagcgctgtatcagcaccagcaagatactttcggatggcagggtttcaagccctttgttgtcgctcgccgtgagcaggaaagtgagaatattgtttctctttatcttgctcgccaagatggggaggcactgcagccacatcagcctggccagtacattactgtgcgggtgacgccgccgggtgggctaccggtaatgcgtaactacagcttgtcctgtgcgccgggggaaagccattaccgaattagtgtgaaacgggagcgagccctcgctgacgaagcgcccgatggggtgtgctccggttatatccatgagcatcttcaggaaggtgatgttgtcgaggtggcgccaccctgtggtgaatttaccctggccgatgcgaatgctgagggagtgccattagtgttagttgccggtggggtgggcgtcacgccgctgctctcgatgctacatggggcgctggctcaccaacagggtcgtgaagtgatctttatccagtgtgccctgaatggcgctgttcggccttttgctgcagagttgcagcagttggcggacaaccacgataacttgcattgtcatgttcgttatagtgagccgtctgcccaggaccaggagaagggtgactttgacagcacagggtttctggattgcgcattgctggatcagctggtgggcgatcgccgcgcagagtattatttttgtggtccggtaccgatgctcaaagcggtgtatgggctgttgcaggataaaggtgtggacgatgccgatatccattatgagttctttggaccgg

SEQ ID NO: 211175 - DNA, 1210 bp, Unknown
  Bacterial polypeptide expressing nucleotide sequence isolated from the Sargasso Sea
catgacccacatcaccgctgaccagatggctcgcgtgaaggccactgcccctgtcctcgccgtgcacggcgcgacgatcacgaagcacttctaccagcgcatgttcgcgcgccatccggaactgaagaacctgttcaaccagacgcaccagaagacgggcagccagccggaaacgctcgcgaaagccgtctacgcgtatgcggcgaacatcgacaatctcggcgcgttgggcggcgccgtgaccaggatcgcgcacaagcatgcgagcctgaacatccgccccgagcattacccgatcgtcggcgaaaacctgcttgcgtcgatcgtcgaggtgctgggcgacgcggtcgatgccgaaaccctcgaggcgtggcgcgtcgcgtacggccagctcgcgcagatcctgatcggcgtcgaggccgacctgtacgcgggcgccgcgtggagcgggttccgtccgttcaaggtcgagcgcaaggtgcgcgagagcgacgagatcacgtcgttctacctgacaccggctgacggcggcgcggcgccgacgttcgagcctggccagtacatcacggtgaagcgcttcgtcggcgacctgggcgtcgaccagccgcgccagtacagcctgtccgacgcgccgcaccgcaagtggctgcgcatctcggtgaagcgtgaagccggcaagccggaagtcattccggccggcaaggtgtcgacgctgatgcacgacggcgtggaagagggggcgatcgtcgaagtgaccgcgccgatgggcgaattctcgctgaagcgtggcgtcgagacgcccgtggtgctgatttccggcggcgtcggcatcacgccgatgatgtcgatggcgtcgacgctggtcgccgagggcagccagcgcgacgtgcggttcgtccacgcttgccgctcgggcgcggtgcacgcgttccgcgactggctgaacgatacggtgcgcgagcatgcggacgtcaagcgcacggtgttgtacgagcgggttggcccgaacgatcgcgccggcatcgaccacgacctggaagggcgcctcacgccggagcgcgtgcagcaatacgcgctcgtgccggatgccgactactacatctgcggcccgatcgggttcatgaaggcgcagcgtgacgcgctcgtcgcgctgggcgtcgcgccggaacgcgtgaataccgagatcttcggttcgggcgcgctcgagtga

SEQ ID NO: 211176 - DNA, 1195 bp, Unknown
  Bacterial polypeptide expressing nucleotide sequence isolated from the Sargasso Sea
atgttggatagccgtaccatccaagtgattaaaagcaccattcccctactcgaatctgctggtcccgcactcactcaacatttttacgaacggatgtttaaacacaatcctgagttaaaagatgtatttaacttggcacatcagcattcaggcggtcagcccgtcgcgctgtttaacgcagttgcggcctatgccaaaaacattgataacttaggtgcactcggctcggctgtagagcgtatcgcccacaaacacacagggtttttaatccaaccagaacaatatgcgattgtcggtagccacctattggcgacactcaaagagctgggtggagaagccgtcacagaagaggtattaacggcatgggccgatgcctatggatttttagccaatatctttatcaatcgtgaagcacagatttatcaagaaagtgctcagcaggatggcggctggtcgggagtgcgtgaatttatcatcagtgagaaaaaagccgagtccttagaaatagcctcctttgtattaacgcccgtggatggcaaagcggtaaaagactttgttccaggacaatacttaagcattaaggcgcaacatcctaagcttgccttcgatgaaattcgccaatattcgctctcggatgctccgaatggccgaagctatcggatcacggtaaagcgtgagcttaatggccaagtatcaaatctactgcacgatgtactgcaagtcggtgacacactttcagtgatgccacctgcgggcgatttcactttagcggttcaagctgaaacacctgtcgtattgatttcagctggggttgggcaaacgccgatgaaaagcatgttaaatcaactcttaaagcttaaacatccaagtacagtgacttggttacatgcctgcgaacacggtggagtacacggatttaaatcggccatcaaaaacaaactcggccaacatgcgaatcttgccagccatgtgtggtacagagagccgacaaaggttgatgtgttaggccaagattatgattttgaaggcacaatggacttaacctccgtcgccgataaaatcgtggccaacgcacattactatttctgtggtccgattggctttatggcttcgatcaaacagcaattactcgccttcggtgtacctagcgagcaaatgcactatgaagtctttggcccacatgccgaactctaag

SEQ ID NO: 211177 - DNA, 400 bp, Unknown
  Bacterial polypeptide expressing nucleotide sequence isolated from the Sargasso Sea
gctgctctcggccggtgtgggtgtcacgccgatgatgagtatgctcaaccagctgctggcgaatggccatcaagccgacatcacctggctgcacgcctgtgaacagggtgccgtacatgccttcagggaggatattcagcaaaagtcccgccaaaacgccaacctgctgagccgggtctggtatcgggagccgcaggccagtgacgtgcagggcgaagggtacgactttgccgggaccatggatctgagtgcagtgaaagagcgcatcacgctgcaggcccactactacttctgtggtcccgtcggcttcatgcaggcagtcaagcagcagctgatcgcggcgggcattccggccggccagcttcattacgaagtttttggtccccaccaagatctgtaa

SEQ ID NO: 211178 - DNA, 1195 bp, Unknown
  Bacterial polypeptide expressing nucleotide sequence isolated from the Sargasso Sea
tatgttatctgctcaaacaattgccatcgttaaaagcactgtgccattactggaaggtgccggtgtagccatcactaaccatttctatcagcgtatgtttcaggtgaatccggagctgaaagatatttttaacatgactaaccagcacagtggccgtcagcaatttgctttgtttagtgctattgccgcttacgccaaaaatatcgataacctgtctgtgctgactgaaactgtggaacgtgtggcgcataaacacaccagtctgtttattcagcctgagcactacgacattgtaggtcatcacctgattgaaaccttacgtgagctggctcctgatgcctttacgccagaggtggaacaagcctggacagaagcttatggcgtactggcgaaaatttttatcggccgtgagcgtacattgtacaaccagactgaacaaaagccgggtggctggtatgggccacgtcgttttaaaatagagcaaaaaatccgcgagtctgaactggtatccagttttgttttggtacccaaagatggtgaagctgtggtggattacctgccaggtcaatatctgggcgtaaaagttaaacctgctttttgtgactattatgaagtgcgccagtattccttgtcagataaagccaatggccaaagctaccgtatcagtgtcaaacgtgaactgggcgacaaaccgggtttagtatcgaattatctgcatgatcatatgcaagcaggcgacgagctggatattctgcctcctgctggtgatttcttcctgcaatctgctcatttacctacagtgctgatctccgctggtgtgggtttaactcctatgctgtctatgctggaaagcattgtggcgttaaagcaacaaaccccggtgtttttcctgcacgcctgtgaaaacgcagagcaacattcgtttgcacagcgtatttcgcaactggagcaggactacccattgctgcacaactttacttggtacaacaaagctgagcaaaacactgccgccaaccaattcgctggtttgatggatctgaaagctgttgcagctcagttgccgctgcaaagtgccaatttctacctttgtggccctacaggttttatgaagtttgccaaagatcagttactggctttgggtgtggcttcggcacaaattcactatgaagtttttggacctcatagcgacctgtaa

SEQ ID NO: 211179 - DNA, 1192 bp, Unknown
  Bacterial polypeptide expressing nucleotide sequence isolated from the Sargasso Sea
tatgcttgacgcacaaaccatcgctacagtgaaagccaccattcccctgctggttgaaacaggtccgaagctgaccgcccatttctacgatcgcatgtttacgcataacccagagctgaaagaaattttcaacatgagtaaccagcgtaatggcgatcagcgcgaggcgctgtttaacgcgattgccgcgtatgccagcaatatcgaaaacctggcggcgctgttgccagcggttgagaaaatcgcgcaaaagcataccagtttccagattaaaccagagcagtacaacatcgtgggtggtcatttgctggcaacgctggacgaaatgttcagcccaggccaggaagttctggatgcgtggggtaaagcgtatggcgtactggcgaacgttttcatcaaccgtgaagcgcaaatctatagcgaaaatgccaataaaaatggcggctgggaaggtacccgtcctttccgcatcgtggcaaaaaccccacgcagtgcactgatcaccagctttgagtttgaacctgtcgatggtggcgcagtagctgaatatcatccgggacaatacctgggcgtctggctgaagccggaaggtttcccgcatcaggaaattcgtcagtactcactgacccgtaagcctgatggcaaaggctatcgtattgccgttaagcgtgaagacggtggtcaggtttccacctggctgcacaaccatgcgaatgttggcgacgttgttcacctggccgcacctgcgggcgatttctttatggacgtcgcgaccgacaccccggtatctctgatctccgcgggcgtgggacaaaccccaatgctggcgatgctggacacgttggcgaaagcgaagcatacggcgcaggttaactggttccacgcggcagaaaatggcgatgtacatgccttcgctgatgaagtaaatgaactcggcaaaacgctgccacgctttagtgcgcacacctggtatcgtgagccaaccgaaaccgatcgcgcgaaaggtgcgtttgatagcgtaggtctgatggatttgaacaagctggaaagcgcaatcagcgatccggcgatgcagttttatctgtgcggtccggttggtttcatgcagttcgccgcgaagcagctggtcggcctgggcgtgaaaaacgagaacattcattacgaatgcttcggtccgcataaagtcttgtaa

SEQ ID NO: 211180 - DNA, 1173 bp, Unknown
  Bacterial polypeptide expressing nucleotide sequence isolated from the Sargasso Sea
tatgttatctgctcaaaccattgccatcgttaaaagcacattgccattactggaaagtgccggtgtggccatcacaaaccatttttatcaacggatgttcaggctgaatccagagctgaaagatatttttaatatgactaaccagcacagtggccgccagcaatttgctttatttagtgctattgccgcttatgccaaaaatatcgataacctggctgtgctgactgaaactgtggagcgagtagcgcataaacataccagcttttttatccagccagagcactatggtattgtcggccaccacctgattgagaccttacgtgagctggctcctgatgcatttacgccagaagtagagcaagcttggaccgaagcttatggtgcactggcgactatttttactggccgtgagcgtcagctgtataaccagaccgaacaaaagccgggtggctggtatggcccacgtcgttttaaagtgaaagaaaaactttctgaatctgaactggtatccagttttgtgctggtgcctacagatggcgaagctgtagtggattaccagccgggtcagtatttgggggtgaaagtaaaacctgcgtattctgattattatgaaattcgtcagtattcgctgtcagataagcccaatggtcaaagctatcggatcagtgtcaaacgtgaattgggtgaggtagctggtttagtatccaactatctgcataaccatattcaggtgggagacgagctggatattctgccgccagctggtgatttctttctgcaatcggctcatttacctacagtgctgatctccgctggtgtggggttaacccctatgctgtcgatgctggaaagcattgtggcgttaaaacaacaaacccctgtgtttttcctgcacgcctgtgaaaaccaacaacaacattcctttgcacagcgtatttcgcaactgcaacaagactactccttactgcacaactttacctggtacaacaaagctgagcagaacacagcggccactcagtttactggtttgatggatctgaaagctgtcgctgcccagttgccgctgcaaagtgccaatttctacctttgtggccctacaggttttatgaagtttgccaaagatcagttactggctttgggtgtagcttcggcacaaattcactatgaagtatt

SEQ ID NO: 211181 - DNA, 1177 bp, Unknown
  Bacterial polypeptide expressing nucleotide sequence isolated from the Sargasso Sea
catgcgaacgcaggttggaattatcggtgcaggcccagcgggtcttcttctctcgcatttgttgtcccaaaagggaatcgactctgtgattattgaatgccgcagtagattttatgtggagggtcgtgtcagggctggagttcttgagcagggtacagttaacttgctagtggatgcaggtcttggtcagaggcttatgaaggaggggttgcatcatcatggaattgagattcgtgctggcggcgagtctcatcgtatagacttggattctctgactggaggcagaggtataaccgtttatggacagcaggaggtggtgaaggatctaatttctgttcgtgatcagcaaaatggaaaaatgatatttgaagcacagaacgttgaaatattaggtatacatactgagaaacctaaagtcagatttagccaagccggtgatcaacacgagcttgaatgtgattggatagccgggtgtgatggcttttatggtgtgagtaggaattctatacctgattcagaaatacgaagttttagccgcgagtatccatttgcgtggcttggcatattagtggaagctcctccttcttcagatgaattgatctatgctaatcacgaaaatggttttgcattacatagtatgcggtctaaggagcgcacaagaaactatattcagtgcgatcctcacgataagattgaggattggtctgaagatcggatttgggatgagttgcatagtcgtttagaaacgatttcaggttggaagcttttggagggaaaaattcttgagaaaggaataacgccgatgcggagttatgtgtgcgagaccatgagctttgggcgtttgtttttggcaggagatgccgctcacatagtgccgcctaccggagctaaaggaatgaatttggccatttcagatgtccgctacctgagtgctgcgcttttcgcttggtacgaatcaaaaagcgaagggctattggctcaatatgctgagaattgcctacgacacatttggcgcggagagcatttttcctggtatatgactaaactgcttcataaattccccgatggtagtttgtttgatgaacgcttacaaaaatctgagctcgaatatttgtttaggtccgaggctgcttctaaaagtttggctgaaaattacgttggtttcagtttcgagtaa

SEQ ID NO: 211182 - DNA, 1234 bp, Unknown
  Bacterial polypeptide expressing nucleotide sequence isolated from the Sargasso Sea
atgcgcacccaggtcgccatcatcggcgccggtccgtccggccttttgctttcccatctgttgcgcctgcaaggcatcgattccatcctcgtcgaagcgcgttcccgcgaatactgcgagaaccgcatccgcgccggcgtgctggagcaggggacggtcgacacgctgaacgaagccggcctcggcgaccggatgcgccgtgaagggctcgaacatcacggcatcgaactgctgttctcgggccagcgccaccgcatcgacctgtccgagctgaccggcgggcgcgcgatcaccgtctacagccagcacgaagtggtgcgcgacctgatcgcggccggcgtcgagcatggccacgcgatgcacttcgaggtaagcgacgtcgcgttgcacgacgtcgaaggcgagcacccgttcgtcacgttcaagcatgccgacggccgcgaagaccgcatcgactgcgactacatcgccggttgcgacggctttcacggcatcgcgcgccagacgattccggcggaacgattgaacacgttcgagcgcgtctatccgttcgcgtggctcggcattctcgccgacgcggcgccgtcgctcgacgagctcgtctacgcgcatcacgacaacggtttcgcgctgttctcgatgcgctcgccgacggtcacgcgcctgtacctgcagtgcaagcccgacgaagacctcaccgaatggtccgacacgcggatctgggacgaattgcacacgcgcttctcgaacgacacgggctggacgccgaccgagggccggatcacgcagaagagcgtgacgccgatgcgcagcttcgtgtcggagacgatgcagcacgggcgcctgttccttgccggcgacgccgcgcacatcgtgccgccgaccggcgcgaaggggatgaacctggcggtggccgacgtccgcgcgctgtcccgcgcgctcggtgcgcgctaccgcaacggcgacgcgacgctgctcgacacgtattccgcgacctgcctcgagcgcgtgtggcgcgccgagcacttctcgtacttcatgacgaacatgctgcattcgtcgccggaagactcgccgttcgtcaatcgcctgaagtttgcggagctgaaatacgtgacgcgctcgcgggccgccgcgcaggcactcgcggaaaactacgtcgggctgccgttcgacgatgcgacaccccccgaggcaacccgccttgacaacgcgctgtgcgcgactctatgat

SEQ ID NO: 211183 - DNA, 952 bp, Unknown
  Bacterial polypeptide expressing nucleotide sequence isolated from the Sargasso Sea
atgaaggttaaaagaacacaagtaggaataataggggctgggccggcaggtctaacattagctcgcttattatttgaaagcggtataagcacagttattctagaagcaaaagatagagaatatgtagaaaatcgaatacgcgcaggagtcttagaacaaggaagcgttgaactcttagggcgagcaaaatccgatgctcggttacaatctaatgctcaaattcataaagggatcgaaataagtttgaacggtgatcgctgtaggattaaccttgaaaaactttctggaggaaaacacgtaaccgtctatgggcaaaccgaaattactatagatttgatagaggttcatactaagcttggtggcgagataatctttgaagcttcaaacgtcatgcccagagattttgaaacgaaaactcctgttattcaatatgagagcaacggtgatttaactgaactacaatgcgacttcatcgcaggctgtgatgggtttcatgggatatcccgatcatcaataccacccagcaaacttaaattctttgaacgcctctatccatattcttggttaggtatattagctgaagctccacccccaagtaaggagcttatttatgctagccacgaaagaggttttgccctctatagcatgcggccaccgaccagatcgcgcttatatttgcaatgcgagaataatacaactctcgataactggcccgatgaggttatctggaatgagctgcgatgcaggttaggagtaaaagatgccaatttaatacaggaaggagaaatcattgaaaaaggggtaacaccaatgcgcagctttgttacagaaccgatgcaatatggaaatctatttctggccggcgatgcagctcatatcgttccacccactggcgccaaaggactgaatctcgcattatacgatatattttacctgtcaaatgcatttacat

SEQ ID NO: 211184 - DNA, 556 bp, Unknown
  Bacterial polypeptide expressing nucleotide sequence isolated from the Sargasso Sea
gaaatatataataacatcaaatttgttaaaaataatttctttggtccttgtggtgcggtaaaaacagggctcatatcatcttctgcagatgcaatggttgtttatccagcagatgatttaattaatggaaatattcttgatgaaatgtataggttttatttagaaggttacgatattgtagctccaagtagatttatgaaaggtggtagtatgaaaaattgtcctttaattaaagaaatactagttagatttgcgtctttttctttatttaaactttcaagtattccagtagaggatgctagtaatgggtttcgccttttttcaaaaaaaattatcaatagatttgaaatagagtccgaacttggttttgcatattcattagaattactagtaaaggcagaaagacatggttataaaattaaacaaataccttctcaatggttagaaagaaaactaggatcaagtaattttaaaattttgaaatggttaagacaatatttaaaatggtatttttatggactcgcaactaattttgttttaaacaaaaaaaaatgaa

SEQ ID NO: 211185 - DNA, 413 bp, Unknown
  Bacterial polypeptide expressing nucleotide sequence isolated from the Sargasso Sea
tagatattttttgaataatcttccattaacatccaagttatggtctaggttctttctattagctgtatttgcaactatgtatgcaagggatttgggaattaaaaaagatttctacagttctttaggtttagatgccagagattacgaccagtttgttattaataaaacaaatgaaactgcagctagagttttccctgtagtaatggacgtttatgataaatctttttatggaagattagataaaatagtagagaataatgaggttctttccgatattgcaaacagtgatggaaataaagtatctaaaacttttaaaaaattacctaaatatttatcaaacggttaccagttattaagactatacttattgaaacctcttgatagcaaagatttccaaccttcgattagataat

SEQ ID NO: 211186 - DNA, 237 bp, Unknown
  Bacterial polypeptide expressing nucleotide sequence isolated from the Sargasso Sea
aatggctcaatcaactgttgaatcaaaaaataaaaaagatattaataatggaaagataccagcaaaagaaacaattttgtccccaagattctatacaacagattttgaggctatggaaaatatggatttatcaataaacgaggaggaattggaggctatttgtgaggaatttaggaaagattacaatagacatcattttgtaagaaatagtgaatttgaaggcgctgcagaaaaatt

SEQ ID NO: 211187 - DNA, 415 bp, Unknown
  Bacterial polypeptide expressing nucleotide sequence isolated from the Sargasso Sea
atttagatacttcttgaacaatcttccattaacatccaagttatggtctaggtttttcttacttgctgtatttgcaaccatgtatgctagagatttgggaattaaaaaagatttctacagttcattaggtttagatgccagagattacgaccagtttgttattaataaaacgaatgaaactgcagctagagttttccctgtagtaatggacgttaataataaatccttttatggaagattagataaaatagtagaaaataataagattctttccgatattgcaagcggtactggaaataaagtatctaaaacttttagaaaagtacctaaatatttatcaaacggttaccagttattaagactatacttattaaaacctctagatagcaaagattaccaaccttcaattagataa

SEQ ID NO: 211188 - DNA, 469 bp, Unknown
  Bacterial polypeptide expressing nucleotide sequence isolated from the Sargasso Sea
aattaccattggcggctctacttttacacacccattattcgactacttccataggtttagatattttttgaataatcttccattaacatccaagttatggtctaggttctttctattagctgtattcgcaactatgtatgcaagggatttgggaattaaaaaagatttctacagttctttaggtttagatgccagagattacgaccagtttgttattaataaaacaaatgaaactgcagctagagttttccctgtagtaatggacgtttatgataaatctttttatggaagattagataaaatagtagagaataataaggttctttacgatattgcaaacagtgatggaaataaagtatctaaaacttttaaaaaattacctaaatatttatcaaacggttaccagttattaagactatacttattaaaacctcttgatagcaaagatttccaaccttcgattagataa

SEQ ID NO: 211189 - DNA, 220 bp, Unknown
  Bacterial polypeptide expressing nucleotide sequence isolated from the Sargasso Sea
aatggctcaatcaactgttgaatcaaaaaataaaaaagatattaataatgggaagataccagcaaaagaaacaattttgtctccaagattctatacaacagactttgaggctatggaaaatatggatttatctataaacgaggaggaattggaagctatatgtgaggaatttaggaaagattacaatagacatcattttgtaagaaatagtgaatttgaa

SEQ ID NO: 211190 - DNA, 265 bp, Unknown
  Bacterial polypeptide expressing nucleotide sequence isolated from the Sargasso Sea
atggctcaatcaactgttgaatcaaaaaataaaaaagatattaataatggaaagataccagcaaaagaaacaattttgtccccaagattctatacaacagactttgaggctatggaaaatatggatttatcaataaacgaggaggaattggaagctatttgtgaggaatttaggaaagattacaatagacatcattttgtaagaaatagtgaatttgaaggcgctgcagaaaaattagatcctgagacaagagagctttttgttg

SEQ ID NO: 211191 - DNA, 598 bp, Unknown
  Bacterial polypeptide expressing nucleotide sequence isolated from the Sargasso Sea
cctgatagcaaaatttttccactatttaattactttgaaaattggtgtcaagatgaaaatagacatggggatttctttgacgcattaatgaaagcacagccacgtactgttaaatcattaagccaaaaaattacaattggcggctctacttttacacacccattattcgactacttccacaggtttagatatttcttgaataatcttccattaacatccaagttatggtcaaggttctttctattagctgtatttgcaactatgtatgcaagggatttgggaattaaaaaagatttctacagttctttaggtttagatgccagagattacgaccagtttgttattaataaaacaaatgaaactgcagctagagttttccctgtagtaatggacgtttatgataaatctttttatggaagattagacaaaatagtagagaataataaggttctttctgatattgcaaacagtgatggaaataaagtatctaaaacttttaaaaaattacctaaatatttatcaaacggttaccaattattaagactatacttattaaaacctctcgatagcaaagatttccaaccttcgattagataat

SEQ ID NO: 211192 - DNA, 764 bp, Unknown
  Bacterial polypeptide expressing nucleotide sequence isolated from the Sargasso Sea
ggaatttattgactttttgattagttcttgcacagccgaattctctggatgtgtactttataaggaaatgaaacgcaggggctctaatgaagatataactcagctatttcagttaatggctcgtgatgaagccagacatgctggatttattaatgacgctcttagagaggccggcgtagccgtaaatttagggtttttaacacagaaaaagaaatatacgtattttcgtcctaaatttatctactatgcaacttatttatctgagaaaattggatacgctcgatatattacgatatatcggcaccttgaaaaaaatccagaacatagatttcatcctatttttaagtggtttcaagagtggtgtaacgatgaatttgctcacggcgaggcgtttgcgcttttgatgaaaacagatcctaagctgacctcaggtataaatgttttttggataaaattttttctgactgctgtgtatgccactatgtatataagggaccatcaaaggccagcgtttcataaagcattaggagttgaccctgactggtatgctgaagaagtttttaccaaaacttctgagttgagtaagcaaatatttccgataactctagatatagataatcctaagtggtttgagaaattgaggcgacttcaaaaagttaacgcagaccttgctgaggcaaaaaagaataaaaataagttgaagcagctgtggtgtagctcaagagcagcattgatctttctttcacttttagctgtaccggcaa

SEQ ID NO: 211193 - DNA, 565 bp, Unknown
  Bacterial polypeptide expressing nucleotide sequence isolated from the Sargasso Sea
tctgcagtacaccttcttcaagcccaagttcatcatctacgcaacttacctgtccgagaagattggctactggaggtacatctccatctaccgccacctccaggcgaaccccgacgaccagctctaccccattttccagtacttcgagaactggtgccaggacgagaaccgccacggtgacttcttcaccgcgtgcctcaaggccaggcctgagttcatcaacgactttgaggccaagctgtgggccaggttcttctgcctgtccgtgtacgtgaccatgtacctcaacgaccactcccgcaccgagttctacgagtccatcggcctgaacaccacccagttcaacatgcacgtcatccaccagaccaacaagaccaccgcgtccatcttcccccaggtcatcgacacctacaacccgaagttcaaggagcaccttgacgagctcgtcgtcgtgaaccagaagctggccaaggcggagtccccggtggagaaggcgccgctcatcgcgtccttcgccttccacctcctctccatcgccctgagaagcccatcgattcgggctcca

SEQ ID NO: 211194 - DNA, 638 bp, Unknown
  Bacterial polypeptide expressing nucleotide sequence isolated from the Sargasso Sea
tgggagatacatagcaatttataggcatctcgaaaagaaccctgataacaaaatttttccactatttaattattttgaaaattggtgtcaagatgaaaatagacatggagatttttttgatgcattaatgaaagcacagccacgtactgttaaatctttaagccaaaaaattaccattgggggctctacttttacccacccgttatttgactacttccataggtttagatattttttgaataatcttccattaacatccaagttatggtctaggttctttctattagctgtatttgcaactatgtatgcaagggatttaggaattaaaaaagatttctacagttctttaggtttagatgccagagattacgaccagtttgttattaataaaacaaatgaaactgcagctagagttttccctgtagtaatggacgtctatgataaatctttttatggaagattagataaaatagtagagaataataagtttctttcagacattgcaaacagtgatgaaaataaagtatctcaaacttttaaaaaattacctaaatatttatcaaacggttaccagttattaagactatacttattaaaacctcttgatagcaaagatttccaaccttcgattagataat

SEQ ID NO: 211195 - DNA, 656 bp, Unknown
  Bacterial polypeptide expressing nucleotide sequence isolated from the Sargasso Sea
atcgagaaaaataggttattggagatacatagcaatttataggcatctcgaaaagaaccctgatagcaaaatttttccactatttaattactttgaaaattggtgtcaagatgaaaatagacatggggatttctttgacgcattaatgaaagcacagccacgtactgtaaaatctttaagccaaaaaattacaattggcggttctacttttacacatccattatttgactacttccataggtttagatattttttgaataatcttccattaacatccaagttatggtctaggttctttctattagctgtatttgcaactatgtatgcaagggatttgggaattaaaaaagatttctacagttctttaggtttagatgccagagattacgaccagtttgttattaataaaacaaatgaaactgcagctagagttttccctgtagtaatggacgtttatgataaatctttttatggaagattagataaaatagtagaaaacaataaggttctttccgatattgcaaacagtgatacaaataaagtttctaaaacttttaaaaaattacctaaatatatatcaaacggttaccagttattaagactatacttattaaaacctcttgatagtaaagatttccaacctttgattagataat

SEQ ID NO: 211196 - DNA, 601 bp, Unknown
  Bacterial polypeptide expressing nucleotide sequence isolated from the Sargasso Sea
atgaataagcactcagcagatgcaactacagcagaagaagctattgcgatccagtcagcgttggacagtgatatggcaactgaggttgcgatgcaagatacactattaacgccaaggttctacaccactgactttgataaactcgatgcgattgacgttagccagatttcagaggaatgggaaccacttattgaaagaatgctcagcgatccaaataagggtcattttaagaaaaatgacgattgggataaggttgactgggatggtatggacccggaactaaaaaaggaatttattgactttttgataagttcttgcacagccgaattctctggatgtgtactttataaggaaatgaagcgaaggggttctaatgaagatataactcagctttttcaattgatggctagagatgaagccagacatgctggatttataaatgatgctctcagagaggctggcgtagctgtaaatttagggtttttaacacagaaaaagaagtatacttactttcgtcctaaatttatctactatgcgacttatttatctgaaaaaattggatatgctcgcttatattaccaatatatcggcaccccctgaa

SEQ ID NO: 211197 - DNA, 664 bp, Unknown
  Bacterial polypeptide expressing nucleotide sequence isolated from the Sargasso Sea
tttgaaagatttaatcgatgacaataccactgatatggcgatggaggagactctaattagccccagattttatactactaattataaggagctcgataagattgatgtttctcgagttcgttcagaatgggatcctttggttgaagagatgaggtctgacccgaacaaaactcatttcaaaaaaacttcagattgggatgactttgactttgaaaacttggaaccgggtttaaggaaagaattcattgattttcttgttagctctctgacctcagagttctcaggatgcgttctttacaaagagatgaagcgtcagggaactaatgaagatgtttgtgaattattttctttgatggcgagagatgaagctagacatgccggttttataaatgatgcccttagggaggcaaacatagcggtaaaccttgggtttttaactaggaaaaagaagtatacatatttttcaccaaagtttatttactacgctacatatctgtctgagaaaatcggttatgccagatatatcacaatctacagacatttagaaaaaaaccctgactctaggtttcatcctatatttaaatggttcgaaaagtggtgtaatgatgagttcagacatggggaagcttttgccttgctaatgagaacagaccccaagttaaca

SEQ ID NO: 211198 - DNA, 647 bp, Unknown
  Bacterial polypeptide expressing nucleotide sequence isolated from the Sargasso Sea
aataggttattggagatacatagcaatttataggcatctcgaaaagaaccctgatagcaaaatttttccactatttaattactttgaaaattggtgtcaagatgaaaatagacatggggatttctttgacgcattaatgaaagcacagccacgtactgttaaatcattaagccaaaaaattaccattggcggctctacttttacacacccattattcgactacttccataggtttagatatttcttgaataatcttccattaacatccaagttatggtcaaggttctttctattagctgtatttgcaactatgtatgcaagggatttgggaattaaaaaagatttctacagttctttaggtttagatgccagagattacgaccaatatgtaattaataaaacaaatgaaactgcagctagagttttccctgtagtaatggacgtttatgataaatctttttatggaagattagataaaatagtagagaataataaggttctttctgatattgcaaacagtgatggaaataaagtatctaaaacttttaaaaaattacctaaatatttgtcaaacggttaccagttattaagactatacttattaaaacctcttgatagcaaagatttccaaccttcgattagataat

SEQ ID NO: 211199 - DNA, 919 bp, Unknown
  Bacterial polypeptide expressing nucleotide sequence isolated from the Sargasso Sea
gaatgggagccgctcattgaaagaatgctcagtgatccaaataagggacattttaagaaaaatgacgattgggataaggttgactgggatggtatggacccagaattaaaaaaggaatttattgactttttgataagttcttgcacagccgaattctctggatgtgtactttataaggaaatgaagcgtaggggttctaatgaagatataactcagctgtttcaattgatggctagagatgaagccagacatgctggatttataaacgatgctctcagagaggccggcgtagctgtgaatttgggttttttaacacaaaaaaagaaatacacttactttcgtcctaaatttatctactacgcgacttatttatctgaaaaaattggatatgcccgctatatcacgatatatcggcaccttgaaaaaaatccacaacataggtttcatccaattttcaagtggttccaagaatggtgcaacgatgaatttgctcatggtgaagcgtttgcacttttgatgaaaacggatcctaagttgacttctgggataaacgttttttggataaaattttttctaactgctgtgtatgcaactatgtatatacgggatcaccaaaggccggcatttcataaagcactaggtgttgaccctgactggtatgccgaagaagttttcaccaaaacttccgagttgagtaagcaaatatttccgataactcttgatatagaaaacccgaagtggtttgagaagctaaggcggcttcaaaaagttaatgcagatcttgccgacgcaaaaaggaataagaataaggtaaagcaactgtggtgtagcataagagccgcattgattttcctctcacttttagctgtaccggctaagagtaataaagtcccaaatgttacaaaaatggagcctgcat

SEQ ID NO: 211200 - DNA, 1009 bp, Unknown
  Bacterial polypeptide expressing nucleotide sequence isolated from the Sargasso Sea
atgcaggacacactattaacgccaaggttctacaccactgactttgatgaactcgatgcgattgacgtgagccagatttcagaggaatgggaacctcttatagaaagaatgctcagtgatccaaataaaggccattttaagaaaaatgatgattgggataaggttgactgggatggtatggatccggaactaaaaaaggaatttattgactttttgataagttcttgcacagccgaattctctggatgtgtactttataaggagatgaagcgaaggggttctaatcaagatataactcagctgtttcaattgatggctagagatgaagccagacatgctggatttataaatgacgctctcagagaagctggcgtagctgtaaatttggggttcttaacacagaaaaagaaatatacttactttcgtcctaaatttatctactacgcgacttatttatctgaaaaaattgggtatgctcgctatattaccatttatcggcaccttgaaaaaaatccacaacataggtttcatccaattttcaagtggttccaagaatggtgcaacgatgaatttgcccacggtgaagcgtttgcacttttgatgaaaacggatcctaagttgacctctggtataaatgttttttggataaaattttttctgactgctgtgtatgcaactatgtatatacgggatcaccaaaggccagcatttcataaagcattaggtgttgaccctgactggtatgccgaagaagtttttaccaaaacttccgagttgagtaagcaaatatttccaataactcttgatatagataatcctaagtggtttgagaaattgaggcgacttcaaaaggttaacgcaaatcttgctgaagcaaaaaggaataagaacaagttgaagcaactgtggtgtagtacaagagccgcactgatttttctttcacttttagctgtaccagcaaagagtaataaagtcccaaatgttacaagaatggagcctgcatactgat

SEQ ID NO: 211201 - DNA, 877 bp, Unknown
  Bacterial polypeptide expressing nucleotide sequence isolated from the Sargasso Sea
atggtccctccaaccgccgtcgcagaggccaacgctgttgccacaaaggatcccgttaaggacacgatcctcactccgcggttttacaccacggatttcgatgccatggctgccatggatctgcgtccgaatgaggcggaactggaggccatttgcgaggagttccggaaggattacaaccgtcatcatttcgttcgcaacgacgactttgacggcgctgcagacaagctcgaccccggaacccggcaggtgttcgtggagttcctggaacagagctgcacctcagagttctctggttttcttctctacaaagagctgagccgtcgcatcaagcagcagaaccccctgctggccgagtgttttgctcacatggcacgggatgaggcccgccatgccggcttcctcaacaaggccatgagtgatttcggcatgcagctggacctcggtttcctcaccgccaacaaggactacaccttcttccagccgaagttcatcttctacgccacctacttatccgagaaaatcggttactggcgttatatcgccatctaccgccatctggagaagaaccccgagagcaagattttcccgatcttcaatttctttgagaattggtgtcaagacgagaatcgtcacggtgacttctttgatgcgctgatgaagtcccagccgaacacagtgcggggaccgatcgcaaaactgtggtgtcgattcttcctgctcgcggtcttcgcaaccatgtatgtccgtgatgtggcccgcaaggagttttacgaagccctcggactcgacgcacggacgtatgacaagatggtgatcgagaaaaccaacgagacgacggctcgtgttttcccggttgttctcgatgtgaacaatc

SEQ ID NO: 211202 - DNA, 716 bp, Unknown
  Bacterial polypeptide expressing nucleotide sequence isolated from the Sargasso Sea
aacagccaataaagaatatacttatttcccaccaagaagtattttttacgctacttatttatccgaaaaaataggttattggagatacatagcaatttataggcatcttgaaaagaaccctgatagcaaaatttttccactatttaattacttcgaaaattggtgtcaagatgaaaatagacatggggatttttttgacgcattaatgaaagcacagccacgtaatgttaaatctttaagccaaaaaattaccattgggggctctacttttacacacccgttatttgactacttccataggtttagatattttttgaataatcttccattaacatccaagttatggtcaaggttctttctattagctgtatttgcaactatgtatgcaagggatttaggaattaaaaaagatttctacagttctttaggtttagatgccagagattacgaccagtttgttattaataaaacaaatgaaactgcagctagagttttccctgtagtaatggacgtttatgataaatctttttatggaagattagataaaatagtagagaataataaggttctttccgaaattgcaaaaagtgatgaaaataaagtatctcaaacttttaaaaaattacctaaatatttatcaaacggttaccagttattaagactatacttattaaaacctcttgatagcaaagatttccaaccttcgattagataat

SEQ ID NO: 211203 - DNA, 707 bp, Unknown
  Bacterial polypeptide expressing nucleotide sequence isolated from the Sargasso Sea
gatgtctcaatcaactattgaatctacaaataaaaaagaaataaatagaggtaaagccccagcaaaggaaacaattttgtctccaaggttttatacaacagactttgaggcaatggaaaatatggatttatcaattaatgaggaagaattagaagcgatatgtgaggaatttaggaaagactacaataggcaccattttgtaagaaatagtgaatttgaaggagctgctgaaaagttagatcctgagacgagagaactttttgttgattttctggaagggagttgtacatcagaattttcaggttttttactttataaggagctaagcaaaaggattaaagacaaaaaccctctccttgctgaatgttttgctcatatggccagagacgaagctagacatgcaggtttcttgaataaatccatgagtgattttggattacagttagatttaggttttttaacagcaaataaagattacacctattttccaccaagaagcattttttatgccacctatttatctgaaaaaattggctattggagatacatcgcaatttataggcatcttgaaaaaaatccagatagcaagatttttccactatttaattactttgaaaattggtgtcaagatgaaaataggcatggggatttctttgatgcactgatgaaagcacagccacgctctgttaaatctttaagtcaaaaaa

SEQ ID NO: 211204 - DNA, 865 bp, Unknown
  Bacterial polypeptide expressing nucleotide sequence isolated from the Sargasso Sea
acagactttgaggctatggaaaatatggatttatcaataaatgaagaggaattggaagctatatgtgaggaatttaggaaagattataatagacatcattttgtaagaaatagtgaatttgaaggcgctgcagaaaaattagatcctgagacaagagagctttttgttgattttctcgagggaagttgtacttcagaattttcaggttttttactatacaaggaacttagcaaaaggattaaagacaaaaaccctcttcttgctgaatgttttgcccatatggccagagacgaagctagacatgcaggtttcttgaataaatctatgagtgattttggattacagttagatttaggttttttaacagcaaacaaggattacacctatttcccaccaaggagtattttttacgctacttatttatctgaaaaaataggctattggagatacattgcaatttataggcatcttgaaaaaaatccaggtagcaaaatttttccactatttaattattttgaaaattggtgtcaggatgaaaatagacatggggatttctttgatgcactgatgaaagcacagcctcgtactgttaaatctctaagtcaaaaaattaccattggcggctctacctttacacacccactatttgactacttccatagattcagatattttttgaataatcttccattaacatccaagttatggtctaggttttttctattagctgtatttgcaactatgtatgcaagggatttgggaattaaaaaagatttctacagttcactaggtttagatgccaaagattacgaccagtttgttattaacaaaacaaatgaaacggcagctagagttttccctgtag

SEQ ID NO: 211205 - DNA, 817 bp, Unknown
  Bacterial polypeptide expressing nucleotide sequence isolated from the Sargasso Sea
gatggtccctcccaccgccgttgccgagcaggccgaaagcaacgttgccaccaaagacccggccagggacacaatcctgacgccccgtttctacaccacggatttcgaggcgatggcctcgatggatctccgaccgaacgaggctgaactcgaggcgatctgcgaagaattccgtaaggactacaaccgtcaccacttcgtccggaacgaggaatttgagggtgcagctgacaaactcgaccctgaaacccgccgggtgttcatcgagtttctggagcagagctgtacgtctgaattctccggttttctgctctacaaggaactaagccgtcgcatcaaacagaagaatccattgctggctgaatgctttgcccacatggcgagggatgaagcccgccatgctggatttctcaacaaatcaatgagtgattttggggttcagctcgacctcggcttcctcacagcaaataagaaatacacattcttcaaaccaaaattcatcttctacgccacatacctttcagaaaagattggctactggcggtacatcgctatttatcgtcatctggaaaacaatcccgacagcaagattttcccgattttcaatttcttcgaaaattggtgtcaggacgaaaaccgccacggagattttttcgatgccttgatgaaggcacagccggacactgttcgtggaccaatcgccaaactttggtgccgattcttccttctggcagtgttcgccacgatgtacgtgcgcgatgttgcaagaaaagagttttacgaatccctgggcctcgatgcccgtgactacgaccgc

SEQ ID NO: 211206 - DNA, 697 bp, Unknown
  Bacterial polypeptide expressing nucleotide sequence isolated from the Sargasso Sea
atggtccctcccaccgccgtggccgaaggcagcgctgtagccatcaaggatcctgtcaaggacacaatcctgacccctcgcttctacaccaccgatttcgaagcgatggcggcaatggaccttcagcccaatgaggctgaacttgaagccatctgtgaagagttcaggaaggattacaaccgccaccacttcgttcgtaacgaggagttcgagggtgctgcggacaagctggatcctgaaacccgcaaggtgtttatcgaattccttgagcagagctgcacatcggaattttcaggcttcctgctctacaaggaactgagccgccgcattaaggcgaagaaccctcttctggccgagtgctttgctcacatggctcgggatgaagctcgccacgccggtttcctcaacaagtcgatgagtgatttcggcatgcagcttgatctcggcttcctgaccgcgaacaaggactacacgttcttcaagccgaaattcatcttctacgccacctacctgtctgaaaagatcggctactggcgttacatcgccatttaccgccacctcgaaaagaaccccgacagcaagatcttcccgatcttcaacttctttgagaactggtgtcaggacgaaaaccgtcatggtgatttctttgatgccctgatgaaggcccaaccggacacggtccgtggccccatcgcca

SEQ ID NO: 211207 - DNA, 859 bp, Unknown
  Bacterial polypeptide expressing nucleotide sequence isolated from the Sargasso Sea
gatggttccccccagcgcgatcgccgaagctcctcgctctggtggtgagcccgccatcaaagacccggtgaaggacacgatcctgactccgcgcttctacacgaccgatttcgaagcgatggccgcgatggatttgcggcccaatcaggacgagttggaagcgatttgcgaggagttccgcaaggactacaaccgccatcacttcgtccgcaatgaggcctttgatggtgcggccgacaagctcgatccagaaacacgccgcgtgtttgtggaattccttgagcagagctgcacctccgagttttcagggttcctgctctacaaggagctgagccgccgcatcaagcagaaaaaccctctgctggctgagtgctttgcccacatggcccgcgatgaggctcgccacgccgggttcctcaacaaggccatgggtgactttggcgttcagctcgaccttggcttcctgacggccaacaaggcctacaccttcttcaagccgaagttcatcttctacgccacctatctctcagagaagattggctactggcgttacatcgccatctatcgccacctcgagcaaaaccccgacagcaagatcttcccgatcttcaatttcttcgagaactggtgtcaggacgaaaaccgccacggcgatttctttgatgccttgatgaaggctcagcccagttccgttcggggtctgcaggcgcgcctctggtgccgcttcttcctgctggccgtcttcgcgaccatgtacgtccgtgatgtggcccgtaaggagttctacgaagccctcggcctggatgctcgcgagtacgacaagtacgtgatcgcaaagaccaacgagacctctgctcgg

SEQ ID NO: 211208 - DNA, 889 bp, Unknown
  Bacterial polypeptide expressing nucleotide sequence isolated from the Sargasso Sea
ctgagacaaggggaactttttgttgattttcttgaaggaagttgtacttcagaattttcaggttttttactttacaaggagctaagcaaaaggattaaagccaaaaatccccttcttgctgaatgttttgctcatatggccagagacgaagcaagacatgcaggcttcttgaataaatcaatgagtgactttggattgcagttagatttaggttttttaacagccagtaaagattacacttatttccctccaagaagtattttttacgccacttatttatctgaaaaaataggctattggagatacatcgctatttataggcatcttgaaaagaatccggataacaagatttttccactatttaattactttgagaattggtgtcaagatgagaataggcatggagacttctttgatgcactaatgaaagcacaaccacgtactgttaaatctttaagtcaaaaaatcactattgggggttctacctttacacatccattatttgactatttccatagatttagatattttttgaacaatcttccattaacatccaagctatggtcaaggtttttcctactagctgtatttgcaactatgtatgccagggatctgggaatcaaaaaagatttctacagttcattagggctagatgccagagattacgaccagtatgttatcaataaaacgaatgaaacttctgctagagttttcccagtagtgctagatgtatacgataaatctttttatggaagattagataaaatagttgaaaataataagatcctttctgatattgctaatagcgatgaaaataatgtatctaaaactttaaaaaaattacctacctatatatcaaacggttaccagctattaagactatacttat

SEQ ID NO: 211209 - DNA, 720 bp, Unknown
  Bacterial polypeptide expressing nucleotide sequence isolated from the Sargasso Sea
ctgaatgctttgcccacatggcacgggatgaagcccgccatgccggattcctcaacaaagccatgagtgatttcggcatgcagctggatctcggcttcctcaccgcgtacaaggactacaccttcttcaaacccaaattcatcttctacgccacctacctatctgagaagatcggttactggcgttacatcgccatttaccgccatttggagaagaaccccgagagcaagatcttcccgatcttcaacttcttcgagaattggtgtcaggacgagaaccgtcacggcgatttctttgatgcattgatgaagtctcagcccgacacagtgcgtggtccgatcgcgaagctgtggtgccgtttcttcctgctcgccgtgttcgccaccatgtacgtgcgtgatgtggcccgcaaagagttctacgaagcactcggcctcgacgcacgcacctacgacaagatggtgattgaaaagaccaatgagacaactgccagggtgttccctgttgttcttgatgtgaacaaccccaagttttggactcgcctggagcgtctggtggagaacaacgcagctttggaggctgctgaacgtagctccagccctgcccccatgaagctcctcaagaaacttccccgctggatcagcaatggctccgaaatggccaaattatttctgatgtctccgattgacagcgccaagttccagcccgccgttcgttgat

SEQ ID NO: 211210 - DNA, 709 bp, Unknown
  Bacterial polypeptide expressing nucleotide sequence isolated from the Sargasso Sea
gatgactcaatcaactgttgaatcaaaaaataaaaaagatattaataatgggaagataccagcaaaagaaacaattttgtctccaagattctatacaacagactttgaggcaatggaaaatatggatttatcaataaacgaggaggaattagaagctatatgtgaggaattcagaaaagattacaatagacatcattttgtaagaaatactgaatttgaaggtgctgcagaaaaattagatcctgagacaagagatctttttgttgattttctcgagggaagttgtacttcagaattctcaggttttttactttacaaggaactgagcaagaggattaaagacaaaaaccctcttcttgctgaatgttttgctcatatggccagagatgaagctagacatgcaggttttttgaataagtcaatgagtgacttcggactgcagttagatttagggtttttgacagccaataaagattacacttatttcccaccaagaagtattttttacgccacttatttatctgaaaaaattggttattggagatacatagcaatttataagcatctcgaaaaaaacccaggtagcaaaatttttccactatttaattactttgagaattggtgtcaagatgaaaatagacatggtgatttctttgacgcattaatgaaagcacaaccgcgtaccgttaaatcattaagccaaaaaatt

SEQ ID NO: 211211 - DNA, 454 bp, Unknown
  Bacterial polypeptide expressing nucleotide sequence isolated from the Sargasso Sea
atggctcaatcaactgttgaatcaaaaaataaaaaagatattaataatggaaagataccagcaaaagaaacaattttgtctccaagattctatacaacagactttgaggctatggaaaatatggatttatcaataaacgaggaggaattggaagctatatgtgaggaatttaggaaagattacaatagacatcattttgtaagaaatagtgaatttgaaggcgctgcagataaattagatcctgagacaagagagctttttgttgattttctcgagggaagttgtacttcagaattttcaggttttttactttacaaggagcttagcaaaaggattaaagtcaaaaaccctcttcttgctgaatgttttgcccatatggccagagacgaggctagacatgcaggtttcttgaataaatctatgagtgactttggacttcagttagatttaggtt

SEQ ID NO: 211212 - DNA, 475 bp, Unknown
  Bacterial polypeptide expressing nucleotide sequence isolated from the Sargasso Sea
atgcgcgagggcatcaaggaggcggcgagcgaaaacttgctcacgccgcgattctacacgacggatttcgacgagatggagcgcttgttcagcaccgagatcaacccgaatttggacatcgtggagatcaacgccatcttgaatgagttccgcgaggatttcaaccaaaagcactttgtgagaaacgatgagttcaaggctgcggcggatgacatcaagggtgagccgcgcagaattttcattgaatttttggagcgatcgtgcacggcggagtttagcgggtttttgctctacaaggagctcggtcgccgcttgaaaaagacggcgccggaagtcgcggagatctttgtgttgatgtctcgcgatgaagcgcgtcacgcgggtttcttgaacaaggcgatgagcgatttcaacttggcgctcgatctcggtttcttgacgaagaaccgtcagtacacgtttttccagccctaag

SEQ ID NO: 211213 - DNA, 397 bp, Unknown
  Bacterial polypeptide expressing nucleotide sequence isolated from the Sargasso Sea
tgctttgcccacatggcccgcgatgaagcccgccatgccggcttcttgaacaaagccatgggggatttcggcgtccagctggatctgggctttttgaccgctaataaggcctatacgttcttcaaaccgaagttcatcttctacgccacctacctctccgagaagattggctactggcgctacatcgccatctaccgccatctcgagaagaaccccgacagcaagattttcccgatcttcaacttcttcgaaaactggtgtcaggacgagaaccgtcacggcgacttctttgatgcgctgatgagggcccagcccagctcggtgcgtggcttgcaggcgcgcctgtggtgccgcttcttcctgctggccgtcttcgccaccatgatatgtgcgtgat

SEQ ID NO: 211214 - DNA, 733 bp, Unknown
  Bacterial polypeptide expressing nucleotide sequence isolated from the Sargasso Sea
gatggctcaatcaactgttgaatcaaaaaataaaaaagaagtaaataacggaaaaatgccagcaaaggaaacaattttgtctccaaggttttatacgacagactttgaggcaatggaaaatatggatttatcaataaatgaggaggaattggaagctatatgtgaggaatttaggaaagattacaatagacatcattttgtaagaaatagcgaatttgaaggcgctgcagaaaaattagatcctgaaacaagagagctttttgttgattttcttgaaggaagttgtacttcagaattctcaggttttttactttacaaggaacttagcaagaggattaaagacaaaaaccctcttcttgctgaatgttttgcccatatggccagagatgaagctagacatgcaggttttttaaataaatcaatgagtgactttggactgcagttagatttaggttttttaacagccaataaagattacacttatttcccaccacgaagtattttttacgccacttatttatccgaaaaaataggttattggagatacatcgcaatttataggcatctcgaaaagaatcccgacagcaagatttttccactatttaattattttgagaattggtgtcaagatgaaaataggcatggtgacttttttgacgcattaatgaaagcacaaccacgtaccgttaaatcattaagccaaaaaattaccattgggggctctacctttaca

SEQ ID NO: 211215 - DNA, 929 bp, Unknown
  Bacterial polypeptide expressing nucleotide sequence isolated from the Sargasso Sea
aaacgaggaggaattggaagctatttgtgaggaatttaggaaagattacaatagacatcattttgtaagaaatagtgaatttgaaggcgctgcagaaaaattagatcctgagacaagagagctttttgttgattttctcgagggaagttgtacatcagaattttcaggttttttactttacaaggaacttagtaagagaattaaagtcaaaaaccctctacttgctgaatgttttgctcatatggccagagatgaagctagacatgcaggttttttaaataaatcaatgagtgactttggacttcagttagatttaggttttttaacagccaataaagattacacttatttccctccaagaagtattttttacgctacttatttatccgaaaaaataggttattggagatacatagcaatttataggcatctcgaaaagaaccctgatagcaaaatttttccactatttaattactttgaaaattggtgtcaagatgaaaatagacatggggatttctttgacgcattaatgaaagcacaaccacgtactgttaaatcattaagccaaaaaattaccattggcggctctactttcacacatccattattcgactacttccataggtttagatatttcttgaataatcttccattaacatccaagttatggtcaaggttctttctattagctgtatttgcaactatgtatgcaagggatttgggaattaaaaaagatttctacagttctttaggtttagatgccagagattacgaccagtttgttattaataaaacaaatgaaactgcagctagagttttccctgtagtaatggacgtttatgataaatctttttatggaagattagataaaatagtagagaataataaggttctttctgatattgcaacagtgagggaaatacagtatc

SEQ ID NO: 211216 - DNA, 778 bp, Unknown
  Bacterial polypeptide expressing nucleotide sequence isolated from the Sargasso Sea
taccgccgtcgcagaagccaacgccgtggcaacgaaggatcctgctaaggacacgatcctcacaccgcggttttacaccacggactttgatgccatggctgccatggatctgcgtcccaatgaggcagaactggaggccatctgcgaggaattccgcaaggattacaaccgccatcacttcgttcgcaacgacgactttgacggtgctgcagacaaacttgaccccgagacccgtcgggtcttcgttgaattcctggaacagagctgcacgtcggaattctctggttttctcctttacaaggaactgagccgtagcatcaagcagcaaaatcctctgctggccgaatgctttgcccacatggcacgggatgaagcccgccatgccggattcctcaacaaatcgatgagtgatttcggcatgcagctggatctcggcttcctcactgcgaacaaggactacaccttcttccaacccaaattcatcttctacgccacctatttatccgagaagatcggctactggcgctacatcgctatttaccgccaccttgagaagaatcccgagagcaagatctacccgatcttcaacttcttcgagaattggtgtcaggacgagaaccgtcacggcgacttctttgatgccctgatgaagtctcagcccgacacggtgcgtggtccgatcgcgaagctgtggtgtcgcttcttcctgcttgccgtgttcgccaccatgtacgtgcgtgatgtggcccgccaaggaattctacgaagcactcggact

SEQ ID NO: 211217 - DNA, 447 bp, Unknown
  Bacterial polypeptide expressing nucleotide sequence isolated from the Sargasso Sea
gatgtcccaatcaactattgaatctacaaataaaaaagaagtaaatagaggaaaagctccagcaaaggaaacaattttgtctcccaggttttacacaacagactttgaggcaatggaaaatatggatttatcaataaatgaagaggaattagaagcgatatgtgaggaatttaggaaagactacaataggcatcattttgtaagaaatagtgaatttgaaggagctgctgaaaagttagatcctgagacaagagaactttttgttgattttcttgaaggaagttgtacatcagaattttcaggttttttactttacaaggagcttagcaaaaggattaaagacaaaaaccctcttcttgctgaatgttttgcccatatggccagagacgaagctagacatgcaggtttcttgaataaatctatgagtgattttggattacagttaga

SEQ ID NO: 211218 - DNA, 736 bp, Unknown
  Bacterial polypeptide expressing nucleotide sequence isolated from the Sargasso Sea
gatggtccctcccaccgccgtggccgaaggcagcgctgtagcaatcaaggatcctgtcaaggacacaatcctgacccctcgcttctacaccaccgatttcgaggcgatggcggcaatggatcttcagcctaatgaggctgaactggaagccatctgtgaagagttcaggaaggattacaaccgtcaccatttcgttcgtaacgaagagtttgaaggcgccgctgacaagctcgatccagaaacccgcaaggtgttcatcgaattccttgagcaaagctgcacctcggaattttcaggattcttgctttacaaggagctgagccgccggatcaaggccaaaaacccgcttctggctgagtgtttcgcccacatggctcgtgacgaagctcgccacgccgggttcctcaataagtcgatgggcgatttcgggatgcagctggatctcggcttcctgactgccaacaaggactacaccttctttaagccgaaattcatcttttacgccacctacttgtctgaaaagatcggctactggcgttacatcgccatttaccgccatctcgaaaagaatcccgacagcaaaatcttcccgatcttcaatttcttcgaaaactggtgtcaggacgaaaaccgtcatggcgatttcttcgatgctctgatgaaggcccagccggacacggtgcgtggaccgatcgccaaactctggtgccgcttcttcctgctggcgggttcgcca

SEQ ID NO: 211219 - DNA, 719 bp, Unknown
  Bacterial polypeptide expressing nucleotide sequence isolated from the Sargasso Sea
tttaccagccaataaagattacacttatttccctccaagaagtattttttacgctacttatttatccgaaaaaataggttattggagatacatagcaatttataggcatctcgaaaagaaccctgatagcaaaatttttccactatttaattattttgaaaattggtgtcaagatgaaaatagacatggggatttctttgacgcattaatgaaagcacagccacgtactgttaaatctttaagccaaaaaattaccattggcggctctacttttacacacccattatttgactacttccataggtttagatattttttgaataatcttccattaacatccaagttatggtctaggttctttctattagctgtatttgcaactatgtatgcaagggatttgggaattaaaaaagatttctacagttctttaggtttagatgccagagattacgaccagtttgttattaataagacaaatgaaactgcagcaagagttttccctgtagtaatggacgtttatgataaatctttctatggaagattagataaaatagtagagaataataagattctttccgatattgcaaacagtgatggaaataaggtatctaaaacatttaaaaaattacctaaatatttatcaaacggttaccagttattaagactatacttactaaaacctcttgatagcaaagatttccaaccttcgattagataat

SEQ ID NO: 211220 - DNA, 889 bp, Unknown
  Bacterial polypeptide expressing nucleotide sequence isolated from the Sargasso Sea
aggcagtctagatagattgcaagaattgcctcagaaggcaaaagagacttacgagagttatttggttagatctgttatatcagagttttctggattcctactctttaaggagatttcaaatcgtttaaagaaagagggaaatagagatcttggcaaactatttcagtttttagctagagacgaagccagacatgcaggttttcttagcagagcattagttgcagaggggattgaagttgatctccctcatttaggcggaaaaagagcagcgacttggttcccaattagttgggtaatttattcagtgtatctttcagaaaaaattgggtattggagatacatcttgatggataggcaccttaaggctaatccagatcaggcttttgctccgctttttgatttctttgaaccatggtgtcaagacgagaacagacatggtgattgctttacagtgatgatgagatgttggccaggtattaccaaaggatttagaggcaagttattaagtcgtttcttcttgtggagtgttttccttactcacactttgacagtttgtgaaaggggtgagttttatgaattgcttggtattgatccaaaggaatttgatgaggaagttataaaaagaacaaaccacacatctaaaaatgccttcccttgggtttttaatcttgatgacaataaattttgggatttgagaaataaaattattgaatctttcagagcatttgtaggtgctaaaggtttaacaaaaccagtaaaatttgtgaaatttgctacgttaatatttaagcaatttgctcttccaatggagaagacaaatgcattgagatatgataaaaatgtgaattttacgggtcaagatattttaaatttctggacagataagtaa

SEQ ID NO: 211221 - DNA, 1087 bp, Unknown
  Bacterial polypeptide expressing nucleotide sequence isolated from the Sargasso Sea
atgaagtcagagatcactgaagaaaaactttctaggggaaagcctgttaacgaaacgacaaaaatggctcatgaaacgacgttgttgaaccctcgattttacactactgattttgatgaacttgataaagtgcgagttgaccgggttcggtccgattgggataaattaatcgcagaattaaaatcagacccaaaccgatcacattttaaaaaaacatctgattgggacgagattgatttcgatgctttggagccggagctacgaaaggagctgatagattttctcgttagttctcttactgccgagttttcaggctgtgtgctttacaaagaaatgaaaaggcgagggaataaccccgacatatgtgagctttttgggtatatgtcacgcgatgaagcccgtcacgctgggttcattaatgatgcgcttagggaagtcggaatggacgtaaatttaggattcttaactagaaccaagaaatacacatactttaaaccaaaatttatattttatgccacctacctatctgaaaagattggctacgctagatatatcacgatttatcgtcatcttgaaaaacaccctgactcaagatttcatccaatatttaaatggtttgaaaaatggtgtaatgacgagtttaggcatggtgaagcatttgctttgttgatgaagactgatcctaagctaacctccgggttgaacgtatggtggataaggtttttcttagtggcagtattcgccacgatggtggttagagatcacgctcgaccggcctttcatagggctttaaatgtagacatagaatggtatgacagagaagtgctgcgaataacctcagaaatttccagacaagttttcccaatcgagattgacctgaatcatccacgctgggagcttggcttaaaaaaattacgtagggccttcgaaagaatggatgagggacgacgtcaggggggactattgggaaactttaaaaaaattgtcgctgcgtcgcgtgcagcttttattttcatatctctttattcgatacccgtaaagaaaaacattgttcccgataattcgtgcctacaaccaacctactgaa

SEQ ID NO: 211222 - DNA, 1072 bp, Unknown
  Bacterial polypeptide expressing nucleotide sequence isolated from the Sargasso Sea
atggtcccgcctaccgccgtcgcagaagccaacgccgttgaaacgaaggatcctgtcaaagacacgatcctcacaccgcggttttacaccacggactttgatgccatggctgccatggatctgcgtcccaacgaggcagaactggaggccatctgcgaggaattccgcagggattacaaccgccatcacttcgttcgcaacgacgactttgacggtgctgcagacaaacttgaccccgagacccgtcgggtcttcgttgaattcctggaacagagctgcacgtcggaattctctggttttctcctttacaaggaactgagccgtcgcatcaagcagcaaaaccccctgctggctgaatgctttgcccacatggcacgggatgaagcccgccatgccggattcctcaacaaagcgatgagtgatttcggcatgcagctggatctcggcttcctcaccgcgaacaaggactacaccttcttccaacccaaattcatcttctacgccacctatctatccgagaagatcggctactggcgctacatcgccatctaccgccaccttgagaagaatcccgagatcaaaatcttcccgatcttcaactttttcgagaattggtgtcaggacgagaaccgtcacggcgacttctttgatgccctgatgaagtctcagcccgacacggtgcgtggtccgatcgcgaagctgtggtgtcgcttcttcctgcttgccgtgttcgccaccatgtacgtgcgtgatgtggcccgcaaggagttttacgaggcactcgggctcgatgcacgcacctacgacaagatggtgatcgaaaaaaccaacgaaacaacagcccgggtcttccctgttgttctagatgtgaacaatcccaaattctggacacgtctggaacgtctggttgagaacaacgcagctctcgaggctgccgatcggagctccagccctgcccccctgaagctcttcaagaaacttccccgctggatcagcaatggtgccgaaatggccaagttgttcctgatgtctccgattgacagcgccaagttccagcccgccgtgcgttgat

SEQ ID NO: 211223 - DNA, 1174 bp, Unknown
  Bacterial polypeptide expressing nucleotide sequence isolated from the Sargasso Sea
aatggctcaatcaactgttgaatcaaaaaataaaaaagatattaataatggaaagataccagcaaaagaaacaattttgtccccaagattctatacaacagactttgaggctatggaaaatatggatttatcaataaacgaggaggaattggaagctatttgtgaggaatttaggaaagattacaatagacatcattttgtaagaaatagtgaatttgaaggcgctgcagaaaaattagatcctgagacaagagagctttttgttgattttctcgagggaagttgtacatcagaattttcaggttttttactttacaaggaacttagtaagagaattaaagtcaaaaaccctctacttgctgaatgttttgctcatatggccagagatgaagcaagacatgcaggttttttaaataaatcaatgagtgactttggacttcagttagatttaggttttttaacagccaataaagattacacttatttccctccaagaagtattttttacgctacttatttatccgaaaaaataggttattggagatacatagcaatttataggcatctcgaaaagaaccctgatagcaaaatttttccactatttaattactttgaaaattggtgtcaagatgaaaatagacatggggatttctttgacgcattaatgaaagcacagccacgtactgttaaatcattaagccaaaaaattacaattggcggctctacttttacacacccattattcgactacttccataggtttagatatttcttgaataatcttccattaacatccaagttatggtcaaggttctttctattagctgtatttgcaactatgtatgcaagggatttgggaattaaaaaagatttctacagttctttaggtttagatgccagagattacgaccagtttgttattaataaaacaaatgaaactgcagctagagttttccctgtagtaatggacgtttatgataaatctttttatggaagattagacaaaatagtagagaataataaggttctttctgatattgcaaacagtgatggaaataaagtatctaaaacttttaaaaaattacctaaatatttatcaaacggttaccaattattaagactatacttattaaaacctctcgatagcaaagatttccaaccttcgattagataa

SEQ ID NO: 211224 - DNA, 706 bp, Unknown
  Bacterial polypeptide expressing nucleotide sequence isolated from the Sargasso Sea
aaagattacacttacttcccaccaagaagtattttttacgctacttatttatctgaaaaaattggatattggagatacatcgcaatttatagacatcttgaaaagaatccagatagcaagatttttcctctatttaattactttgaaaattggtgtcaagatgagaatagacatggtgacttctttgacgcactaatgaaagcacaaccacgtactgttaaatctttaagtcaaaaaattaccattgggggctctacctttacacatccactctttgactatttccatagatttagatactttttgaacaatcttccattaacatcaaagttatggtcaaggttttttctactggctgtattcgcaactatgtatgcgagggatttaggaatcaaaaaagatttttacagctcattaggtttagatgctagagattacgaccagtacgttattaataaaacaaatgaaacttctgctagagtttttcctgtagtattaaatgtatatgataaatctttttatggaagattagataaaatagttgaaaataataaggtcctttttgatattgctaacagtgatggaaataaagtatccaaaactttaaagaaattacctacctatttatcaaacggttaccagctattaagactatacttattaaaacctctaaatagcaaagatttccaacctgcgattagataat

SEQ ID NO: 211225 - DNA, 196 bp, Unknown
  Bacterial polypeptide expressing nucleotide sequence isolated from the Sargasso Sea
aatgtttaaaaaattagcaaaattaaggtatttaccaaataaatttgaggttatctcagaaggtgaccatgttatctgtgcgatctcacaaaaaaaaattaccttagaaaatttaacttattggagtgttgaaaaccaggaggcctatttttcgtattttgaggcatataaaaaaagggaaatgaataaaaaataa

SEQ ID NO: 211226 - DNA, 409 bp, Unknown
  Bacterial polypeptide expressing nucleotide sequence isolated from the Sargasso Sea
ttgggcggcgaagttgagggtttgtcagtagcttggtttggtcgtccagagggtgatcctcagggcataggtcctcatgtagatgcgctcggtcgtgatggcgattcaaaaagcggcgtaacaatctggttcgcacttgacccggtcaatatcaaaaacggctgcctacgatatttgccaggctcccatagagaggagtacgcgaacgatatgcccattccaaatattgatagggagtctgcggacgttattgctgcagaactcgcgccaggagatgcagtagtccatagcgcccacacggttcattggtctggcggtaaccactcggacgagccacgcgacgctgtctcctttttctattcttgtccgagcgattctgccgtgcggcaggcgtcgggatttcactagg

SEQ ID NO: 211227 - DNA, 787 bp, Unknown
  Bacterial polypeptide expressing nucleotide sequence isolated from the Sargasso Sea
atgcaaatcggtattgatttaggggcaactaaaatcgagtcagtacttcttaaagagaatggtcttgaattacatagagatagaatacagtctccaaaaaattataagaaaacaattagtgacatcacaaatatagtaaacaatattgaaaagaaatttaaaaagaatttaaatgttggaatatgtcatcctggatcaacaaatttagaaacaggatttattcaaaacgcttttaactccccatggttgaataatcaaacatttgcaaaagatatatctaaaagtttaaatagaaatgtttattgtgaaaacgatgcaaattgttttgctttatcggaggcttttgatggatctgcaaaaaattttaaaacagtttttgggataattttaggatcaggatgtggtgggggattagtaattgataaaaaaataattattgggccgaattcatttacaggtgaatggggtcatatacccataggaaaacctgatagcgaaactaacatcgaagaatatatttcgggtaaaggtttagaaagaaaatttacagcaagatttaataaaaatctttctgcacacgaaatttttaaaaatgcaaaagataatagtcaagatgaaatagaaataattgatgagtttaaaaaaaaactagcaagaagtttatccttaattattaatgtaattgatccagatgcaattgtttttggcggtggagtgtcaaatgaaattgagtctttagatgaaattaaaaaaaccacagagaaatatttatcaaattttaataata

SEQ ID NO: 211228 - DNA, 259 bp, Unknown
  Bacterial polypeptide expressing nucleotide sequence isolated from the Sargasso Sea
ttgagtaagattgcaccatatagtgatgatgatttaaagacacatgattttaaagatagaaaagagctgtgtgacgccatgtatgatactatgaaaaaatatggtggcataggactatcagcaaatcaggttggtttaccatatcgaatgtttgtaatgggcggtcacccacaaatagatttaggtagaacaagatattgttttaatcctaaggtattagatatgagtaaagaaatggttatgatgaaagaaggttgtt

SEQ ID NO: 211229 - DNA, 199 bp, Unknown
  Bacterial polypeptide expressing nucleotide sequence isolated from the Sargasso Sea
atgaataaaaaattagcaaaattaagatatttaccaaataattttcaaattattgaaaagggtgattatgttgtgtgtgctatttcaggaaaaaaaataaatcttgataatttaaattactggaatgttgaattacaagaaccttatttctcatacgtagaagctagtaaaaaaaaagagaagctagataagaaataat

SEQ ID NO: 211230 - DNA, 859 bp, Unknown
  Bacterial polypeptide expressing nucleotide sequence isolated from the Sargasso Sea
gctgccgatctgtactggtcaggagctgaccgaccggctgatggaacagatagccccgtttgatcccgttttccattacgggcagatggccgaggcgctggagaagctggatgacggaagctggatgctgacgacaagcgacggtgtcaagctgaacgcgcccgtcgtggtgatcgcggccggcggcgggtctttcgtgccgaagcgccctcctctgtccgacctcgatgatttcgaggctagcggcgcggtgcaatatgcggtgcgcaagcgcgacacgctcgtcggcaagcagcttgtaatcgccggcggcggcgactccgcgctggactggactgtgaaccttgtcgatatcgcggaatcggtgacgctggtgcaccgtcgggatgatttccgtgccgcgccggatacggtggctaagatgcgggcgcttgtcgccgagggacgcgtcaccctccatattggccagctgaaggggctcgaggggactggcggacagctcgacaatgtgctggtccaggccgccggggccgaggcgccggatgcccttgctgccgatgtgctgcttcctttctacggcctgaccatgaagctgggcccgatcgccgaattcggcctgaaccttgaggaaaacctgattccagtagatacagagcggttcgagacctcagagccgtcgatctttgccgtgggtgacatcaacgactatccgggcaagctgaaattgatcctgtccggtttccacgaagcggcgctgatgtcccatgccgcctatagcatcatccatcccgacaagaaaatcaggttccagtacaccacttcgtcgtcttcgcttcagaaaaagctcggtgtggcctga

SEQ ID NO: 211231 - DNA, 979 bp, Unknown
  Bacterial polypeptide expressing nucleotide sequence isolated from the Sargasso Sea
caatgattatattaaaagagctgactactttggcatggggaaaacaaatactggggatttaaaaagaatgctaagatatttgcctaatgactatcaactactctatacagcaagacaactattaatgagtagatcttatggtgtagacaatgcaataagtaaggttcctaataaaatgaaaaacgatcctggtcttaactacgatagacttaaatggagacgaaaaagaggtagagttgatagctccctagaaattttattaaatattaaaaacactaaagattacatggtaagacctgataaatggtggaaggaaagagctattatcgcaagatctttaatttacaaaaaaaggtatgaaacagcatataaaataagtagcagacacggattaacagaaggaccagagtttgcagaagctgaatggatgagtggctggatttctttaagctttttagatgacccaattagagcagaggaacatttcaaaaaattttataataatgtcagctatccaataagtttatcgagaggcgcttattggctaggaagaacttatgaaaaacaaggaaatttagaaaaatcaagagaatggtttgtggtaggttcaaaatatttaaccacatactatggacagttatctcatatgaaagtttaccctaatcaagattttgaattaaataaacttatggaaattgaaaaaaaatatgctgaaaaattttataaaaatgaattggttaaaattgtttatttgttaaatgaattaaataaagacaagtatacaaagtacattctcagacatttggctaacatcgatatagataaaggtagcgaaatacttgcagctaaattagcaactgatatttcaagatatgattttgctatacaaatttcaaaaattgcctcatatgaaaaaagatttcataataaatttaattatcctattaatagtactccaaaaagaataaatggaagaaaa

SEQ ID NO: 211232 - DNA, 868 bp, Unknown
  Bacterial polypeptide expressing nucleotide sequence isolated from the Sargasso Sea
aaagggaactacatccacatcgacacggcagcaatgtaccgcaatgagaaattcatcggaaaagtccttgacgaggacgaagaactcttcgcacgcggcaaactcttcatcacgagcaaggtgccgcccaaacacctgacgagtgcggctgcagtgaagaagtgcgtcgagaagtcactgattgacctatttggggctgggatgatgcttccgcctgacccgaaggatgcttacctggacatggttctcatccactatccttcggactttagcgatgacccgaagggggctaggcttgcggcttggggtgctttggaggaattggtgcgtgagggtcgggtgcgggctattggagtgagcaactatcaagttaggcatttggatgagctggttgagcggaagaagggcggtgctgtccaaaacgccttgttgcctgctgtcaaccaaatcgagatgcacccgggcaggcttgggcgggagaagggggtggtggagttctgtgctgaacatggaattctcattgaggcatattgccccatgatgcagggggacaaacggctgctcgcgaacgaggtcgtttctgggattgcgaagggacacggtgtgacgggcgcgcaggtgtgtttgaggtggtgtttggagaaggggttcatcgttttgccgaagagtgagacggaatcgcggattgtgggggagaatgcgccgcgatttatcgaggggttttcgttgtcgggggaggaggtgcggaagttggatgctttgggggattgggctttggggaagaatgacgcggacgggtctgattcggaggacggcgaggacactccgtttccgaaggtctgctggtcctcgaatgatgtgccttaga

SEQ ID NO: 211233 - DNA, 440 bp, Unknown
  Bacterial polypeptide expressing nucleotide sequence isolated from the Sargasso Sea
aatgattgattttaaaaataaaaaaataattataactggagcaacaggaggtataggaggagcgcttgtaaaaaaattcatttctcttggtggaacagttcttgcaacgggaacaaagactgaaaaattagatttaataaaaaagaattatccaacagttaaagtaaaaaaatttaatataagtgaacattctgcaattgaagaatttattaattcgtgtaattcagaattaggaggtttggatattttaattaataatgctggtgttaatgcagataatttgtctttaagaatgaaagacgaagaatggaaaagagtcatagatattaacttaacatcaacatttttattatctaagtatgctattaaagttatgttaaagaacaagttcggtagagtagtaaatgttacctcaatagttggtcatactggaaatcttg

SEQ ID NO: 211234 - DNA, 440 bp, Unknown
  Bacterial polypeptide expressing nucleotide sequence isolated from the Sargasso Sea
tttgagcgatgctgaggtcagtgagttgcgagggagggcgttgccgctggctgagagaatgaccagtcaagatcacggtgcaggaaagtataagaacgtgatcaagtcacttcatcattatgatagctacctcgatgcgcaactaaagagtggcaaacatgtccagtttttagagcagttattgggcggcgaagttgagggtttgtcggtagcttggttcggtcgtccagagggtgatcctcagggcatagatcctcatgtagatgtgctcggtcgtgatggcgattcaaaaagcggcgtaacaatctggttcgcacttgacccggtcaatatcaaaaacggctgcctacgatatttgccaggctcccatagagaggagtatgcgaacgttatgcccattccaatattgatagggagtctgcggacgttattgctgcaga

SEQ ID NO: 211235 - DNA, 1084 bp, Unknown
  Bacterial polypeptide expressing nucleotide sequence isolated from the Sargasso Sea
ttgcaagcaaaagaaaatcttttaggctactctctagagtcgctagaaagttttttttcaaaaattaatgaaccgaagtttagagcaaaacaacttctaaaatggatacaccaaaaaggcgtattagattttaatttaatgacagatcttaataaagatcttcgagctaagcttaattcgattgcctacattaagcccccaattattcatgaagagcatgtttccaaggagggtacaatcaaatatctcattgctcttgagtcaggttcaatgatagagatggtagaaattccagaaaaaaatagaagaactttatgtgtctcttctcaagctggttgcgctcttcaatgcactttttgtgctaccggtgcccaggggttcgatcaaaacctagatagtcatgaaattattggacagctatggctttcaaattttcatagaaaatataatcaacctattacaaatatagtgtttatgggtatgggagagccattacttaactttgatgctgtaatagaatcagcaaagataatgaaacatcagttagcttatggactttcaagaaagagaattaccattagtacttctggcatagtgccaaatataaaaaaactttatgatgaaatagatgtttcattagcgatatctcttcacgcgccagatgataaactaagagatgagatagttcctataaataataagtatcctatagattctttgatagatgcatgtaaagattatttaaataaatatcagaacaagagaagtatcactgttgaatatatccttattgatggtataaatgattcaattttgcatgctaaaaagttaacaagattgttatcaacgatgtcatgtaagattaatttaataccatttaacagttttaaaggatcaaattataaaagaccaaccttaaaaaaaataaatttatttaaagattatttaatgaacaaaggatacattactactttaagaattacccgtggcgatgaaattgatggagcctgtggacaattggttggaaaccttgctcattcaattaaagggaagcatttaatatctcataaattaatatcatgaa

SEQ ID NO: 211236 - DNA, 1138 bp, Unknown
  Bacterial polypeptide expressing nucleotide sequence isolated from the Sargasso Sea
gtcattataaaagaagggtggataaaagctgaaatgtccactagtgaattaagatattttagaagtaaatttaaatcattcctctcatcggatgattacatcaatcgtgccgaatatcttgcttgggaaagaaaatattgggatttgaaaagattactgagatatttaccaaatgacgagaaggctctttataacgcaagacaaatattaatgagtaattcttatggagttgacaatgctatatcaaaagttcctgcacatttaaaaaatgatataggcttacaatacgatagattaagatggagagcaagaagaggtagactagaaccttcattagaaattttatataaaaattcaaacaaatctgaagatgagcttgtcagaggagatttgtggtggaaacaaagagaaagtgttgtcagaagtttattgtataaaaaaagatttaaaacagcatacaaagttgcaagtgagcactcactctcatccggaccagaatttgctgaggctgaatggttgtcaggttggattgcacattcttttttaaaatctccagaatattctgttaatcattttttaaatttttatgataatgtaagttaccctataagcttagcaagaggagcttactggttaggaaaatcttatcaagctctaggagatcaaaaaaattcacaaaaatacttctctgagggcgcagaatttttaacaacttattatgggcaactatcttttaatgaaattaataaaggaggtgaatttaaattagatgacgactcgtcattttcaaaagaatatgaaaaagaattctctaaaaataaattaataaaaatagtaaaaattctaagagagttagatcaaactaaatattctaaggatataattaaatttttagcaactcttgatatcgagagaggcagtgaagttttagcggcaagattagctactgaagtaggaaggtttgattatgcaattcaaatatcaaagcaagcctcttataaaaaaagattttttttaaaatataattatccaataatttctacaccaagacaaataaataataaatcaatgccttcctctgatgtcattcttgcaatcataagacaagaaagtgaattcgatagtaaagcaaatagtt

SEQ ID NO: 211237 - DNA, 199 bp, Unknown
  Bacterial polypeptide expressing nucleotide sequence isolated from the Sargasso Sea
aatgcataaaaaattagcaaaattaagatatttaccaaacaattttgaaatagttgaagaaggagaccatgttgtttgtgcgatttctggaaaaaagataaatttaaataatctaaactattggaatgttgatttacaagaagcttatttttcttttaaagaggctcatttaaagaacgaagaaataaaaaaaaaatag

SEQ ID NO: 211238 - DNA, 1120 bp, Unknown
  Bacterial polypeptide expressing nucleotide sequence isolated from the Sargasso Sea
atgaacaataattctaattcaaaatttccatctgaagctgaagttattatcgttggtgtaggaggaatcgttggatctatgttggcctattggttagcagaacttgggcaagaaaacattgttggacttgagaaatcaaccattattccatctgatattgcatctaccgctcatgcatcagattttgtgtataacacaacacatgacaaattaggttgttggacaactgcattcagtagaaaattttacgaagataatggattctttttaaaaaaaggcggccttgaaatctgccgaaaaaatgacgatgagcgatgggaagaacttaaacgaaaagttgcatcaggtaaagcatttggtacaaatgtaaaattaatatctgcagctgaggcagttgaaaaatttccattacttgaggaagagtctttacggggagctatgtgggatcctgatgcaggccttgtagttcctcggtcacaagaggttgtgaattttgcagttgagagtgctaaagaaaaagggtcattgaaaacttttactaacactcctgcaactggatttgaaacagaaaacggtaaaattgttgcagtcaaaactgacaaaggaataatcaaaactaataaagttgttattgcctcaggaatttggggacctttaatgggtgatatggtaggtgttagcgttcctttaatgcctctagaacatccacttttatttttcgggccatatgaagatattcaagaaacaaatgaattattagtctatcctctgcttagagaccaaggcaattcagcctatgttagggatactggaaaattacatggtggtatgctcgaatggggtttttatgaagacaaaaatcctaggttggttgatcctaaagatataggaaatcctgacaagacaatgttatctgattcaatgagatatttagagttagaagaaattgctgagcctttagaaaaagcatttgaaacaacaccaattctcagtgaattaggatgggatgaaaaaagttcatttaatgggcttttatctgtaacagctgatgcaggttctttaataggtgaaagtccagaggttagagggttttggttatgtgaagctgtttgggttaaag

SEQ ID NO: 211239 - DNA, 1359 bp, Unknown
  Bacterial polypeptide expressing nucleotide sequence isolated from the Sargasso Sea
aggttctgaactaattaaggagggttggataaatgcatctttaagctcaaaggatttaagatatttaaataaaaaatataaaaaatttttaaattcatcggatcacattaaaagagctgattatatggcctgggaatataaatattgggatttgaaaagaatattgagatatttgccaaacgattatagagccttgtataatgccagacaaatactgatgagcaattcttatggtgtagataatgcaattgcaaaagttcctgataattttaaatccgacataggtcttcgatatgatagattaaaatggagaagacgaagaggaagaatagagtcatcattagaaataattaataaggcccctaataatgaaagcgaattaattagagcagatttatggtggaaagaaagacatatagtttcaagatcattaatttataaaaaaaaatatcaattagcctatgaggttgcaaaaaaccattcaatgcgtgaaggccctgaatttgctgaagctgaatggatatcaggatggattgctttaagctttttaaataatccaaacaaagccctgggtcattttaaatcattttatgaaaatgttggctatccgataagtttggcgagaggcgcttattggattggaacaacttatgaaaaacttggcaaaaaaaaattatctgaagattattttaaagaaggtgcaaaatatttgactacttactatggtcaattatcttttaaaaaaattaatccgtttggagattttgaattaaaagatcaatccaaatattcaaaagattatgaaaaagaatttaataaaaatccattagttagacatgtaattcttttaaaagagttaaacaaaacaaagtacactaaagatattcttaaacacttagctgcaaatgatatagataaaggtagtgaagtacttgcggctaaacttgctacagaagtgggaagatatgattttgctattcaaatatctaaaaaagcatcttacgaaaaaagattttataataaatttaattatccaatcataacaacacctagggttattaatggtaaggcaatgccgtcacaagaaataattttggcaattacaagacaagaaagtgaatttgatcctaaagccaatagttatgcgggggctaaaggtatgatgcagttaatgacttatactgctaagcttgtagctaaacaaatgaaagttccttatagtaagagtaaattgacttcagatccagagtataacattaaacttggaagctattattttaattcattgttaaatgattatagggaagtatatccctttgctatagcagcatacaatgcgggtcctaagagagtaagata

SEQ ID NO: 211240 - DNA, 199 bp, Unknown
  Bacterial polypeptide expressing nucleotide sequence isolated from the Sargasso Sea
tatgaagggagtaaaagcaaaacttcgatatctgcctaacacttttgaaattttagaaaaaggtgactatgttgaatgtgctgttacaaaaaagaaaatcccattagaaaaccttcattattggaatgttgatttacaagaagcttatttttctcctaccgaagtaaagttacggcatgaaaaaataagttcaaagtaa

SEQ ID NO: 211241 - DNA, 355 bp, Unknown
  Bacterial polypeptide expressing nucleotide sequence isolated from the Sargasso Sea
atgacggcgtcttatttaagaggaggttttcgtttttataacaggttgcagcgaccaacagagtttgccgcagtttttgcgtctaataacaaatcaagtgatgaggtgtttttgtttttagctagaaaaaatggcacagacattgcgcgccttggggtaacggttcccaaaagacacataacaaaagcggttgatcgtaatcgcgcgaagcgcattataagagaaagttttcgtttacaaaaaaagaaactaaaaggaatggatgtcgtggtgctcgtaaaaaaagaaattaataaaaacaaatctaaatacgcagacgctttaaacagacactgggaaaaagtaacagagtgaa

SEQ ID NO: 211242 - DNA, 814 bp, Unknown
  Bacterial polypeptide expressing nucleotide sequence isolated from the Sargasso Sea
atgaaatattctaacgatactctattctttgtagctgccccatttggtaattatttaaaatttaaaaaaaaggctaatgttctacccgttactggaacatggactttaaaatatagaggtgggattttaaaaaagatttataaaattgcaactactttgcgctacaaaagaaaaaaagaaggatgggtaaataaaatgggtttacctaacgtaggtttaaatgttgggctaagaagaacaaacaacaatgaaatactttccattgctgaattagaaaaaggagattttgaaaagatgtcttttttaataccaaaagaccaatctattgagatcaacttaagctgcccaaatgtaaaaggcggggaaaaactgccttggaacgatgttcgttttttcaacaaagaaaattcacaattacgaaaatattgtatcgctaagatttccccttatactacagaaaaagagctagaatttctaattgacgatcaaggttttaattatattcattgctgtaataccctgccggttgaggaggggggattatcaggtaaaaaacttaaaccctatgttgaggatttaataaaaatgatcacctccaaatggggtaaaaaagtcgaaattatagctggtggtggaatttcaaataaggatgatgccttacactatcttgagctaggtgctaaacatctttctttggggactgtatgtttcacaccttggaaaattaaaaaaatactttctttaatcttgaatattgttaaatctataatattttttttgattttatttttgataagttgcactaattctccaa

SEQ ID NO: 211243 - DNA, 1459 bp, Unknown
  Bacterial polypeptide expressing nucleotide sequence isolated from the Sargasso Sea
atgaatgaagtagctttaagtttttataggaagataaataaaggtaaattagcaataatcgatattggttctaattctattagacttgttatatatcctcaaaatgggaaatatccttttccattattcaatgaaagagtaaattgtaaacttggcgagggtttatcattgagcaaaaatatttccagtcaatcaatttcaaaagccttgtcagctataaagcgttttgcttatataataaaaacaatgtctgtaaaacatcgattaattgtagcaactgcagctgttagaaaagctaaaaatgcaaaagaatttttacgtcctgcagaaaaacttctgaatcataatattaaaatcttgtctgctaaagaagaagctgactatgcctgtctaggagttcttagcaacataaaagttgataaggggcttatagcagatttaggaggaggaagtttagaacttattcttattcaacatggaaaaaagataaaatcaacaagtattgatattggacacttatctcaaattagtagtgaagaaatcagaaaagaaattaataaagttgaatggctgaataaatctaaaggtcttacattgtatggaacaggtggaagttttagagctctaggatctgcctatataaagaattataattatccactctcattattgcatggattaaaattcgatatcgaaagagggataatccttttggatcaaatgtcagacgaaaacaaagaagtattaggtatacctcctggtagaacagatactatttcaactgcagcaaagataataactcacctgattttatcatcaaatgtaaaaaatattatgattagtggaacaagtataagagatggattgatagcagaattaaataaagaaaataggatcaatccagataaagttgcttactataatgtacttgcaaaaaaccaaagatttaatggtatgcaaactaaaataaaaaaaatattcagtcctattgttcaaaaaattgcagataaagatcttgaaagggtatttaaaattagtactaatctttcagatatttcttgggacgaacagccagatatgagaggtaatattgccgcaaacaaaatcttatcactaccagtaagagatttaactcatattgagagggtatggatggccaaagttgtttatcacagatatgttggtactaaagataaacaacaaattgataaaagaataatcaatttactttcagaaaaacaaaaaatttcatcttatgctataggtttaggattaagatttttatataattttagcgcaggattaccaaaaaatttggataatattaaattcaagattaagaaaaataaactgacttgtaaaataaaacctgaagccaaagctctcatggataaagaaaacgaacgaagattaaaaaacttttctaatgcgtgtaatttaaattatgagattatttgat

SEQ ID NO: 211244 - DNA, 820 bp, Unknown
  Bacterial polypeptide expressing nucleotide sequence isolated from the Sargasso Sea
gaagttcagcgcacggttatcaagagttgtcgtcgttttacatacgaagaagtagacgtgttccttgcggatcaaaacaccaaagaaatagacatgaagacatcggtccgtgaactgctcgggagaatgcagcgacttgcttctatcttgcgagatcggcgactgacgcgcggtgcgctcgagctcaatatgcctgaagtgaagattgatcttgaccggtcaggccgagttgctggcgctcatgttgttgaaaacactgagagccatcagattgttgaggaatttatgcttgcagcaaatgaggccgtcgccgagaaaattgctggtgcaaaaggaaagtttctacgacgagttcacccatcaccagacctgcggaaactgcgacagctcacagaattcgttctggagcttggttttgaggttgagtcacttgaaagccgctttgaattgcaacggttgctcgggctagctcgtcatcaaccagaagagcatgcagttcactacgcagttttaaggagcctctcgcgagcaatgtacgctcctcttgaccaaggacactatgcccttgccagtgaatgttactgccattttacatcccctattcgtcgatatcccgatctgacgatccatcgagcactcgactttctcgaagccggtaagaggccccctgatgaccaccttgagcaactcggagaacactgttcggagcttgagcgacgggctgaggcggcggaacgtgaattaataaagctcaagcttctgcattttttgagcagtcgtgttggaatggagcttgagggtgttgtgacaggcgttgcac

SEQ ID NO: 211245 - DNA, 559 bp, Unknown
  Bacterial polypeptide expressing nucleotide sequence isolated from the Sargasso Sea
cgatgtctatctgatgtggcccgagacccgcgaggaactggcggcgcggatggcgacggtcaacgagtgcgccgcggcgcatggccggacgctggattatggtctgcgggtccatatggttgtgcgcgagaccgaggccgaggcgcgtgaatatgcggccgagcttgtctccaggctacatgacgaggtgggacgcgagatcagggagcgtgccctcgacagcacatcgtttggtgtcgccaagcaggcgcgcagccgcgagctggccgacatggacggctttatcgagccccgcctgtggaccggcgttgggcgcgcccgttcaggatgcggggcggcgcttgtcggttccgccgaccagatcctgtcagaaatcgaggcctatcagaaaatgggcatgcgcagcttcatcttttccggctatccgcatctggaagaatgcgatcatatcggcaagctggtgcttccggagttgaagacctgctcgttgccgcatgaatatggccgggtgccggcggccaccccggccacaccgcttggcgttggagacagacactga

SEQ ID NO: 211246 - DNA, 169 bp, Unknown
  Bacterial polypeptide expressing nucleotide sequence isolated from the Sargasso Sea
tcgtctgcacgttatcgtgcgcgagacagtggaggtagcatggcgcgacgccgcgcgcctgatcagccgcctcgacgaggtatccatagcgcgggtgcagaagccgttcgcggacatggattccgagggccagcgccgcatggccgggctgctcggcggcaagcggggg

SEQ ID NO: 211247 - DNA, 670 bp, Unknown
  Bacterial polypeptide expressing nucleotide sequence isolated from the Sargasso Sea
caacttctcaggtcttacaacagaaccttcaaagccatttcaaattggaggaccgctgctttattttgggggctattctccaccagctcttgagttatgcggacaacattgtgatgtttatctgatgtggcctgaacctaaagaacaaataactgggcggatgaaatctgtgaatgaggtggctgaaaaatatgatagaaccctcgattatggtctacgtgttcatatgattgttagagataccgaaatagaagccaaagaatatgctgattatatagtatcaaggctagaagatgacttcggaaaaaaaataagagaacgtgctcaagatagctcttcattgggagtctctcaccaagcaaaaaatagacaaatttcggatgaatttggttatgtcgaacctcatctttggacaggagtgggtagagcaagatctggatgtggtgctgctattgttggatcaactgaccaagtgatgagtgaattagagcaatatcagaaattaggaattcgctcttttatcttatctggatacccccaccttgaagaatgtaaacattttggctcgaaagtcttgccaaatataaaaacttgctctctaccgcatgtatatggccgagttcccaataatatacctttaactccactaggactaggagagcgtaactaa

SEQ ID NO: 211248 - DNA, 218 bp, Unknown
  Bacterial polypeptide expressing nucleotide sequence isolated from the Sargasso Sea
gcaggtggcggcactcatgaacgaatacgcggcgctcggtatcgacacgttcatcctgtccggctatccgcatctcgaagaatcgtaccgctttgccgaactggtgtttccattgctgccgggccggcagctcaagaccgctggcggtccgctgtccgggcccttcggcgagatcgtcggcaacaactatctgccgaaagcggcgagttcgagctgag

SEQ ID NO: 211249 - DNA, 780 bp, Unknown
  Bacterial polypeptide expressing nucleotide sequence isolated from the Sargasso Sea
acggctaaagtttctggtggcgatccggccgggtatttcgtcgccgggtctggcggcgcgcatggccgcgactttcgaccggttgtcgaacgggcgtctgctgatcaacgtcgtgaccggtggagattcggctgaacttgaaggcgacggcgtattcgtcgatcacgacacgcgctatgaaatcaccgatgaattcctgcatatctggcgcaagctgctgagcgccgcgcataccaacgacgcgatcgacttcgagggcaagcatctgacctcgaagggcggcaaggcgctgtatccgccggtgcagaacccgcatccgccgctgtggttcggcgggtcgtcggcggcggcgcacgatatcgcgggcgatcacatcgacacgtatctgacgtggggcgagccccctgcggctgttgcgaagaagatcgcggacattcgcgcccgtgccgaagcacgtggccgcacgatcaagttcggcattcgcctgcatgtcatcgtgcgcgagaccgaggaagaagcgtgggcggccgccgacaagctgatcagcaagctcgacgacgaaaccatttcgcgtgcccaggcttccttctcgaagatggattccgaaggacagcgccgcatggccgccttgcacggcggcaagcgcggcggccgcgccgaactcgaggtgtatccgcatctgtgggcgggcgtcgggctggtgcgcggcggcgcgggaacggcgctggtcggcaatcccgagcaggtggcggcactcatgaacgaatacgcggcgctcgg

SEQ ID NO: 211250 - DNA, 717 bp, Unknown
  Bacterial polypeptide expressing nucleotide sequence isolated from the Sargasso Sea
cgtactggagggcgaaaccgtcgactacgacggcaagcacatccaggtgaagggcgccaagctgctctacccgccgatccagcagccgcgtccgccgctgtacttcggtgggtcgtccgacgcggcgcaggatctggccgccgagcaggtcgagctgtacctgacctggggcgagccgccggctgcggtggccgagaagatcgcccaggtgcgtgagaaggctgctgcgcagggccgcgaagtgcgcttcggcattcgcctgcacgtgatcgtgcgcgagaccaatgaggaagcctgggcggcggcggatcgtctgatcagccacctggaccaggacaccatcgaccgtgcgcaggcgtcgctggcgcgcttcgactcggtcggccagcagcgcatggccgccctgcacggcggcaagaccgacaacctggaagtgtcgccgaacctctgggccggtgtcggcctggtgcgcggcggcgctggaaccgcgctggtgggcgacggcccgaccgtggcggcgcgggtcaaggagtatgcggagctgggcatcgacaccttcatcttctccggctacccgcatctggaggagtcgtaccgcgtggccgaactgctgttcccgcacctggacgtggccgcgcctgcgcgtccggagagtcgcggctatgtcagcccgttcggcgaaatgatctccagcgacatcctgccgaaggcggctgc

SEQ ID NO: 211251 - DNA, 517 bp, Unknown
  Bacterial polypeptide expressing nucleotide sequence isolated from the Sargasso Sea
catgagcctcaatattttctggttcctgcccacccacggcgacggtcattaccttggcaccgccgaaggcgcccgcgctgtcgaccacggttacttgcaacaagtggcccaggctgctgaccgcctgggtttcggcggggtgttgatccctacgggtcgctcttgcgaagactcgtggttggtggccgcctcgctgatccccgtgacccagcgcttgaaattcctggttgccctgcgccctgggatcatctccccgaccgtggccgcgcgtcaggccgcgaccctggatcgcctgtctggtggccgtgcgctgttcaacctggtcaccggtggcgatccggaagaactggctggcgacggattgttcttgagccatgaagagcgctaccaggcgtcggtggaattcacccgcatctggcgccgtgtgctggaaggcgagaccgtggactacgacggcgagcacatcagcgtcaaaggcgcaaaattgctctacccaccgattcaacaaccacgcccg

SEQ ID NO: 211252 - DNA, 442 bp, Unknown
  Bacterial polypeptide expressing nucleotide sequence isolated from the Sargasso Sea
catgagcctcaatatcttctggttcctgcctacccatggtgatggcaagtacctgggcacagccgaaggcgcgcgcgccgtcgaccacggctacctggcccaggtcgcccaggcggctgaccgcctcggttatggcggcgtgctgattcccaccgggcgttcctgcgaggactcctggctggtggccgcctcgctgatcccgctcacgcagaatctgaagtttctcgttgccctgcgcccggggatcatttcgccgaccgtggctgcgcgccaggcagcgacactggatcgcctgtcgaacggccgtgcgctgttcaatctggtgaccgggggcgatccggacgagctggccggcgatggcctgcacttgtcgcacgctgagcgctatgaggcctccgtcgagttcacccgcatctggcgccgcgtactggaaggcgaaacc

SEQ ID NO: 211253 - DNA, 1237 bp, Unknown
  Bacterial polypeptide expressing nucleotide sequence isolated from the Sargasso Sea
catgcgccgcgcatccgcgacgcgagcagggcgatgttttttccaaattccggcaaggacagtcaagcaggagcagcagatgaatgtgttctggtttatccccacgcatggcgacagccgctatctcggtacggccgaaggtgcgcgcgccgcggattacgactacttcaagcaggtcgcagtggccgccgacacgctcggctacgagggcgtgctgctgccgaccggtcgttcctgcgaggatgcgtgggtcgttgcgtcgagcctcatctcggcgacgcagcgcctgaaattcctggtcgcgatccgtcccggcatcgcatcgccggggctgtcggcgcggatggccgcgacgttcgaccgcctgtcgggcggccgcctgctgatcaacgtcgtgacgggcggcgatgccgccgagctagaaggcgacggcctgttcgcggatcacgacacgcgttatgaaatcaccgacgacttcctgaacatctggcgcgggctgctgtccgcgtcgcacgacaatggcggtttcgactacatcggcaagcatctgcagtcgaagggcggcaaggcactgtatccgcccgtgcagcgtccgcatccgccgctgtggttcggcggctcgtcgccggctgcgcacgagatcgcggccgaccacatcgacacctacctgacctggggcgaaccgcccgaggccgtcgcgaagaagatcgccgatattcgcgcacgtgccgaggcgcgcggccgcaagatcaagttcggcattcgtctgcacgtgatcgtgcgcgagaccgaggacgaagcatggcgcgacgccgagcgcctgatcagccgcctcgacgacgaaaccatcgcacgcgcgcagaaggcgttcgcgaacatggattccgagggccagcgccggatggccgcgctgcacggcggcaagcgagggggccgcgaggcgctcgaggtgtacccgaacctctgggccggcgtcggcctcgtgcgcggcggcgcgggcaccgcactcgtcggcaatccggagcaggtcgccgagcgcatgcgcgaatacgccgatctcggcatcgagaccttcatcctgtccggctatccgcacctggaggagtcgtatcgtttcgcggaactcgtattcccgctgatcaagggcaccggcgcgacgaaggccaccggcccgctgtcgggcccgttcggcgagatcgtcggcaacagctatctgccgaaagcggcccagagctga

SEQ ID NO: 211254 - DNA, 723 bp, Unknown
  Bacterial polypeptide expressing nucleotide sequence isolated from the Sargasso Sea
catgcaaattttctggttcattcccacccacggcgacagccgctaccttggcaccgcccaaggcgcacgccagctcagccatgactacctccagcaggtggcggtggccgccgacagcctgggctacgagggcgttttgatccccaccgggcgctcttgcgaagacccgtgggtggttgcatccagcctgatcgccgtgaccaagaaactcaagttcctggtggccgtgcgccccggccttcaccagcccgcgctggctgcgcgcatggcggccacgttcgaccggctctcgggcggacgactgcttatcaacctggtgaccggtggcgaccagaccgagctggagggcgacggcgtgtttctggaccacgccacgcgctacgagcagtccgccgagttcatccgcatctggcgcgagatcctcgcgcgcagccacagcggtgaatcactcgactacgacggccagcacctcagcgtgaagggcgccaagctgctgtttccgcccctgcagcagccgcacccgccggtgtactttgggggctcgtccgatgccgcccacgacctggcggccgagcaggttgagacctacctgacctggggcgagccaccggctgaagtcgccaagaaggtggccgacgtgcgtgcccgtgctgcaacgcatgggcgcaccgtgaagttcggcatccgcctgcacgtcatcgtgcgcgagaccgaagaccaggc

SEQ ID NO: 211255 - DNA, 619 bp, Unknown
  Bacterial polypeptide expressing nucleotide sequence isolated from the Sargasso Sea
catgcccctcgaccatcccctgttgttcaaatcgctgtgctacgtcgacggtcactggctgcacagtgacgacggcgccagcatcgccgtgcacaacccggccgaccagagcgtgatcggccacgtgccgatgcttggccagacgcagatcatcgccgcggtggacgccgcccagcgcgccttcgccaactggcgcgagcagagcctggaaacccgcgcggcgttgctgcggcgctgggccgagctgatcctgcagcatcaggaagacctggcgcgcatcctcagccaggaacagggcaagccgttggccgaagcccgtggcgagatccgctacgccgccagcttcattccctggttcgctgaagaggcgcgcaggctttacggccagaccattcccagccatatccccggtgcccagctcggtacgctgaaggagccggtcggcgtttgcgccctgctcacaccctggaatttcccctgtgcgatgatcacccgcaaggcggctgcggccctggccaccggctgtaccgtggtggtcaagccggcgcacgagacgccctattccgcctttgccctggcccaattggccgaggaagccgggctgcccgccggcgtggtc

SEQ ID NO: 211256 - DNA, 1282 bp, Unknown
  Bacterial polypeptide expressing nucleotide sequence isolated from the Sargasso Sea
agcataggttcaattgctgttgcaaatgatgaccctaatgttatatatgtaggaggtggtgaagtaacaatacgtggaaatgtttcgtcaggatatggtgtatttaaaagtgttgatgcaggtaagacttggactttttcaggtctgccaaactctaaacatattccaagaatagtaattgatcctaataataatgatatagtttatgctgctgtgcttggtaatctttataagccaacaaatgatagaggagtctataaatcatcaaatggaggtgcaacttggagaaaagttctttttgctaataatttatctggtgcatttgaaattgtaatggacccaaacaattcaagaatactttatgcatctacttggagggttcaaagaacaccttcgagtcttagtagtggaggtgatggttcagacctttggaaaagtgaagataatggtgagagttggagaaaaattagtacaaactctggatttcctaaaggtatacttggtgtaattggtgtaactgtttctccagttgattctgaaagagtttgggcaattgttgaaaatgaagaaaagggtggagtttacagatctgataatggtggtaaagaatggaagtatactaatagtgacagatctttaaggcaaagagcttggtactattcaaaaatatatgctgacacccaagatattgatggtgtatatgtgatgaatgtagcatatcattattctgatgatggaggtgaaactttcaaatcaagttatgctcctcatggagatcatcatgatctatggattgcgcctgaagataataataggatgattattggagatgatggaggtgctcaggtatcttatgataaaggtaagacatggagtacttattataatcaacctactgctcaatattacagagtgaccacagataactcattcccatataggatatatgttgctcagcaagataattctacacaaagagttagccatagaagtttagggtataacattggtgaagatgactgggaaagtactgctggaggagagtctgggcatatagctatagaccctaataataatgaaattgtttatggaggaagttacttaggttttctagaaagaagaaatcatgaaaaaaagacatcaagaaaaataaatgtttggccgattaccactttaggtgaaggagctgaaggcatgaagtatagatttaattggaattttccaatctcatttagtaagcatgattcttctaaactctatgctttttcaaatcatgttcatg

SEQ ID NO: 211257 - DNA, 2416 bp, Unknown
  Bacterial polypeptide expressing nucleotide sequence isolated from the Sargasso Sea
tgatgtttcagacctttggaaaagtgaagataatggtgagagttggagaaaaattagtacaaactctggatttcctaaaggtatacttggtgtaattggtgtaactgtttctccagttgattctgaaagagtttgggcaattgttgaaaatgaagaaaagggtggagtttacagatctgataatggtggtaaagaatggaagtatactaatagtgacagatctttaaggcaaagagcttggtactattcaaaaatatatgctgacacccaagatattgatggtgtatatgtgatgaatgtagcatatcattattctgatgatggaggtgaaactttcaaatcaagttatgctcctcatggagatcatcatgatctatggattgcccctgaagataataataggatgattattggagatgatggaggtgctcaggtatcttatgataaaggtaagacatggagtacttattataatcaacctactgctcaatattacagagtgaccacagataactcattcccatataggatatatgttgctcagcaagataattctacacaaagagttagccatagaagtttagggtataacattggtgaagatgactgggagagtactgctggaggagagtctgggcatatagctatagaccctaataataatgaaattgtttatgggggaagttacttagggtttctagaaagaagaaatcatgaaaaaaagacatcaagaaaaataaatgtttggccgattaccactttaggtgaaggagctgaggcaatgaagtatagatttaattggaattttccaatctcatttagtaagcatgattcttctaaactctatgctttttcaaatcatgttcatgtctccactaatgaagggaaaagttgggaaataattagtccagatttgacaagaaatgacaaatcaaagctagtttcctcaggaggtcccattactcaagacaacacaggtgtagaatactacgcaactatatttgctattgatgaatcaaatattgaagaaggattaatgtgggttggaagtgatgatggattagttcatattacaagagatagtggtaaaacatgggagaatgtaacaccaaagaagatgcccgaatggatgatgattaatagtattgatgcttcatcatttgatgcaggaactgcctatatagcaggtactagatataagcttggtgactttacaccttatttatatgtaacagaagactatggtcaaacttggaaactaattacaactggtattgataaagaacattttactagagtcctaagatctgataaggtgaataaaaatattttatatgcaggaactgaaactgggatgtatatttcttatgatatgggaagaagctggaataaatttcagaagaatttaccaattgttccaataactgatctaactataaaagataactccttaatagttgctactcagggtagaagcatttggatacttgatgatttaactgtaatgcatcagctatccccttcaatagatcaagagaaattatataaaccaaaagatgcatatagaattcgtggagctggcggtatggagtcattaactgctggaacaaatcttcctaatggagttatcgtacattattttcttccaaattttgatgaagaaaaagatgatgtgagcctttcattccattctaaagatggaactctgattaaagagttttcaaacaagagtaaagagaacttattaaaagtaaaaaaaggtggaaattcatttgtttgggacatgaaatatcctggagctaaaagaattaacaatatggtactttggagtgctgatttttcaggtgcaaaagcagtaccaaacaactatgaagttagacttaaagttaatggctctgagctatcacagaaatttatgattctaaagaaccctaactctgaaggcacaattgatgatatagagtctcagtttaattttgtaaatgaaattaatggaatagtcgacaaagctcataaagcaattataaatattagaaaaattaaagaagatcttaaaaagttccaaggtgattttactaataatgaattggcaaaagatttaattgaaaagtcaaaatctatttatgaatcaattgataaagttgagaatgaattgtaccaaactaaaaatcaaagcaatcaagatcctttaaactatggagttaagttaactaataacctaggaaatcttaactcaggatttagaggtggagacttcggtccaactgctcaagatatagaagtaaagaatgaactagttgagaaagtaaatactcaacttaaagaatatgacttaattatatcaaatgatatacctaatttcaatgaaagcttcaaaaagcttgaattaaattatttaaatgtttctttggaataa

SEQ ID NO: 211258 - DNA, 789 bp, Unknown
  Bacterial polypeptide expressing nucleotide sequence isolated from the Sargasso Sea
cctgataatagagtcgccatcagttgcacaccagaaggtgcgggtcgcgattgtcggttccggtctcgcgggcctctccgctgcggtggacctggtggatgctggccatgaggtgaacctctacgaggcccgtccgttcatgggcggcaaggtgggcagctgggtggatgacggcggcaaccacatcgaaatggggttgcatgtgttcttcttcaactacgccaatctcttcgcgctgatgcggaaagtgggtgcgtttgagaatctgttgcccaagcagcacacccatctgtttgtgaatgagggcggtgatctgcgggaactggatttccgcttcccgatcggagccccgttcaatggcctcaaggcgttcttcaccacgccgcagctgagctggatcgataagttgcgcaatgccctggccctgggcaccagcccgatcgtgcggggtctggtggattacgaaggggcgatgcgcaccatccgcgccctggactccgtcagtttccaggattggtttgtgggccatggcggcagcccggaaagcatcctccgcatgtggaatcccatcgcctatgcgctgggattcattgattgcgaggccatttcggcccgctgcatgctcaccattttcatgatgtttgcagccaagaccgaggcctcgaaactcaatctgttgaagggatcaccgcatcgctggctcactggcccgatcctggagtacatccagcagcgcggcggcagattgcacctgcgccaccgggtgaagcaggtggaattcagcgatgg

SEQ ID NO: 211259 - DNA, 1435 bp, Unknown
  Bacterial polypeptide expressing nucleotide sequence isolated from the Sargasso Sea
atgcctaagagtgacaccctacagagtgagaacgccaaacgcccctctgccgagcaatttatccccgtaaaaaatatccaggcggacgataagccagcacataaaagcagtggccagattcatttccgtgagcagaagggctattttcaacgcctgagaaccacaatgaatagcctattagtgctgctgttttttgccctgccctttatttcctttgatggtcggcaagcaatattgctggatgtgagtcagcaacagttcttcttttttggcctcacgctctggccacaggatttcaccttactcgcttgggtgtttattgccgccgcctttggattgtttttcatcacagtgttttgggggcgcgtctggtgtggctatctttgcccgcaaaccgcgtggacttttatgtttgtctggctcgagagccggattgagggcaacagcaacaaacgtaaattgctcgataaggcgccatggtcagccaataaactcggtaaaagaagtctcaaacacggtctgtggggattcgccgccttaattaccggctgtggatttatcggttatttcatccccgcccgcgaactctatttggatatttttaccggcaatgccagcttttggacgacctgctgggtatggtttttcgcaatttgtacttacttaaatgcaggctggatgcgcgagcaaatgtgcttacactgctgcccctatgcgcgttttcaggccgtgatgttcgatgccaacaccaaaaccgtgacctatgatgccgcacgcggcgaagcgcgcggtccacgtaagcgcaaacagcagactgaactcggtgattgtgttgactgtaacttatgtgtcgaagtctgcccgacggggattgatattcgccaaggcctccaatacgagtgcattaactgcggcgcctgtgtcgatgcttgtaatgaaaccatgcaaaaattcgactacaaacaaaacctaattagctatgtcagcgagaatgaattaaagggtatagcccattccaactggcgctcgccacgctttttaggttacggcgccgccgttgtcattatgttggttgtgataggtttagatctttctagtcgcagtgagattcagcttaacgttattcgcgacagacagagcctgtaccgcgaaaccgccgataacaaagttgaaaatacctaccaactgaagatccgtaacaagactcagcaaaccaagcaatatcaactcgcggtcaacagcgaaatgcccttcagcttaattgccgatcctgtcattaccctcgctccgggcgagcaatcggattatcccgtgacagtattagccgataaggatgcgatccctgcggggcgcaaaattatcgaattttcggtaacggatgtcagcaaacctgaacaaagcgttagccaagaaactggcttctttagcccttagc

SEQ ID NO: 211260 - DNA, 772 bp, Unknown
  Bacterial polypeptide expressing nucleotide sequence isolated from the Sargasso Sea
tacatcacaaaaaaaggagcaaaaatacatcttaaccataaggtagaagaaatcatttatgaaaaggaatcttcctcttattcagtaaatcaattaaaaatatcttctcctgaaggaattaaggcagtgtttgcagataaatttctagctgcctgtgatgtccctggaataaaaaaaataattccaaaagaatggtatcaatttaaagaatttgaaggtttaaaaaaacttagagctgtagctgttgccacaatccaattaagatatgacggttgggttactgaattacaaaaagataatactggaaacgaaccaattggactagataaccttctttattctgctgatgcctctttcagttgttttgctgatttagcactagcaagtccagcagactatagaaaaaaagatatgggatcgcttctccaatgtgttttaactcctggcgatagatggatgggaagatccacagaaagaattacaaaagagattgataaagaggttcgccgtctattcccatcctcaaaaaaccttaaattgctttggagtaacgtggtacaaattccacaatcactttatagagaagctcccggtatggaacctttcagacccgatcaaaaaacatctatatctaatttcttcatggctggtagttatacaaaacaagattatatagactctatggagggagctacaatgagtggtcatttagctgccgcggcaattttagagaagaaagccgagttagcaaaaaatcttgcagtaagttaat

SEQ ID NO: 211261 - DNA, 823 bp, Unknown
  Bacterial polypeptide expressing nucleotide sequence isolated from the Sargasso Sea
ctcaacctgctcaagggatcgccccaccgctggttgaccgggccgatcctggagtacatccaggcccgcggcggcacgttgcacctgcgtcaccgcgtcacccaggttcatgaaggggagcgcgatggcacaacctgcgtcagcgccttgaccatgggcacccccgagggggatgtggaggtcaaagccgacgcctatctggcggcctgcgacgtgcctggcatccagcgcttgctgcctgagagctggcgccgctttgagcagttcgacaacatctacaaactcgaagccgtcccggtggccacggtgcagttgcgctacgacggctgggtcaccgaactcggccagagcagcgaggcggctgccgcccgtggtgatgtccaccatcccgccgggctgaacaacctgctctacacagcggatgctgatttcagctgctttgctgatctggccctggcatcaccggaggactaccgcaaggagggccagggctcgctgctgcagtgcgtgctcacccccggcgatccctggattccacgcaagagcgaggagatcgttgctcacaccgatgcccaggtgcgcaagctgttcccctccagcgaaggcctcaagctgacctggagcaatgtggtcaagctggcccagtccctctaccgggaagccccgggcatggagccctaccggccggatcagcgcacgccggtgggcaacttcttcctggccggcagctacacgcgccaggactacatcgattcgatggaaggggcgaccatgagcggccgcatggccgccagtgccatcctgagcgctgcgggagcctgag

SEQ ID NO: 211262 - DNA, 714 bp, Unknown
  Bacterial polypeptide expressing nucleotide sequence isolated from the Sargasso Sea
acggaggcctccaagctcaacctgctcaagggctcgccgcaccgctggctgactggtccaatccttgagtacatccaagcccggggcgctcagctgcatctgcgccatcgcgtgactgcggtgcatcaccaggacgacaacggcaccacccgcgttaccggtctaacgatggggacccccgatggggatgtggaggttcaggccgacacctatctggctgcttgcgatgtgccggggatccagcgcctactacctgaggagtggcgccgttttgagcagttcgacaagatctacaagttgaaggccgtgccggtggccacggtccagctccgctacgacggctgggtgactgaactcggtgatcagcctcaagcaattgccgcgcgcactgatgtggccaagccatcagggctgaacaacctgctttacacagcggacgccgacttcagttgtttcgctgatttggctctcgccagtcctgaggactaccgcaaggaaggccagggctcgctgctgcagtgcgtgctcacccctggagatccttggatcccgcgcaaagcagaagagatcgtcgcccacaccgatgcgcaggtgcgcaagctcttcccctccagcagtggcctcaagttggtttggagcaacgtggtcaagctggcccagtcgctctatcgcgaagcacctgggatggagcccttcaggcccgagcagcgcacg

SEQ ID NO: 211263 - DNA, 481 bp, Unknown
  Bacterial polypeptide expressing nucleotide sequence isolated from the Sargasso Sea
cagcgccgggatgtggcgacacccacggggctcaacaacctgctgtacacggctgatgccgatttcagctgttttgccgatctggccctggccagtccggaggattaccgcaaggagggagagggctccctgctccaatgcgtgctcacccctggtgatccttggattcccaagtcggtggatgagatcgtggcccacaccgaccgtcaggtgcgcgcgctgttcccctcggcccgcaatctcaagctcacctggagcaacgttgtgaaactggcgcagtcgttgtaccgcgaagcccctggcatggagccctaccgcccggagcagcgcacgccgatccgtaatttcttcctggccggcagctacacccgccaggactacatcgattcgatggagggggccacgatgagcggtcatctggcggcggcggccatcctcgatcagccggtgaagctggccaccaacgcggcggtggcctgat

SEQ ID NO: 211264 - DNA, 723 bp, Unknown
  Bacterial polypeptide expressing nucleotide sequence isolated from the Sargasso Sea
gcgatggggagtcccccgaagtgacgggcctgcagctgggcacgccggacggggacatccgcgttgaagcggatgcctatcttgccgcctgtgatgtgcccgggatccagaagttgttgccggaggactggcgccgtttcccccagttcgatgccatccaccaactggaagcggttcctgtggccacggtgcagctgcgttacgacggctgggtgacggagctgggtgagtcccaggacgcgcagcgccgtgatgtagcgacgcccacggggctgaacaacctgctgtacaccgccgatgccgatttcagctgttttgcggatctggccctggccagcccggaggactaccgcaaggagggagaaggttccttgctgcagtgtgtgttgacgcccggtgatccctggattccaaaatccgtagacgacatcgtggcccacaccgatcgccaggtgcgtgccttgttcccctcagcccgggatctcaaactcacctggagcaatgtggtgaagctggcccaatcgctgtaccgcgaggctcccggcatggagccctacaggccggatcaacgaacgccgatccagaacttcttcctggccggcagctacacccgccaggactacatcgattcgatggaaggggccacgatgagtggtcatctggcggcggccgccatcctggatcagcccgttaggctcgccatgaatgcagctgtggcttgat

SEQ ID NO: 211265 - DNA, 349 bp, Unknown
  Bacterial polypeptide expressing nucleotide sequence isolated from the Sargasso Sea
atgataaatttagagttgcctgatttaccatatagtaaagatgctcttgcaccttatatgtctgctgaaactttagaattgcatcatgataaacatcatatggcatatgttactaatggtaataaatttattaaagaaaataatattagtgaagactcaatagaagatattgtaaaaaatactcataataaaaatgctccagtttttaataatgtgtcacagcatttaaatcatatacatttttgggaaatcatgaaaaacaatccaaatggtaaaataccatctgaattagaaaataaaataaatgaagattttggatcagttgataccatgaaagaattatttatta

SEQ ID NO: 211266 - DNA, 193 bp, Unknown
  Bacterial polypeptide expressing nucleotide sequence isolated from the Sargasso Sea
atgataaatctagagttaccagatctaccctacagtaaagatgctctaatgccgtatatgtcggctgaaactttagagttgcatcatgataagcatcacatggcttatattactaatggaaataaatttattaaagaacagaatatatcagatgataatgtgaatgatattgttattaactcatatcaaaaaa

SEQ ID NO: 211267 - DNA, 508 bp, Unknown
  Bacterial polypeptide expressing nucleotide sequence isolated from the Sargasso Sea
aatgattaaacttgagttaccagatttaccttatagcaaggatgcacttcagccatatatgtctgctgaaacattagaactgcatcatgataaacatcatcaagcttatgttactaatggcaataaatttattgaagaacaaaatcttagtgaatcaagtataaatgaaattgttattaattcttataaaaataataatgctcctgtttttaataatgtttcacaacatataaatcatattcatttctgggaaattatgtcaaataatcctgaaggaaagatacctggagaattagaatcaaaaattacaaatgattttggatcagtcgatcaaatgaaaaatgatttcataaatgctggaataactcaatttggttcaggttggtgttggttagtgctaaataatggaaaacttgaagttacaaaaacacctaatgctgaaaatccaatagttcatggacatatacctcttttaggttgtgatgtgtgggacattcatattacgtag

SEQ ID NO: 211268 - DNA, 703 bp, Unknown
  Bacterial polypeptide expressing nucleotide sequence isolated from the Sargasso Sea
atggccggaggctggagcagattcgcactaagattttccgagtattacgactccttatctccagactcgatatggacgccaccgaggttaaggaacagggagtggatgtttatcccatgggggggtgcaccgccggataggcaccgtgcgttccccgataagacttcacttcattcttatctcagaacaagagcacctcactcatgcttccacagcactgcttactacgaagatccctccaagggcaagatggcagagaagggatggctgggcgcagatctgatttttgacctcgatggggaccaccttcctggggtgtcggacaacgacttccctgcaatgatcgatgtcatccagggtcatgcctggaggctatggaacgaattccttgaaccagaatttggattcaagcaaaaatacgcacaattcacattttctgggcatcggggatttcatattcatcttagagatccttctttgttacacttagactcgaacgcacgcagggagatggtgaactacatcaggggagagggaatagatatccaatcaacgatcaatgcggactctggttggggaaagagagccattgaaggaatagactccacgttgggccaactttctcagatttcctctggaaaggaaggaaagccacatacgctgaatcaactccacgagataatcaagaccagatccaaatctc

SEQ ID NO: 211269 - DNA, 343 bp, Unknown
  Bacterial polypeptide expressing nucleotide sequence isolated from the Sargasso Sea
atgattaatttagagttacctgatttaccttatagtaaagatgctcttatgccatatatgtcggcagaaactttagaattgcatcatgataagcatcatatggcttatgtaacaaacggcaataaatttattaaagaaaataatattgaagaaacttcaattgaagaaattgttaaaaattctttccaaaaaaacgcaccagtatttaataacgtttctcaacatttaaaccatatccatttttgggaaataatgaaaaataacccagatggaagtaacaatataccttttgaacttgaaaatatgataatacaagactttgggtcaatgaaaaaagaaacaa

SEQ ID NO: 211270 - DNA, 88 bp, Unknown
  Bacterial polypeptide expressing nucleotide sequence isolated from the Sargasso Sea
atggcctatacactgccccccctcccctactcatttgatgcactggagccttcctttgatgctagaacgatggaaattcatcatgaca

SEQ ID NO: 211271 - DNA, 448 bp, Unknown
  Bacterial polypeptide expressing nucleotide sequence isolated from the Sargasso Sea
aagaaagaagcctttagttgagttagttaaagatataaaaaattataatgataaagtaaaagataatgctggcggagcatataatcatcaattattttttaacatgatgactcctggaggaagtaactttgaaggagagatagcagatagaataaaaaagcggttcggtacttacgctaaatttaaaaaagagtttataagcaacgcctctgatcaatttggttcaggttggggctggttagttgaaaaggacggtaaattagatttaatcagaacccctaatcaagataacccacttatgtttaatttaggtaaacctattcttggtgtagatgtatgggagcacagctactaccttatgtacgggcctgatagaaaagaatggctaagtaattttttcgagattgttaattggaatttctgctccgctctgttgcatactagctaa

SEQ ID NO: 211272 - DNA, 385 bp, Unknown
  Bacterial polypeptide expressing nucleotide sequence isolated from the Sargasso Sea
aatgaacaacgttttttcacaaaatgtaacggaaaacggaattgacagattagtggacagtaatggaaatttcattcaaaaatcacttccatacaataaaacttttttggagccacatatggatgaagaaaccttacatctgcactttgaatttcatcacggtggagcagtaaaaggggcaaacacagatttgattaaaattaaggaacatctaaaatcgggcgatttagaccaagtggatttgtggacccgaaagttagcttaccacttttcaagccacgtgcttcattccatcttttggacgaacttaacgaataaaaaaactgaacccaaaactgaactcttaaaacagatagaaaaggatttcggttcatttgacaaactg

SEQ ID NO: 211273 - DNA, 500 bp, Unknown
  Bacterial polypeptide expressing nucleotide sequence isolated from the Sargasso Sea
ggcgtatgtggataacggtaataaattaattgaaggcactgaatgggctaataaatctctagaagatattatagttggaacatatcaagctggctccgttgctcaaaatggtattttcaataatgcttcgcagcattggaaccacgttcagttttgggaaatgatgggtccgggaggaaataatatgccttcggagctatcgtccgctctaaatgaaaattttggttcagtcgataaatttaaggaagatttctgcgcagctggtgctggccaatttggcgcaggctggtgttggctggtaaaagataaagacggttcgctcaaagttacaaaaaccgaaaatggtgtgaacccactatgcttcggtcaaattgcgttattgggttgcgacgtgtgggagcattcgtactacattgattttcgtaataagagaccggcatatttaacaaattttctcgataaacttgttaactgggaaaatgtttcatctagaatgtgac

SEQ ID NO: 211274 - DNA, 481 bp, Unknown
  Bacterial polypeptide expressing nucleotide sequence isolated from the Sargasso Sea
gatgagcagcgatgcccatgccaaccacagtgccgtcgccgatctggcgccgacccagggcaatgccgtcaagggcaacgtcaccttcagcgtcatcgacggcaaggtccacgtgaagggcgaggtcagcggcctcaagcccaacagcgaacacggtttccacatccatgagacgggcgactgcagcgcgccggacggcgccagcgccggcggccacttcaatccgggcaaggaagatcacggcagcgtggctgccaccccgcaccacggcggcgacatgcccaacatcaaggccgacgcccaaggcaatgcggtggtcgacgccgatgtgtcgaccaacgtcaacatcggcaagggcgatggtttcgacatcatcgggcgtggcctgatcgtccatgccgacgccgacgactacaagacccagccgaccggcaacgccggcgcccgcctggcctgcgcggtgatcaaggccgcgccgtaa

SEQ ID NO: 211275 - DNA, 406 bp, Unknown
  Bacterial polypeptide expressing nucleotide sequence isolated from the Sargasso Sea
gatgaaacagtggatcatcgccgcgctggccggctgcactgcggtcgccgttcaggctgatacattgaacgtcaaggtgaacgccgtgacggcccagggcgtcggcgaatcggtcggcagcgtcaagatcgaaaacagcgaatacgggctggtgttccgccccgagctatctggcctgcagcctggcgcccacggctttcacgttcacgccaagggcagttgcgagccggccgagatcgatggcaagcagaccccggctggcgcagcgggcggtcactgggacccgaagaacagcggcaagcatggcgagccatggggtgatggccatatgggcgacctgccggcgctgtacgtcgacagcgagggcaaagccagtcagccagtgctggcgccgcgcctgaagagc

SEQ ID NO: 211276 - DNA, 270 bp, Unknown
  Bacterial polypeptide expressing nucleotide sequence isolated from the Sargasso Sea
aatgagttttactttacccgatctaccatacagtcacgattcactagataaactaggaatgagtaaagaaacattacaattccaccatgatttgcatcataaagcatatgttgataatggaaataaacttatagctggaactgagtgggaaaataagtctgttgaagacattatatcaggtacatataataataattcagtagctcaaaatggtatatttaataatgcttctcaacactggaatcattgccaattttgggagatgatggg

SEQ ID NO: 211277 - DNA, 772 bp, Unknown
  Bacterial polypeptide expressing nucleotide sequence isolated from the Sargasso Sea
ctgctggaggatcgcggtatcgcctggttccgcaacgagctcaaggcgaactacttctccagaccgctgaagggtctccgcaacgaagccaaacccaagttgctcgactatctgggctggcaccgacagaaagctggcctttggttcgtcggtctgccgcttctttgtggtcggttgaagggcacgatgaagcagggcctgcgcgccatcgtcgacacctaccaactggagatccgcctcacggcgaatcaggacctgctgctctgcaacatcggcacggcccagcgggccacgatcaaggctgagctggcggctctcgggttcgatctacccgatgctcccccgcctcttgcccgccatgccattgcctgcccggctctgcccacctgcgggctggcgatcacggaatcggagcgcattctgcccagcgtgctggagcgcctcgatgcccaactgcgtcgcctcgagatcgacaaatcggtgttgatccggatgactggatgtcccaacggctgtgcacgcccttacatggcggaactggctctggtgggcagcggtgtgaatcagtaccagctgtggctcggcggcagtgccaatctccagcggctggcccagcccttcctgcaacgcatgcctctggaggagctcgagcagaccatcgaacctctgctgatcagctggaagcaagccggcggtcgccgcagcctcggcgatcacgttgaaaaacttggcgatcaggcagtgagtgagctgctgggtgctgcggcataga

SEQ ID NO: 211278 - DNA, 430 bp, Unknown
  Bacterial polypeptide expressing nucleotide sequence isolated from the Sargasso Sea
atgataaatttagaattacctgaattaccatatagtaaagatgctcttgcaccttatatgtctgctgaaactttagagttacatcatgataaacatcatatggcatacgtaactaatggtaataaatttattaaagaaaataacttaaatgaagaatctatagaagaagttgttaaaaaatcttataatagtatagcccctgtttttaataatgtttcacaacatttaaatcatatgcatttttgggaaataatgcaaaataatccaaatggaaaaataccatctgaattagaaagcaaaataaatgaagattttgaatctgttgatgcaatgaagcaagaatttataaatgcgggaataggtcaatttggttctggatggtgttggttagttttaaataatggaaaattagaaattacaaaaacaccaa

SEQ ID NO: 211279 - DNA, 208 bp, Unknown
  Bacterial polypeptide expressing nucleotide sequence isolated from the Sargasso Sea
aatggcacatacattacctgaactaacctataattataatcaactggaaccgcatatagatgcaaaaacgatggagattcatcacgcaaaacatcatcaaacatatattaacaacctcaatattgcattagaaaattatcctgaattatttgacaaaactgttgaggatcttttaatcaatcttgaaaatattcctgaatcgattaga

SEQ ID NO: 211280 - DNA, 364 bp, Unknown
  Bacterial polypeptide expressing nucleotide sequence isolated from the Sargasso Sea
tatgagtttaagtgacccaattggagatatgatagctagagttaagaatgctcaagcaagaaatcataaaaaagtagagttaccatcatcaaattttaaaactaaaattgctgatattcttaaaaatgagggatttataaaagattttaaagtagcagaagagggtaaaaaaccaattttatcattagagcttaaatatcattctggtagtccagtcatcagtaattttgaaagagtatcaaaaccaggaagaagaatattttctagtgctgatagcttaccaaaaattaataatggcttaggcatagcgatagtttcaacacctaaaggtgtaatgaccgatatggatgccagaaaacaaaaa

SEQ ID NO: 211281 - DNA, 178 bp, Unknown
  Bacterial polypeptide expressing nucleotide sequence isolated from the Sargasso Sea
aatgattaatctagagttaccagaccttccttatagtaaagatgctcttatgccgtatatgtcggctgaaactttagagttgcatcatgataagcatcatatggcttacataactaatggaaataaatttatcaaagaacaaaatatcacagatgataatgtaaatgatattgttatt

SEQ ID NO: 211282 - DNA, 473 bp, Unknown
  Bacterial polypeptide expressing nucleotide sequence isolated from the Sargasso Sea
aatgataaatttagaattacctgaattaccatatagtaaagatgctcttgcaccttatatgtctgctgaaactttagagttacatcatgataaacatcatatggcatacgtaactaatggtaataaatttattaaagaaaataacttaaatgaagaatctatagaagaagttgttaaaaaatcttataatagtatagcccctgtttttaataatgtttcacaacatttaaatcatatgcatttttgggaaataatgcaaaataatccaaatggaaaaataccatctgaattagaaagcaaaataaatgaagattttgaatctgttgatgcaatgaagcaagaatttataaatgcgggaataggtcaatttggttctggatggtgttggttagttttaaataatggaaaattagaaattacaaaaacaccaaatgctgaaaatccaattgtccatggtcatattccactattag

SEQ ID NO: 211283 - DNA, 394 bp, Unknown
  Bacterial polypeptide expressing nucleotide sequence isolated from the Sargasso Sea
cgcttacgatcagggcgtgctgattgagtctgacctgactgggctatcgcccggaattcacggctttcaccttcatgaaaatccggactgcagcccagtagaaaaagacggaaaaacaacgcctgcaggggccgccggtggacactacgacccagaaaataccgggaagcacaaaggcccgttcgataaatccggacatcttggcgacctgccgaggctgcacgttggccaggagggagaaaacgcccagaccaatattgcgccgcggctgcagctgagcgattttaaaggccgggccctggtgattcacggtggaggagataattactcggattcgccccagcctcttgggggtggcggtgccagagtggcctgcggtgttgttgcgggttaa

SEQ ID NO: 211284 - DNA, 598 bp, Unknown
  Bacterial polypeptide expressing nucleotide sequence isolated from the Sargasso Sea
aatgataaatctagagttacctaatttaccttatagtaaagatgctcttatgccttatatgtcggctgaaactttagagctgcatcacgataagcatcatatggcttatattacaaatggtaataaatttattaaagaaaataatatgaatgaaaaaagtgcggaagaattagttattaattcatttcaaaaaaatgcaccgatttttaacaatgtatctcaacatattaatcacgtacatttttgggaagttatgagcaataatccagatgggaaaataccctctgaattagaaaaaaagataatatctgatttaggctcaattgataaaatgaaagaagattttattaatgcaggcataggacaatttggatctggttggtgttggttagtattaaataaaggaaaattagaaattacaaaaacacctaatgccgaaaatccaatagtttatggtcaaacacctttacttggatgtgatgtgtgggaacattcatattatgttgattatagaaataaaagaccggattatttaaaagcttttataaataatcttgtaaattgggaaaaggttacagaaaatctaagtaattcttaa

SEQ ID NO: 211285 - DNA, 538 bp, Unknown
  Bacterial polypeptide expressing nucleotide sequence isolated from the Sargasso Sea
cgctgaaacgcttgaatatcatcatgatttgcatcacaacgcctatgtggtgaacgggaacaatctgattgccggcactgaatgggaagggaaagcacttgaggatatcatcactgggacctacgacaaaaatgctgttgctcagaatggtatatttaataatgcctctcagcattggaatcacatgaagttttgggaaatgatgggaccaaaggggcgcgccatgccgagtgagctcgaagccgcattgtctgactcatttggatcaactgatgcatttaaggatgctttcaaggccgcaggtgccggccagttcggatctggctggtgctggttggtaaaaaatagtgatggcaggctcgccgtgaccaaaactgaaaatggggtaaacccactctgttttggtcaaacagctttactcggttgtgacgtgtgggaacattcatactatattgattttcggaataaacgtcccgattatctgacaaattttttggagaaccttgtcaattgggactatgttgcagcgcaattatag

SEQ ID NO: 211286 - DNA, 853 bp, Unknown
  Bacterial polypeptide expressing nucleotide sequence isolated from the Sargasso Sea
gcctttaaaatttttaataaatttatgtgcctaatcaatgattttccagaattcaaatttgcctttaaacttcaatatcgagatctagactcgttcataagaccagacatgaagggacgattagatataaaacacataaagcgattcgaagatacccgactaagtgaaaaccattacattaaaatggttaacaaaattaaagaactaggctttatttctatgtgcaccccatttgatgaaaaatctgtggatacaatattggatcataagattgaaatcctcaaaatcgcaagttgctcattttctgattggccattgctagaaaaagcagcttccgctggtttaccaattattgcttctactgctggggcttcattagatacaatagatcaagtaattttatttttcaaaaatagaaatattaattttgcaatacaacattgtgtgggagaatatccaacagaaacgtccagaatgaatttaaatcaattagactttctgaaaaatagatatcctaatgtaaggtttggattctcaactcatgaagatcctaacaacgtcgatattgctaaaattgcaattgcaaaaggagcgagcctattagaaaaacatgtgggtattggttctgagaaatatcctttgaatgcttattctagctctctggctcaaaccatcttgtggttaaattcagcgaagagcactatggaagcatgcggagtaataggtaaacgacatgaagcatcacaatctgaaatttcgagtttgctatcactacgacggggcgtctttgcaaaaaaacatctaaaaattgggcagaagctaaaagaaagtgattattttttagcattcccac

SEQ ID NO: 211287 - DNA, 349 bp, Unknown
  Bacterial polypeptide expressing nucleotide sequence isolated from the Sargasso Sea
atgataaatctagagttaccagatctaccctacagtaaagacgctctaatgccgtatatgtcggcagaaactttagagttgcatcatgataagcatcacatggcttacattactaatggaaataaatttattaaagaacaaaatatagcagacgataacgttaatgatatagttatcaactcttatcaaaaaaatgctccggtattcaacaatgtggcacaacatataaatcatgttcatttttgggaagtgatgaaaaataatccagatggtaaaattccctctgaactcgaaaataagatagtttcagatattggttcaattgaaaaaatgaaagaagattttataa

SEQ ID NO: 211288 - DNA, 286 bp, Unknown
  Bacterial polypeptide expressing nucleotide sequence isolated from the Sargasso Sea
aatgataaatttagaattacctgatttaccatatagtaaagatgcacttgcaccttatatgtctgctgaaactttagaattacatcatgataagcaccatatggcatatgtaactaatggtaataaatttattaaagaaaataattttaatgaagattctgtagaagagattgtaaaaaattcttataataataatgcaccagtttttaataatgtttctcaacatttaaaccatatgcatttttgggatgtaatgaaaaataatccaaatgaaaaataccatcag

SEQ ID NO: 211289 - DNA, 841 bp, Unknown
  Bacterial polypeptide expressing nucleotide sequence isolated from the Sargasso Sea
aatggatcaagctcctcaatatgctattgaccatgttgcaaacagcaaaaaaaatatctttgaatttgaatttcttaattcgctatctgagaagatttctaatttttttggaatatctagtgattccttattttatattgatttaggaatttcaaagcatgtttttttacttttctttgtttcttttatagttgtttcaacgattgtaacgctaattcaaggttatatttctcataagaaaaatattcctaacaagtttatgagcattattgagatgtttgttatttacttaagagacgatgttcttaagaattttatcggagataaagaatatagatcttgggctcctttagtttacacaattttcttttttgttctttttggaaatgttttggggttaataccaatttttgatttaacaggattgataggtaaaattggttataaagctgaaatgttaggtaaggataatatattatatttattatcaaaaggtggacacacagttacggcaaatgttaatgttacttttgcaattgctactattacatttgtcgcatttattgcagctggaattcaaaaatatggctttgtacaacattggaaaaatttagcaccgtctggattgccttggccactatactttgtagttgtaccaattgaattcatgggtttatttattagaccacttgctttgacacttaggttagctgggaatatgatgggcgggcatattgctttaataatttttataacttttatttttagtgcaactgcagaattgggaggtttagccggtttcgaaatagcacctttttcaatctcgcttgcattaggacta

SEQ ID NO: 211290 - DNA, 184 bp, Unknown
  Bacterial polypeptide expressing nucleotide sequence isolated from the Sargasso Sea
ggtagaattgtaagtgattccattagcctagagagtggtgattgtagtatcatcggccgtagcgttattattcatgaagataaagatgatcttggaaagggaggacacactgaatcattgcggacaggaaatgcgggaagacgattggcatgtggtgtgattggtttagcaaaagggtcataga

SEQ ID NO: 211291 - DNA, 350 bp, Unknown
  Bacterial polypeptide expressing nucleotide sequence isolated from the Sargasso Sea
gatgtcatttgagctacctaaattagattatttgaaatccgctttatctccgataatgtccgaagagacactcgatcttcatcatggaaaacatcaccaaacttatataactaatcttaataatctaataaaagatactgaaatgtctaaaatgtccttagaagaaattattattaactcttcaaaagataaatctaaaattggaattttcaataacgctagtcaacattggaaccatatattgttctggaaatgtatgaaaccaggtggcgggggttcaatgcccgaaaagttaaaaaatagaatagaagcagacttcggcagtacaaatgaatttaaaaaacaaattt

SEQ ID NO: 211292 - DNA, 297 bp, Unknown
  Bacterial polypeptide expressing nucleotide sequence isolated from the Sargasso Sea
aaaaaattgtagaagattttggaagcgttgaaaaatttaaagatcaatttaaacaagcaggtataactcaatttggatcaggttggtgttggttatctttaaataatgataaattggtcgttacaaaaacagctaatgctgctaatcctttaattgataacttaaaaccaatacttggttgtgatgtctgggaacattcatattacattgattatagaaatagaagacctgaatatttagataaatttgttgataatcttatagattgggaatttgttgaatctctattaatctaat

SEQ ID NO: 211293 - DNA, 496 bp, Unknown
  Bacterial polypeptide expressing nucleotide sequence isolated from the Sargasso Sea
atatgttgataatgggaacaaattgattgctggcactaagtgggaaacagaaacgttagaatctattgtaaccggaacctacgatgctaatgcggtagcacaaaatggtatattcaataatgcatcacagcattggaatcatatgcaattttgggaaatgatggggccgtctaaaaccggtatgccttctgagttagaatcattaatcaacgagagctttggaaatgtagacgctttcaaggaagccttcagtgccgctggggctggtcaatttggctctggttggtgttggcttgttaaagaagcagatgggagtttgaaagtcacaaaaacagagaacggcgtcaatcctctttgtttcggtcaaacagcactgttaggttgtgatgtttgggaacattcttattatatcgattttcgaaataagcgaccggcatatctttcaaattttttagaaaatttggtaaattgggaaaatgttgctagtagattatga

SEQ ID NO: 211294 - DNA, 961 bp, Unknown
  Bacterial polypeptide expressing nucleotide sequence isolated from the Sargasso Sea
cgatatacttctgtccgtttcggtaacccgggtagaccggcagttgctggagggtgcccgggtgcggttcgttgtacggccacgattggaacggaccacatagaccaggcctggctccaggaacaaggcatcggtttcgccgctgcgccaggctgcaatgccgtcagtgtggcagagtatgtgctctcggtattgtcgctgtacgcagaaaagcggggtattgaagactggtcatccctgacggtcgggattgtcggggtgggtaatgtcggtggtgagttggcccgaatgctggagcggctggatttcacggtaaagctctgtgatccgcccaggcaggaagctgaagaagagcacgcagaggagtttgtgccgctggccgaggctctggagtgtgacgttgtaaccttgcacacgccgttgacgcgaactggagaccatcccaccaaccggatgatcgcgggcagcgagcttgcggcgcttgggcaggatcagttgttgatcaacgccggccggggcgaggtgatagacggagaggcattgcttgcccggcttcagcaggcagacgcgcccacggtggtgctggatgtctgggagcatgagcccagaatcaatccggatctgctagaccgggtgtggctggccacgccccacattgccggctacagcctggaaggcaagatgcagggcacggagatgatctaccaggccctgtgccgttacctggggctgcctgtgcgcaagaaagccggacagtttctgccggagccggccctcagtaaagtgtcctttaccagcagtgctgatgaggatgaggccgttcaggttgctttgcgcgcctgttacgatccccgccgggacgatgcccgcctgcggctgaccatgcgcggtaatcctgaagagcgggcgcaggcctttgacaggttacgcagggactacccggtgcgcagggaatgctcga

SEQ ID NO: 211295 - DNA, 259 bp, Unknown
  Bacterial polypeptide expressing nucleotide sequence isolated from the Sargasso Sea
atgtttgaacttccaaaactagattacaataattcagctctttctccaataatgtcagaacaaactttggatttgcatcatggtaaacatcatcaaacatatattacaaatctcaataactttataaaaagctctgaatatgaaaaattgtctttagaagatataattaaaaaatcattaaacgaaaaaaaagcaggaattttcaacaatgcaagccaacattggaatcacaatcttttttggaagtgcatgaaaccta

SEQ ID NO: 211296 - DNA, 421 bp, Unknown
  Bacterial polypeptide expressing nucleotide sequence isolated from the Sargasso Sea
atggcattcgaattaagagatttaccttacagtcatgacgctttggaatcaagtgggatgagcagagaaactttggaatttcaccacgatttacaccataaagcttatgttgacaatggaaataagctgataagtgggactgaatttgagtcgatgactttggaggaaataataatgaaatccttcaaaaaagatgaagttgctcagtcaggtatatttaataatgcttcccagcattggaatcatatgcaattctgggatatgatgggtcctaaccaggatgacttgccaagtgaattgtcaaaggagataaataaaaattttggatctgttgataattttaaagatgaattttgcaaggcaggtatagggcaatttggttccggtagggtttggctcgtaaaaaatcaagatggtagct

SEQ ID NO: 211297 - DNA, 163 bp, Unknown
  Bacterial polypeptide expressing nucleotide sequence isolated from the Sargasso Sea
aatgataaatttagagttgcctgatttaccttatagtaaagatgctcttgcaccttttatgtctgctgaaacattggaattgcatcatgataaacatcatatggcatatgttactaatggtaataaatttattaaagaaaataatataaatgatgactcaata

SEQ ID NO: 211298 - DNA, 1216 bp, Unknown
  Bacterial polypeptide expressing nucleotide sequence isolated from the Sargasso Sea
catggccggaggctggagtagattcgcactccgattttccgagtattacgactccatatctccagactcgatttggacgccaccgaggttgaggaacagggagtggatgttcatcccatgggggggtgctccgcctgataggcatcgcgcattccccgacaagacttcacttcattcttatctcagaacaagagcgccgcactcatgcttccacagcaccgcttactacgaagatccctccaagggcaagatggtagagaagggatggttgggtgcagatctgatttttgacctcgatggggaccatcttcctggagtttcggacaacgacttcccagcaatgatcgatgtcatccagggacaagcctggagactatggaacgaatttctggaaccggaattcggattcaagcaaaaatacgcacaattcacattttccgggcatcgcggatttcatatccatctgagagatccttcattgttacacttagactcgaacgcacgaagggagatagtgaactacatcaggggagagggaatagatatccaatcgaccatcaatgcggactctggttggggtaaaagagccattgatggaatcgactccacattgggacaactttctcagatatcctctggaaaggaaggaaagaagcatacactggatcaactccacgagataataaagaccagatccaaatcacctaatgtcaatctcaagtcctcaagcaaagctagcatcgaggaattggctcagttatcggacgggagggatgaatacggcctcgataggatctctaggctgaaagatgatccatctttggaggttttcggcaaactcactcccttattctgggagcttgtcaagggagactcatccgtagtaatcgggacagctggtgagaccgacgaagtagtaactgtagacacaaagagagtgattagatgggtcggtagccttcatgggaaatccgggctgaaagttactgaattaccactcaatcgcttagatccagactcgagcaattgtttcgacccactagaagaggcagtcgtcttcacaggaggctctgtgaaggtacgaatacttgcagatgatgtatgtgcgaggatatccggagaacaaatagagccatcactaggcgacgaactcgttgtcagggagtcaatggctatgttcctgtgcctgaaaggatgggcagagatatgcaaatag

SEQ ID NO: 211299 - DNA, 1804 bp, Unknown
  Bacterial polypeptide expressing nucleotide sequence isolated from the Sargasso Sea
attggaagccgtttcgctacgttcaaatcaagaaatccttttcagggtgggggaaggctccttggcagtcgcggaaacaggaactcaatcgctgtccaaggcggagcagcgcaagctggacagcgaccatctacgcgaccctttgttgagcgagctcagcaacgacgatgttcgcttcactgaagatgccgttcaactgctgaagtttcacggcagctaccaacagcaccaccgcgaactgcgcaaaacagacaaagttcgcagttggcaaatgatgctgcggctgcgcagtccgggcggacgcatccctgcccggctgttcctcgctctcgatgacctctccaaccgccttggggacggaactctgcgggccaccacccgtcaggccttccagatgcacggcatcgccaaggccgatctaaaagaggtgatcggcaccatcgttcgcaacatgggctcgacccttgcggcctgcggggatatcaaccgcaacgtgatggcacccccagctccttttgagaaaggcggctatcccgtggcacggcgcctcgccgatgaaattgccgatctgctcagccccgaggcggccgagggggcctatctcgacctctgggtggatggtgacctgagttatcgcttcaagcccagccgagccgttcagaagaccagaaagcgccaaagcgaaggcgacgttttttccggcagcactgaagaacctctctacggggatacctacctgccccggaagttcaaggtggccgtcaccgtgccaggggataactccgttgacctgctgacccaggacatcggcctggtcgccttcaccgacccctccggcgaactgcggggctgcaacgtctacgtgggcggtggcatgggtcgcacccacaacaaggaggaaaccttcgctcgcacagcggatcacttgggttacgtcgatgccgccgacgttctggatgtggttcaggcgatcctggctctgcaacgggaccacggggatcgggaggttcgcaagcacgcccgcatgaagtacctgctgcacgacaagggcatccaatggttccgcgacaccctgtgcgcgacctatttcaagggaagcctcaagggcctacgcaatgagcccaaggccaagcttttggactatctgggctggcatcgccagaaggcagggatgtggttcgtaggactgcccctgctctgtggtcgcctgaacggagatctcaaggcagggctgagggagcttgtggagacctaccagctggagattcgcctcaccgccaatcaagacctgctgctgtgcaacatcggcacctcccagcgagccagcgttcgaacccatctgggagccctcgggtttgcggtgcctgaagctccagcacctctggccaggcatgccatcgcctgcccagctctacccacctgcgggctcgccatcaccgaatctgagcgcatccttccggatgttctggatcgcctcgatgcccagctgcgacggctcgagattgagaagtccctgcttgtgaggatgaccggctgccccaacggctgtgcccgcccctacatggcggagctgggcttggtgggcaacggcgttaaccagtaccagctgtggctcggcggcacccccaatctccagcgtctggcgcgcccttacatggaaaaactgcccttggatgatctggagaaaacccttgagccgctcctcctcagctggaaagccgcgggtggacgtcgcagcttcggggaccacatcgagaagctgggtgatcaggaagtcagcgcgctgttgacggcctcggcgtag

SEQ ID NO: 211300 - DNA, 601 bp, Unknown
  Bacterial polypeptide expressing nucleotide sequence isolated from the Sargasso Sea
atggcttttgaacttcccgaccttccctattcgcacgatgcattggctgacttgggcatgtctaaagaaacactcgagtatcatcatgatctgcatcataaggcctatgtagataatggaaacaaattgatttccggcacagaatgggacggaaaatcaatggaggacattatcactggcacatacgattctagttctgttgctcaaaatggaatattcaataatatttcacagctatggaaccataatcagttttgggagatgatgggaccatctgggcgtgagatgccttctgaattgacaagcgcaatcgccgatagttttggttcggtagagcaatttaaagcagatttttctgcagcaggcgcgggacagtttggtgctggatggtgttggcttgttaaagatgcggacggcgggttgaaagtgactaaaacagaaaatggggtgaacccgctttgtttcggtcaaacagctcttttgggctgtgatgtctgggagcattcttattacattgattttaggaataaacgtccagcctatcttgcaaattttttagataatctggttaattgggaaaacgtggcttcccgtctttaac

SEQ ID NO: 211301 - DNA, 586 bp, Unknown
  Bacterial polypeptide expressing nucleotide sequence isolated from the Sargasso Sea
tatgtttgagcttcctaaattagattatagtaactcagctctttctccaataatgtcagagcaaactttggatttacatcatggcaaacatcatcaaacatatattacaaatctaaataactttataaaaggttctgattatgaaaaattatctttggaagatataattaaaaaatcatcaaatgaaaaaaaagtaggaattttcaacaatgcaagccaacattggaatcataatcttttttggaagtgtatgaaacctaatggcggaggaaatgttccatctaaacttgaaaaaaagattaaacaagattttggagattttgaaaaatttaggaaggaatttattaatgctggtgttactcagtttggatctggatggagttggttatctttaaaagaagataagctagtagtaacaaaaacaccaaatgctgaaaacccaataattcataatatgaaacctatattaggttgtgatttgtgggagcactcatattacttagattacagaaacaaaagaccagcttacttagaaaatttttttgataaactaatcaattgggaatacgttgactctcttctttaa

SEQ ID NO: 211302 - DNA, 388 bp, Unknown
  Bacterial polypeptide expressing nucleotide sequence isolated from the Sargasso Sea
aatgataaatctagagttaccagatctaccctacagtaaagatgctctaatgccgtatatgtcggctgaaactttagagttgcatcatgataagcatcatatggcttacattactaatggaaataaatttattaaagaacaaaacataacagatgatagtgtgaatgatattgttataaactcatatcaaaaaaatgctccagtattcaacaatgtggcacaacacataaatcatgttcatttttgggaagtaatgaaaaataacccagatggaaaaattccctctgaactagaaaataagatagtttcagatattggctcagttgaaaaaatgaaggaagattttataaatgcaggtattggacaatttggatcaggttggtgttgg

SEQ ID NO: 211303 - DNA, 354 bp, Unknown
  Bacterial polypeptide expressing nucleotide sequence isolated from the Sargasso Sea
aatgataaatttagaattacctgatttaccatatagtaaagatgctctggcaccttatatgtctgttgaaactttagagttacatcatgataaacatcatatggcatatgtaactaatggtaataaatttattaaagaaaataattttaatgaagaatcaatagaagatattgtaataaattcttacaacaagaatgctcctgtatttaataacgtatctcagcatttaaatcatatgcatttttgggaaattatgaaaaataatccaaacggtaaaattccatcagaattagaaaataaaattaatgaagatttaggttctgttgataatatgaaagaagcttttataaatgc

SEQ ID NO: 211304 - DNA, 592 bp, Unknown
  Bacterial polypeptide expressing nucleotide sequence isolated from the Sargasso Sea
tatgtataaaatagataaaattttaattggcacccacaataagggtaaatttaaggaaatttccgacttattacctgcaaaaatatataaaatttcaccaaatagtttaaatattgaaagtccagatgagaccgggaaaacttttgctgccaattctttgcttaaagctaaatatttttatgaaaggtcaaaattaattacattatcagatgactctgggttagaagttgaatgcttaaataatcaaccaggtatttactcggcaagatgggcaagagattttggtagttttgataaagctatgtcagaaattttgaaaaaagttaaaaaagcaaacaaaggcactaaagcaagattcattagcagcctaacaatttactgggagaacaagaaatttataactgaggttggaaagattgaaggcaatatatctgaaaaaaagggcttaaacggttttggttatgatccaatatttgttcctaatggatactcaaaaacttttgctgaaatggattataaaaaaaaacttcttattgaccacagatatatagcttataaaaaattagaaggaaaaattaaaaattatatttag

SEQ ID NO: 211305 - DNA, 2462 bp, Unknown
  Bacterial polypeptide expressing nucleotide sequence isolated from the Sargasso Sea
cttgtgcactttcgtcaaaaacaccactcgtgataaggccccctccgcctacatgctgaagtcatctatcgtccgtctcgtcgcctattcggtgcgccatccgttacggatcatcgccctgtccgtcgtgctcgccatactgagcagcatctacgtcgcccataacttcaagatcaacacggacatcagccgtctcatcgagaccgacaagcaatggtcgtcgctcgaaaacgccatggataaggcgttccccgaccggggcgatacggtgctggtagtggtcgaagcccgcgcgcccgagtttgccgatgccgcggccaatgcgctgacggccgcgctcaaagccgattccaaggagttcgtcgcggtgtcgcaacctgccggcggccccttcttcgaacacaatggcctgctgttcccatccaccgatgaagtcctctcgacgacctcgcaactcgtccagtcgcgtccgctcgtcaatgcacttgcgcacgatccgagcctgaccggcctcgccggcacgctcaccacgagtctgttgctgccgctccagcttgggcaggtgaagttggccgacatgagccatctgctgtcgcaaagcgccaccacgctcgaccgcgtgctggccggccagccggcggcgttctcgtggcgtgcgctggtcgacaagggcgtcgccacggatccggcgcgcgccttcgtcacggtgcagccggttgtgaactacgacgcgctggagccgggcgcgagcgcgtcgaaagcgatccgcgccaccgccgcttcgctgcatctcgatacgcgctacggcgccacggtgcgtctgaccggccaacagccgctcgcggatgaagaattcgcgtcggtccaggacggcgccgtcctcaacggcatcggcaccttcatcgtcgtgctggtcattctttggctggcgctgcgctcgggccgcatgatcctcgccgtgttcatcacgctgttcgtcgggcttgcgatcaccgcggcgctcggcctgctgatggtcggcgcgctcaatatgatttcggtcgccttcatggtgctgttcgtcgggctcggggtcgatttcggtgtgcagttcggcgtcaaataccgtgaggagcgcaatcgcgacgaccgcctttccgccgccctgatgcataccgcgcacagcatcggcgtgccgctgacgctcgcggccgtggcggtcgcgctgagcttcttctcgttcctgccgacggcttatcgcggcgtgtcggaattgggcgagatcgccggtgtcggcatgttcgtcgcgtacttcaccaacatgacgctgctgccggcgctgctgaaggtctttaacccgccgggcgaagccgcttcacccggcttcaagcaactcgccccggtcgacgatttcctcgaccatcatcgcaagccggtgctgatcggcacgctgctcgtcgtgatcggcgccacgcccttgctcacgcatctgcgtttcgacttcaacccgttgcacttgaaagacccgcatacggaatcgatggcgacgctgctgtcgctgaaggattcgccggaagcggcggtcaacaacgtgcacgtgctggcgccgacgctggcggatgcggaccagaaggccgcccatttgcgcacgctgccggaagtgggccgcgtgaccacgctcgacaccttcgttccggctgagcagcagcaaaagctgatgctgattgcgagtgccgcacagcaactcttgcctgcgctgcagcaacagcccgcccctcaagccacggacgcggtgcgcgtcgccgcattgaagcgcgcgtcgaaccagctctcgctcgccgccgacgatcacccgggcccgggcgccgccgaagccaagcatctgtcggccacgctgcagaagctggccgccgccgacgccgccacgcgcgaccgtgccgaaaccgcgatgtccgagccgctgcgcatcgcgctgaagcaactggcggatctgctgcagcccaccgagattacgcgcgacaacctgcccaaggagatctcaaaggattgggtttcgaaagacggccacgcgctcgtcgacattgcgccgaaggtcaaacccggcgtcgatccgaacgacgacgcgatgctcgcccgcttcgcccacgcagtgaagaaggcggagccgggtgcgatcggcggtccgatctcgatcctgcattccgcggacacgatcatcaaggccttcctgcaggctgcctgctgggccttgctgtcgatcgcgattctgctgtggattgcattgcggcgactcagcgacatgctgcgcacgctggttccgttgctggtatcggcgctggtgacattggagttgtgcgtggtgttcggcatgccgctgaacttcgcgaacatcattgcgttaccgctgatgctcggcgtgggcgtagcattcaagatttacttcgtcatggcgtggcgccacgggcagactagccttttgcagt

SEQ ID NO: 211306 - DNA, 330 bp, Unknown
  Bacterial polypeptide expressing nucleotide sequence isolated from the Sargasso Sea
aatgataaatctagagttaccagatctaccctacagtaaagatgctctaatgccgtatatgtcggctgaaactttagagttgcatcatgataagcatcacatggcttacattactaatggaaataaatttattaaagaacaaaatatagcagatgataatgctaatgatatagtaatcaatacctatcaaaaaaatgctccagtattcaacaatgtggcacaacatataaatcatgttcatttttgggaaataatgaaaaataacccagatggaaaaattccctctgagctcgaaaataaaataatttcagatattggttcagtgaaaaa

SEQ ID NO: 211307 - DNA, 502 bp, Unknown
  Bacterial polypeptide expressing nucleotide sequence isolated from the Sargasso Sea
aatgttaagtgcgagcagtttcgcaggtcatcatgatagtgatggaaaagaagtgataatgaataacctggaaacagggatgagcatgggctcagtagtggtgagcagttatgatgatgacggtgtagtatttacgccaaatctgtcagggttaaccccgggcattcatggttttcatgttcatcaaaatggtgattgttcaccagcaatgacagatggaaaaaaagtgttgggcggcgcagcgggcggccatttcgatccagaagataccggtaaacaccgtgctccttggtctgaaaagggtcacgagggcgatctacccgtgctttatgttgatgaaaatggaaacgcaacccagcctatctttgcaccagagcttgagttagatgatattgaaggccgcgccttaatgattcacgcaggtggcgacaattactctgattcacctaaaaagttaggtggcggtggtgaccgcgtagcatgtggcgtaattgggaaataa

SEQ ID NO: 211308 - DNA, 601 bp, Unknown
  Bacterial polypeptide expressing nucleotide sequence isolated from the Sargasso Sea
tatggcttttgaacttccagaccttccctattcgcatgatgccttggctgatttgggtatgtctaaagaaacactcgaatatcatcatgatttgcatcacaaagcttatgtagataatggaaacaaattgatttccggcacagaatgggacggaaaatcaatggaggatattatcactggcacatacgattctagctctgttgctcaaaatggaatattcaataatatttctcagctatggaatcataatcagttttgggagatgatgggaccatctgggcgtgagatgccttctgaattgacaagcgcaattgcagatagttttggttcggtagagcaatttaaagcagatttttctgcagcaggcgcgggacagtttggcgctggatggtgttggcttgttaaagatgcggacggcgggttgaaagtgactaaaacagaaaatggggtgaacccgctttgtttcggtcaaacagctcttttgggctgtgatgtctgggagcattcttattacattgattttaggaataaacgtccagcctatcttgcaaattttttagataatctggttaattgggaaaacgtggcttcccgtctttaa

SEQ ID NO: 211309 - DNA, 433 bp, Unknown
  Bacterial polypeptide expressing nucleotide sequence isolated from the Sargasso Sea
atggcttttgaattacctaaattaaattatgcttttgacgcgttagaaccaaacatagatacaaaaactatggaaattcattatggaaaacaccataatggttacacaaataacttaaacaacattatatcaggtactgataatgaaggaaagagtattgaagatatatgtaaatctttagatcttgaaaataaaggattgagaaacaatggtggaggttactataatcataatcttttttgggaaattatgggaccaaatggaggtggagaccctagtggagaaataagtgaatccataaactcaaattttggttcatttgaaaattttaaagatgaattcagcaaagcagctgctacaagatttggctctggatgggcttggctctgcgctcacccagatggtaaacttagaaatctgttcaactgctaat

SEQ ID NO: 211310 - DNA, 403 bp, Unknown
  Bacterial polypeptide expressing nucleotide sequence isolated from the Sargasso Sea
cgaaaaaaaagcaggaattttcaacaatgctagccaacactggaatcacaatcttttttggaagtgcatgaaacctaatggcggaggaaatgttccatccaaacttgaaaataagattaaaaaagattttggaggttttgaaaaatttagggaggaatttatcaatgccggagttactcagtttggatctggatggtgttggttatctttaaaagaagataagcttgtagtaactaaatcaccaaatgctgaaaacccaataattcataatatgaaaccaatattgggatgtgatgtttgggagcactcttattatttagattacagaaataaaagaccagcttatttagaaaatttttttgataaacttattaattgggaatacgttgactctcttctttaa

SEQ ID NO: 211311 - DNA, 223 bp, Unknown
  Bacterial polypeptide expressing nucleotide sequence isolated from the Sargasso Sea
atttggatctggatggtgttggttgtctttaaaagaggataagcttgtagtaactaaatcaccaaatgctgaaaacccaataattcacagtatgaaacctatattaggttgtgatgtgtgggagcactcatattacatagattacagaaataaaagaccggcttatttggaaaatttttttgataaattaatcaattgggaatacgttaactctcttctttaa

SEQ ID NO: 211312 - DNA, 319 bp, Unknown
  Bacterial polypeptide expressing nucleotide sequence isolated from the Sargasso Sea
atgataaacttagagttgcctgatttaccttatagtaaagatgctcttgcgccttatatgtctgctgaaactttagatttgcatcatgacaaacatcacatggcatatgtcactaacggaaataaatttattaaagaaaataatttaagtgaagattctatagaagatattgttaaaaatacatataataaaaatgcccctgtatttaacaatgtttcacagcatttaaatcacattcatttttgggaaattatgaaaaataacccagatggtaaaataccttctgaattagaaaataaaattaatgaagatttaggat

SEQ ID NO: 211313 - DNA, 937 bp, Unknown
  Bacterial polypeptide expressing nucleotide sequence isolated from the Sargasso Sea
aatggatcaagctcctcaatatgctattgatcacgttgcaaacagcaaaaaaaatatctttgaatttgaatttcttaattcactctcagaaaagatttctaatttttttggcatttctagtgaatccttattttatattgatttaggaatttcaaagcacgtttttttacttttctttgtttcctttatagtggtttcaaccattgtaacactaattcaaggttatatttctcataagaaaaatatccctaacaagtttatgagtattattgagatgtttgttatctatttaagagatgatgttcttaaaaattttattggagataaagaatatagatcatgggcgcctttggtctatacaattttcttttttgttctttttggaaatgttttaggactgataccaatctttgatttgacaggattggtaggtaaaattggatataaagctgaaatgttaggtaaggacaatatattatatttattatcaaaaggtggccacacagttacagcaaatgttaatgttacttttgcaatagctactattacatttgttgcttttattgctgctggaattcaaaaatatggctttgttcaacattggaaaaatttagcaccttctggattaccttggccgctatattttgttgttgtgcctattgaattcatgggattattcattcgtccacttgctttgactctaaggttagctggaaatatgatgggtggacatattgctttaataatttttataacatttatttttagtgcaactgcagaattgggaggtttagctggtttcggaatagctcctttttcaatctcgcttgcattaggattaactatgcttgaactgttagttgcagtaatacaagcatatgtttttgcattattaacagccgtttttattggaatggctatacacgtagatcactaa

SEQ ID NO: 211314 - DNA, 310 bp, Unknown
  Bacterial polypeptide expressing nucleotide sequence isolated from the Sargasso Sea
gatgataaatttagaattgcctgaattaccatatagtaaagatgctctagcaccttatatgtctgctgaaactttagagttacatcatgataaacatcatatggcatacgtaactaatggtaataaatttattaaagaaaataacttaaatgaagaatcgatagaagagattgttaaaaattcttataacaatatcgcacctgtttttaataatgtttcacaacatttaaatcatatgcatttttgggaaattatgcaaaataatccaaatgggaaaataccatctgaattagaaaacaaaataaatgaa

SEQ ID NO: 211315 - DNA, 937 bp, Unknown
  Bacterial polypeptide expressing nucleotide sequence isolated from the Sargasso Sea
aatggaccaagctcctcaatatgctattgaccatgttgcaaacagcaaaaaaaatatttttgaatttgattttctgaattctctctcggctaagatttcaaatttttttggcatatctagtgagtcattgttttatattgatttgggaatttctaagcatgtttttttacttttctttgtctcatttatagtagtttcaacaattgttacgctaattcaaggttatatttctcacaaaaagaatattcctaacaagtttatgagtattattgagatgttcgttatctatttaagagatgatgttttaaaaaatttcattggagttaaagaatatagatcttgggctcctttagtttacacaatcttcttttttgtactttttggaaatgttcttggactaattcctatttttgatttaacaggtttgatcggcaaaattgggtacaatgctgaaatgttaggtaaggataacatattgtatttattatcaaaaggtggccatacagttacagcaaatgttaatgttacttttgcaatagctactattacatttgtcgcatttattgctgctggaattcaaaaatatggttttgtacaacattggaaaaatttagcaccttctggattaccttggcctttatattttgtagttgtgccaattgaatttatgggattatttattcgtccacttgctttgacgctcaggttagctggtaatatgatgggtggacatattgctttaataatttttattacttttatctttagtgcaactgcagaattggggggtttagctggtttcggaatagcacctttttcaatctcacttgcattaggattaactatgcttgaactgctagttgcattgatacaagcatatgtttttgcattattaacagccgtttttattggaatggctattcacgtagatcactaa

SEQ ID NO: 211316 - DNA, 625 bp, Unknown
  Bacterial polypeptide expressing nucleotide sequence isolated from the Sargasso Sea
actggtcaacgcggacggcaactacgcggcggcaccgctgccgtttgcgtacgatgcgctcgaaccggtaatcgacgcccacacggtggaactccactacaacttccatcacaagcccgccgccgctgcggcgaacaaggcggaagaaggcttggcccgggcacgggaaaccggcgactttgcgctggtgaaattccacgagaaagaactggcgttccagctttccagccatatcctgcatacgatctactggacgagcatttctggcaaggttggtgagccgggaggcgagctcgccagaacgatcgaccgccatttcggctcgtatgcgaaattcaaggcgcaactcgtcgctgcgaccattgccaccgaggcctcgggctggggtgtcgtcggctatctgccggcgaccggcaagctcatgatcctgcagtgcgagaaccaccagaaactcaccgcgtggggcatccagccgattctggtgctcgacgtgttcgagcatgcctactacctgaagtaccagaaccgccgcaacgaatacgtcaaccagctgttcagcatcctcaactgggacaacgcagcgttgagactgcaggccgcaatgcagtcgcacgccctggcctga

SEQ ID NO: 211317 - DNA, 586 bp, Unknown
  Bacterial polypeptide expressing nucleotide sequence isolated from the Sargasso Sea
atgtttgagcttccaaaattagattacagtaattcagccctttctccaataatgtcagagcaaaccttggatttacatcatggtaaacatcatcaaacatatattgcaaatctaaataactttataaaaagttctgaatatgaacaattgtctttggaagatataattaaaaaatcatcaaacgaaaaaaaagcaggaattttcaacaatgcaagccaacattggaatcacaatcttttttggaagtgcatgaaacctaatggcggaggaaatgttccatctaaacttgaaaataagattaaacaagattttggaagttttgaaaaatttagggaggaatttattaatgctggagttactcagtttggatctggatggtgctggttgtctttaaaagaggataagcttgtagtaactaaatcaccaaatgctgaaaacccaataattcacaatatgaaacctatattaggttgtgatgtgtgggagcattcatattacttagattacagaaataaaagaccagcttatttagaaaatttttttgataaattaatcaattgggaatacgtaaactctcttctttaat

SEQ ID NO: 211318 - DNA, 595 bp, Unknown
  Bacterial polypeptide expressing nucleotide sequence isolated from the Sargasso Sea
tatggcttttcaattaccaacattagattactcgaaatcatctttatctcctcacatgtctgaagaaactttagatttacatcatggtaaacatcatcaaacttatataacgaacttaaataatttaataaaaaattcgggtttagaaaattcatctcttgaggagatagttaaaaaaacatcggcggacccatctaaaattggaatatttaataatgcaggtcaacattggaatcatattttgttttggaaatgtatgaagccaaaaggaggtggtgcgttacctggaaaattagaaaaaagaataaattctgattttggaagtgtagataaatttaaagaacaatttattcaagcaggagtaacacaatttgggtctggttgggcatggctagcgattgacaaaggaaaacttgtagtgacaaaaactgctaatgcctcaaaccctttagtaaataatatgaagccgatattaggttgcgatgtatgggaacattcatattacgttgattatagaaatcgtagacctgattatttaaaaagttttattgaaaatcttgtaaattgggaatttgtagagtcgcaactagattaa

SEQ ID NO: 211319 - DNA, 162 bp, Unknown
  Bacterial polypeptide expressing nucleotide sequence isolated from the Sargasso Sea
actaatcctctgcccaccatcgaagcaaagagagtagacttgttaggtgatagatcaatagtgggcagaggattagtggtacacgcagatgaggacgacctaggcagaggtggcaacgcagaaagtttgaagacaggcaacgcaggcgatagattggcctgt

SEQ ID NO: 211320 - DNA, 589 bp, Unknown
  Bacterial polypeptide expressing nucleotide sequence isolated from the Sargasso Sea
tatgtttgaattacccaaacttgattatagtaaggacgctttatctccaataatgtctgagcagactttggatttacaccatgggaaacatcaccaaacttatataaccaatcttaataattttattaaagatacagaatttgaaaaacttccattagaagagataatcaaaaaaagtttttctgataaaactaaatctggaatatttaataatgctagtcagcactggaatcataatcttttctggaagtgtatgaaggctaatggcggaggcaatattccaaaaaaacttaaagaaaaaattaattatgattttggaagttttgaaaaattcagagaggaatttattaatgctgggattacacagtttggatcaggatggtgctggttgtctattaaagagggtaaactagtagttactaaaacacctaatgctgaaaacccaattattcataatatgaaaccaattttagcctgtgatgtttgggaacattcatattatttagattataaaaacaaaagaccaatctatttagaaaattttttcgataaactaattaactgggaatttgtgcagtcaaatttataa

SEQ ID NO: 211321 - DNA, 283 bp, Unknown
  Bacterial polypeptide expressing nucleotide sequence isolated from the Sargasso Sea
atggcatttgaattaccaaaactaaaatattcttacgattctcttgaaccacatattgattctaaaactatggaaattcatcatggaaaacatcatgctggatatacaaataacttaaataacgcaattagtggatcagaacttgaaaatcattctattgaagaaatacttaaaaatttaaatatggaaaattctgctcttagaaataatgcaggtggatattataaccataatcttttttgggatatactaagtccatcaggaggagggaaaccaaatggta

SEQ ID NO: 211322 - DNA, 235 bp, Unknown
  Bacterial polypeptide expressing nucleotide sequence isolated from the Sargasso Sea
tgttggtgtttttggtagtggctggtgttggttagttcaaaatgattcttcattagaaatcttaggaacaccaaatggcgaaaacccgttagctcatggaaaacatgcacttatgggtattgatgtatgggaacatgcatattatcttgactataaaaatgttcgtccggactatgtaaaggcaattcttgacaattctataaactggagttttgtttctgatcaattaaaataa

SEQ ID NO: 211323 - DNA, 285 bp, Unknown
  Bacterial polypeptide expressing nucleotide sequence isolated from the Sargasso Sea
catacaaatccagacggtgtggatcatggcgacctaaaacaaggtcatgttgggatctggagaatgtggttgcagatgacaacggagtagcaacgttttcgatcactgcgccaagagttgatttactgggagatcgttcagtgattggacgtggactggtaatacacgcagacgaggatgatctgggcaaaggcggcgacgcagaaagcttaaaaacgggtaatgcgggcgatagattggcctgtggtataatagtaattagaagcgacacagtaaataaatagc

SEQ ID NO: 211324 - DNA, 586 bp, Unknown
  Bacterial polypeptide expressing nucleotide sequence isolated from the Sargasso Sea
atgtttgagcttcccaaactagattatagtaattcagctctttctccaataatgtcagagcaaactttggatttacatcatggtaaacatcatcaaacatatattacaaatctaaataactttataaaaggttctgaatatgaaaaattgtctttggaagatataattaaaaaatcatcaaacgaaaaaaaagcaggaattttcaacaatgcaagccaacattggaatcacaatcttttttggaagtgtatgaaacctaatggcgggggaaatgttccaactaaacttgaaaataagattaaagaagattttggaggctttgaaaaatttagggaggaatttatcaatgctggagttactcagtttggatctggatggtgttggttgtctttaaaagaagataagcttatagtaactaaatcaccaaatgctgaaaacccaataattcataatatgaaaccaatattaggttgtgatgtgtgggagcactcttactacttagattacagaaacaaaagaccagcttatttagaaaatttttttgataaactaatcaattgggaatacgttgattctcttctttaat

SEQ ID NO: 211325 - DNA, 601 bp, Unknown
  Bacterial polypeptide expressing nucleotide sequence isolated from the Sargasso Sea
atggcatttgaacttaatgacttgccttatagccatgatgcccttgaggctgcaggcatgagtaaagaaactttggagtttcatcacgatttgcaccacaaggcttatgttgataatggtaataagcttatctcaggaactgagtacgaaaatatgacgttggaagaaatcattacaaaatcttatgattcatcagcgattgctcagtctggtatttttaataacgcatcacagcactggaaccacatgcagttttgggaaatgatgggtccaaatcagacagggataccaagtgaattggcatcagccatagacgaaagttttggttcttttgaaaaatttaaggaagatttttgtgctttaggtgttggacagtttggatcaggctgggtatggcttgtaaaatcgaatgatggtgggctcaaaatttcaaagaccgaaaatggtgttaatccgttgtgccataatgaaacagctcttttaggatgtgatgtttgggagcactcatattatattgatttcagaaataagagacctgcttacttggaaaattttatagataagttagttaattgggaaaatgtagcctctagaatgtagt

SEQ ID NO: 211326 - DNA, 806 bp, Unknown
  Bacterial polypeptide expressing nucleotide sequence isolated from the Sargasso Sea
aatgaagaccactaccaccagagtcacttgtttactaatagttaatttatttattttcagcatgttttcgcaagttcaagttcttccaaaacttagaaccacatattctgattatgatccactaatcgattcgacaacaatgattactcatcattctgtttttcataaaaactacattgattgtttaaataaatcgctcaagggaacaaaaaaaatgaatgaagcgttaaatgacattttactcaatattagctactataaaaacaaaagcatcaggtacaacgctggtgggcatttcaaccattctttatattgggaaatattaaaacctaattcttccaataatatctctgaagcattaagcaatcaaataataaaagattttatttctttagacctcctaaaacaagaaatgaaaagtgctgtcaaatcccaaataggatctggttgggtttggttaattataagcccaaaaggaaagctaatggtaactagtacccaaaatgaagataatccgataatggatgttgtcaaagaaagaggtgttccagtaataggaattgataactgggaacacgcctattatttaaaacacaaacagaataaggaagattattttaatgctatttggaagttaattgattgggaaatagtttctgaaaaatttgttaaagcgattggatcggatgtatttgaaagcattaaaacggacaattggccagaattaaaagtatataaagacattatgtctcacacctatcatgctgcagaaaatggagatttaaatgctcttcgctctttaagtg

SEQ ID NO: 211327 - DNA, 214 bp, Unknown
  Bacterial polypeptide expressing nucleotide sequence isolated from the Sargasso Sea
catgagcaccggcccacacttcaaccccgccggcaaggatcacggcgccccgaccgacgacaaccgccatgccggcgacctcgggaacatcacggcgggcgccgacggcgtcgccaaggtcgacatcaccgactcgcagatcccgatcggcgggccgaactccatcgtcggccgcgcggtcgtctgccacgagctggtgcgcccctcctcctag

SEQ ID NO: 211328 - DNA, 100 bp, Unknown
  Bacterial polypeptide expressing nucleotide sequence isolated from the Sargasso Sea
atggcttttacactcccatctttaccttattcaaatgatgcattagaaccccacattgatacaaaaacaatggaaattcatcatggaaaacatcataatg

SEQ ID NO: 211329 - DNA, 112 bp, Unknown
  Bacterial polypeptide expressing nucleotide sequence isolated from the Sargasso Sea
atggctcacattctacccgatctgccttatgcccacgatgcactagcgccttacatcggtgcggacacgatggagatccaccacggcaagcaccacaatgcctacgtgacga

SEQ ID NO: 211330 - DNA, 595 bp, Unknown
  Bacterial polypeptide expressing nucleotide sequence isolated from the Sargasso Sea
tatggcatttgaattaccaaaactagattattctaatgaggctttgtctccaataatgtcacaagaaacattagaattacatcatggaaaacatcaccaaacctacataacaaatctaaataattttataaaaaatacagacatggctgaaatgtcattggaagatataattgttaaaagctcaaaagataacttaaaagctggaatatttaataatgcaagccagcattggaaccataatcttttttggaagtgcatgaagccaaaaggtggtggaaatattccgtcaaaacttgagaaaaaaattattgaagattttggaagtgttgaaaaattcaaagatgaatttaaacaagcaggtataactcaatttggatcaggttggtgttggttatctttaaataatgataaattggttgttacaaaaacagctaatgctgctaatcctttaattgataacttaaaaccaatacttggttgtgatgtctgggaacattcatattacattgattatagaaatagaagacctgaatatttagataaatttgttgataatcttatagattgggaatttgttgaatctcttttaggttag

SEQ ID NO: 211331 - DNA, 595 bp, Unknown
  Bacterial polypeptide expressing nucleotide sequence isolated from the Sargasso Sea
tatgtcgtttgaactgccaaaattagattattcaaaaaatgctttagcgccaataatgtctgagcaaacactagatcttcatcatggtaagcatcatcaaacttacataacaaacttaaataattttataaaagataccgaaatgtctaaaatgtccttagaagaaattattattacttcttctaaagataagtcgaaagcaggaattttcaataatgctagtcaacattggaatcacataatgttttggaaatgtatgaaaccaaatggtggaggtgcaattcctgaaaaattaaaaaaaagaattgaagcagactttggaagtttagatgaatttaaaaaacaatttattcaagcaggaattactcaatttggttcaggttggtgctggttatcaattaaagatggaaaattagtagtaagtaaaacacctaatgctgagaatacattaatccagaatatgaaacctattttaggttgtgatgtatgggaacactcttattatgttgattataaaaatagaagaccagagtacttagaaaatttctacgaaaaattaatcaactgggaatttgttgagtctaacctagattaa

SEQ ID NO: 211332 - DNA, 430 bp, Unknown
  Bacterial polypeptide expressing nucleotide sequence isolated from the Sargasso Sea
atgttgttgttgaaagtttttaaagacaaagaacagaaaatatttaataatgctggtcaagcatggaaccatattctttactgggatcagatgaaacctggcggcgaaagccaacccagcggtaaattgcatacaatgattgaggattcatttgtagactttaattcattcaaagaccaatttgttcaacaatctgttggtgtttttggtagtggctggtgttggttagttcaaaatgattcttcattagaaatcttaggaacaccaaatggagaaaacccattagctcatggaaaacatgcacttatgggtattgatgtatgggaacatgcatattatcttgattataaaaatgttcgtccggactatgtaaaggcaattcttgacaattctataaattggagttttgtttctgatcaattaaaataaa

SEQ ID NO: 211333 - DNA, 493 bp, Unknown
  Bacterial polypeptide expressing nucleotide sequence isolated from the Sargasso Sea
gagacagtcaccgtgaccctcgaacaggccaccgaaaacggtacaggcgcgcctgtcggcagcgtgaccatcagccagtcgccctatgggctggtgttcacccccgatctacagggactggaaccgggcgtgcatggctttcatgtgcacaccgaagccaactgcaatgcagccgaagtggacggcaagctgacaccagccggcgcggcaggcggccactgggacccgcagaacgccggccgccatggcttcccctgggaagacaacgcccacctgggcgacctgcctgcactgctggtgaccgaggatggcagcgccagccagccggtgctggcgccgcgactcaagagcctgcaagacctgcacaaccgttcgttgatgatccacgccggcggtgacaatcacgccgatcacccgcagccgctgggtggtggcggtgcgcgcgtggcctgcgggctgatcaaggtgccgaccagcaccacgccgatctgat

SEQ ID NO: 211334 - DNA, 586 bp, Unknown
  Bacterial polypeptide expressing nucleotide sequence isolated from the Sargasso Sea
atgtttgaacttcccaaattagattacgctaattcagctctttcaccaataatgtcagaacaaactttagatttacatcacggtaaacaccatcaaacatatattacaaatctaaataattttataaaaggttctgaatatgaaaaattgactttggaagatataataaaaaaatcatctactgaaaaaaaatcaggtatttttaacaatgctagtcaacactggaaccataatcttttttggagatgtatgaaacctaatggcggtggaaatgttccatctaaacttgaaaataagattaaacaagattttggaagttttgaaaaatttagggaagaattcatcaatgctgggattacccagtttggatctggatggtgttggctatctttaaaagaagataagcttgtagtaactaaatcacctaatgctgaaaatcccataattcataatatgaaacctattttaggatgtgatgtatgggagcattcttattatttagattataaaaacaaaagaccagtttatttggaaaattttttcgataaattaattaattgggaatttgttgagtcccttctctaac

SEQ ID NO: 211335 - DNA, 541 bp, Unknown
  Bacterial polypeptide expressing nucleotide sequence isolated from the Sargasso Sea
atgaacgatgcaaaaaaatttaatcttcctccattaccttttggagaaaatgacttgtctccagtcatatcatctgataccattcaacttcactatggtaaacatcatcaagcatactttaatatgttgaataccttagctgagggaaccaaatataatgatatgagccttgaagatgtagttgttgaaagttttaaggataaagaacagaagatttttaacaatgctggacaagcatggaaccatatcctttactgggatcaaatgaaaccaggaggcgaaactgttcctagcggtacgcttcatacgatgatcaaaaattcatttggagactttaattcttttaaagatcaatttattcaacagtcagttggagtttttggaagtggttggtgttggttagttcaaaatgattcatctttagaaatcttgggaacaccaaatggtgagaatcctctagcgcatggcaaacatgctttgatgggaattgatgtttgggaacatgcttactatttagattataagaatgttcgtcactgat

SEQ ID NO: 211336 - DNA, 592 bp, Unknown
  Bacterial polypeptide expressing nucleotide sequence isolated from the Sargasso Sea
atgtttgaattacctaaattagattacacaaaatcagcgcttgctccaataatgtcagaggagacccttgatcttcatcatggaaaacaccatcaaacttatataacaaatcttaataattttataaaagatacagaaatgtctaaaatgtcgttagaggaaattattgttagctcttctaaagataaatccaagtcaggtatttttaataatgcaagccaacactggaaccacataatgttctggaaatgtatgaagccaaatggtggtggtactatgcctgagaaattaaaaaaaagaattgaagcagatttcggaagcgcagatgaattcaaaaaacagtttatacaagcaggaattactcaatttggttctggatggtgttggttatcaatcaacaacggtaagttagtagttagaaaaacccccaatgctgaaaatactttaattcaaaatatgaaacctattttaggttgtgatgtatgggaacattcttattacgtagactataaaaatagaagacctgagtatttagaaaatttctacgaaaaactaattaattgggaatttgttgaatctcaactagattgaa

SEQ ID NO: 211337 - DNA, 502 bp, Unknown
  Bacterial polypeptide expressing nucleotide sequence isolated from the Sargasso Sea
aatgtttgaacttcctaaattagattatgctaattctgctctttctccgataatgtcagagcaaactttggatttacatcatggtaagcaccaccaaacatatattacaaatcttaataattttataaaaggttctgaatatgaaaaattgtccttggaagatataatcaaaaaatcatcgaacgaaaaaaaatcaggaatttttaacaatgcaagccaacattggaatcataatcttttttggaagtgtatgaaacctaatggaggcggaaacgttccattaaaacttgaaaataaaattaaacaagattttggaggttttgagcaattcagggaagaattcattaatgctggagttactcagtttggatctggatggtgctggttatctttaaaagaagataagcttgtagtaactaaatcacctaatgccgaaaacccaatcattcataatatgaaacctatattagggtgtgatgtctgggaacatcttattacttag

SEQ ID NO: 211338 - DNA, 376 bp, Unknown
  Bacterial polypeptide expressing nucleotide sequence isolated from the Sargasso Sea
atgaataatatatacggcataataaaattctatagccataattcaaacaaaattaagataacatatgatattacaggattaacagatggtttacatggatttcacattcataaatgtggagatatgagcgattcatgtacgagcgcatgttctcattttaatccaacaaactcagaacatggtggtctaaatagtaaaatacgccacgctggagatctgggtaatataaaatcacataacaataaatgtaaaggaacattatatgcacctacattatcaatagatccaacatcattatattcaataataggtagagcaatcatagtacatgaagatgaagatgatttagggttaggtagtaatgaagaatctaaaa

SEQ ID NO: 211339 - DNA, 511 bp, Unknown
  Bacterial polypeptide expressing nucleotide sequence isolated from the Sargasso Sea
aatggttggattaaactatcaatacaatgatttagaaccttttattgatgctaaaacgatggaaattcactacagcaaacaccatttaggttatgctaataaattaaatactgccatcaaagacaccgagtataaaactaaaactatagaagaaatattaaatacgcttgatattaataattcatttctacgaaataatgctggtggttattacaatcataatttattttttgaaataataagtcccaaaaaagatacaaagccttctacccttttcttagaagctatcaacagagactttggctctttgaatacaatgatttctaaactttctgaaacagcaacaaatttatttggttcgggttgggtttggttaatcgttgataaagacggaaaactaaaaattagtcaaacctcaaaccaagataatccattaatgtctaatgctgttgaaaaaggaactccaattatagccatagacgtttgggaacatgcttattatttaaatatc

SEQ ID NO: 211340 - DNA, 595 bp, Unknown
  Bacterial polypeptide expressing nucleotide sequence isolated from the Sargasso Sea
tatgtcatttgaactacctaaattagactactctaaaactgctttatctccaataatgtctgaagagactctcgatcttcatcatggaaaacaccaccaaacttacataactaatcttaataatctaattaaagatactgatatgtccaaaatgtccttagaagaaattattattaactcttcaaaagatgaatctaaaattggaatttttaataatgctagtcaacattggaaccatatattgttctggaaatgtatgaaaccaaatggcgggggttcaatgcctgataagctaaaaaaaagaattgaaacagattttggtagtacaaatgaatttaaaaaaaaatttacacaagcaggtattacccaattcggatctgggtggtgttggttatcaattaacagtggtaaattagtgataagtaaaacacctaatgctgagaatacattaattcaaaatatgaaacctattttggcatgtgatgtgtgggaacattcttattatgtagattacaaaaataaaagacctgagtacttagagaacttttacgagaaattgattaattgggaatttgttgaatctcaactagattaa

SEQ ID NO: 211341 - DNA, 573 bp, Unknown
  Bacterial polypeptide expressing nucleotide sequence isolated from the Sargasso Sea
tagattattctaatgacgccttatctccaataatgtcacaagaaacattagaattacatcatggaaaacatcatcaaacctatataacaaatcttaataattttataaaagatacagacatggctgaaatgtcattggaagatataattgtaaaaagctcaaaagataactcaaaagctggaatatttaataatgcaagccaacattggaaccataatcttttttggaagtgcatgaaaccaaaaggtggtgggaatattccgtcaaaacttgagaaaaaaattattgaagattttggaagtgttgaaaaatttaaagatcaatttaaacaagcaggtataactcaatttggatcgggttggtgttggttatctttaaataatgacaaattagttgtaacaaaaacagctaatgcagcaaatccattgatagaaaatatgaaaccattattaggttgcgatgtttgggagcattcatattacattgattatcgtaatagaaggcctgaatatttagataaattcattgataatctggttaattgggaatttgttgaatctcttttagattaat

SEQ ID NO: 211342 - DNA, 535 bp, Unknown
  Bacterial polypeptide expressing nucleotide sequence isolated from the Sargasso Sea
atgtcagaacaaactttaaatttacatcacggtaaacaccatcaaacatatattacaaatttaaataattttataaaaggttcagagtatgaaaaattgactttggaagatataataaaaaaatcatctactgaaaaaaaatcaggcatttttaacaatgctagtcaacactggaaccacaatcttttttggaggtgcattaaacctaatggcggtggaaatgtcccatctaaacttgaaaataagattaaacaagattttggaagtttcgaaaaatttagggaagaattcatcaatgctggagttactcagtttggatctggatggtgctggttatctttaaaagaagataagcttgtagtaaccaaatcacctaatgctgaaaatcctttaattcataatatgaaacctattttaggatgtgatgtatgggagcattcttattatttagattataaaaacaaaagaccaatttatttggaaaattttttcgataaactaattaattgggagtttgtcgagtctcttctctgat

SEQ ID NO: 211343 - DNA, 595 bp, Unknown
  Bacterial polypeptide expressing nucleotide sequence isolated from the Sargasso Sea
atgacctttgagcttccaaaacttgattatgataaaaacgctttagcgcctataatgtcagaagaaactttagatcttcatcacggaaaacatcatcaaacttacattacaaatttaaataactttattaaagatacagatatggctgggatgtcattagaagaaattgttcataattcttcaaaagataaatcaaaagcaggtatttttaataatgcaagccaacattggaatcatgaattgttttggaaatgcatgaagccaaatgggggaggttccatgccaaaaaaactagaggatcgaataaagtctgatttaggaagtattgaggaatttaaaaaacaatttattcaagcaggaattactcaatttggttcaggttggtgctggttatcgataagtaatggaaaattagttgtaagcaaaacaccaaatgcagaaaatcctttaatacacaacatgaaaccaatattaggatgtgatgtttgggaacattcttattatgtagattacagaaatagaagacctgaatatctagaaaacttctttgaaaaactagttaattgggaatttgttgagtctcaattagattaat

SEQ ID NO: 211344 - DNA, 595 bp, Unknown
  Bacterial polypeptide expressing nucleotide sequence isolated from the Sargasso Sea
tatgacatttgaattaccaaaactagattattctaatgaggctttgtctccaataatgtcacaagaaacattagaattacatcatggaaaacatcatcaaacctacataacaaatcttaacaattttataaaagatacggacatggctaaaatgtcattggaagatataattgtaaaaagctctaaagataactctaaagctgggatatttaacaatgcaagccagcattggaaccataatcttttttggaaatgcatgaaaccaaaaggtggtggaaatattccgtcaaaacttgagaaaaaaattgttgaagattttgaaagtgtcgaaaaattcaaagatgaattcaaacaagcaggtataactcagtttggatcaggttggtgttggttatctttaaataatgataaattagttgttacaaaaacagctaatgctgctaatcctttaattgataacttaaaaccaatacttggttgtgatgtatgggaacattcttattacattgattatagaaatagaagacctgaatatttagataaatttgttgataatcttatagattgggaatttgttgaatctctattaatctag

SEQ ID NO: 211345 - DNA, 304 bp, Unknown
  Bacterial polypeptide expressing nucleotide sequence isolated from the Sargasso Sea
ttgcatacaatgattgaggattcatttggagactttaattcattcaaagaccaatttgttcaacaatctgttggtgtttttggtagtggctggtgttggttagttcaaaatgattcttcattagaaatcttaggaacaccaaatggagaaaacccattagctcatggaaaacatgcacttatgggtattgatgtatgggaacatgcatattatcttgattataaaaatgttcgtccggactatgtaaaggcaattcttgacaattctataaattggagttttgtttctgatcaattaaaataaa

SEQ ID NO: 211346 - DNA, 586 bp, Unknown
  Bacterial polypeptide expressing nucleotide sequence isolated from the Sargasso Sea
atgtttgaacttcctaaattagattacgcaaattcagccctttccccgattatgtcagagcaaactttagacttgcatcacggaaaacatcatcaaacctatattacaaatttaaataattttataaaaggttcagaatatgaaaaattgtctttggaagatataattaaaaaatcatctactgaaaaaaaagcaggtatttttaacaatgccagtcaacactggaaccataatcttttttggaggtgtatgaaacctaatggcggtggaaatgttccatctaaacttaaaaataagattaaacaagattttggaagttttgaaaaatttagggaagaattcataaatgctggaattactcagtttggatctggatggtgttggctatctttaaaagaaaataagcttgtagtaactaaatcacctaatgctgaaaatcctataattcataatatgaaacctattttaggatgtgatgtatgggagcattcctattatctagattataaaaacaaaagaccaatttatttagaaaatttctttgacaaattaattaattgggaatttgtagagtcaaacttataga

SEQ ID NO: 211347 - DNA, 595 bp, Unknown
  Bacterial polypeptide expressing nucleotide sequence isolated from the Sargasso Sea
atgacatttgaattaccaaaactagattattctaatgaggctttgtctccaataatgtcacaagaaacattagaattacatcatggaaaacatcatcaaacctacataacaaatcttaataattttataaaagatacagacatggctgaaatgtcattggaagatataattgttaaaagctcaaaagataactcaaaagctggaatatttaataatgcaagccagcattggaaccataatcttttttggaagtgcatgaagccaaaaggtggtgggaatattccgtcaaaacttgagaaaaaaattattgaagattttggaagtattgaaaaattcaaagatgaattcaaacaagcaggtataactcaatttggatcaggttggtgttggttatcattaaataatgataaattggttgttacaaaaacagctaatgcagcaaatccattagttgacaacatgaagccaatacttgggtgtgatgtttgggaacattcttattatatagattaccgaaatagaagacctgaatatttagacaaatttgttgaaaatcttattgattgggaatttgttgattctcttttaggttaat

SEQ ID NO: 211348 - DNA, 598 bp, Unknown
  Bacterial polypeptide expressing nucleotide sequence isolated from the Sargasso Sea
aatgataaatctagagttaccagatctaccctatagcaaagatgctctaatgccgtatatgtcggctgaaactttagagttgcatcatgataagcatcacatggcttacattactaatggaaataaatttattaaagaacaaaatatagcagatgacaatgttaatgatatagtaattaactcttatcaaaaaaatgctccagtattcaacaatgtggcacaacatataaaccatgttcatttttgggaagtaatgaaaaataatccaaatggtaaaattccctctgagctcgaaaataagatagtatctgacattggttcagttgaaaaaatgaaagaagattttataaacgcaggtattggccagtttggatcaggttggtgttggttagttttaaataatggaaaattagaaattactaaaacaccaaatggagaaaacccaatcgtacatggtcacactcctctacttggatgtgatgtttgggaacactcatattatgttgattatagaaacagaagacctgattatttaaaagcttttattgataatttagttaattgggaaaaagttacagaaaacttaaataacgcttaa

SEQ ID NO: 211349 - DNA, 724 bp, Unknown
  Bacterial polypeptide expressing nucleotide sequence isolated from the Sargasso Sea
aatggatcgaaaaaaattcttaaaaacgagtgctatcctagcaggtacaacaattttaccttcaaattcaatttttgctaataacatcaataagaatggtattgaaaagataactgatgataagggtaattttattcaacaggctttaccttacaatatagattatcttgagccatttatggattctgaaactttagatttacatcattcttttcatcatggtggtgctgttaaaggtgcaaataaagatatagaaatgataaagcgctcaattaaacaaaatgatttgaatatggttgatcattggacaaagaagctttcatttcatctgtctagccatattttgcacagtattttttggacaaacttaacaaaaagaagctctactccatctggcgcattattaaaaaagatcgagaaagattttggttcattagataaaatgcagggcttgctttctaaattatctaaatcaattgaaggtagtggttggggagttttagcctatcaaccacaatcagatacgttagttattctacaatgtgaaaatcatcataagctaacaatatggggagcagttccattattagtcatcgatgtatgggagcatgcatattatttaaagtataaaaatagacggggagattttgttgatgctctgatgaatataattaattgggataatattgctgaaaggtatgagatagctaaaaagctaaattaa

SEQ ID NO: 211350 - DNA, 595 bp, Unknown
  Bacterial polypeptide expressing nucleotide sequence isolated from the Sargasso Sea
atgagttttacattaccaaagcttgattacacaaatgacgcattatctccgattatgtctgaagaaacattagatttacatcacggtaaacatcatcaaacctatattacaaatttaaataattttattaaagatactgacatggcaaatatgtctctagaggaaataatcttgaagagctctaaagataaatctatggcaggtatttttaataatgcgagtcaacactggaatcataaccttttttggaaatgtatgaaaccaaatggaggtggaaaaatcccacctaagcttgaaaaaagaattatctcagattttggaagtatagatcagtttaaaaaaaattttaaacaagctggtgttactcaatttggttctgggtggtgctggctttcaatttctaatgataaacttgttgtgacaaaaacttccaatgcacaaaatcctgtaattgacaacatgaaaccaattttaggatgtgatgtatgggagcattcttattatattgattatagaaatcgaagaccagaatatcttgataaatttattgaaaatttaattaattgggaatttgttgagtctttactagactagc

SEQ ID NO: 211351 - DNA, 577 bp, Unknown
  Bacterial polypeptide expressing nucleotide sequence isolated from the Sargasso Sea
atgataaatttagaattacctgaattaccatatagtaaagatgctcttgcaccttatatgtctgctgaaactttagagttacatcatgataaacatcatatggcatacgtaactaatggtaataaatttattaaagaaaacaacttaaatgaggaatctatagaagaggttgttaaaaaatcttataatagtatagcccctgtttttaataatgtttcacagcatttaaatcatatgcatttttgggaaataatgcaaaataatccaaatggaaaaataccatctgaattagagaccaaaataaatcaagattttgaatctgttgatgcaatgaagcaagaatttataaatgccggaataggtcaatttggttctggatggtgttggttagttttaaataatggaaaattagaaattacaaaaacaccaaatgctgaaaacccaattgttcatggtcatattccactattagggtgtgatgtttgggaacattcatattacgtagattatagaaacagaagaccagattacttaagagcttttgtagataacttagttaatggcaaaaagtatcaga

SEQ ID NO: 211352 - DNA, 586 bp, Unknown
  Bacterial polypeptide expressing nucleotide sequence isolated from the Sargasso Sea
tatgtttgagcttcctaaattagattacagtaattcagctctttctccaataatgtcagagcaaactttggatttacatcatggcaaacatcatcaaacatatattacaaatctaaataactttataaaaggttctgattatgaaaaattatctttggaagatataattaaaaaatcatcaaatgaaaaaaaagcaggaattttcaacaatgcaagccaacattggaatcataatcttttttggaagtgcatgaaacctaatggcggaggaaatgttccatccaagcttgaaagtaagattaaagaagattttggaggctttgaaaaatttagggaggaatttatcaatgctggagttactcagtttggatctggatggtgttggttgtctttaaaagaagataagcttgtagtaactaaatcaccaaatgctgaaaacccaataattcataatatgaaacctatattaggttgtgatgtgtgggagcactcgtattacttagattacagaaataaaagaccagcttatttagaaaatttttttgataaattaatcaattgggaatacgttaactctcttctttaa

SEQ ID NO: 211353 - DNA, 454 bp, Unknown
  Bacterial polypeptide expressing nucleotide sequence isolated from the Sargasso Sea
tatgcgagctatagaacttactaaagaacaaagttgccctagaacacgtgcaaaagaatgcacttgcgaaagcattaagactatcacagaatcatcagaaccagtaattgcacagagtgaattgatgcacagcgacaaggtcaaaggcacggttctattcatgcaggcacctggcacagcaactttgatcaaaggcaccataacaggactagagcctggcttacatggattccacatacatgaatttggcgatatgagtgacggctgtaaaagcatgggcggacattacaacccggacggagttgaccacggtgatctcaaaaaaggtcatgtgggggatttagaaaatgttttggcgaatgataagggagtggcaaaattcaccataaccgcaccaagggttgaccttataggagaaagatcagttataggaagtaggcattgttatccatga

SEQ ID NO: 211354 - DNA, 424 bp, Unknown
  Bacterial polypeptide expressing nucleotide sequence isolated from the Sargasso Sea
tttgaaaagctcaaatgataactcaaaagctggaatatttaataatgcaagtcagcattggaatcataatcttttttggaaatgtatgaagccaaagggtggtggaaatattccatcaaaacttgagaaaaaaattattgaggattttgagagtgttgaaaaatttaaagatcaatttaaacaagctggtataacccagtttggatcaggttggtgttggttatctttgaataatgacaaattagttgtaacaaaaacagctaatgcagcaaatccatcaatagaaaatatgaaaccattattaggttgtgatgtttgggaacattcatattatattgattatagaaacagacgacctgaatatttagataaatttgttgataatcttatagattgggaatttgttgaatctttattaatctaa

SEQ ID NO: 211355 - DNA, 541 bp, Unknown
  Bacterial polypeptide expressing nucleotide sequence isolated from the Sargasso Sea
tttgtataagataaccatggagaagggtatgaaaaacatcgtgttactgcttgcttcaatgtctgctgccagcgcatttgcagacgtgagtgtgccaatgaatcttgtcaatgaaaagggtgtgggtgagagtgtcggtcaagtgactgtttcagaatcgcaatatggagtggtatttacgccatcactcaaaggcttaatgccgggattacatggtttccatctacatgagaacggcagctgtgatccaaaggaaaaggacggaaaaatcgtccctgctggtgcagcaggtggacactatgatcctaccgccacgaaagcccacggtacgccatggggagaagggcatttaggcgatctgccaccattgtttgtcgatgcagacggtgctgctagccaggccgtgctggcaccgcgtttaaaaatgagtgatcttaaaggccatgcaatcatgatccatgccggtggcgataaccattccgatcaccctgcgcctttaggtggcggcggtgcgcgtgtggcctgcggtattatcaattaa

SEQ ID NO: 211356 - DNA, 505 bp, Unknown
  Bacterial polypeptide expressing nucleotide sequence isolated from the Sargasso Sea
tatgaaagcggtatgcgtcctaacaaataatataaataaaaaaattaaaggatttatcgaatttatagaaaataataatttcatgattattaatatacatattcagggtttaaagcctggttatcatgctattcatattcatgaatatggtgatttaagagagggttgttcaagtttatgtagtcattttaatccatataaaacaaatcatggttcacctttaaataatcaaaataatagacatataggtgatttaggtaatatattcgctaataaatcgggaattgttagagaaacttttacagacaaattaattaaacttagagggaaatctaatataataggcagaagtgttgtaattcatgaagatatagatgacctaggtttaggtggaattgatactaatagtggaataattgttaacaaaaaaattcatgaagaaagtttaaaaacaggtaatgctggtaaaagaatcgcttgtggagtaataggatgggcaaaataa

SEQ ID NO: 211357 - DNA, 501 bp, Unknown
  Bacterial polypeptide expressing nucleotide sequence isolated from the Sargasso Sea
gtagcaaagttcaaagcatcactgaatcaaaagaaacagtgatagcacagtgcgacctacaacattctgatacagtaaaaggcactattttgttcatacaggcacccggaacacccacaatgataaaaggaactgtgacaggtcttgagcctggtgatcacggattccacatacacgaatttggcgacatgagcaaaggatgtgaatcaatgggcggccactacaatcccgacggtgatgaccatggaaatgaagacaatggacacgtgggagatctaggaaacatcaacgcagatgagaacggaactgcaacagtgaacattattgcaaaacgtgttgatctgataggtgagagatcagttgttggcagaggcattgtcgtacacaaggaacaagatgaccttggtcaaggcaacgatgcagaaagtttaaaaacaggaaacgcaggagacagattggcctgtggagtcatagtattgagagatagcaatgaagattgaa

SEQ ID NO: 211358 - DNA, 386 bp, Unknown
  Bacterial polypeptide expressing nucleotide sequence isolated from the Sargasso Sea
catggcctttagcttacccccccttccatacgaaatgaatgcccttgaaccgcatatttcttcggaaaccctggagtttcattacggcaaacatcatcagacttatgttaataacctcaacggtttggtagaaggtaccgataacgcttccaagagtcttgaggaaatcatcatgagttccgacggtgggctattcaataatgcggcacaggtttggaaccatactttctactggaattgcatgggccccaacggtggtggaaatccgaccggaagcgccgcagatgcaatcaagcaagcctatggatcatttgataatttcaaagaccagttttcaaaatctgcggcaacgaattttggttccggttggacatggctggtaaaaa

SEQ ID NO: 211359 - DNA, 393 bp, Unknown
  Bacterial polypeptide expressing nucleotide sequence isolated from the Sargasso Sea
catgacttatgagttacccgacatgccctacgactacgatgcactagagccgcatatcgatgcactaactatggagattcaccataccaagcatcacaatgcatacaccaataatctcaatgctgccatcgagtcaaatggtattcctgaaatgccaattaacgacctactgagaaaccattctgatatcgcggcaattaggaataacggcggaggatggtggaaccactgtcaattctgggaatcaatgtcccccgatggaggagggaaaccatctggagatctagcagacgcaatagattcggttttcggatcatttgaggatttccaagcagatttccagaaggcagctatgactaggttcggtagtggatgggcttggcttggagtcaa

SEQ ID NO: 211360 - DNA, 247 bp, Unknown
  Bacterial polypeptide expressing nucleotide sequence isolated from the Sargasso Sea
atgggaaaatacacacttcctgagatgccttatgcatacgatgcattagaacctcacattgatgctcagacaatggagattcatcataccaaacaccatcagaaatataccgacacaatgaatggtgcattggaaaaattgagtcccgaattgcagagtaaagatatcactgaaatactttctaacatcaacgatgttcctgaagatattcgaggtgcaatcaatttcaatggtggtggatatgata

SEQ ID NO: 211361 - DNA, 793 bp, Unknown
  Bacterial polypeptide expressing nucleotide sequence isolated from the Sargasso Sea
ctattggtttttattacaatatcaatatgttatacagcgcaaattcatgttttaccaaaactagggtatgaatatgccgcttatgaaccttttattgattctcacacaatgaagatccatcacttaaagcaccatcaaggatacataaacaaactaaataaagcattaaaaggaactaaaaaagaaaaagagaccctcagctctatactcatgaatattagcttatataatacaacagtaagaaataatgctggtgggcattacaatcattctttattttggagaatacttaagccaaagccaaacaaacaaccaagcgaggatcttatgcgaggaataggcaaaagctttgaaagcattagtaaacttaaagaagaaatgaacttagaggctgccaaaagatttggctccggatgggtatggctaattcttcagtctaatggtgaattaaaagttacctcaacagcaaatcaagacaaccctctgatggatcttatcaaagatagaggtattccaattattgctattgatgtttgggaacatgcatactatttaaaatatcaaaacaaaagaaatgactatttaggagcaatttggaacttaattgattggggggttgtttctgataattacattaaggcatttagctctcccatttttcaagaattaaaaacacataattggccagaattaaatgtttttagaaacgatttgtcacatatttattattctgccgaaattgaaaattacgcacctttaaaaacaatgacaaaagaattaatgctgaaatcga

SEQ ID NO: 211362 - DNA, 178 bp, Unknown
  Bacterial polypeptide expressing nucleotide sequence isolated from the Sargasso Sea
atggcccattcattacctgagttaggttacgcgtataatgcgctagaacctcatatagatgctaaaacaatggaaatacatcattctaagcatcatcaaacatatataactaatctaaatgcagctttggaaaattatcctgagttttttgacaagagcgttgaagagcttctaatca

SEQ ID NO: 211363 - DNA, 185 bp, Unknown
  Bacterial polypeptide expressing nucleotide sequence isolated from the Sargasso Sea
tacagcaaatcaagacaacccattaatggataaaggttgtggtggaactcctatcttaggattagatgtttgggaacatgcgtactaccttaactatcaaaatagaagacccgattacattaatgcattttttaatgtgattaactgggatgtagtctctgataaatttaattcagctaagtaaa

SEQ ID NO: 211364 - DNA, 604 bp, Unknown
  Bacterial polypeptide expressing nucleotide sequence isolated from the Sargasso Sea
tatgagcaattcacaaaaatttacattaccagcattaccctatggtgcatcagatttatctccaactatctcatctgacacagttgatttacatcacggaaaacatcatcaagcatatttcaatatgttaaataattttgctgatggcacaaaatttatggatatggaattagatgaagtagttgttgaaagttataaagaaggaaatgtgaaagtatttaataatgcgggacaagcatggaaccatatcctttattgggaacaaatggctccaggtggaagcaatgcgcctcaaggtaaattattagaaaaaattgatgaggcatttggagattttgatactttcaaaactgattttacacaacaagctgttggagtgtttggtagcggatgggcttggcttatagaaaaagatggaaaattagaaatgcgcggtttaccaaacgctgaaaatcctttagcacatggagaacatgcattaatggggattgatgtttgggaacatgcctactacttagattataaaaatgtaagacctgattatgtcaaagcagttttagataatctaattaattgggactatgtctcagatcgattacaataa

SEQ ID NO: 211365 - DNA, 578 bp, Unknown
  Bacterial polypeptide expressing nucleotide sequence isolated from the Sargasso Sea
tatggcatttaaagtaccggatttaccttacgactacaacgcgctagaaccatacatagatgaagaaactatgcatttccatcatgataaacatcatgcagcctatgtcaacatgctaaatggagctgtagaagcagctggactagaagggaaaactgttgaagaattgattacaaacttagattcagtacctgaagaacaaagaggagccgttaggaaccatggaggcgggcactacaatcacacaatgttctgggaaataatgggaccagtaaatggtgaaatgagtgcagacttgaacacagctctattggacgctttcggtagtcttgatgatttcaaagctgaatttcacaaagctggaatgacaagattcggctctggatgggcatggttatgctctgataatggaaagttgagtgtgtgctcaactgcaaaccaagataatccaatcatggaaagtaaatatggaggatgtggaaaaactccaattctcggatgtgatgtttgggagcatgcttactacctaaattatcagaatctccgtggagattatcttactgcatttttcgatgtag

SEQ ID NO: 211366 - DNA, 613 bp, Unknown
  Bacterial polypeptide expressing nucleotide sequence isolated from the Sargasso Sea
atgccttatcagcttccgccgctcgcctacgcctacgatgccctggaaccgcatatcgatgcgcagaccatggagattcaccacaccaagcatcatcagacctatatcaacaacctcaacgcggcgctgcaaggtacggcgtacgccgagcaggacgtcgagcagttgctgcgtcaggtcagcgagctgccgcagaacctgcagggcgcggtgatcaaccaggggggtggccacgccaatcacagcctgttctggcaggtgatgtcgcccagcggaggcggcgtgcccgagggggaactggcgttggcgatcgataccgaactgggtggtttcgcggcattcaaggaggccttcacgcaggcggcgctgagtcgtttcggcagtggctgggcctggctcagcgtgacgccgcagcgcaggttactggtcgagagcagcgccaatcaggacagtccgctgatgcacggcaacacgccgattctcgggctggacgtctgggagcacgcctactacctgcgttaccagaaccgccggccggaatacattggtgccttctacaacgtcatcgactgggcggaagtggcgagtcgattccgacgggcgtcgagctgag

SEQ ID NO: 211367 - DNA, 367 bp, Unknown
  Bacterial polypeptide expressing nucleotide sequence isolated from the Sargasso Sea
tctggagtgcctttccccccagggggcggacttccccaaggggaacttgccgccgccatcgactccgccttcggtaatttcgattcctttaaggaggccttcgccaaggccgccatgactcgcttcgggtccggttgggcttggctcgtcaagagagcggatgggagcctttccgtcacctcgacgccaaatcaggattctcccctcatggagggggtggcggatgaaaccggtcgccccatcgtcgggctcgacgtctgggagcacgcctactacctcaattaccagaacaggcgtccggactacgtgtccgccttctggagcgtggtggactggaaccaggcgctggaactcttcaagtcatagg

SEQ ID NO: 211368 - DNA, 241 bp, Unknown
  Bacterial polypeptide expressing nucleotide sequence isolated from the Sargasso Sea
atggcttttgaattaccagcattaccatacgaacaaaatgcactagaaccgcatatttctgctgaaacgcttgagtaccactatggcaagcaccacgctacttatgtaactaagcttaacggcctagttgaaggtactgacatggaaaacaaaagcctagaagaaatcatcaaatcttctgacggcggtgttttcaataacgcagcgcaggtatggaaccacacgttctactggcactgtc

SEQ ID NO: 211369 - DNA, 583 bp, Unknown
  Bacterial polypeptide expressing nucleotide sequence isolated from the Sargasso Sea
catggcctttagcttacccccccttccatacgaaatgaatgcccttgaaccgcatatttcttcggaaaccctggagtttcattacggaaaacatcatcagacttatgtcaacaacctcaacggtttggtagaaggtaccgataaagcttccaagagtcttgaggaaatcatcatgagttccgacggtggactattcaataatgcggcacaggtttggaaccatactttctactggaattgcatgggccccaacggcggtggaaatccgaacggaagcgccgcagatgcaatcaatcgagcctttggatcatttgataatttcaaagaccaattttcaaaatctgcagcaacgaattttggatccggatggacctggctggtgaaaaattcaagtggaggtgtggagatccagaatacaagcaatgcaggatgtccaatgacttcaggcaaaaaagcggttctaacaatcgatgtctgggaacacgcttattacgtagacaaacggaatgcccgacctgcttacatcgaatcctggtggaatcttgtcaactgggacttcgtcaacagtcaactcgaaggttga

SEQ ID NO: 211370 - DNA, 571 bp, Unknown
  Bacterial polypeptide expressing nucleotide sequence isolated from the Sargasso Sea
catggcctttagcttaccccctcttccatacaagatgaatgcccttgaaccgcatatttcttcggagaccctagagtttcattacggcaaacatcatcagacttatgtcaacaacctcaacggtttggtagaaggtaccgataacgcttccaagagtcttgaggaaatcatcatgagttccgacggtgggcttttcaataatgcggcacaggtttggaaccatactttctactggaattgcatgggccccaacggtggtggaaatcccaccggaagcgtggcagatgcaatcaatcaagcctttggatcatttgataatttcaaagaccagttttcaaaatctgcggcaacgaattttggttccggatggacctggctggtgaaaaattcaagtggaggtgtggagatccagaatacaagcaatgcaggatgtccaatgacttcaggcaataaagcggttctgaccatcgatgtctgggaacatgcctattacgtagacaaacggaatgcccgacctgcgtacatcgaatcctggtggaatcttgtcaactggaactacgtcaacagtcaa

SEQ ID NO: 211371 - DNA, 295 bp, Unknown
  Bacterial polypeptide expressing nucleotide sequence isolated from the Sargasso Sea
catggcttacatgcttcccccactgccctactcctttgacgcactggagcctcatatcgatgctcgcacaatggaaattcaccatgacaaacatcatgctgcgtatgtggcaaatgtgaataaagctcttgagggtagctctttagctgaacttccaatagaaaaactcatcagcgacctcgaacaggtgccagaagcaattcgtactgctgtccgaaacaatggcggtgggcacgcgaatcactcacttttctgggagtcattgggaggcggtaaaggaggtgagccgtccgga

SEQ ID NO: 211372 - DNA, 489 bp, Unknown
  Bacterial polypeptide expressing nucleotide sequence isolated from the Sargasso Sea
caaacctaggatctcagtctattgacgagttagtaaagactatatctagtgttgattcgtctattcaaggtgctatacgtaataatgggggagggcatgccaatcattccttattttggtcgattttatcaccaaatggaggaggagcacccacaggggcattagctagtatgattgaaagtacatttggaagtatagacagctttaaagaagcctttaatcaggccgccgctacgcgatttggaagtgggtgggcctggctaggtgttaaatcaggaggtacattatgtatcagttcaacacctaatcaagataatcccttaatgaaagggttggtagactgtgaatgtacgcctattttaggactagatgtgtgggaacatgcttattatttaaattaccaaaaccgacgtccagattatatagcggctttttggaatgttgtgaactgggatgtagttaatcagaattatgaaaaatcattataag

SEQ ID NO: 211373 - DNA, 335 bp, Unknown
  Bacterial polypeptide expressing nucleotide sequence isolated from the Sargasso Sea
agagcctagtggagaaataagtgaatccataaattcaaattttggttcatttgaaaattttaaagatgaatttagtaaagcagctgctacaagatttggttcaggatgggcttgggtttgtgctcacccagatggaaaactagaaatatgttcaactgctaatcaagataatcctcttatgccaaatggttgtggtggaaatccaattctatgtcttgacgtctgggaacatgcttattatttaaattatcaaaacagaagacctgattatataaatgcatttttcaatgtaattaattgggatgaagtaaataatagatttactaataaataaa

SEQ ID NO: 211374 - DNA, 274 bp, Unknown
  Bacterial polypeptide expressing nucleotide sequence isolated from the Sargasso Sea
tttaaagagcaatttactaatgcagcggtaagtcgctttggcagtggctgggcttggttatgtgttgatgaaaataaccaattggtagttgaaagtagcctcaatcaagatagcccactgatgcaaaatcacacgcctattttagggcttgatgtgtgggagcatgcatattacttgaagtatcaaaatcgtcgccctgaatatattgctgcattttacgaagtgatcaattggccggaagttgagcgccgatatttagccgcaattaaatagc

SEQ ID NO: 211375 - DNA, 510 bp, Unknown
  Bacterial polypeptide expressing nucleotide sequence isolated from the Sargasso Sea
tatggctttcgaattacctaaattaaattatgcttttgacgcattagaaccaaacatagatgcaaaaactatggaaattcattatggaaaacaccataatggctatacaaataacttaaataacattatatcagggactgataatgaaggaaagagtattgaggatatattgaactctttagatctagaaaataaaggattgagaaacaatagtggtggttactacaatcataatctattttgggaaattatgggaccaaatggaggtggagaaccaacaggtgaaataggtgaatctattaatttaaattttggatcatttgaaaactttaaagatgaatttagtaaagcagcagccactagatttggctctggatggacatggttatgtgctcataatgatggtaaacttgaaatatgttctactgcaaatcaagataaccctctaatgccaaatgggtgtggaggtgttcctgttttatgtcttgatgtatgggaacatgcgtatta

SEQ ID NO: 211376 - DNA, 254 bp, Unknown
  Bacterial polypeptide expressing nucleotide sequence isolated from the Sargasso Sea
caaaacagctccaattcaaggaagcggatggggttggcttgtatacaatccaaactctggtaaagtcgaatacaaggcaatgccaaaccaaactagtccaagaactgaaggtttagttcctcttttaggattagatgtttgggaacatgcatactatctcaagtatcaaaacaaaagacctgattacatagctgcttggtggaatgtcatcaactgggatgaggtaaacgaccgattctcaaaagcaaagtaat

SEQ ID NO: 211377 - DNA, 439 bp, Unknown
  Bacterial polypeptide expressing nucleotide sequence isolated from the Sargasso Sea
catggcttttgaactacccgcacttccctacgagaagaacgcactggagccgcacatctcggcagagactctggaataccattacggtaagcaccacaacacctacgtggtcaacctgaacaacatggttccgggcaccgagtacgaaggcaagagcctggaagagatcatcaagacctccagcggtggcgttttcaacaacgcagcgcaaatctggaaccacactttctactggaactgcctgagcccgaacggcggcggcgagccgactggcgagctggccgaagccatcaacaaggcgttcggctccttcgccgcgttcaaagaagaattcagcaaagtctccatcggcaccttcggttccggctggggctggctggtcaagaaaggcgacggctccctggcgctggccagcaccatcggcgccggctgcccgctg

SEQ ID NO: 211378 - DNA, 244 bp, Unknown
  Bacterial polypeptide expressing nucleotide sequence isolated from the Sargasso Sea
atggcacatacccttcctgaactgccgtacgcttacgatgctctcgagccgaacatcgacgcgatgacgatggaaattcaccactctcgccaccacaacacctacgtcaccaacctgaacggtgcgctggaaggcaccggtctagaagatgttccggtggaagagctggtggcgaacttggatcgcgtacccgaagagaagcgccaagctgttatcaacaacggtggcggccacgctaatcact

SEQ ID NO: 211379 - DNA, 601 bp, Unknown
  Bacterial polypeptide expressing nucleotide sequence isolated from the Sargasso Sea
atggcttttaaattaccagaattaaattatggatacaatgatcttgaaccatttattgatgcaaagacaatggaaattcattattcaaaacatcatcaaggttacacaaataatttaaataacgcaattgaagggacaaattttcaagggatgggaataattgatttattaaaatcaatggatatgaacaatactgctcttaggaataatggaggtgggttttataatcactcacttttttggtcaataattggtcctaataagggaggtacacctaatggagaaatttctaataaaatcaattcagatttcggttcttttgattcttttaaagaattattttcaaaagctgcagcttcaagatttggatctggttgggcttggctgtgtgtaaaaaaggatggaggtttggaggtatgctcaacagcaaatcaggataatcctctgatgccaagtattgaatgtggaggaactccaattttatgtattgatgtatgggaacatgcttattatttaaactatcaaaatagaagaccagaatatatatcagcatttttcaatattatagattgggaatcagtcagtgaaatctacaaaaaag

SEQ ID NO: 211380 - DNA, 520 bp, Unknown
  Bacterial polypeptide expressing nucleotide sequence isolated from the Sargasso Sea
caccagacctacgtcaacaacctcaatgcgctggtcgagggcaccgaatatgccgacctgccgatcgacgagctgctgcgcaaggtcaagaccctgccggaaagcctgcagcagggcgtgcgcaaccagggcggcggccatggcaaccactcgctgttctgggacgtgatcggccccaacgccggtggcaccccgggcggcgcgctgggcaaggccatcgacgagcagctcggcggtttcgacaagttcaaggaagccttcaccaaggctgcgctgacccagttcggttcgggctgggcgtggctgagcgtgaccgccgacaagaagctggtggtcgagaagaccggcaaccaggaaagcccgctgatggagggccgtaccccggtgctgaccatcgacgtgtgggaacacgcctactacctgaagttccagaaccgccgcgccgagttcatcgagaccttctacagcctgatcaactggaaggaagtggaacgccgttacgaggaggccgtggcctgat

SEQ ID NO: 211381 - DNA, 578 bp, Unknown
  Bacterial polypeptide expressing nucleotide sequence isolated from the Sargasso Sea
aatgacatttacattaccagagttagagtatgattattcagccttggggccttatattgattcagaaacaatgaaaacgcatcatacgaaacaccatgcggggtatgttgcgaaactaaacgcagcggttgaaggaactgatttagcaaaaaaatcgttaatggagttgttatcttctctttctactttgcctacggataaacaagctgcagttagaaataatggcggtgggcacgccaatcattcgttgttttgggcgagtatgtcgccaagccctaaaactagcccagagggagagcttaagactgctattgatcaaacttttggtgatttagatacgtttaaaacagctttttcaactgctgcgatcactcaatttggtagtggttgggcgtggttagtcacagataagacagggaaattagctgtttattcgttacctaatcaagatagccccattatgcagggagatattccgttgattggtttggatgtatgggaacacgcgtattatttgaaatataaaaataggcggcctgattatgttgatgcgttttggaacgttttagattgggctg

SEQ ID NO: 211382 - DNA, 250 bp, Unknown
  Bacterial polypeptide expressing nucleotide sequence isolated from the Sargasso Sea
aatgactatatctttaccaaaattaccttatgacaataaggctcttgagccttatatttctgaaaatactctaaattatcactatggcaagcatcataatacctatgttgttaatctaaataaattaattactggaacaaagtttgagggacagtcacttgaagaaatcattaaaaactctgatggtggaattttcaataatgccgctcaagtatggaatcataccttttattggaattcccatgaagcc

SEQ ID NO: 211383 - DNA, 604 bp, Unknown
  Bacterial polypeptide expressing nucleotide sequence isolated from the Sargasso Sea
atgaatgatgcaaaaaaatttaatcttcccccactaccttttggagaaaatgaactatctccagtcatatcctctgatactattcaacttcactatggtaaacatcatttagcatattttaatatgctaaatactttagctgaaggaactaaatataatgatatgagccttgaagatgtagttgtagaaagttttaaaaataaggatcagaaaatttttaataatgctggtcaagcttggaatcatattctttattgggatcaaatgaaaccaggaggtgaaagtgctccaagtggaaaacttcatgcaatgattgaagaatcatttggagattttgattcttttaaagatcaatttgttcaacaatcaattggagtttttggaagtggttggtgctggttagttcaaaatgattcatcgctagaaatcttaggaacacctaatggtgaaaatcccttagcacatggaaaacatgctcttatgggaatagatgtttgggaacatgcttattatttagattataagaatgttcgtcctgattatgttaaggcaattctagacaattctattaattggagctttgtgtctgatcaattaaaataaa

SEQ ID NO: 211384 - DNA, 622 bp, Unknown
  Bacterial polypeptide expressing nucleotide sequence isolated from the Sargasso Sea
atgagttatacactgccatccctgccgtacgcttatgatgcccttgaaccgcacttcgataagcagacgatggaaatccaccataccaaacaccaccaggcttacgtaaacaacgcgaacgctgcgctggaaagcctgccagaattcgccagcctgtccgctgaagagctgatcaccaaactggatcaactgccagcagacaagaaaaccgtactgcgtaacaacgcgggcggtcacgctaaccacagcctgttctggaaaggcctgaaaaccggtactacgctgcagggtgacctgaaagcggctatcgaacgtgacttcggctccgttgacaacttcaaagctgaatttgaaaaagcagcggcaacccgctttggctccggctgggcgtggctggtgctgaaaggtgacaaactggctgttgtttccaccgccaaccaggattccccgctgatgggtgaagctatctctggcgcttccggtttcccaatcgtgggcctggatgtttgggaacatgcttactacctgaaattccagaaccgtcgcccggactacatcaaagagttctggaacgtcgtgaactgggacgaagctgccgcacgtttcgcagcaaaaaaataag

SEQ ID NO: 211385 - DNA, 352 bp, Unknown
  Bacterial polypeptide expressing nucleotide sequence isolated from the Sargasso Sea
atggctttcgaattgccgccgctgccttacgcgaagaacgcccttgagccgcacatttccgcggaaaccctggaataccaccacgacaagcaccacaacacctacgtcgtgaatctgaacaacctggttccgggtaccgagttcgaaggcaagagcctggaagacatcgtcaagacctcgtcgggcggcatcttcaacaacgcagcccaggtgtggaaccacaccttctactggaactgcctgagccccaacggcggtggccagcccaccggcgccctggctgacgccatcaacgctgccttcggttccttcgacaagttcaaggaagagttcagcaagacctccatcggca

SEQ ID NO: 211386 - DNA, 370 bp, Unknown
  Bacterial polypeptide expressing nucleotide sequence isolated from the Sargasso Sea
tatgtcatttgagttaccaaaattagactacgcttttgatgcgttagaaccccatatagatgcaagaactatggaaatccatcatgataagcatcatgccggatataccagtaagttgaacgacgctattaaaggcacagatcttgaaggaaaaactatcgaaaatatattgatcaatctggatatgtctaatatggcagtaagaaacaacggaggtggtttttataaccacagcttattctggaaagttatgtctcctgatggaggaggaaaacctaccggagcattgctagatgctattacagatgcttttgggtcatttgaggcttttaaaagtgaatttttcaatgctgcaggttccagatttggt

SEQ ID NO: 211387 - DNA, 355 bp, Unknown
  Bacterial polypeptide expressing nucleotide sequence isolated from the Sargasso Sea
cttccgcagaacgctcttgcagcagccattgacaaggaccttggcggcttcgagaacttcaagaccgaattcaccaaggctgccatcagccgctttggcagcggctgggcctggctcagcgtggaccgcagcggcaagctgcatgtggaaagcagcgccaaccaggacaaccctctgatgctgggcattggcagcggcaacacgccgattctgggcctggacgtctgggagcatgcctattacctgaaataccagaaccgccgccccgaatacatcgccgccttctacaacgtggtggactggaatgaagtggcgcgccgctttgctgccgccacccaggctgtcaggagctgaa

SEQ ID NO: 211388 - DNA, 127 bp, Unknown
  Bacterial polypeptide expressing nucleotide sequence isolated from the Sargasso Sea
atgggaaaatacacacttcctgagatgccttatgcatatgatgcactagagcctcatattgatgcacaaacaatggaaatccatcattcaaaacaccatcaaaaatatactgatggcatgaatggtg

SEQ ID NO: 211389 - DNA, 595 bp, Unknown
  Bacterial polypeptide expressing nucleotide sequence isolated from the Sargasso Sea
tatgacttttgaattaccaagcttaccttatgcaaatgatgctttagctccatatatgtcatcagaaactcttgatttccatcatggcaaacatcatcaaacatatgtaacaaatttaaataatcttgttaaagacactgatatgaaagattcttctcttgaggaaatagttgtaaaatcaagtaaagactcatcgatggcaggaatttttaataatgcaggtcaacattggaaccatattttattttggcaatgtatgaaacccaatgggggaggctctatgccgtccgaattggagagtagaattacatcagacctaggagggattgatcaattcaaagaagcttttattcaggcaggaacaactcaatttggttctggatgggcttggcttgccatcgataatggtaaattagtggtcacaaagtcacctaatgcttctaatcctctagttgatggaatgaagccaatactaggatgtgacgtatgggaacactcttattatatagattatagaaacaaacgacctgattatttaaaagcttttttagatagtctagtaaactgggaatttgttgcttctcaattagattaa

SEQ ID NO: 211390 - DNA, 622 bp, Unknown
  Bacterial polypeptide expressing nucleotide sequence isolated from the Sargasso Sea
atgagtttccaattacctgacctaagttataatcatgatgcgcttgagccgtatattgattcaagaacaatgcaaatccatcatggcaaacatcatgctggatatacaagcaaacttaatgctgcaattgaaggtacagacctttcgggcaaatctattgatgatattttaaaaaatctggacatgaataattcagctgttagaaataatggcggcggatattataatcattgtcttttttgggaaatcatgtcccctaatgggggtggatctccgtcgggagctctatctgctgcaattgaaaaaagctttgactcttttgatgaatttaagtctaaattctcatcggcggcgggaacaagatttggttctggttgggcatggctttgtgctcactcaaatggagatttagaaatttgttcctcagccaatcaggataatccattgatgccaggaattggttgtggaggaacgccaattttaggtcttgatgtttgggaacatgcttattatttgaactatcaaaatagaagacctgattatataaatgccttttttaatattatcaattggggaaaaagtaaacgaaaagtacttagctgtctcttgaatgggaattagt

SEQ ID NO: 211391 - DNA, 583 bp, Unknown
  Bacterial polypeptide expressing nucleotide sequence isolated from the Sargasso Sea
atggcttttgaattacccgcactcccttacgaaaagaatgcactggaaccgcacatctctgccgagactctggactaccaccatggcaagcatcacaacacctacgttgtgaacctgaacaacatggttccgggcaccgagtacgaaggcaagagcctggaagagatcatcaagacttccagcggcggcgtcttcaacaacgcagcgcagatctggaaccacaccttctactggaactgcctgagcccgaacggcggcggtgagccgacaggcgaactggccgaagccatcaacaaggcgttcggctctttcgcagcattcaaggaagagttcagcaaggtatctatcggcaccttcggttccggctggggctggctggtgaagaaggctgacggctccctggcactggccagcaccatcggcgcgggctgcccgctgaccagcggcgacaccccgctgctgacctgcgacgtctgggaacacgcttactacatcgattaccgcaatgcacgtccgaagtacgtcgaagcgttctggaacctggtcaactgggacttcgtagcgaaaaactacgctgcctgat

SEQ ID NO: 211392 - DNA, 601 bp, Unknown
  Bacterial polypeptide expressing nucleotide sequence isolated from the Sargasso Sea
atgccacacaccctccctgctttgccttatgagctcgatgccctcgagccccatatctcacggcagaccctggagtttcaccatggcaagcaccacgctgcctacgtgaacaacctcaacaagctggtggatggcaccgatctcgacggcaagagcatcgaggacaccattaccgccgtggctggcaacagcgagaaagctggtgtgttcaacaacgccgcccaggtgtggaaccacagcttctactggcagtgcatcaaacccggtggcggcggccaacccaccggtgctctggccgagaaaatcaacgctgacttcggcagcttcgagaaattcgtcgaagccttcaaagctgctggtgccacccaattcggtagtggctgggcctggctggtgctcgacaacggcagcctcaaggtgaccaagaccgccaacgccgatctgccccttgcccacggccaagaagctttgctcaccatggatgtctgggaacacgcctactacctcgactaccaaaaccgccgccccgactacatcaccacctacctcgagaagctggtgaactgggacttcgttgctgccaacttcgccgctgcctgat

SEQ ID NO: 211393 - DNA, 745 bp, Unknown
  Bacterial polypeptide expressing nucleotide sequence isolated from the Sargasso Sea
gatgacgaccgcgacgacggtcaagccgtcgtctaacgcgacgcggtccttcgtgaacgctaaacttcccgatctcgactacgacttctccgccctggagccggttatttgtgcagagatcatggaaattcaccatcaaaagcaccacaacacgtacgtgacgaactttaacgtcgctcaagagaagtacgcggaggcggaagcgaagggtgatcacgccaccatgattgccatgcaaccggcgatcaaattcaacggtggcggacacgtcaaccacacattgttctggaaatgcctcacggcgccaaaggactacgcgcttccggagggcgaactgttgaagatgatcgagcgagactttggatcgctttcggcgatgcaagacaagtttaccgccgcgactgtcgccgttcaaggctctggatggggttggttgggcttcgacaaagctagtggaaagctcgcggtgacgacgacggcaaaccaggacccgtgcgtgaccaccggtcttactcccatcctgggagtcgacgtctgggagcacgcgtactacttgcagtacaagaatcttcgtccggattacgtcaaaagtgtctggaagatcattaactggaaggtaagtgtaatctttgttgtgacgagagaaaagactgacgagctcgatttttttccgtacagaatgttgctgataaccttaagaatgccatgtaatgcacattctaacttgtacaacaattttttgtga

SEQ ID NO: 211394 - DNA, 205 bp, Unknown
  Bacterial polypeptide expressing nucleotide sequence isolated from the Sargasso Sea
atggtaaacttagaaatctgttcaactgctaatcaagacaaccctttaatgccaaatggatgtggtggaaatccaattctatgtcttgacgtttgggaacatgcatattacttaaattatcaaaatagaagacctgattatataaatgcattttttaatgtaattaattgggtagaagtaaacaaaagatttttacaagcataaa

SEQ ID NO: 211395 - DNA, 514 bp, Unknown
  Bacterial polypeptide expressing nucleotide sequence isolated from the Sargasso Sea
atggcttttgaattaccagcattaccatacgaacaaaatgcactagaaccgcatatttctgctgaaacgcttgagtaccactatggcaagcaccacgctacttatgtaactaagcttaacggcctagttgaaggtactgacatggaaaacaaaagcctagaagaaatcatcaaatcttctgacggcggtgttttcaataacgcagcgcaggtatggaaccacacgttctactggcactgtctaagcccgaatggcggcggtgagccaacaggcgcgctagcagaagctatcaacgcgaaatggggctcatttgcagacttccaagcagcatttaacgataaagcggttaacaacttcggttcaagctggacgtggttagttaaaactgcagacggcagcctagatatcgttaacacaagcaacgcgcaaacgcctatttctggcgacgaccttacgccagtgcttactgttgacctttgggaacacgcttactacatcgactaccgcaatgcgc

SEQ ID NO: 211396 - DNA, 482 bp, Unknown
  Bacterial polypeptide expressing nucleotide sequence isolated from the Sargasso Sea
tatgggaaaatatacacttcctgagatgccatatgcatatgatgcactagagcctcatattgatgcacaaacaatggaaattcatcattcaaaacatcaccaaaaatatactgatggtatgaatggtgcattggaaaaactaagtcctgaattacaagacaaggacatagaagaaattttgtcaaacatcaatcaagtccctgacgatgttaagggtgccattaactttaatggtggaggatacgataaccataaactgttttggaacagtatgaaacaaaacggtggtggtgaaccaactggtgcaattgctgatgccataaacgattcctttggatcttttgcagagtttaaagaattattctctagtaaaacagctccaattcaaggaagcggatggggttggcttgtatacaatccaaattctggcaaagtcgaatacaaggcaatgccaaaccaaactagtccaagaactgaaggtt

SEQ ID NO: 211397 - DNA, 622 bp, Unknown
  Bacterial polypeptide expressing nucleotide sequence isolated from the Sargasso Sea
tatgggaaaatatacacttcctgagatgccatatgcatatgatgcactagagcctcatattgatgcacaaacaatggaaattcatcattcaaaacatcaccaaaaatatactgatggtatgaatggtgcattggaaaaactaagtcctgaattacaagacaaggacatagaagaaattttgtcaaacatcaatcaagtccctgacgatgttaagggcgccattaactttaatggtggaggatacgataaccataaactgttttggaacagtatgaaacaaaacggtggtggtgaaccaactggtgcaattgctgatgccataaacgattcctttggatcttttgcagagtttaaagaattattctctagtaaaacagctccaattcaaggaagcggatggggttggcttgtatacaatccaaattctggcaaagtcgaatacaaggcaatgccaaaccaaactagtccaagaactgaaggtttagttccgttattaggactagatgtttgggaacatgcatactatctcaagtatcaaaacaaaagacctgattacatagctgcttggtggaatgtcatcaattgggatgaagtaaacgatcgattctcaaaagcaaagtaa

SEQ ID NO: 211398 - DNA, 595 bp, Unknown
  Bacterial polypeptide expressing nucleotide sequence isolated from the Sargasso Sea
atgacttttgaattacctagcttaccttatgcaagtgatgctttagctccatatatgtcatcagaaactcttgattttcatcatggcaaacatcatcaaacatatgtaacaaatttaaataatcttgtgaaagatactgatatgcaagactcttctcttgaagaaatagttgtaaaatcaagtaaagatccatctatggcaggaatttttaataatgcaggccaacattggaatcacattttattttggcaatgcatgaaacctaatggcggtggctcaatgccatccgaattagaaagcagaattacatctgacttaggtggaattgaccaattcaaagaggcatttatccaagctggaattacacaatttggttctggatgggcttggcttgctattgataatggcaaattggttgtcaccaaatcacctaatgcttctaaccccttggttgatgggatgaagccaatcctaggctgtgatgtatgggaacactcttattatatagattacagaaacaaacgacctgattacttaaaagctttcttagatagcatggtaaactgggaatttgttgcttcccaattagattaaa

SEQ ID NO: 211399 - DNA, 616 bp, Unknown
  Bacterial polypeptide expressing nucleotide sequence isolated from the Sargasso Sea
aaaatacacacttcctgagatgccttatgcatatgatgcactagagcctcatattgatgcacaaacaatggaaatccatcattcaaaacaccatcaaaaatatactgatggcatgaatggtgcattggaaaaactaagtcctgaattacaagaaaaggacatagaagaaattttgtcaaacatcaatcaagtccctgacgatgttaagggtgccattaactttaatggtggaggatacgataaccacaaactgttttggaacagtatgaaacaaaacggtggtggtgaaccaactggtgcaattgctgacgccataaatgattcctttggatcttttgcagagtttaaagaactattctctagtaaaacagctccaattcaaggaagcggatggggttggcttgtatacaacccaacttctggcaaagtcgaatacaaggcaatgccaaatcaaactagtcctagaactgagggtttagttccactattaggattagatgtttgggaacatgcatactatctcaagtatcaaaacaaaagacctgattacatagctgcttggtggaatgtcatcaactgggatgaggtaaacgatcgattctcaaaagcaaagtaa

SEQ ID NO: 211400 - DNA, 580 bp, Unknown
  Bacterial polypeptide expressing nucleotide sequence isolated from the Sargasso Sea
catggctcatacgctcccgccgctcccgtacgctgaagacgcactcgcgccgaccatctcgctcgagacgatccagtaccactacggcaagcaccatcaggcttatgtgacgaacctgaacaatctgatcccgggcacggaattcgaaaacctgtcgctggaagagatcgtgaagaagtcgtcgggcggcatcttcaacaacgccgcgcaaatctggaaccacacgttcttctggaacagcctgtcgccgaacggcggcggcgcaccgacgggcgcactgggcgacgcgatcaacgcgaagtggggttcgtacgacgcattcaaggaagcgttcacgaaggctgcagtcggcacgttcggctcgggctgggcatggctcgtgaagaaggctgacggttcgctcgacatcgtgtcgacgagcaacgcggcaacgccgctgacgaccgccgacaaggcactgctgacgatcgacgtgtgggaacacgcgtactacatcgactaccgcaacgcacgtccgaagttcgtcgaagcgttctggaacatcgtgaactgggacttcgcagcgaagaacttcgcgtaa

SEQ ID NO: 211401 - DNA, 586 bp, Unknown
  Bacterial polypeptide expressing nucleotide sequence isolated from the Sargasso Sea
aatggcattcgaacttcccgctctgccctatgcaatcaatgctctggaaccgcacatctcccaggaaactctggaataccaccacggcaagcaccacaacacctatgtggtcaacctgaacaacctggtgccgggtaccgagtttgaaggcaagtctctggaagagatcatcaagacctccactggcggcatcttcaacaacgccgcccagatctggaaccacaccttctactggcactgcctctccccgaacggcggtggcgagcccactggcgctctggccgatgccatcaccaaggccttcggctccttcgccgaattcaaggatgcgttcaccaagtcagccatcggcaacttcggttccagctggacctggctggtgaaaaaggctgacggctccctggccatcgtcaacacctccaacgccggttgcccgctgactgaagccggtaccactccgctgctgaccgtcgacctgtgggaacacgcctactacatcgatttccgcaacctgcgtccgaagtacatggaaaccttctggactctggtcaactgggaattcgtggccaagaacctggctgcctga

SEQ ID NO: 211402 - DNA, 586 bp, Unknown
  Bacterial polypeptide expressing nucleotide sequence isolated from the Sargasso Sea
atggctttcgaattacccgcattaccatatgcaaagaacgcactagaaccacacatttctcaagaaaccattgaataccactacggcaagcatcacaacacctacgttgttaagctaaacggtttaatcgaaggaaccgatttcgcaggtaaatctttagaagagatcatcaagacttctactggtggcgtatttaacaacgcagctcaagtttggaaccacactttctactggaactgcttagcgcctaacgctggcggtgagccaacaggtcctgtggctgatgcgatcaatgctgcattcggttcattcgacgcattcaaagcacaatttaccgattctgcggtaaacaactttggtagcgcttggacttggttagtgaaaaaagccgatggcaccgttgctatcgttaacactagcaatgctgcaacgcctctgactgacagcactgtgacaccaatcctgactgttgacgtgtgggaacacgcttactacatcgattaccgcaacgtacgtcctgactacttagcccacttctggcaattagttaactgggacttcgtgaaccaaaacttcgctggttaat

SEQ ID NO: 211403 - DNA, 607 bp, Unknown
  Bacterial polypeptide expressing nucleotide sequence isolated from the Sargasso Sea
tatggcttttgaattaccaaaacttaattattcatttgatgcactagaaccttacattgatgcaaaaacaatggagattcattatggaaaacatcataatggttatataaacaatttaaataatgcgattagtggaactgaacttgaaagtaaaactatagaagaaattttaaaaaatctagatttagataatatggctttaagaaataactcaggggggtattttaatcacaacttattttgggagataatgggcccaaattgtggaggtaatccgagtggtgaaatttctgaagcaattaattcaaattttaattcatttgaaaacttcaaagaagaatttaaaaaagcagcagcaaccagatttggttctggttgggcatggctttgtgtacttggagatgggaaattagaaatttgttcaactcccaaccaagataatccacttatggaaaactcatgcggtggtaatcctattctttgccttgacgtctgggaacacgcgtattatcttaattaccaaaatagaagacctgattatattgaagcctttttcagtttaattaattgggatgaggttaatagtaaatatttgaattttaaataa

SEQ ID NO: 211404 - DNA, 604 bp, Unknown
  Bacterial polypeptide expressing nucleotide sequence isolated from the Sargasso Sea
atggctttcgaattacataaattaaattatgcttttgacgcgttagaaccaaacatagatgcaaaaactatggaaattcattatggaaaacaccataatggttacacaaataacttaaataacattatatcaggtactgataatgaaggaaagagtattgaagatatattaaaaactttagatcttgaaaataaaggattgagaaacaacggtggaggtttctataatcataatcttttctggaaaattatggggcctaatggagggggagagcctagtggagaaataagtgaatctataaattcaaattttggttcatttgaaaattttaaagatgaatttagtaaatcagctactacaagatttggatcagggtgggcttggctatgtgcacatccagacggtaaattagaaatatgttcaacagctaatcaagataatcctctcatgccaaatggttgcggtggaaatccgattctatgtcttgatgtatgggagcacgcttattatttaaattatcaaaacaggagacctgattatataaatgcatttttcaatgtaattaattgggatgaagtaaataatagattcacaaataaataaa

SEQ ID NO: 211405 - DNA, 616 bp, Unknown
  Bacterial polypeptide expressing nucleotide sequence isolated from the Sargasso Sea
atgagccataccctgccagccctgccctatgcctatgacgcgctggaaccccacatcgatgcgctgaccatggagatccatcacagccgtcaccatcagacctatatcaacaacctcaatgccgccctgaccgatctccccgagctggcggcgctgccggtggaggagctgcttgcccgcttcgacagcctgcctggcaaggtgcagggggcggtgcgcaatcacggcggcggtcacgccaaccacagcctgttctggcaggtgatgagtccgcagggcggcggcgagccgggcggcgagctggccgcggcgatcctgcgggacctgggcgggctggaggccttcaagcaggcctttacccaggcggcgctgagccgttttggcagcggctgggcctggctggtggtcgatcagagcagcaagctgcaggtcgtgagcagcgcgaaccaggacagccccctgcaggatgggctggtgcccatcttggggctggatgtgtgggagcacgcctactacctcaagtaccagaacaagcgtcccgactacatagccgcgttttacaaggtgatcgactggaacgaggtggcgcggcgttacgtggcggcgctggcctgat

SEQ ID NO: 211406 - DNA, 352 bp, Unknown
  Bacterial polypeptide expressing nucleotide sequence isolated from the Sargasso Sea
atggaacatacgctcccgccgctgccgtttgccagaaacgcactcgttccgcacatgtcggaagagacgctcgactatcactacggcaagcaccatcagacctacgtgactaacctgaacaatctgatcaagggcacggagttcgagaacctgtcgctcgaagagatcgtcaagaaggcatcgggcggcatcttcaacaacgctgctcaagtgtggaaccacacgttcttctggaacagcctgtcgccgcaaggtggcggtgcgccgaccggcgcactggctgacgcgatcaacgccaagtggggttcgttcgacaagttcaaggaagaattcgccaagaccgcagtcggca

SEQ ID NO: 211407 - DNA, 592 bp, Unknown
  Bacterial polypeptide expressing nucleotide sequence isolated from the Sargasso Sea
atgctaaatcttccagaattaccttatgcatatgattcattagcaccatatatgtcaaaagaaactttagagtttcatcatgacaaacatcacaatacatatgttgttaatgcaaataaaattattgaagataataatattaattatgataatttagagtctttagtaaaaaattcacatagttcaaatcaaggtttatttaacaatgctgctcagcattggaaccatattgaattttggcaatggatgaaaccaaatggaggaggaaatatcccaagtgaactggaatctaaaatagtagaagattttggttcatttgataaattcagagcagactttatcgctgctggtgcaactcaatttggctcaggttggtgttggttggtaaaaggtgcagatggaaaactttctgtaactaaaacaccaaatggagaaaatccaattgtacatggccaaaaagctttattaggatgcgatgtttgggaacattcttattacatagattatcgaaatgctagacctaagtaccttgaagcatttattgataacttagttaactgggaaagagttgctgaattgttcggttcttagt

SEQ ID NO: 211408 - DNA, 622 bp, Unknown
  Bacterial polypeptide expressing nucleotide sequence isolated from the Sargasso Sea
atgggaaaatacacacttcctgagatgccttatgcatacgatgcattagagcctcacattgatgcacaaacaatggaaattcatcattcaaaacaccatcaaaaatatactgatgggatgaatggtgcattggaaaaacttagtcctgaattacaagaaaaggacattgaagaaatcttgtcaaacatcaatcaagtccctgacgacgttaagggcgccattaacttcaatggtggaggttatgataaccataaactgttttggaacagtatgaaacaaaatggtggtggtgaaccaactggtgcaatcgctgatgccatcaatgattcctttggatcatttgcagaatttaaagaactattttctagcaaaacagctccaattcaaggaagcggatggggttggcttgtatacaatccaaactctggtaaagtcgaatacaaggcaatgccaaatcaaactagtccaagaactgaaggtttagtccctctattaggattagatgtttgggaacatgcatactatctcaagtatcaaaacaaaagacctgattacatagctgcttggtggaatgtcatcaactgggatgaggtaaacgaccgattctcaaaagcaaagtaat

SEQ ID NO: 211409 - DNA, 595 bp, Unknown
  Bacterial polypeptide expressing nucleotide sequence isolated from the Sargasso Sea
aatgggatttgaattacttgaacttgaatatgcctatgactcactagagccccatattgatgcggagacaatggagctacaccattccaagcatcatgctggatacaccgctaaactgaatgctgcaatcgagggtacagaaatggactctttgggtattgaggatttgatgattaatcacatggataacgctgcagttaggaataacggcgggggattctggaaccatggaattttctgggagacaatgagccccgatggtggtggagaacccgagggagatcttgcaaatgcaatttcagactctttcggatctttccaatctatgaaggatcagttcagcgatgcagccatgacaagattcggcagtggttgggcatggctatgcgtttcagatgggcaactttccatatgctccactccaaatcaggataatcccctcatgttgggcgaaggtataccaattctaggtctagacgtttgggaacatgcctattacaagaattacggaccgggcagaggggactacatcgccgcatggtggaatgtagtaaattggtcagctgtgtccgataactaccatgccgcaatatag

SEQ ID NO: 211410 - DNA, 586 bp, Unknown
  Bacterial polypeptide expressing nucleotide sequence isolated from the Sargasso Sea
atgcaagaattaaacgaagttggtctgagcgtggcgggcatgacttgcccaagttgcacaaagcacgttgaggacgcgctgctggcggttcccggcgtgatacgagcgtctgtcgattatccggcgaacagggcgcaggtcacgggcaataggcttgacgtatcggcactcgtgacggcagtgggggcacttggttatcgtgctaagcctgcagacgaagtggaaagcaaaaggcgcagtgctgaacggccaggacttcttggcagagccgcccagtggctgagcggtgaccgcgcggtggaggagctggccggtcagttacatgtggcggttatcggtagcggcggagccgctgtggcggctgcgctcaaagcggcggaaaacggtgcccgggtcacgctgatcgagcgcgggactatcggcggcacctgcgtcaacgtgggttgcgttccctccaagatcatgattcgggcagcccatatcgctcatctgcgccgtgaaagtccttttgacgtggggctcactgcgacgccgcctgttgtctcgcgtgaccgtttgcttgtccagcaacaggcgcgcgtggacg

SEQ ID NO: 211411 - DNA, 420 bp, Unknown
  Bacterial polypeptide expressing nucleotide sequence isolated from the Sargasso Sea
gatgaccttgaagattgacgggatgacctgcgcttcctgcgccgagcatgtcaggcaggcgctggaaaaggtgcccggcgtgcgctcggcagcggtctcctattccaaagccctagccgatctgacggtcgatgaaggggttagtcacgacacgctgactgccgcggtgacgacagccggctatcacgccagggtggctgacgtgccaccccactcagcaggcctgcccggcaagacgcccggctcggcggaaactggtgggaagcgtagcggcggtgatagcgcgctgcgggtcgccgtgatcggcagtggtggcgctgccatggcggctgcgctaaaggctgccgaaaacggcgcgcaagtgacgctgatcgagcgcggcaccatcggcggcacctgcgtgaacgtcggctgcgtgcc

SEQ ID NO: 211412 - DNA, 535 bp, Unknown
  Bacterial polypeptide expressing nucleotide sequence isolated from the Sargasso Sea
aatgaaaacagaaaatataaaactcgatatcgcaggaatgacctgcgaccattgtgccacaggcattgaaaaaatgcttaccaaaaatgaaggagtaacagaagtaaaagtgagttatcaaaacggcagttgcgaatgttctttcgacccttctaaaactagtaaagaagaaattatcaatactattaacagcacaaaaaattataaagtagctcatactgctgaaactaaatgttgtaatacaaacgcaaaccacttcgatttaattatcatcggtggtggttcggcggcattttcggcagctataaaggccgaaagtttaggattatcgaccttaatggtaaacggtggtttagactttggcggaacttgtgtaaacgtaggttgtgtcccttctaaaacccttattcgtgcagcggaaacagcttatcacgcaacacattccaatttttcgggcatcaaacccaaaggtgttgctatagattttgctcaagtaattaaagacaaaaaacaattggtagccacgctccagaag

SEQ ID NO: 211413 - DNA, 778 bp, Unknown
  Bacterial polypeptide expressing nucleotide sequence isolated from the Sargasso Sea
aatgcaagagttaaacgaagttggtttgagcgtggcgggaatgacttgcccaagttgtacaaggcacgttgaggacgcgctgctggcggtccccggcgtaacgcgagcggctgtcgattatccatcgaacaaggcgcaagtcacaggcaataggcttgacgtgtccgcgctcgtagcagcagtgggcgcccttggttacggtgctacgcctacagacgaatttgaaagcaaagagcgcagtgttgaacagccaggactccttggcaaagccgcccagtggctgagcggcgagcgcgcggtggagaaaccggcaggtcagctgcatgtggcgatcatcggtactggcggcgccgctgtggcagcagcgctgaaggcagctgaaaacggtgcccgtgtcaccctgatcgagcggggaactatcggcggcacctgcgtcaacgtgggctgcgtcccttctaagatcatgattcgggcagcgcatatcgctcatctgcgacgcgaaagtccttttgacgtgggactgtcggcaacgcccccagttgtcctgcgtgaccgtctgctggcgcaacagcaggcccgtgtggacgagctgcgtcatgctaaatatgaaagcatcctcgaaagcaatccgtcgatcaatctggtgcgaggcagcgcccgattcaaggatggccaaacgcttatcgtggaagcggcagaaggtgacactcgcgaagtgggcttcgatcgctgtctcatttgcactggttgcagcgctgccatcccgccgttgcctggt

SEQ ID NO: 211414 - DNA, 889 bp, Unknown
  Bacterial polypeptide expressing nucleotide sequence isolated from the Sargasso Sea
gaagccattcctaaacggctggcagtaattggcgcctcggtcgtagcactggaactggcacaagcgtttgcgcgcttgggcagcgaggtgacggtcctggcccggcgcaccttgtttgccagtgacgaccctgccattggcgaggccgtgactgcagctttccgtgcggaaggcatcacggtgctgacacagacgcaggcgagtgccgtgacctattgcgaccgccaattcatcctgacgaccgcgcagggcgagttaaaggtggatcaattgcttgttgccaccggccgcacgccaaataccgcaagcctgaatctcgagcgcgcaggtgtgacgtttgactcgcaacatcgcatcctgatcgatcaaggcatgcgcacgagtgcttcgaacatttacgcagctggcgactgcactgaccagcctcagtacgtctacgttgcagccgcggctggtacccgggctggcattaatatgaccggcggcgacgtaaagctcgatctcgacgccatgccggcagtcgtgttcaccgatccgcaagttgccacggtaggctacagtgaagcagaggcccagcgcattggtctgcaaaccgaaagccgtacgctcacgctcgacaatgtgccgcgtgcactcgccaacttcgatacccgcggctttatcaagcttgttgctgaggcagggtccggacgcattctcggagtccaggctgtgacaccggaagcaggcgaaatcatccagactgccgcgattgccatccgggcccgcatgaccgtccaggatctggctaaccagcttttcccttacctcaccatggttgaaggtctcaaactggtggcacagactttttcgaaggatgtgacacagctatcgtgctgtgccggctaaa

SEQ ID NO: 211415 - DNA, 769 bp, Unknown
  Bacterial polypeptide expressing nucleotide sequence isolated from the Sargasso Sea
gtatcaagcgtcgttcgaagtcgcctcgctacaactgcgccccggccagctcgataaggcgctgggctggttgcgcagcgacaccgaggtcggcaaaaacggcgacgcgctacacattgcagtcataggcagcggcggtgcggcaatggcggccgccttgaaggcggtggaagccggcgcccgcgtcactctgatcgagcgcggcaccatcggcggcacttgcgtcaacgtcggctgcgtgccgtcgaaaatcatgattcgcgccgcgcatgtggctcatttgcgccgcgagagtccgttcgatgacggaatgcccgccacgccgccgaccgtcctgcgcgagcggctgctcgcgcaacagcaaggccttgtcgacgaactgcgtcacgccaagtacgaaggcattctggagagcacaccagccatcaccgtgctgcgtggcaccgctcgcttccaggacggccacacgctcagcgtcgaactggtcgaggggggcgggcgcgaagtcgcgttcgaccgctgcctgatcgctaccggcgccggtgcggccgtgccgccgattcgcgggctgcaagacaccccctattggacctcggaggaggcactggccagcgccagtattccgcaacggctcgccgtgatcggctcatccgtggtggccttggagctggcgcaagcctttgcccggctgggtagccgcgtcaccatcctggcgcgcaactcgctgttcttccgcgaagatccggccatcggcgaggcgctgaccgca

SEQ ID NO: 211416 - DNA, 614 bp, Unknown
  Bacterial polypeptide expressing nucleotide sequence isolated from the Sargasso Sea
tatgacttcggatcaatgttcaacaagctgttgctctctgagtgaaagcgaccagctacatgttgcaattattggtagtggctctggtgcctttgcttgtgcaatcaaagcagcagaaaatggtgctagagtcacaattattgaaggatcagatgttattggcggctgttgtgtcaacgtaggatgcgttccatcaaaaattttaattcgtgcagcacaattagcgcaccaacaacgaagaaacccttttgatgggcttgagaataataatcctcaaataagccgtgctctgctagcccatcaacaaaagtctcgtgttgaagagctacgcgaagctaaatatgaaagtattctaaagaaaaaccctgcattatctttgattaaaggttatgcgcgttttaaaaacgaaagtacattgattatccaaaaatcagatggcactaatgaagagctactcgcagatcggatattgatagccactggctcaactccgtcaattccgccaattaagggattagaagataccccttactggacatcaacagaagcactatttgaaacagagttacccggaagcttaatagtcatcggttcttcagttgttgcgctagaaa

SEQ ID NO: 211417 - DNA, 623 bp, Unknown
  Bacterial polypeptide expressing nucleotide sequence isolated from the Sargasso Sea
aaaattactaatatccacaggtcgatttgctaatacaggtaaacttggcttggaaagtataggtgttgaaacagaaatgaatggagcgatcaaagtcaatgaacgcatggagacatcaatagcgaatatctatgcagcaggtgattgctctaacatgcctcaatttgtttatgtagcagcggcagcaggaagtagagcaggaataaatatgacaggtggtgatgctatacttgatttatctaccatgcctgtcgtggtattcactgacccacaagttgcaacggtaggtttatcagaagagcaagctatatctaaaggtcttgatgttgttagtcgagttttggatatggaaaatgtgccaagggcattagctaactttgaaactgatggctttattaagttagtagcggagagtaaaagtgagcgcattattggggcacagatattatctcatgagggtggagagttaattcaaagtgcagcattagctattagcaaccaaatgaccgttactgatttagcaaaccaattatttccatacctaacgatggttgaagggttaaaactgtgtgctcaaacctttaataaagatgtaactgagctttcatgttgtgcaggttaat

SEQ ID NO: 211418 - DNA, 622 bp, Unknown
  Bacterial polypeptide expressing nucleotide sequence isolated from the Sargasso Sea
atgaccttgaagattgacgggatgacctgcgcttcctgcgccgagcatgtcaggcaggcgctggaaaaggtgcccggcgtgcgctcggcagcggtctcctattccaaagccctagccgatctgacggtcgatgaaggggttagtcacgacacgctgactgccgcggtgacgacagccggctatcacgccagggtggctgacgtgccaccccactcagcaggcctgcccggcaagacgcccggctcggcggaaactggtgggaagcgtagcggcggtgatagcgcgctgcgggtcgccgtgatcggcagtggtggcgctgccatggcggctgcgctaaaggctgccgaaaacggcgcgcaggtgacgctgatcgagcgcggcaccatcggcggcacctgcgtgaacgtcggctgcgtgccctccaaaatcatgatccgtgccgcccatatcgcgtatctgcggcagacgagtcccttcgacgcgggcattaccgcgacggcaccggccattgaccggccgcgcatgctcgcccagcagcaggcgcgcgtggacgagctgcgccacgaaaaatatgaaaacattctcgacacgagcccgaacatcaacgtcctgcacggcgagg

SEQ ID NO: 211419 - DNA, 520 bp, Unknown
  Bacterial polypeptide expressing nucleotide sequence isolated from the Sargasso Sea
catgacccatctgacaatcaccggcatgacctgcggttcgtgtgcggcacacgtcaaaaaagccttggaagacgtgcccggcgtacagtcggcatttgtctcccaccccgaaggcactgcccaacttgtcaccctgccgggcacattgcccgatgctctgactgccgctgtggccagactgggctacaaagcaatgctcgccgatgtcccccccaaacacaaccacgctggatcgctcgatcaggtgcgtcagtggacagggggcgctgacaagcgccgtggcaacgagcgtccgctgcaaatagccgtgatcggaagtggtggagccgctatggcggcagcactgaaggccgtcgagcaaggcgcgcacgtcacgctggtggagcgaggcaccatcggcggaacttgtgtgaacattggctgtgtgccgtccaaaatcatgatccgcgccgcgcatatcgcgcatctgcgccgagaaagcccgttcgatgggggcatgtcacccacaccgccgacgatc

SEQ ID NO: 211420 - DNA, 650 bp, Unknown
  Bacterial polypeptide expressing nucleotide sequence isolated from the Sargasso Sea
tatgtcaacgaatagttgttgctcgtcaaatgacatccagccagaacaattacatgtagccattattggtagtggttcaggggcctttgccagtgcgattaaagcagcagaaggcggagcaagagttactatcattgaaggagccgatgtaatcggaggttgctgtgtaaatgtcggctgtgttccttcaaaaatattgatccgtgctgcgcaattagcgcatcagcaacgtactaacccgtttgatggtttagaaaatattcagccacaacttagccgctccttattagcacatcagcaaaacgctcgcgtcgaagaactacgcgatgctaaatatcaacgtattttagagagtaatcccgcgctatctttacttaaaggttatgcacgttttaaaaatcaaaataccttgctagttcacaagtctgatggtagtgaagaagagctggttgcagatcgcattttaattgcaacaggctctacaccaagcattccgccaattaagggtttagttgatacaccttattggacatcaacagaagccttatttgcagaagagttaccgagtagtctagttgtcatcggctcctccgttgttgctctggaaattgcgcaagcttatgcccgtttaggtagccgtgtgacaattc

SEQ ID NO: 211421 - DNA, 757 bp, Unknown
  Bacterial polypeptide expressing nucleotide sequence isolated from the Sargasso Sea
ccggcggtgggtgaagccgtggaagcggccttccgtcgcgagggcatcgaggtgctcaagcagacccaggccagtgagattacccacaatggccgggtgttcaccctccaaaccaacgccggcaccctggaggcggagcaactgctggtggccagtggccgcacacccaataccgagaacctgaacctggaggccgtcggcgtggctaccgagcgcggcgcgatccggatcgacaaccacctgcaaacgaccgcgtccggcatttatgcagccggggactgcaccgatcaaccccagttcgtctacgtggctgccgccggtggtagtcgggccgccattaacatgaccggcggtgacgccagcctcgacctcagcgccatgcccgaggtgatctttaccgatccacaagtggccaccgtcggtctgtccgaggcggaggcccaggctcagggatacgacaccgacagccgcaccctgaccctcgataacgtgccccgggccctggttaacttcgatgccgggggcttcatcaagatggtcgctgagcgtggcagcggacgattgctgggtgtccagtccgtcgcgggcgaagccggtgagctgatccagacggccgtcatggcgctgcgtgcgcgtatgaccgtgaacgacattgccgatgagctgttcccgtacctgaccatggtggaggggctcaagctctgtgcccaaaccttcaccaaggacgtgaagcaattgtcgtgctgtgcgggataag

SEQ ID NO: 211422 - DNA, 1222 bp, Unknown
  Bacterial polypeptide expressing nucleotide sequence isolated from the Sargasso Sea
gatgaccttgaagatcgacgggatgacctgcgcttcctgcgcggagcatgtcagacaggcgctggaaaaggtacccggcgtgcgctcggcagcggtctcctggcccgaagcgctggccgatgtgacggtcgatgaaggagtcagcgacgacacgctggctgccgcactgatgacagctggctaccacgccaaggttgccgacgtgccggaccaatccgcaggcctgttggacagggcgctcggctgggcgggagctggtgggaagcgtcgcggcgatgatggcgcgctgcgggtcgccgtgatcggcagtggtggcgctgccatggcggctgcgctgaaggcggccgaaaacggcgcgcaggtgacactcatcgagcgcggcaccattggcggcacgtgcgtgaacgtcgggtgcgtgccctccaagatcatgatccgtgccgcccaaatcgcgcatctgcggcaggtaagccccttcgatgcggggatcagcgccgtggcaccggtgatcgaccggccgcgcctgctcgcccagcagcaggcgcgcgtggacgagctgcgccacgccaaatacgaaaacattctcgacacgagcccgaacatcaatgttctgcacggcgaggcgcgcttcacggggagccatacgctcaccgtcacgctgaccgtcggcggcgaacgcatggtgtcgttcgatcgctgcctgattgccacgggtgcaactgccgcggtgccgccgattccgggcctgaaggacaccccgtactggacctcgacggaagcgctggcgagcgaaacgattcccgcacgactggccgtgatcggctcgtcggtggtggctgtggaactggcccaggcctttgcacggctgggcagtcatgtcatcgtcctggcccgtcacacactgctctaccaggaggacccggcgatcggcgaaaccgtgacggcggcctttcgcgccgagggcatcgaggtgctggaacagacccaggcgagtcacgtgtcgtacgctgacggcaagttcgtcctcaccacgaaccacggcgaggtgcgggccgaccagctgctggtggcaacgggacgcgcccccaacaccggcagtctgagcctggcaagtgccggcgtgcagctcgacgggcacggcgctgtcgtgatcgacgccggcatgcgcacgagcgcaccggacatttatgcggcgggcgactgtacgaatcaaccgcagttc

SEQ ID NO: 211423 - DNA, 517 bp, Unknown
  Bacterial polypeptide expressing nucleotide sequence isolated from the Sargasso Sea
atgcgcagtagcgcagtggatatctatgcagccggcgactgcaccaaccagccgcagttcgtctacgtcgcggcggcggctggcacccgtgcggcgatcaacatgaccggcggcgaagctacgcttaatctcgatgccatgccggcggtggtgttcaccgatccgcaggtggccaccgtcggttacagcgaagcggaagcacagcgcgcaggcctcgaaaccgacagtcgcacgctgagcctggacaacgtgccgcgtgcgctggccaacttcgacacgcgagggttcatcaagctggtcgccgaagcgggttctggtcggttgctcggcgtgcaggcggtggccccggaagcgggcgagctgattcagacggcggtgctggctattcgcaaccgcatgaccgtgcaggagctggccgaccagttgttcccctacctaaccatggtcgagggcctgaagctcgcggcgcagactttcaccaaggacgtaaagcaattgtcctgctgcgctggatgaa

SEQ ID NO: 211424 - DNA, 630 bp, Unknown
  Bacterial polypeptide expressing nucleotide sequence isolated from the Sargasso Sea
gcgccgaccagctgctggtcgccactggcagggcaccgaacacgcgcagcctggcattggaagcggcgggagtcgctgccaatgcgcagggggccatcgtcatcgacaagggcatgcgcaccagtacgccacacatttatgcggctggcgactgcaccgaccagcctcagttcgtctatgtggcggcagcggccggcacccgtgctgcgatcaacatgactggcggcgatgcggccctggacctgaccgcaatgccggccgtggtgttcaccgacccgcaggtcgccaccgtgggctacagcgaggcggaagcacatcacgacgggatcgagaccgacagtcgcaccttgaccttggacaacgtgccgcgtgcgcttgccaacttcgacacacgcggcttcatcaagctggtcatcgaggaaggtaacggacggctcatcggcgtgcaagcggtggccccggaagcgggtgaactgatccagacggcggtcctcgccattcgcaaccgtatgaccgtgcaggaactggccgaccaattgttcccctacctgaccatggtcgaagggctgaagctcgcggcgcagaccttcagcaaggacgtgaagcagctttcgtgctgcgccggatgag

SEQ ID NO: 211425 - DNA, 883 bp, Unknown
  Bacterial polypeptide expressing nucleotide sequence isolated from the Sargasso Sea
aatgtatttgaatatcaccggaatgacctgcgactcgtgcgcgacacatgtcaaggacgccctggagaaagtgccgggcgtgctgtcggcgctcgtgtcctacccgaaaggctccgcgcaactcgccaccgatcccggcacctcgccagaggcgctgaccgccgctgtggccggcctcggctacaaggccacacccgccgatgccccatccacttcagcgcggggcagactgcttggcaaggcgctgggatggctgggcggtggcgacaaggctggtggtgatggggacggactgcacgtcgccgttattggcagcggcggagccgcgatggcggcggcgctgaaggccgtcgagcaaggtgcgaacgtcacgctgatcgagcgcggcaccatcggcggtacttgcgtcaatgtcggctgcgtgccgtccaagatcatgatccgcgctgcccatatcgcccatttgcgccgtgaaagcccattcgacagtggcatcgcggcgactgtgcctgcgattgatcgcagcaaactactggcccagcagcaggcgcgcgtcgatgagctgcgccacgccaagtacgaaggcatcctggacagcaacccggccatcaccgtgctgcatggtgaagcgcgtttcaaggacgaccagagccttgccgtccgtttaaacgatggcggcgagcgtgtggtggcgttcgaccgctgcctggtcgccacgggtgccagcccggccgtgccgccgattccgggcctgaaagagtcaccctactggacttccaccgaggccctggtcagcgacaccattcccgagcgcctggccgtgatcggctcgtctgtggtggcgctggaactggcgcaagcctttgcccggctgggcagcaaa

SEQ ID NO: 211426 - DNA, 1642 bp, Unknown
  Bacterial polypeptide expressing nucleotide sequence isolated from the Sargasso Sea
aatgattaagttaagtattcaaggcatgacatgccccagttgtgcacctaaggttcacaataaaataatcaaactagaaggcgtacttgacgtttcagtctcttatgaagagagtttagtctcaatcactccgtcagaagatttcaacgtccagagtgcaattgacgccttagagtcagagggctaccaatctcatgcgcaggaggattcttgttgtgcatctgatcagtttgtatcaaataaaaaacatctgcatgttgccattattggcagtggatctggcgcattcgcttgtgcaaccaaggctgctgaaggtggcgcaaaagttaccatcattgagggagcagacgttataggtggctgctgcgtaaatgtaggctgtgtgccatcaaaaatattgatcagagccgcacaactcgcggagcaacaacgtaacaatccatttgcaggtcttgaaaatcaccagccgcaattaaatcgagcattattgtcgcagcaacaatcggcacgtgttgaggagttgagacatgctaaatatcagaacatcttagatacaaacccttctttgaatcttatcaaaggttatgcacgctttaaaaacgccaacactctgattattgataaaccagacggtgatcaacaagaaatcagtgcggataaaattttaattgctacgggatctactcccaccattccagcaatcaatgggttgagcggtacgccttattggacttcaacagaagcactatttgcaactgatttaccagagcatttggttgttataggctcatcagtagtggcactggaaatcgctcaagcgtatcgtcggttgggttctgaagtgacggtgcttgcaaggcataccttactatatcgtgaagatccattattaggtgaagaactggagaaatgtttcaaaaaagaaggcatcaatgttcttacttatacgagtgccaaaaacattgcccacgatggtaaacaatttattatcgactcaaacaacggtcaaatcacctctgacagactacttgtatcaacgggacgtcatgccaatacagaaaaactcaacttaaaagcggtgggtgtacaagttaccgagcgaggcgaagtaatggtcgatgaaaagatgcaaacaaatgtcgaaggtatatatgcagcaggtgactgctcgaacatgccacaatttgtttacgtagcggcagccgcaggcagccgagcaggaacgaatatgactggtggtgatgtgaatttagatctaacgactatgcctgccgttatttttaccgatccccaagtagctacggtaggattaactgaaactcaagcgaaccagcaaggcattagtacgataagtcgggtgttaccaatggaaaatgtgccgagagcattagctaattttgaaactgacgggtttattaaattagttgcagaggaatccacaggtaagctgataggcgcacaaatattggctcatgaaggtggtgagcttgttcaaagcgtagcaattgccattatcaacaatatgacagttgaagaattagcaggacaactatttccttacctgacaatggtagaggggttaaaactatgcgctcaaaccttcaataaagacgtatctgaattatcctgttgcgcagcttaa

SEQ ID NO: 211427 - DNA, 1678 bp, Unknown
  Bacterial polypeptide expressing nucleotide sequence isolated from the Sargasso Sea
gatgaccttgaagattgacgggatgacctgcgcttcctgcgccgagcatgtcaggcaggcgctggaaaaggtgcccggcgtgcgctcggcagcggtctcctattccaaagccctagccgatctgacggtcgatgaaggggttagtcacgacacgctgactgccgcggtgacgacagccggctatcacgccagggtggctgacgtgccaccccactcagcaggcctgcccggcaagacgcccggctcggcggaaactggtgggaagcgtagcggcggtgatagcgcgctgcgggtcgccgtgatcggcagtggtggcgctgccatggcggctgcgctaaaggctgccgaaaacggcgcgcaggtgacgctgatcgagcgcggcaccatcggcggcacctgcgtgaacgtcggctgcgtgccctccaaaatcatgatccgtgccgcccatatcgcgtatctgcggcagacgagtcccttcgacgcgggcattaccgcgacggcaccggccattgaccggccgcgcatgctcgcccagcagcaggcgcgcgtggacgagctgcgccacgccaaatatgaaaacattctcgacacgagcccgaacatcaacgtcctgcacggcgaggcgcggttcacgggaagccattcgctcacgatcacgctgaccgccggcggcgaacgtacggtgtcgttcgatcgctgcctgattgccacaggtgcaactgccgcagtgccgccgattccgggcctgaaggacacgccgtactggacctcgaccgaagcgctggtgaacgacgcgattcccgagcgactggctgtgatcggctcgtcggtagtcgcactggaactggcccaggcatttgcacggctgggcagccatgttacggtcctggcccgtcacacgctgctctaccaggaggacccggcgatcggcgaagccgtgacggccgcctttcgcgccgagggcatcgaggtgctggaacagacccaggcaacccacgtgtcgcacgccgatggcaagttcgtcgtcaccacgaaccacggcgagctgcgggccgaccagttgctggtggcaacaggtcgtgctcccaacaccggtagtctgaatgtggcgggcgccggcgtgcagctcgacgagcgcggcgccatcgtgatcgacggcggcatgcgcacgagcgcaccggatatctatgcggcgggcgactgcaccaaccagccgcagttcgtctatgtcgcggcggctgccggtacacgcgcggcgatcaacatgaccggaggtgatgtacgtctcaatctcgatacgatgccgacggtcgtcttcactgagccacaggttgcgacggttggctacagcgaggcgcaggcgcaccgggcgggcatcgagaccgacaatcgcaccctaacgctcgacaatgtcccacgtgcgctggtgaacttcgacacgcacggcttcatcaagctggtggcggaagccggcaccggccggctcatcggcgtgcaggcggtggcgcccgaggcgggcgaactcatccagacggccgcgatcgcgatccgcgcaaggatgaccgtgcaggacctcgccgaccagctgttcccgtacctgacaatggtcgaggggctcaagctcgctgcgcagaccttctcgaaggatgtgaagcagctctcatgctgcgcgggataa

SEQ ID NO: 211428 - DNA, 1687 bp, Unknown
  Bacterial polypeptide expressing nucleotide sequence isolated from the Sargasso Sea
atgacccatctaaaaatcaccggcatgacttgcgactcgtgcgcggcgcacgtcaaggaagcgctggaaaaagtgccaggcgtgcagtcggcgctggtgtcctatccgaagggcacagcgcaactcgccatcgtgccgggcacatcgccggacgcgctgactgccgccgtggccggactgggctacaaggcaacgctagccgatgcgccactggcggacaaccgcgtcggactgctcgacaaggtgcggggatggatggccgccgccgaaaagcacagtggcaacgagcccccggtgcaggtagcggtcattggcagcggtggagccgcgatggcggcggcgctgaaggccgtcgagcaaggcgcgcaggtcacgctgatcgagcgcggcaccatcggcggcacctgcgtcaatgtcggctgtgtgccgtccaagatcatgatccgcgccgcccacatcgcccatctgcgccgggaaagcccgttcgatggcggtattgcggcaactgtgcctacgattgaccgcagtaagctgctggcccagcagcaggcccgcgtcgacgaactgcggcacgccaagtacgaaggcatcctgggcggtaatccggccatcaccgttgtgcacggtgaggcgcgcttcaaggacgaccagagccttaccgtccgtttgaacgagggtggcgagcgcgtcgtgatgttcgaccgctgcctggtcgccgcgggtgccagcccggcggtcccgccgattccgggcttgaaagagtcaccctactggacttccaccgaggccctggcgagcgacaccattcccgaacgccttgccgtaatcggctcgtcggtggtggcgctggagctggcgcaagcctttgcccggctgggcagcaaggtcacggtcctggcgcgcaataccttgttcttccgtgaagacccggccatcggcgaggcggtgacagccgctttccgtgccgagggcatcgaggtgctggagcacacgcaagccagccaggtcgcccatatggacggtgaattcgtgctgaccaccacgcacggtgaattgcgcgccgacaaactgctggttgccaccggtcggacaccgaacacgcgcagcctcgcgctggacgcagcgggggtcactgtcaatgcgcaaggtgccatcgtcatcgaccaaggcatgcgcacgagcaacccgaacatctacgcggccggcgactgcaccgaccagccgcagttcgtctatgtggcggcagcggccggcacccgtgccgcgatcaacatgaccggcggcgatgcggcgctcgacctgaccgcaatgccggccgtggtgttcaccgatccgcaagtggcgaccgtgggctacagcgaggcggaagcccaccacgacgggatcgagaccgacagccgcaccttgaccttggacaacgtgccgcgtgcgctcgccaacttcgacacacgcggcttcatcaagttggttatcgaggaaggcagccatcggctgatcggcgtacaagcggtcgcgccggaagcgggtgaactgatccagacggcggctctggccattcgcaaccgcatgacggtgcaggaactggccgaccagttgttcccctacctgacgatggtcgaggggttgaagctcgcggcgcagaccttcaacaaggatgtgaagcagctttcctgctgcgccgggtgag

SEQ ID NO: 211429 - DNA, 1687 bp, Unknown
  Bacterial polypeptide expressing nucleotide sequence isolated from the Sargasso Sea
atgaccgagttgcgaattgacgggatgacctgcgcttcgtgcgccgaccacatccgcgatgcgttgaagcaggtgcccggcgtggtgtcggtgtcactgtcctggccgctgggcacggcaaccctcaagacggagtcgggcacgtccgtggaggcgctgacgtccgccgttgcccgtctcgggtatcgcgccgcgctggccgacgcgccgtcgcccccgaaaccggctgcgccgttcgaccagacgttgggccggcccggcggctccgcaaaggcagacagcggagcaggacgcctgcgtattgccgtaatcggcagcggaggtgccgcgatggccgctgcgctgaaggccgccgacagcggcgcacaggtgacgctgatcgagcgcggcacccttggcggcacctgcgtgaacatcggatgcgtgccttccaagatcatgatccgtgccgcccacatcgctcacctgcggcaaacaagcccgttcgatgagggcatcagtgcggtggtgccggggatcgaccggccacgcctgctcgcccggcagcaggcacgcgtggacgaactgcgccacgcgaaatatgaagacattctggcgttgaacccgaacatcaacgtgttgcacggcgaggcgcgctttgctgacggacgtacgttgaccgttacattgaccgccggcggcgaacgcacggtggcgttcgatcgctgcctgatcgccacgggtgcgagtgccgcagtgccgccggttccgggcctgcaggacacaccgtactggacctccaccgaggcgttggtctgcgccgcgattccgccgcggcttgcggtgatcggctcgtcggtggtcgccgtcgaactggcgcaggcgtttgcccgtcttggtagccgggtcacgatactggcacgccacgccctgctgtctggcgaagagcctgcgatcggcgaagcggtgacggctgcctttcgtgccgaaggcattgaggtagtggagcagacccaggcgagccaggtgtcgcatgtcactgacgagttcgtcctaaccacgaaccacggcgaactgcgggccgaccggctgctggtggccacgggacgctcgctgaacaccggcaggctaaatctggccagcgtcggcgtgcagctcgacgagcgcggcgccatcgtgatcgacggcggcatgcggaccagcgcgccggacatctatgcggccggcgactgcaccagccagccgcagttcgtctacgtcgcggcggcggccggcacacgcgcggcgatcaacatgatggggggcgatgcgcagctggatctcggcaccatgccggccgtgacgttcaccgacccgcaggtggcaaccgtcggttatagcgaagcgcaggcacgtcacgcgggtatcgagacggatacccgcacgctgacgctcgacaacgttccacgcgcgctggtgaatttcgacacgcgcggcttcatcaagctggtggccgagtccggcagcggccggctcatcggcgtgcaggcggtgacgccggaggccggcgaaatcatccagacggccgcgctcgccatccgcgcggggatgaccgtccaggaccttgccgaccagttgttcccgtacctgacgatggtcgagggactcaagcttgccgcgcagaccttctcgaaggacgtgacgcagctctcgtgctgcgccggataac

SEQ ID NO: 211430 - DNA, 1669 bp, Unknown
  Bacterial polypeptide expressing nucleotide sequence isolated from the Sargasso Sea
atgatcttactatcgatagaagggatgacctgtccaagttgcgtcgctcacgttaaagaagcgctcgatgcgatcgaaggcgtgaataaggttgaaatatcttatgaaaacgccagcgcaacgatcaccacaaacggtggggtcagcgtaaccgatctcattggagcgattgaagccctgggttataccgcaaaagaaaaccccttagcggaaaacacagcaccgaacgcctactgtgacaacgaaaataccagcaacacagaaagcaaccgaactcaacatgtggcgattatcggtacgggttccggcgcttttgcctgtgctatcaaagccgctgaaggtggtgccaaggtcactcttattgagggagccgatgtgattggcggctgttgcgtgaatgtcggctgcgtaccctcaaaaattttgatccgcgccgctcaattggcacagcagcaacgcaataatccctttgccggactggaaaatcatgcgccccaattgagtcgagccttgttggctcagcagcagaccgctcgagtcgaagagctgcgcgctgcaaagtatcagaatattctagagacaaatcctgcgcttagtttacttaaaggttgggcgcaatttaaaaatgcaaacaccctgatagtcagaaaaaatgatggcactgagcaggaaatctttgctgataaaatcctgatcgccactggctccacgccaaccattcctcccatcgaggggctggccgaaacgccttactggacctctaccgaagcgctgtttgccgaggaattgccgcagcacctggtggtgattggttcatcggtcgtggcgctagaaattgcccaggcttaccgacgattgggcagtgaagtcaccgtgttggcaagacactcactactttacagtgaagaccccataatcggtgaaaaactggcaggctgttttgaaaaagaaggcattcgagttttaaacaacacgcaagccacccaagtgacccacgatggaaatcaattcaccctgaacactaatgcaggcgagctcagttgtgatcgtttgctggtaagcaccgggcgacacgccaataccagccaactcaatctggacgcggtgggtgtcaccaccaacaaaaagggcgaaatcgttgttaacgaacgcatggaaaccaatgttgctggtatttacgctgccggtgactgctctaacatgccgcaatttgtctatgtcgccgcggccgccggtagccgtgctggtatcaatatgacgggcggcgacgccaaactggatctgtccaccatgcccgccgtgatctttaccgatccacaggtggctaccgtcggactgaccgaggaacaagccagggctcaggatattgagaccgacagccgcgtactgggtatggaaaatgtcccacgtgcgttagccaactttgaaaccgacggttttatcaaactggtcacagagaaggaaacggggttgttgctaggcgcgcagatcctggctcacgaaggcggcgaactgatccagagtgcggctttagccatccgcaaccgtatgacggtgacggaattagccgaccagcttttcccttacctcaccatggtggaaggtttgaagctctgcgcgcaaacctttaacaaggatgtcaaagaactgtcctgttgtgcaggataag

SEQ ID NO: 211431 - DNA, 1657 bp, Unknown
  Bacterial polypeptide expressing nucleotide sequence isolated from the Sargasso Sea
atgatcacactgtctatctctgggatgacttgtgcaagttgcacccatcatgttcaggaggccctgctagccgttgcgggcgttagcagcgcaatggtctcttatgacgaggctaatgccgtcatcgaaaccgacacagatatccatgagaaaaccttgctcgatgctgtcgccacgctgggctataaggctaaagtcgttgcgttgggcaataactcacgcttaaccaaagatgaggatacggaagaactgcacgtggctattattggcagcggttcagcggcatttgcctgcgccatcaaggcagccgaaggcggtgctaaagtgacgctcatcgaaggggcggatgtcattggcggctgctgtgtcaacgttggttgtgtgccgtcaaagatcctgatccgggttgcgcaactggcagagcagcagcgtcataacccgtttgcgggattggaaaatcattccccccaactgagtcgctcactgttgttggcgcagcaaacggcgcgggtcgaggagctgcgtgcggccaaataccagaatattctggacgccaatcctgcgctcagtctgatcaaaggttgggcgcgattcaaggacgctaacacactaatcgtcagtcaaaacgatggtacgcagcagcaggttcacgctgataaggtcctgattgcgaccggatcgacgccgactattcctcccatcgaaggactgagcgggacaccctattggacttccaacgaggctctttttgccgaagaaatgcctcaacatctggtggtgattggctcgtcagtcgtggcactggaaattgcccaggcctatcgccgattaggcagtgaggtaaccgtgttggccagacacacactgctctatcgggaggagcccttgctcggtgaacaactctcaggatgttttgaaaaagaaggcattcgtgttctgaatcatacccaggcttcaagtgtttcctatgatgggcagcagtttactcttgaaattctctcatcagaagctggggctggcactttgcattgtgacaagttgttgatcagcacaggccgtcatgccaatacaggcaagcttaacctcgatgcggtaggcgtcaagacggagcaaaatggcgtgatcatcgtcaatgagcgtatggaaaccagcgttccaggtgtttatgccgccggggattgcgccaacatgccgcagtttgtgtacgtcgcggccgcggccggtagtcgcgccgccatcaatatgacaggcggtgagactaaactggatctatccgctatgcctgcggtgatctttaccgatccccaggtggcgaccgtcggactgactgaagatcaggccaaagcacaatatattgaaaccgatagtcgggtactaagcatggaaaacgtacctagagcattggctaattttgacactgatggctttatcaaactggtggtagaaaaagtcagtggacgcctgattggcgctcaaatcctggcgcatgaaggcggagagctgatccagagtgcggctttagccatccgcaaccggatgacagtaacagaattatccgaacagttgttcccttacttgaccatggtggaagggcttaagctctgcgcccaaacctttaacaaagatgtgaaagagctgtcctgctgcgcggggtaac

SEQ ID NO: 211432 - DNA, 442 bp, Unknown
  Bacterial polypeptide expressing nucleotide sequence isolated from the Sargasso Sea
cagcggccggccccgtgctgcgatcaacatgactggcggcgatgcggccctggacctgaccgcaatgccggccgtggtgttcaccgacccgcaggtcgccaccgtgggctacagcgaggcggaagcacatcacgacgggatcgagaccgacagtcgcaccttgaccttggacaacgtgccgcgtgcgcttgccaacttcgacacacgcggcttcatcaagctggtcatcgaggaaggtagcggacggctcatcggcgtgcaagcggtggccccggaagcgggtgaactgatccagacggcggtgctcgccattcgcaaccgtatgaccgtgcaggaactggccgaccaattgttcccctacctgaccatggtcgaagggctgaagctcgcggcgcagaccttcagcaaggacgtgaagcagctttcgtgctgcgccggatga

SEQ ID NO: 211433 - DNA, 824 bp, Unknown
  Bacterial polypeptide expressing nucleotide sequence isolated from the Sargasso Sea
tctctttatatttgggaacaggttcgtcaaaattatcatgcttttgaaactgatttcaaaggtggaagttctgatgtgtatctccatcaaatgccaggtggccaatttactaacttgaaagaacaagccagatctcttggaattacaactgataagtggggaatggttgccaataaatatgctgaggttaaccaactctttggtgatattgttaaagtgacaccttcttctaaaattgtaggagatatggctctttacatgattgctaatgatttaagtaaagaagatgtgttagatccaaaaaaagagatttcttttcctgcatctgttattgagtttttcaaaggagaaattggtatacctcacggtggttttccaaaagagttacaaaaaaaggttcttggagatttacaaccattaacaaaaagaccaggggaagttttagagtcagttgatttagataaagaaattaaaaaattagaagatgatattggaacgaaagttaatcaaaagcaccttgcttcatatctgatgtacccgaaagtttttaaagactatgttgaacattttaaggagtttagcgatacatcaatactttcaactgaattatttttttatggccctcaacaagataaagaatatattattgaaatagacaaagggaaaagtttaattcttagatatttagcaaaaagtgaaataaatagcactggccagtgttccgtattttttgaaataaatggacaaccacgaactattgacattgaaaataaagaattttctaaaaatattgtccaaagggcaaaagctgatgataataataa

SEQ ID NO: 211434 - DNA, 924 bp, Unknown
  Bacterial polypeptide expressing nucleotide sequence isolated from the Sargasso Sea
ctagctgctatagaagaaaaggtagatatcgtggatctgcaatttgactcgatgagtggattaacatcacaacctgcacttggatcaatcgtatctataatgaaacaaaatcataaagacccaaaacttgacgaagaggctataagaacactatctttatattgggaacaagttcgtcaaaattatcatgcatttgaaaccgattttaaaggcggtagttctgatgtttatcttcaccaaatgcctggtggtcagtttacaaatttaaaagaacaagcgagatcattgggaattacaactgataagtggggaatggttgctaataaatatgcagaggtaaaccaactttttggtgatattgttaaagtcacaccttcttctaaaattgtaggcgatatggcgctctatatgatcgctaatgatttatccaaagaagatgtgttagacccaaaaaaagagatttcttttcctgcttcagtcatcgaattttttaaaggggagattggtatacctcaaggaggctttccaaaagaactacaaaagaaagttcttggtgatactaaacctttaacaaaaagacctggggaaattttagaatcaattgatttagataaagaagccaaaaatttaggagatgaaataggaatgaaaattaatcaaacacacctagcgtcttacttaatgtatccaaaagtttttaaagattatgttgatcacttcaaggagtttagtgatacatcaattctttcaacagaattatttttttatggtcctcaacaagataaagaatatacgatagaaattgataaaggtaaaaatcttattttacgatacttagctaaaagtgaagttaatagtaatggtaagtgctccgtgttttttgaaattaacggacaaccaagaacaatagatatagaaaataaa

SEQ ID NO: 211435 - DNA, 843 bp, Unknown
  Bacterial polypeptide expressing nucleotide sequence isolated from the Sargasso Sea
aggagcaaatattattgccataaaagatatggcaggattggcaaaacctaatgctataaaaaaattagttaaagaaattaaacaaacaactgatcttccaatccatttccatacacacgatacctccggtacttcatcagcatcagttcttgctgcaatagaagaaaaggtagatattgttgatctcgcaattgactctatgagtggcttaacatcacaacctgcacttggctctattgtatcaataatgaaacaaaatcatcaagatccacaacttgatgaggatgtgataagaacactatctttgtattgggagcaagttcgtcaaaattatcatgcatttgaaacagattttaaaggtggaagttctgatgtttatcttcaccaaatgcctggagggcagttcactaatttaaaagagcaagcgagatctttaggaattacaacagataaatggggattggttgctaataagtatgcagaggtaaaccaactttttggtgatattgttaaggtaacaccttcttctaaaattgtaggcgatatggctctttatatgattgctaatgatttatctaaagaagatgtattagatccaaaaaaagaaatttcctttcctgcttctgtcattgagttttttagaggggaaattggtataccgcatggaggttttccaaaagaacttcaaaagaaagttcttggagataaaaaacctctgataaaaagaccaggggaagttttagaatcgattgatttagataaggaagctaaaaatttagaggatgaaataggaatgaaagttaatcaaacacatctagcatcttacttaatgtatccaaaagt

SEQ ID NO: 211436 - DNA, 538 bp, Unknown
  Bacterial polypeptide expressing nucleotide sequence isolated from the Sargasso Sea
atgctgtctgcaaccatgatcgaaaagttgaatgaacaaattaatatggagtttttctcctctaatttatacctgcaaatgagtgcatggtgtgaagatcaaggctttgaaggcgcagcaaaatttatgcgcgaacatgcagatgaagaaatgggccatatgcgccgtttgttcacctatgtgagtgaaaccggtggtttacctctattgggcgccattgcagcacctcagtcacagttcgattctctgctggcgttattcgagctgacctatgagcatgaacagttaattactcgtcagattaacgcgttagcccacactgcattttcgaatcaagattattcaaccttcaattttctgcaatggtatgtggctgaacagcatgaagaagaaaagctgtttaagtcgattgtcgataagatccgtttagtgggtgaagatggcaaagcgctgttctttattgataaagatcttgccaaattagcctcaaagggcggcgaaagtattatgaatgcccaaagccaaccgcaggcttaag

SEQ ID NO: 211437 - DNA, 538 bp, Unknown
  Bacterial polypeptide expressing nucleotide sequence isolated from the Sargasso Sea
atgctgtctgcaaccatgatcgaaaagttgaatgaacaaattaatatggagttcttctcctctaatttatacctgcaaatgagcgcatggtgtgaagatcaaggctttgaaggcgcagcaaaatttatgcgcgaacatgcggacgaagaaatgggccatatgcgtcgtttgttcacctatgtgagcgaaaccggcggcttacctctattgggtgccattgaagcgccgcagtcacagtttgactctctgctggcgttattcgagctgacctatgagcatgagcagttgatcaccagtaagatcaatgccttggcccatgcagccttttcaaaccaagattattcgaccttcaacttcctgcaatggtatgtggccgagcagcacgaagaagaaaagctgtttaagtcgattgtcgataagatccgtttagtgggcgaagatggtaaggctctgttctttatcgataaagatttagctaagttggcatcaaagggcggcgagagcattatgaatccccaaagccaaccacaggcttaag

SEQ ID NO: 211438 - DNA, 1996 bp, Unknown
  Bacterial polypeptide expressing nucleotide sequence isolated from the Sargasso Sea
aatgatatattctggaagagtcagtaataattcgactgtagaagttcaaattcctatttcaaacactaaaagtgaaaaaaataattatgtaaaggatttacaaactttaggtccagaaaaatttgcaaaaaaaataaaagaaacaccctacaccctaattactgacacaacgatgcgtgatgcacatcaatcgcttcttgctacaagaatgagaacagatgatcttgttaacatcgctgaatattatagtgaaaatctaagtaccttattctcattagaatgttggggaggcgcaacgtttgatacatcgatgcgttttttaaaagaagatccttgggatagattagcaagattaaacaaaagagcacctaaccttcttaaacaaatgctctttagaggatctaatgctgttggatataaaaattatccagataacgttgttaaacacttcattcaacaatcagcccaagctggaattgatgtattccgagtttttgattcattaaacctaattgataatatgcgtgttgcaattgatgaagtccgcaatcaaaataaaatttgtgaaggaactatctgttatacaaatgatgtaactgatccaaatgagaaaaaatatacattaaaatattatattgatcttgttaaagatttagaaaaagcaggagcacatattatcgccattaaagatatggcgggattagcaaaacctaatgctataaaaaaattagttaatgaaattaaacaaacaaccgatcttccaattcattttcatactcacgatacatctggtacttcatcagcttcagttctagctgctatagaagaaaaggtagatatcgttgatcttgcaattgactcgatgagtgggttaacatcacaacctgcacttggatcaatcgtatctataatgaaacaaaatcatcaagacccaaaacttgatgaagaggctataagaacactgtctttatactgggaacaagttcgtcaaaattatcatgcatttgaaaccgattttaaaggtggtagttctgatgtgtatcttcaccaaatgcctggtggtcagtttacaaatttaaaagaacaagcgagatcattgggaattacaactgataagtggggaatggttgctaataaatattcagaggtaaaccgactttttggtgatattgttaaagttacaccttcttctaaaattgtaggtgatatggcgctctatatgattgctaatgatttatccaaagaagatgttttaaacccaaaaaaagaaatttcttttcctgcttcagtcatcgaattttttaaaggggagattggtatacctcaaggaggttttccaaaagaactacaaaagaaagttcttggtgatactaaacctttaacaaaaagacctggggaaattttagaatcagttgatttagataaagaagccaaaaatttagaagatgaaatagggatgaaaattaatcaaacacatttagcgtcttacttaatgtatccaaaagtttttaaagattatgttgatcactttaaggaatttagtgatacatcaattctttcaacagaattatttttttatggtcctcaacaagataaagaatacacaatagaaattgataaaggaaaaaaccttatcttaagatatttagcgaaaagcgaagttaatagtaatggaaagtgctccgtgttttttgaaattaacggacaaccaagaacaatagatatagaaaataaagaattttcaaaaaatataacacaaagagctaaagcagatgataataatttggatcatgtcggatctcctttgccaggccaagttgctaaaatatttgttcaatcaggtagtaaggtgattaaaggtgataagttactagtgatcgaggctatgaaaatggaaactacaataaacgctgataaaagtggaacaatcaaatcaattaatgttgcatctggtgataatgtggaaaccaaagatttgcttgttgaaattagctag

SEQ ID NO: 211439 - DNA, 1079 bp, Unknown
  Bacterial polypeptide expressing nucleotide sequence isolated from the Sargasso Sea
gatgcgtgatgcacaccaatcgcttcttgctacaagaatgagaacagatgatcttattaatattgctgaatattatagtgaaaatctaagcaacttgttctcattagaatgttggggcggagcaaccttcgatacatcgatgcgttttttaaaagaggatccttgggatagattagcaagattaaacaaaaaggctcctaaccttcttaaacaaatgctctttaggggatctaatgctgttggatacaaaaattatgctgataacgtcgttaaacatttcattcaacaatcagcagaagctggaattgatgtattccgagtttttgattcattaaacctaattgataatatgcgtgttgcaattgaagaagtacgcaatcaaaataaaatttgtgaaggaactatctgttatacaaatgatgtaactgatccaaatgagaaaaaatatacattaaaatattatattgatcttattaaagatttagagaaagcaggagcacatattatcgctattaaagatatggcgggattagcaaaacctaatgctataaaaaaattagttaatgaaattaaacaaacaaccgatctcccaattcatttccatactcacgatacatctggtacttcatcagcttcagttcttgcggcaatagaagaaaaggtagatatcgttgatcttgcaattgactcgatgagcggattaacatcacaacctgcgcttggctcaatcgtatctataatgaaacaaaatcatcaagacccaaaacttgatgaagaggctataagaacactatctttatattgggaacaagtacgtcaaaattatcatgcatttgaaaccgattttaaaggtggaagttctgatgtttatcttcaccaaatgcctggtggtcagtttacaaatttaaaagaacaagctagatctttaggaattacaaccgataagtggggaatggttgctaataaatatgcagaggtaaaccaactttttggtgatattgttaaggttacaccttcttctaaaattgtaggtgatatggcgctatacatgattgccaacgatttatctaaagaagatg

SEQ ID NO: 211440 - DNA, 2284 bp, Unknown
  Bacterial polypeptide expressing nucleotide sequence isolated from the Sargasso Sea
gaagatccacttaataattttatgccagattatgggaagatcatgacttaccgatctgcagccggttttggagtaagattagatgcagcgaatgcatcatccggttcaattattacaccatattatgactctttacttgtaaaagtaaccacttgggcaaagcatcaagatgattgcataaaaagaatggatagagctttaagagaatttagaattagaggtgttaaaacaaatttagtatttctagaatctcttataaataacaatgattttcttaaaggaaattataatacgaattttgttgatacaaaaaaagaattatacacctataaacctcaaaaggatcgagcatcaaaaattgtatcttatctgggtaatataatagtaaacggacacagcgatatttctggaaggcctaataatagttcaactgtagaagttcaaattcctatctcaaataacaaaaatggaaaaaataattttgtcgaagatttaaaaaaactaggttctgaaaaatttgcaaaaaaaataaaagaaataccctacaccttaattacagatacaacgatgcgtgatgcacaccaatcacttttagccacaaggatgcgcacagatgatattgttaacattgctgaatattatagtaaaagtctaagcaacttattttcattggaatgttggggaggcgcaactttcgatacttcaatgagatttttaaaagaagatccgtgggatagattagaaaggttaaataatagagctcctaatctccttaaacaaatgctctttagaggctccaatgcagttggttataaaaattatccggacaatgttgttaaacattttattcaacagtccgcagaagcaggaattgatgtatttcgtgtttttgactcactaaacttaattgataatatgcgagttgcaattgatgaagtacgtaatcaaaataaaatttgtgaagggactatttgttatacaaacgatgtaactgatccaaatgaaaaaaaatatacattaaaatattatattgaccttgttaaagatttagaaaaagcaggagcaaatattattgctataaaagatatggcaggcttggcaaaacctaatgctataaaaaaattagtaaacgaaataaaacaaataactgatcttccaattcacttccatacacacgatacatctggtacttcatcagcatctgttcttgcggcaatagaagaaaaagtagatattgttgatcttgcaattgactctatgagcggtttgacatcccagcctgcatttggttcaatcgtatcaataatgaaacaaaatcatcaagatccaaaactagatgaagaggctattagaacactatctttatattgggagcaggttcgacaaaattatcatgcttttgaaacagacttcaaaggcggaagttctgatgtgtatcttcaccaaatgcccggtggacagttcaccaacctaaaagaacaagctagatctttaggaattacaactgataaatggggaatggttgcaaataaatatgcagaagtaaatcaactttttggcgatattgttaaggtaacaccttcttctaaaattgtaggcgatatggcactttatatgattgctaatgatttaagtaaagaagatatattagatccaaaaaaagaaatttcttttccctcttctgttattgagttttttaaaggtgaaattggcataccacatgggggctttccaaaagagttacaaaaaaaggttcttggagatgtaaaacctttaacaaaaagaccaggagaagttttagaatcagttgatctagataaagaagttaaaaacttagaaaatgaaataggaatgaaagttgatcaaatgcatcttgcttcttacttaatgtatccaaaagtttttaaagactatgtagatcattttaaggagtttagtgacacatcaattctttcaacagaattatttttttatggtcctcagcaagataaagaatacacaatagaaattgataaaggtaaaaacttaattttaagatatttagcaaaaagtgaagttaacaataatggaaaatgctctgtcttttttgaaatcaatggtcaaccacgtactattgatattgaaaatagagaattttcaaaaaatattatacaaagagcgaaagcagatgatagtaacaataatcatgtaggatccccattaccaggtcaagttgccaaaatatttgtcaaaccgggaaataaggtaattaaaggtgataaacttttagttatagaagcaatga

SEQ ID NO: 211441 - DNA, 526 bp, Unknown
  Bacterial polypeptide expressing nucleotide sequence isolated from the Sargasso Sea
catgttggccaaagccatgatcgagaagttgaacgagcagattaatcttgaattctattcctccaacctctacctgcagatgagcgcctggtgcgaggacaagggcttcgagggggcggccaacttcctgcgccagcacgccgtcgaggagcgtcagcacatggagcgtctgttcacctacgtgagcgagaccggtgccatgccgctgctgggcgccatcgatgctcctccccacgagttcaagtcgctgggtgacatcttccgcaccaccctcgagcacgaataccacatcaccaagtgcatcaacggcctggcccacgtggcgttcaccacccaggactactccaccttcaacttcctgcagtggtacgtggccgagcagcacgaagaggagaagctgttcaagagcatcgtcgaccgtctgtcgctggtgggtgaagacggcaagggcctctacttcatcgacaaggagctggccgagctggccaagggcgcccctgccagcatcatggatggcaacgcctga

SEQ ID NO: 211442 - DNA, 1993 bp, Unknown
  Bacterial polypeptide expressing nucleotide sequence isolated from the Sargasso Sea
tgatatatctggtagagtcagtaataattcgactgtagaagttcaagttcctatttcaaacattaaaagtgaaaaaaataattatgtaaaggatttacaaactttaggtccagaaaaatttgcaaaaaaaataaaagaaacaccccataccctaattactgacacaacgatgcgtgacgcacaccaatcgcttcttgctacaagaatgagaacagatgatcttgttaacatcgctgaatattatagtgaaaatctaagtaccttattctcattagaatgttggggaggcgcaacgtttgatacatcgatgcgttttttaaaagaagatccttgggatagattagcaagattaaacaaaagggcacctaaccttcttaaacaaatgctctttagaggatctaatgctgttggatataaaaattatccagataacgttgttaaacacttcattcaacagtcagcccaagctggaattgatgtattccgagtttttgattcattaaacctaattgataatatgcgtgttgcaattaatgaagtccgaaatcaaaataaaatttgtgaaggaactatctgttatacaaatgatgtaactgatccaaatgagaaaaaatatacattaaaatattatattgatcttgttaaagatttagaaaaagcaggagcacatattattaccattaaagatatggcgggattagcaaaacctaatgctataaaaaaattagttaacgaaattaaacaaacaactgatcttccaattcatttccatactcacgatacatctggcacttcatcagcttcagttcttgctgctattgaggaaaaggtcgatatcgttgatcttgcaattgactcgatgagtggactaacatcacaacctgcgcttggttcaatcgtatctataatgaaacaaaatcatcaagacccaaaacttgatgaagaagctataagaacactatctttatattgggagcaggtacgtcaaaattatcatgcttttgaaactgattttaaaggcggaagttctgatgtgtatcttcaccaaatgcctggtggtcagtttacaaatttaaaagaacaagcgagatcattgggaattacaactgataagtggggaatggttgctaataaatatgcagaggtaaaccaactttttggtgatattgttaaagttacaccttcttctaaaattgtaggtgatatggcgctctatatgatcgctaatgatttatccaaagaaaatgtgttagacccaaaaaaagaaatctcttttcctgcttcagtcatcgaattttttaaaggggagattggtatacctcaaggaggctttccaaaagaactacaaaaaaaagttcttggagatactaaacctttaacaaaaaggcctggggaaattttagaaccaattgatttagataaagcagccaaaaatttagaagatgaaataggaatgaaaattaatcaaacacatctagcgtcttacttaatgtatccaaaagtttttaaagattatgttgatcactttaaggagtttagtgatacatcaattctttcaacagaattatttttttatggtcctcaacaagataaagaatacacaatagaaattgataaaggaaaaaaccttatcttaagatacttagcgaaaagtgaagttaatagtaatggaaagtgctccgtgttttttgaaattaacggacaaccaagaacaatagatatagaaaataaagaattttcaaaaaatataacacaaagagcaaaagcagatgataataatttggatcatgtcggatctcctttgccaggccaagtagctaaaatatttattcaatcaggtagtaaggtgattaaaggtgataagttactagtgatcgaggctatgaaaatggaaactacaataaacgctgataaaagtggaacaatcaaatcaattaatgttgcatctggtgataatgtggaaactaaagatttgcttgttgaaattagctag

SEQ ID NO: 211443 - DNA, 1528 bp, Unknown
  Bacterial polypeptide expressing nucleotide sequence isolated from the Sargasso Sea
atcagcccaagctgggattgatgtattccgagtttttgactcattaaatctaattgacaatatgcgtgttgcaattgatgaagtctgcaatcaaaataaaatttgtgaaggaactatctgttatacaaatgatgtaactgatccaaatgagaaaaaatatacattaaaatattatattgatcttgttaaagatttagaaaaagcaggagcacatattattgccattaaagatatggcgggattagcaaaaccaaatgctataaaaaaattagttaatgaaatcaaacaaacaactgatcttccaattcatttccatactcacgatacatctggcacttcatcagcttcagttcttgctgctattgaggaaaaggtcgatatcgttgatcttgcaattgactcgatgagtggattaacatcacaacctgcacttggttcaatcgtaactattatgaaacaaaatcatcaagacccaaaacttgatgaagaatcaataagaacactatctttatattgggagcaggtacgtcaaaattatcatgcttttgaaactgattttaagggtggaagttctgatgtgtatcttcaccaaatgcctggtggtcagtttacgaatttaaaagaacaagcgagatcattaggaattacaactgataagtggggaatggttgctaataaatatgcagaggtaaaccaactttttggtgatattgtgaaggtaaccccttcttcaaaaattgtaggcgatatggcgctttatatgattgctaatgatttatccaaagaagatgtactagatccaaaaaaagaaatttcctttcctgcttcagtcatagaattttttaaaggggatattggtataccacatggaggctttccaaaagaacttcaaaagaaagttcttggtgacacaaaacctctaacaaaaagacctggagaagttttagaatcagttgatttagataaagaagtaaaaattttagaagatgaaattgggatgaaagttaatcaaacacatctagcgtcttacttaatgtatccaaaagtttttaaagattatgttgatcattttaaggagtttagtgatacatcaattctatcaactgagttgtttttttatggtcctcaacaagataaagaatacacgatagaaattgataaaggaaaaaaccttatcttaagatacttagcgaaaagtgaggttaatagtaatggaaagtgctccgtgttttttgaaattaacggacaaccaagaacaatagatatagaaaataaagaattttcaaaaaatattacgcaaagagcaaaagcggatgataataatgtagatcatgttggatctcctttgcccggccaagttgctaaaatatttgttcaatcaggtagtaaagtaataaaaggtgataagttactagtgatcgaagccatgaagatggaaaccactattaacgctgataaaagtggaaccatcaaatcaattaatgttgcatctggtgataatgtggaaacaaaaagacttgcttgttga

SEQ ID NO: 211444 - DNA, 538 bp, Unknown
  Bacterial polypeptide expressing nucleotide sequence isolated from the Sargasso Sea
gacttttcattcgcgaggagtggattctcgaatgagtgcgaacgcgcgctcaacgcgcaaatcaacgtcgagtacaacgtgtcgtacatttaccactccatgtgggcgtatttctctcgagataacgtcgcgttgaaaggtttcgccgaccactttaagaatgaatcgctcgaggagcgcgcgcacgccgaacagttgatggaatacatgaatttgcgcggcggtcgcgtcgagttgcaacaattgctcccgccgcaaaccgaatacgaacactcggacaagggatgcgcgctgtacgccctcgaactcagtctgagtctggagaaactgaacaacgataaattgtgtgagcttcacggcgtggcggacgccgccggggacgcgcacatgtgtgatttcatcgaggggcaaatgttggagccgcaggtgcggagcgtgcgcgaggcgagcgaaatggtggcgacgcttcttcgcatgggtcctccgggcgacggcatggccgcctggcacttcgatcagacgcttcaacaaccgtaaa

SEQ ID NO: 211445 - DNA, 193 bp, Unknown
  Bacterial polypeptide expressing nucleotide sequence isolated from the Sargasso Sea
aatgaaaaaagaacttaaaatttttttagcatcaccaagaggattttgtgctggagttgatagggctatagagatagtcaaaaaagcattaaataaatatggttcgccggtatatgtaagacatgaaatagtgcataataaaaatgttgttgagtctcttaaggagttgggcgctatttttgtggaagagatt

SEQ ID NO: 211446 - DNA, 648 bp, Unknown
  Bacterial polypeptide expressing nucleotide sequence isolated from the Sargasso Sea
ctacatgcccacttgtatctaaagttcacagagaagcagaaaatttagataaaaaggatattcaagttttgcttataggtcataaaaaccatcctgaagtaattggtactatggggcaagtccctgatggaaaaattgatcttatagaaacgattgatgatgcaaaaaattatgaaagaggtgaaaataaaaaacttgcttatataacacaaacaacattgtcgattgatgatactaaagatattataaacgtcttaaaagaacgctttcctgatattaacgagcctaaaaaagatgatatttgttttgcaacaacaaataggcaggcagcaataaaaaaaattgcaaaagagtgtgataatctatttgtgattggtagcaggaattcatctaactcagttaggctagtagaagtagctaaaaataatggatgcgaacatgctgagttaattcattcagaaagcacttttcctctagaaaaaatatctaaatgcaaaacaataggtatttcatctggtgcttcagctcctgaagtattagttaatgaattcatagaaaatattaaaaaaaattttactatagatatagaggaagttgaaatagtaaaagaaaacgtaacatttaagattccaggaaaattaaattaat

SEQ ID NO: 211447 - DNA, 445 bp, Unknown
  Bacterial polypeptide expressing nucleotide sequence isolated from the Sargasso Sea
aatgaagataattttagctaaagatgctggatattgttttggagtaagagatgctgtaaatagcgcttacgaaatgagcaaaaaatatggagaagtctatatgttgggagatattgttcataatgaaagtgtcgtaagtgatttagaaaaagaaggtgtaaaagttgttgagaaacttgatcagattccaaaagacaaacctgttcttttcagagctcacggtactgcaaaagaggtctggaaaaaagctgaagataaaaaaatgaatattatcgatgctacatgccctttagttcatgaaatacatcatgaagtaaaagcattacataaagaaggaagaaaaattatcattattggagaccatggtcacgatgaagtaattggaattgctagtcaaataccagatccagtgattgttgcttcagtagaaaagctgaacacttag

SEQ ID NO: 211448 - DNA, 355 bp, Unknown
  Bacterial polypeptide expressing nucleotide sequence isolated from the Sargasso Sea
atggatactcaagcttttagaagatcccttcatcattctgatagatacaatagaaggggtttcgattctccaactaaaagagctcaagcgttagaagaagcttaccaaagtgatttgataagctctattagggataatggttttacttacactcaaggcagactaaatattaagttggcccaagcctttggtttctgttggggagttgaaagagctgtagcaatggcttatgaaactagaagacattaccctaacgagaatatttggataacaaacgaaataattcataatccctcggttaatgatcatttaagaaaaatgaatgtaaaattcatttcagctaaaaatggaataa

SEQ ID NO: 211449 - DNA, 513 bp, Unknown
  Bacterial polypeptide expressing nucleotide sequence isolated from the Sargasso Sea
aatgaaaattttggttgcaaaagatgcaggttattgttttggtgtaagagatgcagttaatcttgcaaaaaaaagcggaacagatttcgacgaagtgtatatgctcggagatattgtccataatgaaaaggttgtggcagatctcaataaaaaaggttcaaaagttgtaaatagactagaagatatcccaaaagataaaccagtactgtttcgtgcccatggtacagatccggaaacttggaaagctgctcagaaaaaaaagttaaacattatagatgcaacttgtccattagttactgaaattcatgaggaaattaaaattcttgagtctgaaaatagaaggacaattattattggtgaccataatcatgatgaggtcgctggtatagcttcccaagtaaaaaggccaattataatttcaaatgtagaagaagctaagtcactagggaaaatgaaaagagcaggtgttgttagtcaatcaactcaaatgatagagaatgtccaagaaatctt

SEQ ID NO: 211450 - DNA, 355 bp, Unknown
  Bacterial polypeptide expressing nucleotide sequence isolated from the Sargasso Sea
atggatactcaagcttttagaagatcccttcatcactctgatagatacaatagaaggggtttcgattctccaacaaaaagagctcaagcgttagaagaagcttaccaaagtgatttgataagttctattcgggataataattttacctatactaaaggcagactaaatataaagttggcccaagccttcggtttctgttggggagttgaaagagctgttgcaatggcttatgaaactagaagacattatccaaatgagaatatttggataacaaacgaaataattcataatccctcggttaataatcatttaagaaaaatgaatgtgagattcatctcagctaaaaatgaatcaa

SEQ ID NO: 211451 - DNA, 391 bp, Unknown
  Bacterial polypeptide expressing nucleotide sequence isolated from the Sargasso Sea
acagattttgaagaagtatatatgcttggagatattgttcataacgaaaaggttgttgaagaccttaataaaaaaggttcaaaagttgtaagaaacctagaagatataccaaaagataaaccagtattgtttcgtgcccatggaacagatcctgaaacttggaaagctgctcagaaaaaaaagcttaatattattgatgcaacttgtccattagttactgaaattcatgaagaaataaaaattcttgaatctgaaaatagaaggacaattattattggtgaccataatcatgatgaggtcgttggtatagctgctcaagtaaaaaggccaattataatttcaaatgtagaagaagctaagtcattaggaaaaatgaaaagagcaggtgttg

SEQ ID NO: 211452 - DNA, 915 bp, Unknown
  Bacterial polypeptide expressing nucleotide sequence isolated from the Sargasso Sea
gatgactatgtggtaggcatcatgcctggctctgatacaggagctttagaagcctccctatggtctctattaggtaaaagaggtgtagacattctagcttgggaaaattttggtaaggattggatacaagatgttgttaaacaacttcaaatatctaatttaactgtgcatgatgttgattatgggcaatttcctgatgtaactaaagtcaattttgaaaatgatgtagtttttacttggaatgggactacttcaggagttagagttcctaatgcagattggatacctgataatagagaaggtttaacaatatgtgatgctacctcagcaatttttgctatgcctattgattacaaaaagtgtgatgtgcttacttggtcatggcagaaagtattgggtggtgaagctgcacatggaatgattgcaatgtcaccacgagctctcaatagattagagaatttcaagccatcatggccaatacctaaggtttttagaattgcaaataataataaaataatcaaaggtatttttgaaggaagtacaataaacacgccctcgatgatttgtgttgaagatgctctagatggacttaattgggcagaaaaaaatggtggtttgaattttctattagatacttcaatgcattcatttaatttaatttataattgggttcaaaaaaatgattgggtaacttttttatctgaaaataaaagtaaagagtacctatcaaacactggaattacatttaaaatatgtgaagaatggtatttatcaaaaaatgaagatgagcaaagatcgattgtcaaacaaatttgcaaaattttatctgaagaagatgtagctcatgatattaatggttatgcaaaagcacctccatcttttagagtatgggcaggaggaaccgttgagtctcta

SEQ ID NO: 211453 - DNA, 250 bp, Unknown
  Bacterial polypeptide expressing nucleotide sequence isolated from the Sargasso Sea
atgaaacaaaaaattaaaatttttttagcagcacctaggggtttctgtgctggtgtagatagagcaattgaaatagtcaaaaaaactttaaataaatatggtagcccagtttatgttagacatgaaatcgtgcataataagaatgttgttgaaaacctaaaaaatttaggagctatatttgttgaggagatttctgagattaaagataaatccagaccagtcatatttcagcgcatggtgtccctaaatc

SEQ ID NO: 211454 - DNA, 145 bp, Unknown
  Bacterial polypeptide expressing nucleotide sequence isolated from the Sargasso Sea
tatgaaaacacagaaaataagtattcatatagcaggaccaaggggattttgcgcaggggttgatagggcaatttctatggtagaagaggcaattaaaaaatatggcggacctatttatgtacgtcatgaaatagttcataataaa

SEQ ID NO: 211455 - DNA, 370 bp, Unknown
  Bacterial polypeptide expressing nucleotide sequence isolated from the Sargasso Sea
atgaagataatcttagctaaagatgctggatattgttttggagtaagagatgctgtaaatagcgcttacgaaatgagcaaaaaatatggagaagtctatatgttgggagatattgttcataatgaaagtgtcgtaagtgacttagaaaaagagggtgtaaaagttgttgagaaacttgatcagattccaaaagacaaacctgttcttttcagagctcacggtactgcaaaagaggtttggaaaaaagctgaagataaaaaaatgaatattatcgatgctacatgccctttagttcatgaaatacatcatgaagtaaaagcattacataaagaaggtagaaaaattattattattggagacccatggtcac

SEQ ID NO: 211456 - DNA, 394 bp, Unknown
  Bacterial polypeptide expressing nucleotide sequence isolated from the Sargasso Sea
tttaaagaaaaaatttccagaaattaaagagccaaaaaaagaagatatttgttatgcaacaacaaatagacaggctgctgttaaaaaaattgcagaaaaatgtgatatgttttttgttattggaagtagaaattcatctaactctttaaggttggtagaagttgcaaaaaactctggatgtgcaaattcaagattaattcattctgaaagcgcagtgcctttagatgaaattgaaaattataaaactataggaatttcatcgggagcttctgcgcctgaaatattagttgataattttataaataatttaaaaaaacagtttactgtatcgatagaagaaatagaaatagttaaggaaaatataacatttaaaattccaggaaaattaaactag

SEQ ID NO: 211457 - DNA, 364 bp, Unknown
  Bacterial polypeptide expressing nucleotide sequence isolated from the Sargasso Sea
ttgttatgcaactcaaagcagacaagatgctgtgaaacaattagctttagaatgcgacttagtgcttgttgtgggatccactacaagctcaaattcaaacagattaagagaaattgctgaaagatcaggagtagagtcatatctcatcgatgggtctaaagatattaagctagaatggtttgaagggaaacattctataggtctgacttctggagcttcagctcctgaacatttagtacaagaagttatgtcttttattggttctcattttgatttagagaaagatgtagattcagagagagaagatgaaggagtctattttaacttacctaaaaaaattaaagcctttggaacttcccaataa

SEQ ID NO: 211458 - DNA, 701 bp, Unknown
  Bacterial polypeptide expressing nucleotide sequence isolated from the Sargasso Sea
tatgaaaatattagttgcaaaagatgcaggttattgttttggtgtaagagatgcggttaatcttgcaaaaaaaactggaacagattttgaggaagtatatatgcttggagatattgtccacaatgaaagggttgtggcagatctcaataaaaaaggttcaaaagttgtaaataggctagaagatattccaaaagataaaccagtattgtttcgtgcccatggcacagacccggaaacttggaaagctgctcagaaaaaaaagttaaatattattgatgcgacctgtccattagttactgaaattcatgaagaaataaaaattcttgagtccgaaaatagaaggacaattattattggtgatcataaccatgatgaggttgttggtatagctgcgcaagtaaaaagaccaattgtaatttcaaacgtagaagaggctaaatcgttaggaaaaatgaaaagagcaggtgttgttagtcaatcaactcaaatgatagaaaatgttcaagaaattttgaatgttttatctgaaaaagtttatgatttgagatttattaacactatatgctttccaacaagaaggaaccatgaacaaataaaggagctagctggtatttgtgatttgatgattgtgataggttcttttactagtgctaattcaaaaagattaactcagctatcttttgatagaaacaagaattcat

SEQ ID NO: 211459 - DNA, 279 bp, Unknown
  Bacterial polypeptide expressing nucleotide sequence isolated from the Sargasso Sea
ttgttattggatctaaaaacagttcaaattcaaatcgtttaaaagaactggctgaaaaatgtggagccacatctattttaattgatggagctaatgagatagatttcgaaaagctttctcaattcaaaagcataggaattacagcgggggcatctgccccagagtctatcgttcaaaaagttgtgaaagttgttagcaataaattcaatgtaattcctgaggagcttggagaaaataaggagaacatatatttcagattaccccctgaacttcgatgac

SEQ ID NO: 211460 - DNA, 218 bp, Unknown
  Bacterial polypeptide expressing nucleotide sequence isolated from the Sargasso Sea
catggacacccacgccttcaagcgctccttacaccattccgagcgttacaaccgacgtggcttcgggcgcgccgaggaggttgcggagagccttgagcaggcctaccaaagcggcctaatcggcacaatccgggacaacggttacaagctgatccacgggcgcctgaacgtgcgcttggctgaagccttcgggttctgctggggtgtggagcgggctg

SEQ ID NO: 211461 - DNA, 208 bp, Unknown
  Bacterial polypeptide expressing nucleotide sequence isolated from the Sargasso Sea
atgaaaaacgatcttaaaatttttttagcagcaccaagaggattctgtgctggcgttgatagagctatagagatagttaaaaaaaccttaaaaaaatacggatcaccagtgtatgtaagacatgaaatagttcataacaaaaatgttgttggatcgcttaaaaaattaggtgccatttttgtagaagaaatttcggaaatctcagatc

SEQ ID NO: 211462 - DNA, 330 bp, Unknown
  Bacterial polypeptide expressing nucleotide sequence isolated from the Sargasso Sea
atcgtcaggatgcagtgcgggcgatcgcgggccgctgtgatgtcgtcttcgtggtcggctctgtgaccagctcaaactcaaatcggttacgggagttggcggagcaaacgggcgcccgtgcgtatttaattgacggtgcggaggatattgatcaaaaagtgcttgaaggcgttaatcatgtcggcgttaccgctggcgcgtctgcgcccgagatcctggtcgatgcggtagtcaaaaaactcaaagcactggggggatcccctaaaggcgccccctccccgttggacgaaggggtttctttttccctgccatcggaacttcgcgactgaa

SEQ ID NO: 211463 - DNA, 430 bp, Unknown
  Bacterial polypeptide expressing nucleotide sequence isolated from the Sargasso Sea
ttgtcggttgatgatacaaaggaaattattgatgccttaaagctaaaatttccagacataaaaggcccaatcaaagaagacatctgttatgcaacaacgaataggcaggctgcagtaaaaaaaattgcagctaattgtgagatgttttttgtaataggaagtaaaaattcttcaaactctgcaaggctggttgaagttgcaaaaaaatcaggatgcaaagattctgaactcattttttataataaaaaagttcctatagaaaaaataaaaaactgtaaaactattggcttatcgtctggtgcttctgctccagaagagttggttcagaattttatttcggaaataaaaaaaaatatgcaagtttctattgaagaagttataacagcaaatgaaaaagtggctttcagattaccaaaagaattaaattaga

SEQ ID NO: 211464 - DNA, 535 bp, Unknown
  Bacterial polypeptide expressing nucleotide sequence isolated from the Sargasso Sea
atgaagattttagtcgcaaaagatgcaggttattgctttggagtgagagacgccgtcaatcttgctaaaaaaagtggaggggaatatgattctgtctatatgcttggcgatattgtgcacaatgaacgcgtcgtaagtgacttagaaaaatctggttcggtcgttgtaaataatctagatgagattcctgaagataagcctgtgttatttcgagcgcacggaacggacccgaaggtttggaagcaggcacaaaagaaaaaattaaatattattgacgcaacttgtccattggtcacggatatccacgaagaaataaaaattttagagtctgagaaccgtaagacaattattattggagatcatgggcatgatgaggtgatgggtatagctgcccaggttaaaaatcctattattatttcaaatgttgaggaggctcagttattaagaaaaatgaaaagagctggagtcgtaagtcaatcaactcagatgattgaaaatgttcaagatataattaatgtgctaatgggtaaagtat

SEQ ID NO: 211465 - DNA, 535 bp, Unknown
  Bacterial polypeptide expressing nucleotide sequence isolated from the Sargasso Sea
atgaagataatcttagctaaagacgcaggatattgttttggagtaagagatgctgtaaatagcgcttatgaaatgagtaaaaaatatggtgaagtctatatgttgggagatatagttcataatgaaagcgtagtaagcgatttagagaaagaaggtgttaaagtagttgagaagcttgatcaaattccgaaagataaacctgttcttttcagagctcatggtactgcaaaagaggtttggaaaaaagctgaagataaaaaaatgaatattattgatgctacatgtcctttagttcatgaaatacaccacgaagtaaaagccttacatgaagaaggtagaaaaattatcattattggagatcatggccatgatgaagtaattggtatagctagtcaaatcccagatccagtaattgtagcgtcagttgaagaagctgaggcactaagaaaaacaaagaaagctggagttgtgacccaatcaacccaaacaattgagaatgttcaagatattataaatattttaatgacaaaaagta

SEQ ID NO: 211466 - DNA, 271 bp, Unknown
  Bacterial polypeptide expressing nucleotide sequence isolated from the Sargasso Sea
caccgtgaaacaaagcaattatttaagagaggctttgatattgttctaattggacataaaaaccatccagaagtaataggcacaatgggacaattacctgaaggttctattaagcttatagaaactgttcaggatgttaaaaatttaagtttttcaaaaccagttgcttacgttacccaaacaacattgtcggttgatgacacaaaaaaaattattgaagttttaaaaaaaaaatatccagatattaaaggaccaattaaagaagatattt

SEQ ID NO: 211467 - DNA, 839 bp, Unknown
  Bacterial polypeptide expressing nucleotide sequence isolated from the Sargasso Sea
tcccatcgctcaactgaaggaaaagaaaaactaaagtatgttattgataaatcaaaagaattattaggattgccagatgattatattttaggaatattacctggctcagatacaggagcattagaatgtgctttatggagtttattaggaaacaatggtgttgatattttagcttgggaaaattttggaaaagattgggtaaaagatgttttagatgagctcaaaattaaagatctaaatatttatgaaacagattatggtgatattcctgatttatctaaagtcaattttgacagagatgtaatttttacttggaatggcacaacgtctggggttaaagttcctgacggtagttggattaaaaaagatagagcaggattaactatctgtgatgctacatcagcaatttttgcaatgcctattgattataaaaaatgtgatgtaatcacatggtcttggcaaaaagtattaggcggagaagctgctcatggaatgctcgcattatcaccaaaagctatcaaaagattagaaaattataaacctaattggcctatccctaaaatttttagacttactaataataataaaatcatttcaggtatttttgagggaagtacaattaatacaccatctatgatttgtgtagaggatgctatagatgctttaaattgggttgataaaaatgggggtttgaataaccttttagatatatctaataaatcttttgaaattatttctaaatggattgaaaaaaaccattgttttgaatttttagctaatagtttagataaaaaatttatatctaatacaagtattacttttaaaattgcagaaaaatg

SEQ ID NO: 211468 - DNA, 932 bp, Unknown
  Bacterial polypeptide expressing nucleotide sequence isolated from the Sargasso Sea
ctcgcgcgccatctgctttgccaagcgcacgctggagatctgggaccgcctgggggtgggccagcgcatggtggacaagggggtgtcgtggaacctgggcaaggtgttcctcaaagacgaacagctgtatgaattcaatctgctgcccgaagagggccatgagcgccccgcattcattaacctgcagcagtactacgccgaggcctacctggtggagcgtgcgctgcagctgccaggcatcgacatccgctggcacaacaaggtgacggccgtgcaaagccgctcggacggcgcgctgctgagcatcgacacgcccgagggcgcgtaccagatcgacgcgcagtggctggtggcctgcgacggcgcgcgctcacccacgcggcagatgctggggctggagagcaaggggcgcatttttcaggaccgcttcttgatcgccgatgtgaagctggcggacgaggcgaacttccccaccgagcgctggttctggttcgacccgccctttcaccccaaccagagcgtgctgctgcaccgccagcccgacaacgtgtggcgcatcgacttccagctgggctgggatgccgaccccgaagaagaaaaaaagcccgagaacatcatcccgcgcgtgcaggcgctgctgggtacggaggcacagttcgagctggactgggcgagtgtctacacttttgcctgcctgcgcatggaccagttcgtgcacggccgcgtcgtcttcgcgggcgacagcgcccacggcgtctcgccctttggcgcacggggcgccaacagcggcgtgcaggacgcggagaacctggcctggaagctcgattgggtgctccagggccgcgccagccccgcgctggtgagcacctatggccccgagcgtgaatacgcggcggacgagaacctgtgcaactccacccgcgccaccgact

SEQ ID NO: 211469 - DNA, 151 bp, Unknown
  Bacterial polypeptide expressing nucleotide sequence isolated from the Sargasso Sea
atgaaaaaagaacttaaaatttatttagcttcacctagaggtttttgtgcaggggtaaaaagagctattgaaattgttgaaaaatccataaacaggtttggtgctcctgtatatgtacggcatgaaattgttcacaacaagcaggtttaga

SEQ ID NO: 211470 - DNA, 342 bp, Unknown
  Bacterial polypeptide expressing nucleotide sequence isolated from the Sargasso Sea
atgcaactaccaacagacagtctgcggttaaagagatagcttctaagtgcgatatattttttgtagtgggaagccgtaactcttcgaattctgtcagattagttgaagttgcaaaaaaagctggttgtaataattctcatttaatgcactctgaaaaagaaattccttataatgaaatagaaaattctgaaaccattggaatatcctctggagcgtctgcaccagaaaagcttgttcaaaatttattggataatataagaaaagatagaaaggtatctattgaagaagtaatagttgcagaggaaaaagttatatttaaattgccgaaagaactcaattaat

SEQ ID NO: 211471 - DNA, 355 bp, Unknown
  Bacterial polypeptide expressing nucleotide sequence isolated from the Sargasso Sea
aatgaagatattagttgcaaaagatgctggttattgcttcggagtgagggatgcggttaatcttgctacgaaaaccggagcagaatatgattccgtttacatgctcggcgatatagtgcacaatgagcgtgtagtaagtgatctagaaaaatctggctctagggtagtaaacgaccttagtgatattccagaagataagcctgtattatttcgcgcgcatggaacagatccaaaggtttggaaggatgcacaaaagaaaaaattaaatatcatcgatgcaacttgtcccttggtaaacgagattcatgatgagataaaactattggaatcagagaatcgaaaaaacatatcatag

SEQ ID NO: 211472 - DNA, 202 bp, Unknown
  Bacterial polypeptide expressing nucleotide sequence isolated from the Sargasso Sea
atgactaaagaaataaaattagccaacccacgaggcttttgtgctggtgttgatagagctatagacattgtaaataaagctcttgatatatatggagctcctgtgtatgtaaaacatgaagttgtacacaataaagtagttgtggatgatttaagaaataggggtgcagtatttgttgaggaaattgatgagattccctgat

SEQ ID NO: 211473 - DNA, 740 bp, Unknown
  Bacterial polypeptide expressing nucleotide sequence isolated from the Sargasso Sea
tggaactacttcaggagttaaagtccctaatgctgactggatccctgacactagagaaggattaactatttgtgatgctacttcagcaatttttgctatgcctattgattataaaaaatgtgatgttcttacctggtcctggcagaaagtcctaggtggtgaggccgcacacggaatgatagcaatgtcaccaagagccctaaatagattagaaaatttcaagcctttatggccgatacctaaagtttttagaattgcaaataataataaaattatcaaaggtatttttgaaggtagtactattaatacaccttctatgatttgtgttgaagatgctttagatggacttaattgggcagaaaaaaatggtggattaaattttctattcgatacttcaatgaattcatttgatctaatacacgaatggattcaaaacaatgattgggtaacttttttatctgaaaataaaaatacagaatacttatcaaatactggtattacatttaaaatttgtgaaaactggtacttagctaaaagtgcagatgatcaaagattaattgtaaaagaaatttgtaaattattatctgatgaaaatgttgcctttgatattaatggttatgcaaaagccccaccttcctttagggtatgggctggaggaactgttgaaacaaataatattaagctattattaccttggttagaatgggcctattttgttgtgaaggaatctcatgcctaaa

SEQ ID NO: 211474 - DNA, 231 bp, Unknown
  Bacterial polypeptide expressing nucleotide sequence isolated from the Sargasso Sea
aatgagaaaagaacttaaaatttatttagcctcaccaagaggattctgtgctggagttaaaagagcaattgaaatagttgaaaaatctataagtaagtttggagctccagtatatgttcgtcatgaaattgttcacaataagcaagttgttgaagaactaaaagagaaaggtgcaatttttgttgatgaattatctgatattggcgatgcaagtagacctgtaattttctc

SEQ ID NO: 211475 - DNA, 397 bp, Unknown
  Bacterial polypeptide expressing nucleotide sequence isolated from the Sargasso Sea
cagctttaaagaaaaatttccagaaattaaagaaccaaaaaaagaggatatttgttacgcaacaacaaataggcaagctgcagtaaaaaaaatagcaaaagaatgtgatatgttttttgttattggaagcagaaattcatctaactccctaagattagtagaagttgcaaaaaattctggatgcacaaattcgagattaattcattctgaaagtacagtgcctttagatgaaattgaaaaacatcaaactataggaatttcgtcaggagcctctgcgcctgaaatattggttgataattttataaataatttaaaaaaacaatttactgtagcaatagaagaaatagaaatagttaaggaaaatataacatttaaaattccgggaaagttaaactag

SEQ ID NO: 211476 - DNA, 184 bp, Unknown
  Bacterial polypeptide expressing nucleotide sequence isolated from the Sargasso Sea
tatgaaaaaaataattaatatttatctagcttcacctagaggattttgtgctggtgttaaaagagcaattgaaatagttgaattagctttacaaaagtacggccctcctatttatgtgagacatgagatagtccataataaaagagtagtacaagaactgagcaagaaaggagcagttttcgtc

SEQ ID NO: 211477 - DNA, 1702 bp, Unknown
  Bacterial polypeptide expressing nucleotide sequence isolated from the Sargasso Sea
atgagcatcaactaccagacgctgtcgttcgagtatcggccgtgccgcgagcaaagcggcgcggagcaggcgcgttatcccgtgattgtggtcggcgcggggccggtgggcctcgctacggcgatcgatatcgcgcagcagggcgtgccggtcgtgctggtcgacgacgattgctcgttgtccaccggttcgcgggcgatctgcttttcgaagcggtcgctcgatatcttcgaccggctcggctgcgggcagcgcatggtggacaagggcattagctggaatgtcggcaaggtgttcctgaaagatgaactggtgtacacgttcaatctgcagccggaggcgggtcaccatcggcccgcgttcatcaatctgcagcagtactacgtcgaaggttttctgctcgaacgcgcgcaggagatgccgaatctcgaaatccgctggaagagtaaggtggtcggcgtgcagcagagcggcacgccaggtacgcaggacgccagcgtaacgctgacgatcgacacgcctgatggtcaatacccgttatgcggccgctatgtggtggccgccgacggttcgcgtagtccgatgcgtaatctgatgggactcgacagcaagggcgtcacgttcaaagaccgtttcctgatcgccgacgtgaagatggaagcggagtttccgaccgaacgctggttctggttcgatccgccattccatccgaatcaatcggtgctgttgcatcgccagccggacaacgtgtggcgaatcgatttccagttgggctgggacgccgatccggtgctggagaaaacgccggagcgggtgattccgcgtgtgcgcgcgttgctcggaccggatgcgaagttcgagctggaatgggtcagcgtctatacgttttcgtgtttgcgcatggaccggttccggcacggcaacgtgttgttcgcgggcgattccgcgcatggcgtgtcgccgttcggcgcgcgcggcgcgaatagcggcgtgcaggatgcggagaacctcgcatggaaactggcgatggtgctcgacggtaaagcgtccgatacgctgctcgacacctatgcaagtgagcgcgaattcgccgcggatgaaaacatccgcaattccacgcgctcgaccgatttcatcacgccgaagagccccgtgagccgcgtgttccgcgatgcggtgctgaagctcgcacggcatcatccgttcgcgcggcagttgacgaatagcgggcgactgtccgtgccggcggtgctgcgtgattctccgttgaatacaccggatagcgagagctttgaaggtgcgatggtgccgggcgcatcgtgcgtcgatgcaccggttcacgcagacgggcaacctgtgtggctgttacagcaactcggccagcaatttacgggcgtgctgttctgcggcccgcaaggcatggatcagtcgacgcaagctgcgctggacgcattgcgaagcgggccggttccgctgaagctcgtcgtggtgacgagtggcgatgcgcaggtcgcgttggcttcggatgtcaaggtggtgcatgacgtcgatggtcttgtcgccgcacgttatgacggccaacccggcacgttctatctgatccgccccgatcaacacgtttgcgcgcgttgtcggcaactcgatgtgagttttgtacacggcgcattgaagcgggcattgtgcgtggaaggcacggcctgaa

SEQ ID NO: 211478 - DNA, 1654 bp, Unknown
  Bacterial polypeptide expressing nucleotide sequence isolated from the Sargasso Sea
catgagcatcgattaccagacgctgaagttcgaataccacccgcgtgcgcaggacacgaccgttcacccggtgatcgttgtcggcgcgggcccggtgggcctcgcggccgcgatcgacctcgcgcagcagggcgtgagcgtcgtgctgctcgacgacgatgacacgctgtcgaccggctcgcgcgcgatctgcttcgcgaagcgcacgctcgagatcttcgaccggcttggctgcggcgagcgcttcgtcgacaagggcgtgagctggcatgtcggcaaggtgttcctgcaggacgagcagctttatgcgttcgacctgctgcccgaggaagggcatgcgcgccccgcgttcatcaatctgcagcagtactacgtcgaaggctacctggccgatcgcgcgttcgagttgccgaatatcgatatccgctggaagcacaaggtcacgggcatcgaccagtcggccgaacatgcggtgctgacgatcgagacgccggacggcgtcgcgacgctgcgcgcgcagtacgtgatcgcggccgacggctcgcgcagcccgatgcgcacgatgatgggcctcgaaagccacggccgcacgttcaaggaccgcttcctgatcgccgacgtgaagatgaaggcggagtttccgaccgagcgctggttctggttcgacccgccgttccacccgaatcagtcggtgctgctgcatcgccagcccgacaacgtatggcgcatcgacttccagctcggctgggatgcggaccccgtcgccgagaagcagccggagcgcgtgatcccgcgcgtgcgtgcgctgctcgggccggacgtcgagttcgagctcgaatgggtgagcgtctatacgttccgctgccagcggatggagtcgttccggcacggccgtgtgctgttcgcgggcgattccgcgcacggcgtgtcgccgttcggcgcacgcggcgcgaacagcggcgtgcaggacgccgacaacctcgcatggaagctgaagctcgtgctcgacggccggtcggccgacagcctgctcgacacgtatgcgagcgagcgtgaattcgcggccgacgagaacatccgcaactcgacgcgctcgaccgacttcatcacgccgaagagcccggtgtcgcgtgtgttccgcgacgcgacgctgaagctcgcacgcgactgcgaattcgcgcgcaagctcgtgaacagcggccgcctgtcggtgccggcagtgctggccgattcgccgctgaacacgccggaccgcaacggcgacgcgttcgcgggcgcgatgccgccgggcgcggcggcggccgatgcgccggtacgtacgcagggcgcgtcgggctggctgctgcagcacctgggcagcggcttcaccggcgtgctgttcgggttgccgggcgatgcggccgcactcgcgcaggcgctcgacggcctcgcgctgccggtgcggcccgtgctcgtcgtgccggccgggcatgcgcagccggtcgcgggtgtcgacgtcgtggaggacgtcgacggccttgctgcacggcgctacgacggaaagcccggcacgttctacctgctgcgtcccgaccagcacgtttgcgcgcggatgcgcacgctcgagcgtcaggcgctggccgatgcgctggcgcgcgcgacctgcgcatgctga

SEQ ID NO: 211479 - DNA, 408 bp, Unknown
  Bacterial polypeptide expressing nucleotide sequence isolated from the Sargasso Sea
gatggatactcaagcttttagaagatctcttcatcattctgacagatataatagaaggggtttcgattctccaacaaaaagagctcaagcattagaagaagcttaccaaagtgatttgataagttctattagagataatggttttacttacactaaaggcagactaaatattaagttggctcaagccttcggtttctgttggggagttgaaagagctgtagcgatggcttatgaaactagaagacattaccctaatgagaatatttggataacaaacgaaataattcataatccctcggttaatgatcatttaagaaaaatgaatgtgaaattcatttcagctaaaaatggaatcaaagatttttctctagtttctaatggggatgttgttatacttcctgctttcgg

SEQ ID NO: 211480 - DNA, 268 bp, Unknown
  Bacterial polypeptide expressing nucleotide sequence isolated from the Sargasso Sea
gttgtctgaagtaactgacttaatgattattattggatcatttacaagcgctaattctaaacgtctagctgaattaagctcagaaagaaatgaaaatacatttcaggtgacttctgctacagaaattgattcatcttggttcaaagatgatgtaaattctgtaggaatatccgccggagcctcaactccagactggataatcgaatcagtaattaaaaaagtcaaagaagtaacaaatacacaggaaaaggaaataattcatgaataa

SEQ ID NO: 211481 - DNA, 904 bp, Unknown
  Bacterial polypeptide expressing nucleotide sequence isolated from the Sargasso Sea
aagaggtgtagacattctagcttgggaaaactttggtaaggattggatacaagatgttgttaaacaacttcaaatatcaaatttgaccgtgcatgatgttgattacggtcaattccctgatatcactaaagtcaattttaaaaatgatgttgtttttacttggaatggaactacctccggagtcaaagttcctaatgcagactggatacctgatagtagagagggtttaacaatatgtgatgctacatcagcaatttttgcgatgcctattgattataaaaagtgtgatgttcttacttggtcatggcaaaaagtattgggtggtgaagcagctcatggaatgattgcaatgtctcctcgagctatcaatagattagagagttttaagccgtcatggccaatacctaaagtttttagaattgctaataacaataaagtaatcaaaagtatttttgaaggaagtacaataaacacaccttcaatgatttgcgttgaagatgctctagatggacttaattgggcagaaaaaaatggtggtttgaattttctattggatacttcaatgaactcatttaatttaatttataattgggttcaaaaaaatgattgggtaacttttttatctgaaaataaaagcaaagaatatctatcaaacactggaattacatttaaaatatgtgatgactggtatttatcaataagtgaagatgagcaaagatctattgtcaaacaaatttgtaaaatattatctgacgaaaatgtggcccatgatataaatggttacgcaaaagcacctccatcttttagagtatgggcaggaggaactgttgagtctctaaatatagaattattacttccatggttagattgggcatattctgaagtgaggaaatcttatgcctag

SEQ ID NO: 211482 - DNA, 799 bp, Unknown
  Bacterial polypeptide expressing nucleotide sequence isolated from the Sargasso Sea
gcttatgatactgcgaaaagacatggtgacgtttatatgcttggcgatatagtacacaatgaaaatgttgtcgcagatttgaataaagctggagcgagggtagtaaaaagtcttgatgaagtgcctgatggtaaaccaatcctatttagagcacatgggactttattagagacctgggatgatgcaaaatcaaaggatatgaatattgtagatgcgacatgtcctttagttaaagaaattcatgatgaagtattaaaactgtctaaggaaggtaggaaaattatcattatcggtgatcatggtcatgatgaagttgttggaattgcaagtcaagtaaatgatgcaattgttgtctctaatgaaaaagaagctatgaaactaagaaagatgaagcgagctggagtggtttctcaatcaactcaaacaattgaaaatgttcagaaaataataaatataattatgacaaaagtttatgatttgaattttgttaatacgatatgttttcccactaaaagaaaccaagatcaaataaaagatttagcaaaagaatgcgatgttatgattgtgattggctcatttactagtgcaaattcaaaaagactaactatgttagctgaagaaataaataaaaaatcttatcaagtaactgatgccgatgatataaatatcgaatggtttgctggtgctaaaactgtaggtttgtcagcaggagcaagtactccagataatattattaataatgtgctagataaaattaaaacaattagtgaaaatcacgaggagatgatttatggctaaa

SEQ ID NO: 211483 - DNA, 3025 bp, Unknown
  Bacterial polypeptide expressing nucleotide sequence isolated from the Sargasso Sea
acccttctaattcgccctattgaaacagagttagctgatatcgatgggctcaagaaaatgacggcaaccgctgcagaaaactatgcaggagtggcaatagagtttgaatttggttgggacaaagccaaaacaatggctgatgttcgagatgccatgaatgctgctgaggcttttttcccagaaggtgcagaaaagtattcaataaatgaattaaatttttcagaatttccaataattatagtgaatttaactggggatgtgcccgagagaacaatgacgagggtagctaaaaagctacaagaagaaatagaagctatggatgcggttctagaagcagttatctctggagatcgagaggagatggtagaagttatcatcgaccctttaagattggaaagttataatgttactgccggcgaactaataaatgtggttcaaaataataaccagctaatcgccgcgggcgaggtagacagtaaacaagggactttttcagttaagatccccagtagttttaatgaaactcaggatatatatgatcttcccgttaaaactaatggtgataggatcatcactttaggcgatttggcgcaaattaaattaacttttgtcgacagatccggtaccgcgcgtttcaatggtaaaaacactgtcgctcttcaagttgtaaaaagaaaaggtttcaacctgatcggaacagcaaaagaagtgcggctgttagtggaaaaagaaagtcaaagctggccttcaaatcttaaagcagcagtggatgttggcacatcaaacgatcaaagtcgagttgtagacagtatggtgaggcagttggaaggttcagtcctaactgccatagcgttggtgatgattgttgtacttacatcactaggaacaagagctgcactgcttgttgggttttcaatacccacatcatttttgttgtgttttgttttattgggtttaatgggtgttacaatatcaaatattgtcatgtttggtcttatcttagcagtaggaatgctcgttgatggtgcaatagtagtagttgagtacgccgataaacgtatttcacaaggcacaggacctatgaaggcctatgtggaagcagccaaacgtatgttttggccagtggtaagttcaacagcaacaactctttgtgcttttttacccatgttattttggccgggggttccaggtcaatttatgggcatgttaccagtaactcttatttttgttttatcagcttccttaattgttgccctaatttatctaccaatcttgggtggtgtatcaggtagattaagtaggtttttcgaaaatagctccaatcttttgcgcgatattcttccatggtttatacgcttgccacttgtgccactgataatctgcttactttgcttgagtatattgcaggttgttaacccgggcctactgctcaatatcgatcccaaggaagcaggcccaatggcaaatttacctggagtattaatgtttatactctcagcttttatggcttcaattgttttaggttctgtggaaatcaagaaaaggcaaaaaaatgtccaagctggatatagaagaaccccttttggctacttcattaagtttattgctggaaatcctattatgccgcttatagcaattggcggcgtaattggcttcactagttttatttttacaacctttggggaaaataactacggtgttgaattttttgttgaaggggaaccagagcaagcaatcgtatatgtcaaagcaagaggtaatctttcattaacagagaaagataccctagtgcgccaagcggaattgatcgtgaatgctcaccccggtgtcgaaagcgttttttctttcgctggaactggcggtctaaatcaaaatacagcaggagcatcagcacctaaagatacaattggtcaaatccagctagaaacagttccctgggaaaaccgaagaggaaatcctgacttagatgggaacaaaattattgctgaattatccaatgcgctcactattttaccgggaatagaaatagaaattctagaattagagagagggccagcaagtccaaagcctgtgcatctgagactaaaaggtgaaaactggaatgatcttctaagcactactgccgaaatgcgagggatatttgatcaaacagaaggcttagtacaagttgaggatactaggccactgccaggtatagattggcaaattgatgttgatgtggaaaaagcaggacgctacggtgccgacgtagcgaccgttggtgcaatggtacagttggtcacacgtggaatcttattagacacaatgcgcgtcgatagttcggacgaagaaattgaaattcgagtaagactgccggaagaagatcgatttttatcaactttggataatttaaaagttcgaactgctgatggacttgttccgctatcaaacttcataagtcgcaaacctgtaacaaagcttgctgaaataaatcgcatagatcaaaagagatattttgatataaaagcgggcgttcaacccgacttaaagcgaaccattgtatcggatgagggtgtggagagtgaaattttcattaatgccaatgaaaggatagcttatcttacagaatatctcgaaaaaaaaccacttgctccgggcatttcttgggagtggaccggggatcaagctgatcaagcagaaagccaagcctttttaagctcggcatttgctgccgcacttgtacttatgtttattattcttcttgcacaatttaatagtttttataatgcgtttgttgtcctaattgcagtcgttctttccacggtaggcgttttaattgggatgctggtgatgcagcaacctttttcaattatcatgacaggaacgggtatagtggcgctagcaggaattgtcgtaaacaacaatattgttttgatagatacataccaagaactgtctcgctatctaccaaaggtagaagcgatcatacgaacggcagaacaaagaattcgacccgtacttttaacaacaataactacaatggcag

SEQ ID NO: 211484 - DNA, 865 bp, Unknown
  Bacterial polypeptide expressing nucleotide sequence isolated from the Sargasso Sea
atgaaaattttgttggcgaaagatgctggttattgttttggagttagagacgctgttagtcttgcttatgaaacagcagaaaaagaaggtgaagtattcatgcttggagatattgtgcataatgaaaatgtggtcgaagagcttgaagaagctggagttaaagttgtcaatagtttagataaagttccagataataaacccattttgttccgtgcgcatgggactgttcctgatgtatggaaagagtcaaaaatgagagaaatggaagttgtagatgcaacatgtcctttagtgacagaaatccatgaagaagtaaaaaaattacattccgaaaacagaaagattataattattggtgaccatggtcatgatgaggtaaatggtataaaagagcaggtagaaaatgctattgttgttgcaaatcctgaagaagcaatgcaattaagaaaaataaaaaaggctggagttgtttcacaatctactcaaatgattgagaatgttcaggaaataattaacattttaatgacaaaggtatttgaccttcggtttgtaaatacaatatgttttcctacaagaaggaatcatgaacagataaaaaacttatcagaaatatgtgatataatgatagttataggatcgtttactagtgctaattctaaacgattaactgaattagctaaaatgcgaaatgaaagaacgtttcaagttacctctgctgaggacttagaaattgattggtttcaaaactcagatacggttggtatatctgctggggcctcaactcctgataacatcattaatcaagttttggataaaattaaatcaattggtaaagtaactgaagaggagttggtttatgagtaaa

SEQ ID NO: 211485 - DNA, 211 bp, Unknown
  Bacterial polypeptide expressing nucleotide sequence isolated from the Sargasso Sea
atgaagaataaaaatttaaaaatttatttagcttctcccagggggttttgcgctggtgtagatagagcaattgagatagtaaaaaaaagtataaataaatacggtgcaccagtctatgtaagacacgagattgttcataacaaaaatgttgtagaaaatttaaaaaaaataggtgctatttttgttgaagaattaaacgaaatagaagata

SEQ ID NO: 211486 - DNA, 505 bp, Unknown
  Bacterial polypeptide expressing nucleotide sequence isolated from the Sargasso Sea
aattgaaaatattgaggatgcaaaaaaatatgaaaataaatctaagaaaaaacttgcatttataactcaaacaacactttctgtagatgatactaaaggaattattaatattcttaaaaataaatttccaaatataagagaacccaaaaatgaagatatatgctacgcaactacaaatagacaaatggcagttaaaaagatagccaataaatgtgatatgttttttataattgggagcagaaactcatcaaattcattaagattagtcgaagtagctagtcacgctggttgtaaaaaatcagagttaatccatagcaaaagtatcgttcctatagaaaaaattaaagattgtaaaactattggaatatcttctggagcatcagcacctgaattactagtaaaaaattttattgaggaaattaaaaaaaattttactgtaaatattgaagaaataaaaattattgatgaaaaaataacttttaaaattccaggaaaattaaattaa

SEQ ID NO: 211487 - DNA, 539 bp, Unknown
  Bacterial polypeptide expressing nucleotide sequence isolated from the Sargasso Sea
aatggagatacttgtaagctcccctagaggattttgtgcaggagtagttcgtgccatcgatatggttgaactagctcttaaaaaatacggtgctccagtctatatcaagcaccagatcgttcataatcctcatgtagttgaagaccttgaaagtaaaggagcaataacggtagaaactgttgaagaaatccctgaaggttcccatgttgtattttcagctcatggttcaccacctgaagattttaacaaagccatagaaagaaatttgaacgtaattgatgcggtttgtcctctagttaccaaagtacacaatgaagcgaaaaagtatgcttctctaggcaaaaaaattatcttagtgggacatgaaggacaccaagaagttaaaggaactatggggcaaacccctatgacattggtaaatgataatgatttagaatctattccggattgggacacaaacagtgatatagcagtactgactcaaaccacattatcagtcaatgacacccaaaacatcactgataaaatagcttcagaat

SEQ ID NO: 211488 - DNA, 463 bp, Unknown
  Bacterial polypeptide expressing nucleotide sequence isolated from the Sargasso Sea
atgaaaaacgaagttaaaatctttttagcatctcctaggggattctgtgctggtgtagaacgagcaatagacatagtagaaaaaacaatagtaaagtttggaacacctgtatatgttagacatgaaatagttcataataaacaagttgttgagaacttgaaaaaaaaaggaactatatttgttgaagaactatctgaagttaaggatctatctaggccagtaatattctctgcacacggtgtgcctaaaaaagtcccggaagaagctaaaattaaaaatttattttatatcgatgcgacttgcccattagtttcaaaagtacatagagagtctgagcaattacataagcaaggatacgacatagttttaattggccataaaaatcatccagaagttattggaactatgggtcaattgcctccaggatcaattaaactcatagagacagttaatgaagttcaag

SEQ ID NO: 211489 - DNA, 664 bp, Unknown
  Bacterial polypeptide expressing nucleotide sequence isolated from the Sargasso Sea
tctgttatttcgtgctcatgggacatcgcctgagctctgggataaggcctcagaaaaaaatctgaatttaatcgatgcaacatgtccattagtaacagagattcaccatgaaataaaaaaattagatcaagaaggtagaaagaccattattattggtgaccatggtcatgatgaggtggttgctatagctgcgcaggtagaacgttccattgtgattgcaaatgttgaagaagccaaaaagcttcgtaaaatgaagagagcaggcgtagtaagccaatctacccagatgattgaaaatgtccaagaaatcatcaatgttctcatggaaaaggtttttgatcttagatttgtaaatacaatttgttttccaaccaggagaaaccatgagcagataaaagaattagctgaaaaatgtaatgtgatgattattatcggatcttatactagtgcaaactctaaaagattaactcagttatctctggaacgtaatcaaaaatcttatcaagtcacatcatctgatgaattggatgtgtcttggttcaaaaattgcgagactgttggaatatcagctggtgcatctactccggatgaaacaattagtgaagtagttagtaaaataaaaatgattggtagtgtaaaaacaaaggaattagtttatgagtaa

SEQ ID NO: 211490 - DNA, 237 bp, Unknown
  Bacterial polypeptide expressing nucleotide sequence isolated from the Sargasso Sea
aatgactaaagaaataaaattagccaacccaagaggcttttgtgctggtgttgatagagctatagacattgttaataaagctcttgatatatatggagctcctgtgtatgtaaaacatgaggttgttcataataaagtagttgtggatgacttaagaaataggggtgcagtatttgttgaggaaattgatgagattcctgatgattcattagtaatttttagtgcccatggagtatc

SEQ ID NO: 211491 - DNA, 124 bp, Unknown
  Bacterial polypeptide expressing nucleotide sequence isolated from the Sargasso Sea
aatggttttgaaaaagaattttattcctgagggagaaattaaagtaggtattacttctggagcttctactccagataagatagtcgctgatgttattgaaaagttaattgctattactaagtaa

SEQ ID NO: 211492 - DNA, 346 bp, Unknown
  Bacterial polypeptide expressing nucleotide sequence isolated from the Sargasso Sea
aatgaaaaataaagaaatcaaagttttgcttgcgtctccaaggggtttctgcgctggtgttgacagggcaattgaaattgttaaaaaaagcattgataaatatggcgcgcctgtttacgtcagacatgagatagttcacaataaaaatgttgttgaaagtttaaaaaatattggtgctatatttgtagaagaactatcagaaattaaagataagactcgtccggtaattttttccgcacatggtgttcctaaatctgtgccatcagaagctgaaaatttaaacatggaatatgttgatgcaacatgtcctctggtttctaaagtacatagagaagctgaaaattta

SEQ ID NO: 211493 - DNA, 328 bp, Unknown
  Bacterial polypeptide expressing nucleotide sequence isolated from the Sargasso Sea
aatgaaaaaagaacttaaaatttatttagcgtcaccaagagggttttgtgctggagttaaaagagcaattgaaatagttgaaaaatctattaagaagtttggcgctccagtgtatgttcgtcatgaaattgtacacaataagcaagttgttgaagaactaaaagagaaaggtgcaatttttgtagatgaattatctgacgtgaatgagacaagtagacctgtaattttctcagcccatggagttcctaagtcagttccaaaagaagctaaattaaaaaatttatcctttgtagatgcaacatgtccattagtttctaaagtacataga

SEQ ID NO: 211494 - DNA, 205 bp, Unknown
  Bacterial polypeptide expressing nucleotide sequence isolated from the Sargasso Sea
atgagtaaacaaataaaacttgcaaatccaagaggcttttgtgctggggttgatagagcaatagatattgttaataaagctctggaaatatatggagcacctgtctatgtgaaacatgaagttgtccataacaaggtagttgttgatgatttgaaagaaagaggtgctatttttattgaggaaattgaagaaattccagatattc

SEQ ID NO: 211495 - DNA, 223 bp, Unknown
  Bacterial polypeptide expressing nucleotide sequence isolated from the Sargasso Sea
gatgaaactcgatcctacaagcccaagcttgaatattttactcgccaatccacgtggtttttgtgctggagtggatcgtgctatcagtattgtcgaacgggcgttggaattgttttcaccgccaatctatgttcgccatgaagttgtgcataaccgctatgtcgtgcaaaatctgaaagaccgtggtgcggtttttgtcgaagagcttgaccaagtgccctga

SEQ ID NO: 211496 - DNA, 266 bp, Unknown
  Bacterial polypeptide expressing nucleotide sequence isolated from the Sargasso Sea
aatgaaaaaagagcttaaaatatttttagcgtccccaagaggattttgtgctggagttgatagggcaattgaaattgtaaataaagcgctcgataaatttggttcaccagtctatgttaggcatgagattgttcataataaacaagttgtagaagatttgaaaaaaagaggagctatatttgtggaagagttatctgaaataaaagacagctctaggccagtaattttttctgctcatggtgtacccaaaagtgttcccattgatg

SEQ ID NO: 211497 - DNA, 449 bp, Unknown
  Bacterial polypeptide expressing nucleotide sequence isolated from the Sargasso Sea
atatgtgactcaaacaaccctgtctgttgatgatacaaaagaaattattgatgctcttaaaaaaaggttcccaaaaatacgagggcctataaaggaagatatatgttatgcaacaacaaatagacaatcggcagtaaaaaaaatcgcttctgattgtgaaatgttttttgttattggaagcagaaattcgtcgaattctgcaaggttggtagaggttgcaagaaaatctggatgtgaaaaatcagagttaattttttatggaaaaaaagctccaatagataaaattataaattgtaaaactattggattatcatctggtgcatcagcacctgaagaattagttcaaaactttatttctgaaattagagaaagtatgaatgtttcaattgaagaaattgttacagctaatgaaaaagttgtttttaaacttcccaaagaattaaattaaa

SEQ ID NO: 211498 - DNA, 587 bp, Unknown
  Bacterial polypeptide expressing nucleotide sequence isolated from the Sargasso Sea
taccggttattttattggtcatcgtaatcatccagaagttattggcactatgggtcaaacaaaaagttcaatatttctagttgaaaaagtagaagatgtaaaaaaagttcctatagatgtaaataatgaaatagcttatgtaactcaaactacattatcagttgatgatacaaaagatataattcaagaaattaaaaatcgttataaaaaagtaattgaacctaaaaaaaatgatatttgttatgctactacgaatagacaggaggctgtcaaaagaatagcaagtaactgtgattatttcctggttattggagcaagtaattcttcaaattctcttagattagttgaggtagcaaaaaattatggttcaaaaaaagctattttggtagaagatgtcgattctattaatcttaatatttttgaaaatattaaaaacataggcataactgctagtgcatcttcacctgaaatacttgttaagaaacttatagataagttaaaaatcaactttgatttatctattaatgaggctcattatcaaaaagaaaatgtgtactttaaagttcctcaaaaacttaaaaattaaa

SEQ ID NO: 211499 - DNA, 521 bp, Unknown
  Bacterial polypeptide expressing nucleotide sequence isolated from the Sargasso Sea
acccaggggttccattaagctaatagagactgttggagatgttaaaaatttaagtttttcaaaacctgttgcctatgttacgcaaacaacactatctgttgatgatacaaaagaaattattgatgcattgaaacaaaaatttccagaaataaagggaccaattaaagaagatatttgctatgcaacaaccaataggcaatcagcagttaaaaaaattgctccaaattgtgagatgttttttgttttaggaagtagaaattcatcaaattcagcaagattggttgaagtggcaaaaaaatctggatgtgaaaattcggaattaattttttatggcaaaaaagctccaatagataaaataaaaaattgtaagactattggtctttcatctggtgcttcagcacctgaagaattagtgcaaaattttatttcagaaataaaagaaagtatgaatgtttcaattgaggaaattgttactgcaaacgaaaaggtagtttttaaattgccaaaagaagtgagttaaa

SEQ ID NO: 211500 - DNA, 283 bp, Unknown
  Bacterial polypeptide expressing nucleotide sequence isolated from the Sargasso Sea
atgaaaaataaagaattaaaaatactattatctgctccacgcggattttgtgcaggtgttgaaagggcaattgaaattgttgaaaaatcaattcaaaaatttggtgctccagtttatgttcgacatgaaattgttcataacaagcacgtagttgatgatctaaaaaataaaggagctatatttgttgaggagcttgaagaaataaatgacaaaaccagacctgttattttttctgctcacggagtaccaaaaaaaataccattagatgctaaaaactataaaa

SEQ ID NO: 211501 - DNA, 400 bp, Unknown
  Bacterial polypeptide expressing nucleotide sequence isolated from the Sargasso Sea
aaacgttttaagagaacgttttcctgatattcacgaaccaaaaaaagatgatatatgctatgcaaccacaaatagacaagcagctgtgaaaaaaattgcaaaagattgtgataatctttttgtaattggtagtagaaattcatctaactcagttagattggtggaagtagctaaaaataatggatgtgaaaatgctgaattaattcattcggaaagcacttttccactagaaaaaatatctaaatgcaaaacaataggtatttcatctggtgcctcggctcctgaagtattagttaatgaattcatagaaaatattaaaaaaaaatttactgtagaaatagaggaagttgaaatagtaaaagaggatgtaacatttaaaattccaggaaaattaaattaa

SEQ ID NO: 211502 - DNA, 727 bp, Unknown
  Bacterial polypeptide expressing nucleotide sequence isolated from the Sargasso Sea
tatggtaaataatctctatgttgtaactccaagaggattttgtgcaggtgtcgaaatggcaataaaagcactaacttggatgcttaaaatttatgatgaacctgtttattgctatcacgaaattgtacataatgactggattgttcaaaagttcaaggacaaaaatgttatattcattgaggatccaaaagatctaccgaaaggttctattgtcatgctttcggctcatggaactgcaccattgattgagatggaattcaaaaatatttcaatgaccagtgtcaattctgtctgtcctcttgttacaaaagttcatcatgaagcaaagagatttagtgaagatggaaagaagataatctatgtaggtcataagaatcacgatgaggctataggagcactgggtgttgcaccagataatatggtattggtagagtctgtcgaagatattgatcaaactaatttacacaacgacaaggttgcattgcttgctcaaactacacttgcaatgtctgaatgggaaccaatattaaataaagcaaaaagtgagtaccaaaatattgaattaccaagaaaaagtgatttatgttatgcgactactaatagacaaaaagcactaataaatatttcaaacaaagttgataaagtactggtagttggatctagtacctcaagtaatacgaatgcactagtaactactattaataatttaggaaaagaagctcataga

SEQ ID NO: 211503 - DNA, 506 bp, Unknown
  Bacterial polypeptide expressing nucleotide sequence isolated from the Sargasso Sea
gatggacactcaagcttttagaagatctcttcatcattctgatagatacaatagaaggggtttcgattctccaacaaaaagagctcaagcgttagaagaagcttaccaaagtgatttgataagttctattagagataatgattttacttacaccaaaggcagactaaatataaagttggcccaagcttttggtttctgttggggagttgaaagagctgttgcaatggcttatgaaactagaagacattacccaaatgagaatatttggataacaaacgaaataattcataatccctcagtgaatgatcatttaagaaaaatgaatgtaaaattcatctcagctaaaaatggaattaaagatttttctttagtttctaatggggatgttgttatacttcctgcttttggagctactgtacaagaaatgaaactcttgcatgagaaaggttgtcatattattgatacaacttgtccatgggtttcaaaagtttggcatacagttgaaa

SEQ ID NO: 211504 - DNA, 652 bp, Unknown
  Bacterial polypeptide expressing nucleotide sequence isolated from the Sargasso Sea
gatgcaacttgtcctcttgtgagtaaaatacataaagaggttgaacaatttgataaaaaaaatctgccagtaatattaattggtcatagaaatcatccggaagttatagggacaatggggcaaacaaataggcgaatacatttagtagaaaataaaaatgatgttgcaaatttacaaattgataaaaatgagaagattgcatatgtaactcaaactacattatctattgatgatactaaagaaatagtgcaggcaattaaatcaaaatatttaaatgtaattgaaccaaaaaaaaatgacatatgttatgcaacaacaaataggcaggaagctgtaaaaaaaattgctggtcactgtgattattttttagttattggagcaagtaattcttctaattcattaaggcttgttgaagttgcaaaaaactatggttcaaaaaaagcaattttagttgaagatgttgactcattaaatttaaacatttttcatgattccaaaaatattggaattactgcaagtgcatcttcaccagaaattctagtaaaaagattattagataaattaaaagataattttaaaataaaattaaatgaagaaaattaccataaggaaaatatatatttcaaagttccacaaagtttaaaatattaag

SEQ ID NO: 211505 - DNA, 523 bp, Unknown
  Bacterial polypeptide expressing nucleotide sequence isolated from the Sargasso Sea
cttcctaaaggatcaattaaacttattgagactgttgacgaaatcaaagatttgaaattttcaaaaccattggcttatgtaactcaaacaacactgtcagtagatgatacaaaagaaattattgaaggtcttaaagaaaaatttccggagataaaggggccaattaaggaggatatttgttatgcaacaacaaataggcaagctgcagtaaaaaaaattgctcctaattgtgaaatgttttttgttataggtagcaggaattcttctaattctgctagattagtagaagttgcaaagaaatctggatgcaaggattctgagcttattttttatggcaaaaaagctccattagaaaaaatcaaaaactgtaagacaattggattatcctctggagcttcagcgccagaagaattagttcaaaattttattttagaaataaaaaatgatatgaatgtttctattgaagaggttgtaactgctaatgaaaaagtagttttcaaattaccaaaagaattaaattaaa

SEQ ID NO: 211506 - DNA, 653 bp, Unknown
  Bacterial polypeptide expressing nucleotide sequence isolated from the Sargasso Sea
cccattagtaacaaaagtccatagggaggcggagaggcataacaaaaatggttataagataatacttataggccacaaagatcatcctgaggtgataggaacaatgggtcaaatttcaaaagaaaatattactctaatagaaactgcggaagatgctcaaaaaattgagattgatggcccggttgcttacgtcacccaaacaactttatcaatagacgatacaaaagatattatagatattttagaaaaaaaatttccagatattaaagcgccaattaaagaagatatatgttatgccactacaaatagacaaaatgcagttagggagattgcagattcctgtgacatgttttttgttattggtagtgataattcttcaaactcaaaaagattggttgaagttgcaaaaaaagctggatgtaaaaatgctgagctagttgattttaaaaaggagttgcctataaaagaaataatttcatgtaataaaataggattaacatctggagcctccgctcccgaaaaactagttcagagcttcattttagaaattaaaaaacatgcgcgagtttcaatagaagaacatataagttcagtagaaaatgtaatttttaaacttccgtcttctttacaagagcaaaattctaaagaataac

SEQ ID NO: 211507 - DNA, 358 bp, Unknown
  Bacterial polypeptide expressing nucleotide sequence isolated from the Sargasso Sea
aatgaaacaaaaaattaaaatcttattagcagcaccgagaggtttttgtgctggggtagatagggcaatagaaatagtaaaaaaaactcttaataaatatggaagccctgtttatgtcagacatgaaattgtacataacaaaaatgttgtggaagatcttaaaaatttaggagcaatatttgtggaagaaatttctgaaattaaagataaatcgaggccagttattttttcagctcatggagtccctaaggaagttcctgaagaggcaaatcttaaaaagattttctatattgatgctacatgtcctcttgtttcaaaagtacatagagaaacagagcaattacataaaagaggtttt

SEQ ID NO: 211508 - DNA, 397 bp, Unknown
  Bacterial polypeptide expressing nucleotide sequence isolated from the Sargasso Sea
ttacgtaataaatttccaaatattgaatcatctccgaaggaagatatatgttacgcaacttcgaataggcaaaatgctatcaaggagtatgcaaataagtgtgatgcatttattgtggttgggtctaagaattcatctaattccaatagacttgttgaagtagctaaaaatgcaggatgtttgaattcatatctattagaaaatgctgaaagcttgaatattagcaattattcctcatacaacactattggaatatcttcaggcgcttctgtgccagaagttctggtagaaaatgtaatatcaaaatttcaagaaaattattcattagatattgaggatgtttctcttggtgaggaaaatgttcaatttaaacttcctaaggaagtcagaaattaat

SEQ ID NO: 211509 - DNA, 182 bp, Unknown
  Bacterial polypeptide expressing nucleotide sequence isolated from the Sargasso Sea
aatgaaaaataaagaattaaaaatcttgttatctgcaccacgtggattttgtgcaggtgttgaaagggcaattgaaattgttgaaaaatcaattcaaaaatttggttctccagtctatgttagacatgaaatagttcataataaatatgtagttgatgatctaaaaaataaaggagctatat

SEQ ID NO: 211510 - DNA, 289 bp, Unknown
  Bacterial polypeptide expressing nucleotide sequence isolated from the Sargasso Sea
gatgataaaaaataaaaatttaaaaatcttattagcttctccaagaggtttttgtgctggtgttgaccgtgcaattgaaattgtaaaaaaaagtattgataaatatggatcgcctatttatgtgagacatgaaattgtacacaacaaacatgtagtggatagcttaaaaaaaattggagctatatttgtagaaagcttagaagaaataaatgataaaactagaccagttattttttctgcccatggagttccaaaatcagttccaaaagaagcttctagtcttaacatg

SEQ ID NO: 211511 - DNA, 214 bp, Unknown
  Bacterial polypeptide expressing nucleotide sequence isolated from the Sargasso Sea
atgaaagtgaaaaataatcatctaaaaattcttttagcagctcccagaggtttttgtgcgggtgttgatagagcaattgaaattgtaaagaaaagtatagaaaaatatggtgctcctgtatatgtgagacatgaaattgttcacaacaaacatgtggtagatggcttaaaaaaaattggtgcaatatttgttgaagagattgatggaaattgaa

SEQ ID NO: 211512 - DNA, 383 bp, Unknown
  Bacterial polypeptide expressing nucleotide sequence isolated from the Sargasso Sea
aatgaaaaacaaacttaaaatttttttagcgtcaccaagaggattctgtgctggagttgatagagctatagaaatagttaaaaaaactttagataaatatggttcgccagtatatgtaagacatgaaatagttcacaataaaaatgttgttgaatcgctaaaaaaattaggagctatttttgtagaagaaatttcagaaatttcggactcatcaaggcctgtcatattttcggcccatggtgttcctaaaaaagttcccgaagaagcaaagcttaagaaaattttttatgttgacgctacttgtccattggtttccaaagtgcatcgtgaaactgaacaattatataaaaaaggctttgatattgttttgataggacacagaa

SEQ ID NO: 211513 - DNA, 477 bp, Unknown
  Bacterial polypeptide expressing nucleotide sequence isolated from the Sargasso Sea
aaaatttaaatttttcaaaaccattggcatatgtaacgcaaacaactttgtctgtagatgatactaaagaaataatagatgctttgaaaattaagtttcctgaaattaagggtccagttaaagaggatatttgctatgcaacaactaataggcaggcagcagtaaagaaaattgctcctaattgcgaaatgttttttataattggtagtagaaactcctcaaattctgctagattagttgaggttgcaaaaaagtcaggttgtaagaattccgagctaattttttatggaaaaaatgcacccctagacaaaattaaaagttgcaaaactatcggtctatcatctggagcatctgctcctgaggagttggttcaaaattttatttctgaaattaaaaatgacatggatgtatcaattgaagaagtagtaacagctaatgaaaaagttgtatttaaattacccaaagaattaaattaaa

SEQ ID NO: 211514 - DNA, 361 bp, Unknown
  Bacterial polypeptide expressing nucleotide sequence isolated from the Sargasso Sea
aatgaaggaagatatttgttacgccacaacgaataggcaattggctgtaaaaaatattgcaaaaaaatgtgatttattttttgtaattggtagtagaaattcatctaattcagttagattagtagaggttgcaaaaaaatctggctgctctaactcactattaattcattcacaaagtgaaataccattcgatttaattaaagactcaaatataattggaatttcctctggggcttccgcaccagaaattttagtcaataattttatagatgagctaaaaaataaatttacagtcagtatagatgaagtagaaataattaaagaaaatgttgttttcaaagcaccgaaaaaattaaactaa

SEQ ID NO: 211515 - DNA, 763 bp, Unknown
  Bacterial polypeptide expressing nucleotide sequence isolated from the Sargasso Sea
tatggtaaataatctatatgttgtaactccaagaggtttttgtgctggtgttgagatggctataaaagctttaacgtggatgttgaaaatttatgatgaaactatctattgttatcatgaaattgttcataatgattggattgttaaaaagttcaaagaaaataacgttaaatttgtcgataatcctcatgaattacctgataatgcaatagttatgttatcagcacatggaacagctcctaatatagaaaaagaatttaaatcaatatccttaactaatgtaaattcagtttgcccattagtaacaaaagtacatcatgaggctaaaaggtttagtgaagaggggcatgaaataatttatgtaggacataaagatcatgacgaagcagttggagctatgggagtagctcctgaatcaatgaacttaattgaaaatgttgatgaaatagaagaaatagatttgaaatcagacaatgttgctttattagctcaaacaactttgtcaatgtcagattgggaaccaataatgttaaaagctaaagataaatacccaaatttaaaaatgccaagaaaaaatgatttatgttatgcaactacaaatagacaagaagcgataattaatattgctggagaagtagatttagttattgtagttggttcttcaacatcaagtaataccaacgctctcgtaacttcaataaataacattgggaaagaggcatacagagttgaaacaactagcgatttaaaaatattaatttag

SEQ ID NO: 211516 - DNA, 514 bp, Unknown
  Bacterial polypeptide expressing nucleotide sequence isolated from the Sargasso Sea
tgaaatagacttaatagaaaatattgaagatgttaaaaattataaaaataaaaaagataaattagcttttgttactcaaactactctttcagtagatgatactaaagaaataatatctgctttaaaaaataaatttccagaaataagagaaccaaaaaaagaggatatttgttatgccacgactaacaggcaatctgctgtaaaaaaaattgcaaataaatgtgacatgttttttgttattggaagtaggaactcttcaaactctatgagattagttgaggttgctaaaaactcagggtgcttaaattctagattgattcattcagatagctctattccttttggggaaatagaaaaatttaagactattggtatatcatctggagcatctgctcccgaaatattggtcgataattttattaaaagtttaaaaaaacaatttacagtagtaatagaagaagtagaaatagtgaaagaaaatataacatttaaaattccgggaaaattaaactag

SEQ ID NO: 211517 - DNA, 382 bp, Unknown
  Bacterial polypeptide expressing nucleotide sequence isolated from the Sargasso Sea
atgaaaaacaaaattaaaatttacttagctgccccaagaggtttttgtgcaggcgtagatagagctatagagatcgtaaaaaagacactagacaagtatggttctccagtttacgtaagacatgaaatagttcacaataaaaatgtagttgagtccttaaaaaatttaggtgctatttttgttgaggagatatcagaaataaaagatacctccagaccagttattttttcagcacatggtgtgcctaaaaaaatacctgaagaggcaaaactaaaaaaaatcttttatgttgatgctacttgtccgcttgtttcaaaagtacaccgtgaaacagagcaactctttaaaagaggttttgatatagttttaattggtcataaaa

SEQ ID NO: 211518 - DNA, 346 bp, Unknown
  Bacterial polypeptide expressing nucleotide sequence isolated from the Sargasso Sea
ttatgccacccaaaacaggcaggatgcagtgaaacaacttgcactcgaaacagattacattattgttgttggctcaaaagcaagttcaaattcaaatcgcctaaaggagcttgcaaataagtgtggcgtcaactcggtcctaatagatgaatttagtgatcttgacttaaatgaattaaaagactgtaagaatattggcttaactgctggagcatctgcaccagaatcaaaagttcaagaaataatctcaaatcttagtattttcttagatgcagagatagaagagaagggtggagtcaaagagaatatttcttttaaattacctccagaattaagagcaagttaa

SEQ ID NO: 211519 - DNA, 460 bp, Unknown
  Bacterial polypeptide expressing nucleotide sequence isolated from the Sargasso Sea
aataaattagcttatattacacaaactacattatcgatagatgacaccagagaaattataaatgttttaaaaaaaaaatttccagaaattaatgaaccaaaaaaagaagatatttgttatgctactacaaatagacaattagctgtcaaaaagattgcaaaaaactgtgatatgttttttgttataggaagtagaaattcatctaattcagttaggttggtagaagtggcaaaaaataatggatgtgataaatcagaactaattcattctgaaagtaaagttccaatagataaaattgctaattgcaagactataggaatttcttctggagcttcagctccagaaattttggtagaggaatttattcaagaattaaaaaaagaatttattataaagatagaagaaatagagataataaaagaagatataacgtttaaaattcctggaaagttaaactaat

SEQ ID NO: 211520 - DNA, 529 bp, Unknown
  Bacterial polypeptide expressing nucleotide sequence isolated from the Sargasso Sea
atgaaaaaagaacttaaaatttatttagcttctcctagaggtttttgtgcaggggtaaaaagagctattgaaattgttgagaaagcaattgataagttcggttctcctgtatatgtaagacatgaaattgtacataacaaacaagttgtagaggaattaaaaaaaaagggagcaatttttgttgatgaactatctgatataaaagactcaagtagacctgtaattttttctgctcatggtgttccaaaatcagttcctgaggaagctaattcaaaaaatttatcttttgtagatgctacatgtcctctagtttctaaggtgcatagagagtcagaacaattaaacaaaaaagggtataaaatttttttaattggtcataaaaatcatcctgaagtggttggaactatgggtcaacttccagcagggtcaattaaattaattgaaactaaaaatgatgttaaaaatttaaaaattggtgattttaataaacctttagcttatattactcaaaacaacgctttccattgat

SEQ ID NO: 211521 - DNA, 827 bp, Unknown
  Bacterial polypeptide expressing nucleotide sequence isolated from the Sargasso Sea
tatggtaaataagctctatattgtaactccaagagggttttgtgctggtgtagaaatggcaataaaagccttgacctggatgctaaaaatatacgacgaaccagtgtattgttatcacgaaattgtacataacgactggatcgtagaaaaatttaagaaaaaaaatgtaatatttattgaagatactgatgaattgcctaaagattcaatcgttatgttatctgcgcacggtactgcacctgatattgaaaaagagtttaaaaacatatcattaacaagcgtcaattctgtgtgtccattagtaactaaagttcaccatgaagctaagaaatttagtgaaagtggaaaacaaataatatatgtaggccataaaaatcatgatgaagcaattggagcattgggagtagcacctgaaaatatgcatttagtcgagtctgttgatgacattaaaaatattaattttcaggataaagaagttgcattacttgctcaaactactctagccatgtctgaatgggagccaatattaaataaagtaaaagaagactttgataatttagatcttccaagaaaaagcgatctttgttatgcaactacaaatcgtcaaaaagctttaattaacatttcaagtaatgttgatgttgtacttgttgtagggtcaagcacttcaagtaatactaaagcattagtgacaactataaaaaacttaggaaaagaagcctacagaatagaaactttaaatgatttggaagatataaatttagaaagtaaagatgtagccattactgcaggcgcatcagcacccgaacatattgtaaatgagattt

SEQ ID NO: 211522 - DNA, 718 bp, Unknown
  Bacterial polypeptide expressing nucleotide sequence isolated from the Sargasso Sea
gatgctggagcaaaagtggttaattccttggatgaagttccacatgataagccattattatttcgtgcccatgggacctctcctaaagtttgggaagatgcaaaaaaaagaaacctcaagttaattgatgctacgtgccctcttgtcactgagatacatcaagatatcaagaaactaaacgatgaaggtagaaaaacaattattattggtgaccacggccatgatgaggttgttgcaatagctgcacaagttgacaatcccatgattatttcaaatgtagaagaggcaaaagcacttaggaaaatgaaaaaagctggtgttgtaagtcagtcaactcaaatgttggaaaatgttcaggaaattatgaacgttctcatggaaaaagtttttgacttaagatttattaacacaatttgttttccaacaagaagaaatcatcaacaaataaaagatttggccttgaatagtgatgttatgataattattggctcatataccagtgccaattcaaaaagacttactcaactttcacttgagaggaataagaaatcattccaggtcacatcagctgatgagttagatcctatttggtttaaagattgtgacaatgttggtatatctgcgggtgcgtcaacgccagatgaaacaattgaagaggtgattaacaaaattaaggagatcgggcaagtaacagaaaaggaagaaatatatgagtaaa

SEQ ID NO: 211523 - DNA, 292 bp, Unknown
  Bacterial polypeptide expressing nucleotide sequence isolated from the Sargasso Sea
atgaaaaataaagaattaaaaatattactatctgcacctcgtggattttgtgctggggtagaaagagctattgaaatagtagaaaaatctatacaaaaatttggagctccagtttatgttcgtcatgaaatagttcataataaatatgtcgtagatgatttaaaaaataaaggagcaatatttgttgaagagctagaggagataaaggataaatcaagacccgtaattttttcagcacatggtgttccaaaaaaaatccctgaagatgcaaaaaattataaaatgacttatg

SEQ ID NO: 211524 - DNA, 292 bp, Unknown
  Bacterial polypeptide expressing nucleotide sequence isolated from the Sargasso Sea
aatgattaacaaaaatttaaaaatttatttagcttcaccaaggggattttgtgcaggagttgatagagcaattgagattgtaaaaaagagtatagataaatttggtgctcctgtttatgtaagacacgaaattgtacataacaaacatgttgtagaaagtttaaaaaaaataggagcaatatttgttgaagaattaaatgagattaaagacaagtcgagaccagttattttctcagcgcatggggttccaaaatctgttccagaggaagcttctaatttaaatatgatgttt

SEQ ID NO: 211525 - DNA, 386 bp, Unknown
  Bacterial polypeptide expressing nucleotide sequence isolated from the Sargasso Sea
aagatttccaaatatatatgaaccaaaaaaagaggatatttgttatgcaacaacaaatagacaagaagcagtaaaaaaaatagcacctaaatgtgaaatgttttttgttattggtagtcgtaactcctcaaattcagtgaggctagtggaggttgccaaaaaaaatggctcaaaatctgctgaattgatccattctgaaagcataattccttttgataaaattaatgagtgcaaaacaatcggaatttcctctggagcgtctgcacctgaaatattagttagcgaatttatcgaagatttaaaaaaacaatttactattgatatagaagagatagaaatcaccaaagaaaatataaccttcaaagttcctggtaaattaaattaat

SEQ ID NO: 211526 - DNA, 337 bp, Unknown
  Bacterial polypeptide expressing nucleotide sequence isolated from the Sargasso Sea
tatggtaaataatctctatatagtaactccaagaggattttgtgcaggtgtagaaatggcaataaaagctctaacgtggatgcttaaaatttatgatgaaccagtttattgctatcacgaaattgtacataatgactggattgttcaaaggttcaaagataaaaatgttattttcattgaggatccaatagatctaccaaaagattctattgtgatgctttcggctcatggaacagcaccaatggtcgagatggaatttcaaaatacttcaatgacaagtgtccattctgtatgtccacttgttacaaaagttcatcatgaagcaaagagattttag

SEQ ID NO: 211527 - DNA, 897 bp, Unknown
  Bacterial polypeptide expressing nucleotide sequence isolated from the Sargasso Sea
tgtttattaaaaatctatgatgaaacaatctattgctatcacgaaatagtacataataaatggattgtgaaagagtttgaaaaaaataatgtagtttttgtagaagacactaaggaaatccctgaaggtgcaattgttatgttatctgcacatggaactgcgcctgaaattgaacttcggtttaataatatatcttcactaactattaattctgtatgtccattagttacaaaagttcatcatgaagccaaaaaatttagtaaagaaaacacccaaataatttatgtaggtcataaaaatcatgatgaggcaaaaggtgcaattggtgtttcacctgacaacatgcatttagttgagaatattgaagatgttaaagcattagaaattggaaatgatgttgctttactcgcacaaactacattagctttatcggagtgggaaccaattatgaaatattctcaagaaagatttaatagcttaaaaatgcctagaaaaagcgacttatgttatgctacaaccaatagacaggaagctatattagaaattcttccagaagtaaatacagttcttgttgtaggttctgaaaattcaagtaacacaaaagctctagttagtatggtgaacaatcagggtgttgaggcccatcgtgtagacaatgttgatgacatagaaactctaaatttgaatggaaatattgcaattaccgcgggtgcgtctgcaccagatcatcttgtttatgaaattatagataaaataaatcctgataatctagagacatttagattaaaagaagaagacgaatactttccactacctcagcaacttagatccaatattaaaaatatttcagattttttgagtattttgaatatttcagaaactaatcctaagtcagaa

SEQ ID NO: 211528 - DNA, 497 bp, Unknown
  Bacterial polypeptide expressing nucleotide sequence isolated from the Sargasso Sea
gaaaagcaagcaaaagaaaattaaattaaaagatacaaaaaaaatagcttatgttactcaaacgactttatctttaaatgataccagtgaaattattaaaattttaaaaaataaatatcctaatattataggacctgatttggatgatatatgctatgctactcaaaatagacaagtagctgtctctaagttagctgatttgtgtgatctagtttttgtagtaggcggagaaaactcatctaacacaaaaagattagcagaaatagtaagaaaaaagaatatttctgtgtttagaatttctggaaaagaggatattaaccaaagttggtttaatgaaattaatactcttggtattacttcaggagcatcatctcctgaggttttaatagaagagatattggagtttttaagggttatttatgatgaagtggaaattaaagatttagaaggtataaaagagaatataacttttaaaccactaactaacttttcatgat

SEQ ID NO: 211529 - DNA, 257 bp, Unknown
  Bacterial polypeptide expressing nucleotide sequence isolated from the Sargasso Sea
tatgcctaataacaaaatattaaatgtttacttaattggacctagaggattttgcgctggggttgatagagctatattaatggttgaagaagccctaaaaaagtatggtaaaccagtctatgttagacatgaaatagttcacaacaaatatgttgttgaagatctaaagacaaaaggtgcgatttttgttgatgaactcaaagaaattaaagataaaaatagacctgttatattttcagcacatggagtacctaaaa

SEQ ID NO: 211530 - DNA, 520 bp, Unknown
  Bacterial polypeptide expressing nucleotide sequence isolated from the Sargasso Sea
taaatccattgatttaatagaaactcttgatgacgttaaaaattttacaaaaaaaaatgataaaaaagttgcttatgtaacacaaacaactctttctgttgatgatacaaaaaatatagttgaagctttaaaaataaaatttccagaaataaaagaaccagttaaagaagatatttgttatgcaacaacaaatcgtcaggctgctgtaaaaaacatagcaaaaaattgtgagatgttttttgttattggtagtagaaattcatcaaactcacaaagattagtggaagtggcaaaacaatctgggtgtgatagatcagaactaattcattcagaaagtaacttgccaatagaaaaaattattaattgcaaaactattggaatttcatctggtgcttctgctccagaggtgttagtagaaaattttattaataaaataaaagaaaaaattaatcttgaaatagaagaagttgaaattattaaagaaaatataatatttaaaactccaggaaaattaaattaa

SEQ ID NO: 211531 - DNA, 327 bp, Unknown
  Bacterial polypeptide expressing nucleotide sequence isolated from the Sargasso Sea
accagtaattttttccgcccatggtgtaccaaaaaaaatacctgaagatgcaaaaaattataaaatgacctatgttgatgctacatgtccacttgtttctaaagttcatagagaagcagaaaatcttaataaagctggttaccatataattttaattggtcatgaaaatcatcctgaggtaatcggaactatgggtcaattagacgaaggttctatagatctaatccaaaatgaggaagaggctaccaactatcaaaaaataactaataaaaatctagcatatattactcagactaccttgtcagttgatgatacaaaagaaataat

SEQ ID NO: 211532 - DNA, 695 bp, Unknown
  Bacterial polypeptide expressing nucleotide sequence isolated from the Sargasso Sea
tatggtaaataatctctatgtagtaacacctagaggattttgtgcaggtgtcgaaatggcaataaaagcactaacgtggatgcttaaaatttatgatgaacctgtttattgctatcacgaaattgtacataatgactggattgttcaaaagttcaaggaaaaaaatgttatattcattgaggatccaaaagatctaccgaaagattctattgtcatgctttcggctcatggaactgcaccattgattgagatggaattcaaaaatatttcaatgaccagtgtcaattctgtctgtcctcttgttacaaaagttcatcatgaagcaaagagatttagtgaagatggaaaaaagattatttatgtaggtcataagaatcacgatgaggctataggagcactgggtgttgcaccagataatatggtattggtagagtctgtcgaagatattgatcaaactaatttacacaacgacaaggttgcattgcttgcgcaaactacacttgcaatgtctgaatgggaaccaatattaaataaagcaaaaagtgagtaccaaaatattgaattaccaagaaaaagtgatttatgttatgcgactactaatagacaaaaagcactaataaatatttcaaacaaagttgataaagtactggtagttggatctagtacttcaagtaatacgaatgcactagtaacta

SEQ ID NO: 211533 - DNA, 274 bp, Unknown
  Bacterial polypeptide expressing nucleotide sequence isolated from the Sargasso Sea
aatgaaaaataaagaaattaaaattttattagcagccccaagaggtttttgtgcgggtgtagatcgtgcaattgaaatagtaaaaaaaagcatagagaaatatggtgcaccagtttatgtcagacatgagatagtgcataacaaacacgttgttgaaagtttaaagaaaattggtgcgatttttgtagaagagttaaatgagatagaagataaaacaagaccagttattttttcagctcatggggttccaaaagtagttcctgcagaagcaaaa

SEQ ID NO: 211534 - DNA, 508 bp, Unknown
  Bacterial polypeptide expressing nucleotide sequence isolated from the Sargasso Sea
atgactaaaaaacttaatatatttcttgcaggacctcgaggtttttgtgcgggagtagatagggcgattgaaatggttaagggtgctttaaaaaaatatggagctcccgtgtatgttcgtcatgaaatagttcataataaatttgttgttgaaaatctcaaatcacagggagctatttttgtagaagaattaaatgagattgaagataaaagtaggcctgttatcttttctgcacatggtgttccaaaagcagtacccgaggaagctttaagtttaaatttaatatattatgatgctacatgtcctcttgttagcaaaattcataaggaggtagaaaattttgacaaaaaaaatctccccgtaattttaattggtcataggaatcatcctgaagttataggaactatggggcaaactaataaagaaatttatttggtagaaaaagttgaagatgttaaaaagttaccctttgaccagaatgataaaattgcgtatgtaacccagacaa

SEQ ID NO: 211535 - DNA, 156 bp, Unknown
  Bacterial polypeptide expressing nucleotide sequence isolated from the Sargasso Sea
actccatatttcataaaccactacgatcagatttagaacttaaaaataattttttacctagtggaaatattaatgttggaattacctcaggcgcatcaacccctgataaagttgttgcggatgttattgaaaagttaattgatatcgcttcataaa

SEQ ID NO: 211536 - DNA, 601 bp, Unknown
  Bacterial polypeptide expressing nucleotide sequence isolated from the Sargasso Sea
tattttatggtaaataatctatatgttgtaactccaagaggtttttgtgctggtgttgagatggctattaaagctttaacgtggatgttgaaaatttatgatgaaactatctattgttatcatgaaattgttcataatgattggattgttaaaaagttcaaagaaaataacgttaaatttgtcgataatcctcatgaattacctgataatgcaatagttatgttatcagcacatggaacagctcctaatatagaaaaagaatttaaatcaatatccttaactaatgtaaattcagtttgcccattagtaacaaaagtgcatcatgaggctaaaaggtttagtgaagaggggcatgaaataatttatgtaggacataaagatcatgacgaagcagttggagctatgggagttgctcctgaatcaatgaacttaattgaaagtgttgatgaaatagaaaaaatagatttgaaatcagacaatgttgctttattagctcaaacaactttgtcaatgtcagattgggaaccaataatgttaaaagctaaagataaatacccaaatttaaaaaagccaagaaaaaatgatttatgttatgcaacta

SEQ ID NO: 211537 - DNA, 270 bp, Unknown
  Bacterial polypeptide expressing nucleotide sequence isolated from the Sargasso Sea
taagagatgcaccagaaggttcgagggtaattttctctgcacatgggattccaataagcgtaataaatgaagcgaaaaatagagaaatgccatttatagacgcaacctgccccttagttataaaagtacataacgaagcaaaaagacttcacaaagatggagcgcacatctttcttattggtcatgagggtcatccagaagttataggaacaactgggtcaaatcccgcaagatgccattacattgatacaaaaaaaagaagatattaaa

SEQ ID NO: 211538 - DNA, 300 bp, Unknown
  Bacterial polypeptide expressing nucleotide sequence isolated from the Sargasso Sea
aatgaaaaataaacagataaaaatttatttagcttcaccaagaggtttttgtgctggtgtggacagagcaatagaaatagttaaaaaaagtttaaaaaagtatggatcaccagtttatgttagacatgaaattgttcataacaaacatgttgttgaaagtttaaagaaaataggagctatatttgttgaagaattagatgaaataaaggataagtctagacctgttattttttctgcacacggtgtgccaaaatccatacctgaacaagcaaatactttaaagatggattatatagacgc

SEQ ID NO: 211539 - DNA, 550 bp, Unknown
  Bacterial polypeptide expressing nucleotide sequence isolated from the Sargasso Sea
attggaactattgggtcaaattgatagtaaaatttatcttatagaaaaagaagaggatgtagaaaatttagaaattccctctaatcaaaaaattgcttatgttactcaaactactctttctgttgatgatacaaaatcaatcataaataaaattaaatctaaatataaaaaaatattagaaccaaagaaaaatgatatttgttatgccactacaaatagacagtatgctgtaaaagaaattgcagaaaaatgtgatttatttttagttattggagctaataattcatcaaattctttacgcttagttgaagtagccaaacaatatggagctcaaaaaagtaagcttatagaaaacatagataattttaattttttagaaattaacgatataaaagttctaggaataactgcgagtgcttcagctccagaagttttagttcaaagttttattaaaaaattaaaacaaaaatttgatgttatattacatgaaccagattataggaaagaagatgttaattttaaaattccacagaagttaaaagcacattaa

SEQ ID NO: 211540 - DNA, 802 bp, Unknown
  Bacterial polypeptide expressing nucleotide sequence isolated from the Sargasso Sea
tggttgttaaaaatctatgatgaaacaatctattgctatcacgaaatagtacacaataaatggatagtaaaagagttcgaaaaaaataatgtagtttttgtagaagaccctgaagaaatcccagacggtgcaattgttatgttatccgcacacggaactgcacctgaaattgaacttcagtttaataatgtatcttccttaactattaattctgtatgtccattagttacaaaagttcatcatgaagctaaaaaatttactaaagaaaatacccaaattatttatgtgggtcataaaaatcatgatgaagcaaaaggtgcaattggtgtttcacctgacaacatgcatttagttgaaagtattgaagatgttaaatcattagaaattggagatgatgttgctctacttgcacaaactactttagctttatcagaatgggaaccaattatgaaatactctcaagataaatttaatggtttaaaaatgccaaggaaaagtgacttatgttatgcaactaccaatagacaggaagcaatattagaaattcttccagaagttaatacagttcttgttgtgggttcagaaaattcaagtaacacaaaagcactagttagtatggtgaataatcaaggtgttgatgcctatcgcgtagacaacgttaacgatatagaaaatctaaatctgaatggtaatattgcgattacggcaggggcgtctgcgccagatcatcttgtttacgaaattataaataaaataaatcctataaatttagagcaatttagattgaaagaagaagatgaat

SEQ ID NO: 211541 - DNA, 315 bp, Unknown
  Bacterial polypeptide expressing nucleotide sequence isolated from the Sargasso Sea
cagtaaagcaacttgcccttgaatcagattatattattgtggttggttcaaaaaatagctcgaactcaaacagactcaaagaacttgctgaaaaatgtggttgtaaatcaatcttaatagatgaattttcagatttagatcttgaggatttacaaaaattcgaaaatatagctattacagctggagcatctgctccagaatcaagagtaatggagattgcaaaatcacttgaaaattattttgatgcaaggcttactgaggatggagaagatactgagaatgtatatttcaaaatgccacctggattaagataga

SEQ ID NO: 211542 - DNA, 827 bp, Unknown
  Bacterial polypeptide expressing nucleotide sequence isolated from the Sargasso Sea
tatggtaaataagctctatgttgtaactccaagagggttttgtgctggagtagaaatggcaataaaagccttgacctggatgctaaaaatatacgacgaacctgtatattgttatcacgaaattgtacacaatgattggatcgtagagaaattcaagaaaaaaaatgtaatatttattgaagatactgatgagttacctaaagattcaatcgtaatgttatctgcgcacggtactgcacctgatattgaaaaagaatttaaaaatatatcattaacaagcgttaattctgtatgtccattagtaactaaagttcaccatgaagctaagaaatttagtgaaaatggaaaacagataatatatgtaggccataaaaatcatgatgaagcaattggagcattgggagtagcacctgaacatatgcatttagtcgagtctgttgatgacattaaaaatattaattttcaggataaagaagttgcattacttgctcaaactactctagccatgtctgaatgggagccaatattaaataaagtaaaagaagactttgataatttagatcttccaagaaaaagcgatctttgttacgcaactacaaatcgtcaaaaagctttaattaacatttcaagtaatgtcgatgttgtacttgttgtagggtcaagcacttcaagtaatactaaagcattagtgacaacaataaaaaacttaggaaaagaagcctacagaatagagactttaaatgatttagaagatataaatttagaaaataaagatgtagccattactgccggcgcatccgcacccgaacatattgtaaatgagatat

SEQ ID NO: 211543 - DNA, 478 bp, Unknown
  Bacterial polypeptide expressing nucleotide sequence isolated from the Sargasso Sea
tatgaaaataaaggataacaaaaatttagcttttgttacacaaacaactctttctgtagatgatacaaaagaaataatatcagctttaaagaaaaaatttccaaaaattaaagaaccaaaaaaagaagatatttgttatgcaacaacgaataggcaagctgctgttaaaaaaattgcagaaaagtgtgatatgatttttattattggaagtagaaattcatctaactccttaagattggtagaagttgcaaaaaactctggatgtaaaaattcaagactaattcattcagaaagtacaattcctttaaatgaaattgaaaattataaaactatagggatttcatcgggggcttctgcgcctgaaatattggttaataattttataaataatttaaaaaaaaaatttacgatagcgatagaggaagtagaaatagttaaggaaaatataacatttaaaattccagggaaattaaactaa

SEQ ID NO: 211544 - DNA, 400 bp, Unknown
  Bacterial polypeptide expressing nucleotide sequence isolated from the Sargasso Sea
attggaaaagcgattcccaaaaatccaggggccaccaaaaaatgatatttcttttgctactcaaaatcgccagaatgctgtcaaagcattaagcaaaaaagttgacctggtgctggtagttggagcaccgaacagttcaaattcagtgcgcctgctggaagttgccatggcgactggagttaaggcacgcagaatcgagtcagaggaagaattgaatccggaatggtttgaaggaatagagagcattggagtcacagcaggagcatctgctcctgaagatatcttgcagggagttgtttctggactaaaaaaaatgttttcttcaagcaaattgaaggaccttaaaatagttcaggagaatgttacttttgctttgcctgcagtgttaagaaatgattga

SEQ ID NO: 211545 - DNA, 237 bp, Unknown
  Bacterial polypeptide expressing nucleotide sequence isolated from the Sargasso Sea
aatgaagactaaagttttattggcaaatccaagaggattttgcgctggagtagatcgagctattgatatagtcaatcaagctttaaaaaaatttggaccaccgatctatgttcgccatgaagttgttcataataaaactgtagtagatgaattaaagtcgaaaggtgtaatatttgtagatgaactcagcgaggtccctcaatcatctcatgtaatttttagtgctcatggagtatc

SEQ ID NO: 211546 - DNA, 298 bp, Unknown
  Bacterial polypeptide expressing nucleotide sequence isolated from the Sargasso Sea
gatgaacaaagagataaaactagctaatcccagaggcttttgtgctggcgttgatagagctatagatattgttaacaaggcattagatatttacggagcaccagtatatgtaaaacatgaggttgttcataataaagttgttgtaaatgatttaaaaaagaaaggggcaatttttgttgaaaacattgatgaaatacctgataactctcttgtaatatttagtgctcatggtgtttcaagtgaagttgaagaaactactaaatctagaaatttaaattattttgatgcgacttgtcct

SEQ ID NO: 211547 - DNA, 272 bp, Unknown
  Bacterial polypeptide expressing nucleotide sequence isolated from the Sargasso Sea
gaactctaatagacttaaagatattggttccgagtctggtgtaaacacacatttgatagagacagctgatgacatgtctttaagttggtttgaaaatgtcgattccgttggaataacctctggtgcatccacacctgacgaattagtcaaagaagtaattgatagaatttcaactttcacttcaatagagatagaaaaacaagcaggtaaagaagaaaatgttgtctttaaattgccgaaagaactattgaattatgaaatggcaaattaat

SEQ ID NO: 211548 - DNA, 160 bp, Unknown
  Bacterial polypeptide expressing nucleotide sequence isolated from the Sargasso Sea
gccggacctcgaggtttctgtgccggtgtcaacatggcaatcgaaacacttgaaacagcaattcgtctctacggaacacccatttacgtgtttcatgaaattgtacacaacaagcatgtggttgaacgctttgtgaaagagggtgcagtattccattgat

SEQ ID NO: 211549 - DNA, 637 bp, Unknown
  Bacterial polypeptide expressing nucleotide sequence isolated from the Sargasso Sea
ttagtaactaaggttcatcttgaggcgattaaattgcatagcagtggttatcatatacttttagtaggacatgatggacatccagaaattgagggtactagagggcaagttcctaaagaaagtataactttaattcaaaatctcaaagaagcaaaaaccttcagatcaaaagaaaaaaaactagcatggctaagtcaaactacattatcagttgatgatacttctgaaatagtaaaaactttaaccaaacgttttccaaatattataggaccaaagaaaggtgatatttgctatgcaactacaaacagacaaatggctgttaaggaaattgcttcaaatgttgaagtaatgctaattgtaggatcagaaaattcctccaattcacaaaggcttgtagaagttgcaaaaaatgaaggttgtgtaaattcatatttgatatctgatgtaaactttataaactggaatgaaataaacaacataaaaaatattggactatcttcgggcgcctcagcacctgagagtcttatagaagaaattcgtgctgaattttcaaaaagatataatgtaacagagatacagaacttggaaacaacagaagatatctactttaagctccctaaagcattagaaaattaaa

SEQ ID NO: 211550 - DNA, 481 bp, Unknown
  Bacterial polypeptide expressing nucleotide sequence isolated from the Sargasso Sea
tggactccctccatcctcaaggatcgcttacctgacccaaactactctctctcttgatgatactgccgacatcatcaaagtgctgcgtcgacgtttcccggaaattgagggtcctgccaaggatgacatctgttatgccacccaaaaccgacagaatgctgtcaagcagatttccaaagaagtagatctggtcctcgttgtcggagctgaaaacagctcgaataccttgagactcgtcgaagtcgcagaaagcctgggaacgcgggcaattcgtatccaatcttcctcagaactgcaacctgacttgttggacgaatgcaataaaatcggtatcaccgctggagcatcggctccggaagatatcgttcaggggattgttgacaaacttagaggatggaatcctggatgcagagttcgggagttgaaactgacagaagaacaagtcagctttggtcttccaccccagctaaaaacgccttaa

SEQ ID NO: 211551 - DNA, 481 bp, Unknown
  Bacterial polypeptide expressing nucleotide sequence isolated from the Sargasso Sea
aattatcaaaataaatctaaaaaaaaattagcttttgttactcaaacaactttatctgttgatgatacgaaagaaataatatcagctttaaaaaaaaaatttccagaaattaaagaaccaaaaaaagaagatatctgttacgcaactacaaataggcaagctgcagtaaaaaaaatagcaaaggaatgtgatatgttttttgttattgggagcagaaattcatctaactctttaagattggtagaagttgcaaaaaactctggatgtgaaaattcaagattaattcattctgaaagccaagtacctttagaggaaattgaaaaatacaaaactatcggaatatcttctggggcatctgcaccagaaatattggttgataattttatcaataatttaaaaaaacaatttacagtaattatagaagaggtagaaatagttaaagaaaatataacatttaaaattccaggaaaattaaactagt

SEQ ID NO: 211552 - DNA, 520 bp, Unknown
  Bacterial polypeptide expressing nucleotide sequence isolated from the Sargasso Sea
atgaaaaataaagaaatcaaaattttactatcagctcctcgtggtttctgtgcaggtgttgaaagagcaattgaaattgtagaaaaagccttaattaaatatggtgctccagtttatgttcgtcatgaaatagttcacaataaatttgtagtggacgacctaagaaaaaagggcgcaatatttgttgaagagttagaggaaataaaagataaatcaagacctgtgatcttttctgctcatggcgttcccaaaaaaattccagctgatgctgaaaaatacaaaatgacttatgttgatgccacatgtccactcgtttcgaaagttcatagagaagctgaaaatctttataagtccggctatcatttaatcttaattggtcatcaaaatcaccctgaagttgttggcacaatgggtcaattacctgagggatctattgatttaattcaaaatgaaaaagaggctaaaagttataattacaataaaaataaaaatttagcttttgttactcaaacaaacttta

SEQ ID NO: 211553 - DNA, 289 bp, Unknown
  Bacterial polypeptide expressing nucleotide sequence isolated from the Sargasso Sea
tatgaataaaaaaatagatatatatcttgcgggacctagaggtttttgtgctggggttgaaagagctatattgatggttaaagaagcaataaaaaaatatgggaagcctgtctacgttcggcatgaaattgttcataataaatatgtagttaatagcttaacaaaagaaggggctatttttattgaagaattggatgagattaaaaataaaaacaggccagtaattttttctgctcatggagttcctaagtctgtacccagagaagcaaaaaatttaaatttactttat

SEQ ID NO: 211554 - DNA, 501 bp, Unknown
  Bacterial polypeptide expressing nucleotide sequence isolated from the Sargasso Sea
aaatagaagatgttaatcatatcaaattatcaaaagataaaattgcatacataacacaaactactttatcaattgatgacaccaaagaaattattgtagcactttgtaaaaaatttccaaagattaaagcgccattaaaaagcgatatttgttatgcaacaacaaatagacaaatggctgtgaaaaatatagctgcaaaatgtgacgttttttttgttgtgggcagtagacaatcctctaattctcagcgactagttgaagtagcaaaaaaaagtggaagtaaggaaagttttttagttcatcaaggatttgaactatcgaaaaaaattattgagaatgcaaaatgtattggtgtatcttctggagcatcagcgccagaagttttggtggatcaattactcgatcaaatcaaagaaattcgaaacattgaagttgaagaagttgaaattgttaaagagaatgttgaatttaaacttccaaaagaattaagagtaaattaat

SEQ ID NO: 211555 - DNA, 376 bp, Unknown
  Bacterial polypeptide expressing nucleotide sequence isolated from the Sargasso Sea
aatgaaaaaaaaaattaaaatatttttagcatcacctagaggtttttgtgcaggggtcgatagagcaattgaaattgtaaacaaggctttagataaatatggggctccagtttatgttaggcacgagattgtacataataaacaagttgttgaagacttaaaaaatagaggggctatttttatcgaagaattagtagaaattaaggactccacaagaccagtaattttttctgcccatggcgtcccgaaaagtgtacctgctgaagcaattaataaaaaacttaaatacgttgatgccacttgccctttagtgtcaaaagtacatagagagtcagaacaactttacaaaaaaggttttgatattattttaattgga

SEQ ID NO: 211556 - DNA, 508 bp, Unknown
  Bacterial polypeptide expressing nucleotide sequence isolated from the Sargasso Sea
atgaaaactagtaagaaaatatatttaatatcacctcgtggattttgtgctggcgttacccgcgcaattgaaatagttgaactagcaatcaaaaaatatggcccaccagtttatgtgaatcacgaaattgttcataacaaatatgtcatagatgaattgagtgataagggtgcagtttttttagataatattaatgatgcgcccccagatcgtccacttatcttttccgctcacggtgtttcaaaggatgttgagctacatgcaaataaaaaaaataaaatagttattaatgcaacatgtccacttgtaaccaaagttcatgttcaagctatgaagttttttgaattgggttaccgcattattcttattggacataaaaaccaccctgaagtaataggaaccatgggccagcttccaagcggcagcatagaacttgttgaaacggtaagtgatgtgatgaaactgtctataaatgacaatgataattttgcctatttaactcaaaaca

SEQ ID NO: 211557 - DNA, 331 bp, Unknown
  Bacterial polypeptide expressing nucleotide sequence isolated from the Sargasso Sea
tatgcaaattcatttagctaaccctcgtggcttttgcgcgggcgttgacagggctatcaccatcgtagagcgagcacttgaaatgtttgagccgccaatttatgtgcgccacgaagtggtacataataaatttgtggtagatggactacgtgagcgtggtgcgctatttgttgatgagcttcacgaagttccagacgacagcattgtaattttttctgctcatggtgtatcgcaagcggtaagaaaggaagcggaaaatcgcggtctaaaggtattcgatgctactttgccgttagttacgaaagtacatatgggaagtaacccgtgctag

SEQ ID NO: 211558 - DNA, 475 bp, Unknown
  Bacterial polypeptide expressing nucleotide sequence isolated from the Sargasso Sea
atggaaatttatctagccagccccagaggtttttgtgcaggtgtagtgcttgctattgacctagttgaaatagctcttgaaaaatatggtgctccagtatacgtaaagcatcaaattgttcataatccagttgttgtttcagaagttgaatctaaaggtgcaataacagtagaaaacgtatcagatgttccagataattcggttgttgtattttctgcccatggttcaccacctagggattataaacttgctgaagaaaagaacctaagagtcatagatgctacatgtccattagtaactaaagttcataatgaagcaaaaaaatactctaaagaaggaaagaatattatattagtaggacataaaggtcaccaggaagtaataggtacttcaggtcaagctaatatgaaaataattgatgatagagacgagtttaatttagaaaataatgattctgttaaagatgaggatgtta

SEQ ID NO: 211559 - DNA, 813 bp, Unknown
  Bacterial polypeptide expressing nucleotide sequence isolated from the Sargasso Sea
tatggatacccaagcagtaaaacacaaaatacaacattcgggaagatataaccgtaagggttttgaatctcctactaaacgtgctaaggctttaggggaatcatatcaaagtgacttaatagcatcgataagagaaaatgattttacttttgaaaaaggcaggttaaaaataaaactcgctaaatcttttggtttttgttggggagttgaaagagcagttgcaatggcctatgaaactagaagacattatcctaatgaagttatttggatgacgaatgaaattattcataatccttcagttaataatcatctcagcagaatgaatgtaaaaataatttctgcaaaaaatggaataaaggatttctcctcagtatcaaccggggatgttgtaattcttcctgcttttggagcaacagttcaagagatgcaattactgcatgaaaaagaatgccagataattgatactacttgcccttgggtttctaaagtttggcatactgttgagaagcataaaaagcacacttttacttctattattcatggtaaatataaacatgaagaaactcttgctaccagatcatttgcaggaaattacttagtagtttctgatttaagagaggctgaatatgtatctgattacatcaaaggaaatggtgataaaaagaaattcattaataagtttgcaaaagcttgttcaaatggatttgatccagatattcatcttgaaagaattggagttgcgaatcaaacaacaatgctcaaaagtgaaactgaggaaattgggaaaatttttgaaaaaactatgatagctaa

SEQ ID NO: 211560 - DNA, 205 bp, Unknown
  Bacterial polypeptide expressing nucleotide sequence isolated from the Sargasso Sea
aaataaagaagcagtaaaagaattgcaaacaccaaaaaaccaacaagttgcttatgtcacgcaaacaaccttatctgtagatgaaactaaagatattgttaaagaaatcaagtcttattttaaatttgtaggggagccaaaaaaaaatgatatttgctatgcaactactaacagacaagaagctgtaaaaaatattgcacagtga

SEQ ID NO: 211561 - DNA, 271 bp, Unknown
  Bacterial polypeptide expressing nucleotide sequence isolated from the Sargasso Sea
aatgaaaaacaaagaaattaaaattttacttgccgcaccgcgtggtttctgtgctggtgtagaacgtgctatagaaattgtaaaaaaaagcattaacaaatatggagcaccagtttatgtgagacacgaaatcgttcacaataaacatgtggttgatagtctaaaagaaattggtgccatttttgtcgaagaacttaatgaaataaaagataaaactagaccagtaattttttctgctcatggtgtaccaaaaaagtccctattgaagcaa

SEQ ID NO: 211562 - DNA, 344 bp, Unknown
  Bacterial polypeptide expressing nucleotide sequence isolated from the Sargasso Sea
aatgaaaaataaagaattaaaaatattattgtctgcccccagaggtttttgtgctggtgttgagagggctatagaaattgttgaaaaatcaatacgaaagtatggctctccagtttatgttcgtcatgaaatagttcataacaaatttgtagttgatgatttaaaaagcaaaggagctatctttgtggaagagcttgaggagataaaggataaatcaagaccagttattttttcagcccatggtgttccaaaaaaaataccgaaggatgctaagaactataatatgacttatgttgatgctacatgccctcttgtatcaaaggtgcatagagaggctgaaaatc

SEQ ID NO: 211563 - DNA, 481 bp, Unknown
  Bacterial polypeptide expressing nucleotide sequence isolated from the Sargasso Sea
tatgtcagatattaataatgacgattttcaaatccatttagcacacacacaaggcttttgtgcgggtgtatcttctgctattgagattgtagaattgtgtataagaaaatatgggacgcctttatatgttcgtcatgaaattgttcataatactgcaatcattaaagacttggaaactagaggtgttatatttattgaagagctaaaggatgttccagatgataatccggttgtgtttagtgcacatggaacagcacctgatgtctttgaagccgctcgtcaacgtggtattcatgtgatagacgcaacatgtccattagttacgaaagtgcatcgtcaagcagagcgttattcaaagcgtggtgtgcataccatattaattggccatcggggtcatcaagagttaatagggacatctggatatgtaagctctgatctattgcatattgttgaagacctagatgatgttgaatctatttct

SEQ ID NO: 211564 - DNA, 422 bp, Unknown
  Bacterial polypeptide expressing nucleotide sequence isolated from the Sargasso Sea
gatggatactcaagcttttagaagatctcttcatcattctgatagatacaatagaaggggtttcgattctccaacaaaaagagctcaagctttagaagaagcctaccaaagtgatttgataagttctattagggataatggtttttcttacactaaaggcagactaaatattaaattagctcaagctttcggtttctgttggggagttgaaagagctgtagcaatggcttatgaaactagaagacattacccaaatgagaatatttggataacaaatgaaataattcataatccctcagttaatgatcatttgagaaaaatgaatgtaaagttcatttcagctaaaaatggaataaaagatttttctttagtttctaatggggatgttgttattcttcctgctttcggagctactgttcaag

SEQ ID NO: 211565 - DNA, 291 bp, Unknown
  Bacterial polypeptide expressing nucleotide sequence isolated from the Sargasso Sea
gatgaaactattactagctaacccaagaggattctgcgccggagtagatagggctattgaaatagtaaaaaaagtcctagaagaaaaaggaagtcctatttatgtaaagcatgaagtagtacataacaaaattgtggtaaaagagctcgaaaatttaggtgcagtttttgtagaagaaatttctgatatacctaaaggagaaacagttatatacagtgcccatggagtttctaagacagtagtaactgattctaatactaaagatttagatatttttgacgctacttgtcc

SEQ ID NO: 211566 - DNA, 322 bp, Unknown
  Bacterial polypeptide expressing nucleotide sequence isolated from the Sargasso Sea
atgaagaaacaaaaaataaatttatatttggcttctccaagaggtttttgcgctggtgttgatagggctgtaaaaatagtggaggaatcaataaaaaagtttggggctccagtctatgttagacacgaaatagttcataataaggatgttgttaattcattaataaggattggtgctgtttttgtagaagaggtcaatgaagcacctgtagatagaccaattatattctctgcacatggtgttgctaaatctgttgttaatgaggctgctcaaagaaaaatgatatctattgatgccacttgtccgttagtaactaaagtac

SEQ ID NO: 211567 - DNA, 625 bp, Unknown
  Bacterial polypeptide expressing nucleotide sequence isolated from the Sargasso Sea
agagaagttgaaaatttttgaaagaaaaaatttaccagtaattcttataggacatcaaaatcacccagaagtaataggaactatgggtcaaacttcacaagatatatatcttgtagaaaataaaaaagaagttaaaaatttgcctattccaaaaaataaacatattgcctatgtaactcaaacaacattatctgttgatgatactaaagaaattgttgaagagataaaatcacattttgataatgttttggagccaaaaaaaaaggatatatgttacgctacaactaataggcaagaggcagtaaaagaaattgcaaaaaaatgtgattatttttttatacttggttcaaaaaattcttcaaactcacttcgtttagttgaagttgctaaaaattatgggtcgcgatattctatattagttgatgatataaaaaattttgatccaagaattatcaaaaattgttctaaaattggaataactgcaagcgcatcatctcctgaaattcttgttacaaaaatacttaaaaaaatagatgagcattttactataaatattattgaatcaatttttgaaaaagaagatatacattttaaaatcccacaaaaattaaaagaagctatataa

SEQ ID NO: 211568 - DNA, 415 bp, Unknown
  Bacterial polypeptide expressing nucleotide sequence isolated from the Sargasso Sea
tacagctggaataatagaagctcttaaaaacaaatttccaaaaattaaaggtcctataaaagaggacatatgttacgcaactacaaacagacagtctgctgttaaagagatagcttccaagtgtgatatgttttttatagttggaagtcgtaactcatctaattctgttagattggttgaagttgcaaaaaaagctggttgtaataattctcatttaatgcattctgaaaaagaaattccattcaatgaaattgaaaattctgaaaccatcggaatatcttctggagcttctgcgccagaaaaacttgttcaaagtttgttggataatataaaaaaagatagaaaaatttctattgaagaagtagtagttgctgaagaaaaggttgttttcaaattgccgaaagaacttaattaa

SEQ ID NO: 211569 - DNA, 868 bp, Unknown
  Bacterial polypeptide expressing nucleotide sequence isolated from the Sargasso Sea
atgaagataatcttagctaaagacgcaggatattgttttggagtaagagatgctgtaaatagcgcttatgaaatgagtaaaaaatatggtgaagtctatatgttgggagatattgttcataatgaaagcgtagtaagcgatttagaaaaagaaggtgttaaagttgttgagaagcttgatcaaattccgaaagataaacctgttcttttcagagctcatggtactgccaaagaggtttggaaaaaagctgaagataaaaaaatgaatattattgatgccacatgtccgcttgttcatgaaatacatcatgaagtaaaagctttacatgaagagggaagaaaaattattataattggtgatcacggtcatgatgaagtaattggtatagctagtcaaataccagatcctataattgtagctacagttgaagaagctgaagaattaagaaaaacaaagaaagctggaatagttactcagtcaacacaaacaattgagaatgttcaagatattataaatattttaatgacaaaagtatttgatttaagatttgtaaatacaatttgttttccaactaagagaaatcaagaacaaattaaagagttatcagaagtaactgacctaatgattattattggatcatttacaagtgctaattctaaacgtctagctgaattaagttcagaaaggaatgaaaatacatttcaggtgacttgcgcttcagaaattgattcatcttggttcaaagatgatgtaaattctgtaggaatatctgccggagcttcaactccagactggataatcgaatcagtaattaaaaaagtcaaagaaataacaaatacacaggaaaaggaaataattcatgagtaaa

SEQ ID NO: 211570 - DNA, 343 bp, Unknown
  Bacterial polypeptide expressing nucleotide sequence isolated from the Sargasso Sea
atgaataaaaaacttaatatttttttagctggaccaaggggtttttgtgctggcgttgatagagcgatagaaatggtaaaagaggctcttaagaaatacggtaaacctgtatatgtaagacatgaaattgttcacaataaatttgttgttgaaaatcttaaatcagagggggcaatatttgttgaagagttagatgaaataaaagataaaagtagaccggtaatattttcagcacatggagttcctaaatctgtgcctgcagaagcatcaaatctcaatctaatttactatgatgcaacatgtcctctggttagtaaaattcataaagaagtgaacattcgac

SEQ ID NO: 211571 - DNA, 439 bp, Unknown
  Bacterial polypeptide expressing nucleotide sequence isolated from the Sargasso Sea
accaccttatcagtcgatgacaccaaagaaattattgatgaattaaaatgtatttttccaaatattattcaacctccaaaagaagatatttgttatgcaactacaaaccgtcaattagcaataaaatctattgcaagtaaatgtgatttaatttatgtcattggcgctaataactcatcaaattcattaagattggttgaagttggaaaaagatctggttgtgaagaaacacatttaatatcagataaatctgaagttaattggaaattggttgaaaaaaaacaaaaaataggattaacagctggcgcgagcgcaccagatatactaattcaagagtttataaatgaattgaatcaattatataatgtagaaattaaaaagatctcagttgctgatgaaaatataacatttaaaatacccagggaacttaatgagtaat

SEQ ID NO: 211572 - DNA, 610 bp, Unknown
  Bacterial polypeptide expressing nucleotide sequence isolated from the Sargasso Sea
tgaaaatttaaataaaaatggatttcaaattttactaattggacacaaaaaccatccagaagttataggaactatgggtcaaattcctgaaggtgaaatagatcttattgaaaatgttgatgatgcaaataattatgaaaataaatctaaaaaaaaattagcttttgttacccaaacaactctttctgttgatgatacaaaagaaataatatcagcattaaagaaaaaatttccagaaattagagaaccaaaaaaagaagatatctgctacgcaactacaaatagacaggctgctgttaaaaaaattgcagaaaaatgtgacatgttttttgttattggaagcagaaattcatctaactctttaagattagtagaggttgcaaaaaactctggatgcacaaattcgagattaattcattctgaaagtgatgtaccttttgaggaaattgaaaaatacaaaactataggaatttcatcaggagcctctgcgccagaaatattagttgataactttataaataatttaaaaaaagaatttatggttgcaatagaagaaatagaaatagttaaagaaaatataacatttaaaattccaggaaaattaaactag

SEQ ID NO: 211573 - DNA, 361 bp, Unknown
  Bacterial polypeptide expressing nucleotide sequence isolated from the Sargasso Sea
aatgaaagaagatatttgttatgcaacaacaaatcgacaaatggcagttaaaaatatcgctaagaaatgtgacttattttttgttattggtagtaggaattcatctaattcagtcagacttgttgaagttgctaaaaaatctggatgttcaaattctcaattaattcattcccaaagcgagatcccatatagcctaattgaaaaatctaatacaatcggaatttcatcgggtgcatctgctccagaaattttggtaaatgattttattaataacttaaaaaagagatttagtgtcaatataaatgaggtagaagcaataaaagaaaatgttgtttttaaaattccaaaaaaattaaattaa

SEQ ID NO: 211574 - DNA, 172 bp, Unknown
  Bacterial polypeptide expressing nucleotide sequence isolated from the Sargasso Sea
aatgagagataaacaaattaaaatttatttagcctctccaagaggattttgtgctggcgtagatagagccattgagatagtcaaaaaaagtttagaaaagtatggttcacccgtttatgttagacacgaaatagttcataacaaacatgttgttgaaagtttaaaaaaatag

SEQ ID NO: 211575 - DNA, 514 bp, Unknown
  Bacterial polypeptide expressing nucleotide sequence isolated from the Sargasso Sea
tataactttaattcaaaatctcaaagaagcaaaaaacttcataacaaaagaaaaaaaactagcatggctaagtcaaactacattatctgttgatgatacttctgaaatagtaaaaaccttaaccaaacgttttccaaatattattggaccaaagaaaggtgatatttgctatgcaactacaaacagacaaatggctgttaaaaaaatcgcttcaaatgttgaagtaatgctaattgtaggatcagaaaattcctccaattcacaaaggcttgtagaagttgcaaaaaatgaaggttgtgtaaattcatatttggtatctgatgtaaactttataaactgggatgaaataaacaacataaaaaacattggactatcttcgggcgcttcagcacctgagagtcttatagaagaaattcgtgctgaattttcaaaaagatataatataaaagagattcagaacttggaaacaacagaagatatctactttaagcttcctaaagcattagaaaattaa
